United States Patent Application Publication US 2007/0072175 A1 - sequence listing, part 13

SEQ ID NO: 33559 - DNA, 862 bp, Macaca Mulatta
  misc_feature (1)...(862): n = A,T,C or G
aggtctcatgaaacagatntttttttttagaaaaattactgctctgaagatatcttactatggtttnagtatttacttctggtgacctttgaaaatgtgcccggctcgtatgttatatgcttatgggccatgtcttccattttttaatcagttgataaggaatacaaatcggtaacaaaaccaaagccactaagtcaacctgaaatgagtcctgctgcatctgcagccgtcaaaaatgatgtcccaaagcaacgtgctgcaccaaaagtctctcctcatgtaaagcctgagcagaaacagagggtggcccagcaggaatctatcagagaagagtttcggaaagactgtttgccagttatggtactgaaagcaacaaagcccttcacgtttgaaacccaagaaggcaagcaagagatgtttcatgctacggtggctacagagaaggaattcttcttggtaaaagtttttaataccctgctgaaagataaattcattccaaagagaatgattataatatcaagatattatcggcccagtggtttcttagaggtaaatagcgcctcatgtgtgtnagatgctaaatctgaccaaaaggttgatgtcccgctgaacattctcagaaaagctggtgaaaccccaaagatcaacacgcttcaaactcagccccttggaaccctcgtgactgggtcgtttgtagtccagaaggtacccgcacagacgcaaacgtctcatcgaccctagtaccccacgcggcactgcactatggcggctgaacacacgacccctgcctgtaggacgaaacacgtgccactaactctcccccgctcaaatgggaaaaccccgtgactctgatctaccccaa

SEQ ID NO: 33560 - DNA, 3058 bp, Macaca Mulatta
  misc_feature (1)...(3058): n = A,T,C or G
agacagacccttccctgcctgccccatccccctatcctctagctttggccgatggcccaagggacagacaatgtgggtccagacctccaccgtcaccctgtcagaggaggagttgnnnnnnnnnnnnnnnnnnnnnnnnnnnnnnnnnnnnnnnnnnnnnnnnnnnnnnnnnnnnnnnnnngaatcagcgctggtctccgtctatgtacatctggacttttcagataagacctggccccatgaagtctccaggaccctgactctccctgctgcctcagcttcctcttccccaaggcctcttctcactggcctcagactcacaacannnnnnnnnnnnnnnnnnnnnnnnnnnnnnnnnnnnnnnnnnnnnnnnnnnnnnnnnnnnnnnnnnnnnnnnnnnnnnnnnnnnnnnnnnnnnnnnnnnnnnnnnnnnnnnnnnnnnnnnnnnnnnnnnnnnnnnnnnnnnnnnnnnnnnnnnnnnnnnnnnnnnnnnnnnnnnnnnnnnnnnnnnnnnnnnnnnnnnnnnnnnnnnnnnnnnnnnnnnnnnnnnnnnnnnnnnnnnnnnnnnnnnnnnnnnnnnnnnnnnnnnnnnnnnnnnnnnnnnnnnnnnnnnnnnnnnnnnnnnnnnnnnnnnnnnnnnnnnnnnnnnnnnnnnnnnnnnnnnnnnnnnnnnnnnnnnnnnnnnnnnnnnnnnnnnnnnnnnnnnnnnnnnnnnnnnnnnnnnnnnnnnnnnnnnnnnnnnnnnnnnnnnnnnnnnnnnnnnnnnnnnnnnnnnnnnnnnnnnnnnnnnnnnnnnnnnnnnnnnnnnnnnnnnnnnnnnnnnnnnnnnnnnnnnnnnnnnnnnnnnnnnnnnnnnnnnnnnnnnnnnnnnnnnnnnnnnnnnnnnnnnnnnnnnnnnnnnnnnnnnnnnnnnnnnnnnnnnnnnnnnnnnnnnnnnnnnnnnnnnnnnnnnnnnnnnnnnnnnnnnnnnnnnnnnnnnnnnnnnnnnnnnnnnnnnnnnnnnnnnnnnnnnnnnnnnnnnnnnnnnnnnnnnnnnnnnnnnnnnnnnnnnnnnnnnnnnnnnnnnnnnnnnnnnnnnnnnnnnnnnnnnnnnnnnnnnnnnnnnnnnnnnnnnnnnnnnnnnnnnnnnnnnnnnnnnnnnnnnnnnnnnnnnnnnnnnnnnnnnnnnnnnnnnnnnnnnnnnnnnnnnnnnnnnnnnnnnnnnnnnnnnnnnnnnnnnnnnnnnnnnnnnnnnnnnnnnnnnnnnnnnnnnnnnnnnnnnnnnnnnnnnnnnnnnnnnnnnnnnnnnnnnnnnnnnnnnnnnnnnnnnnnnnnnnnnnnnnnnnnnnnnnnnnnnnnnnnnnnnnnnnnnnnnnnnnnnnnnnnnnnnnnnnnnnnnnnnnnnnnnnnnnnnnnnnnnnnnnnnnnnnnnnnnnnnnnnnnnnnnnnnnnnnnnnnnnnnnnnnnnnnnnnnnnnnnnnnnnnnnnnnnnnnnngaatctcctgattgccacagacaaggtcctagatatggacaccaggtctctgtggaccctggcccaagcccggaagccctgggcaggctcaactctcctgctggctgtggagaccctggcatgcagcctgtgcccacaggaccaccccttcaccttcagcttgcccaatgtgctgctgcagagccagctgtttggacccacgtttcctgctgactacagcatctccttccctactcggcccccactgcaggctcagattcccaggcactcactggccccactggtccgtaatggaactgaaataagtattactagcctggtgttgcaaaaactggaccaccttctgccttcaaactatggacaagggctgggggattccctctatgccactcctggcctggtccttgtcatttccatcatggcaggcgaccaggccttcagccagggcgaggtcatcatggattttgggaacacggatggttcccctcactgtgtcttctgggatcacagcctcttccagggcagggggggttggtccaaagaagggtgccaggcacaggcggccagtggcagccccactgctcggtgcctctgccagcacctcactgccttctccgtcctcatgtccccacacactgttccggaagaacccgctctggcgctgctgactcaagtgggcttgggagcttccatactggcgctgcttgtgtgcctgggtgtgtacaggctggtctggagagtcgtggtgcggaataaggtctcctatttccgccacgccgccctgctcaacatggtgctctgcttgctggccgcagacacttgcttcctaggcgcccccttcctccctccagggccccgaagcccgctctgcctggctgccaccttcctctgtcatttcctctacctggccacctttttctggatgctggcgcaggcccnnnnnnnnnnnnnnnnnnnnnnnnnnnnnnnnnnnnnnnnnnnnnnnnnnnnnnnnnnnnnnnnnnnnnnnnnnnnnnnnnnnnnnnnnnnnnnnnnnnnnnnnnnnnnnnnnnnnnnnnnnnnnnnnnnnnnnnnnnnnnnnnnnnnnnnnnnnnnnnnnnnnnnnnnnnnnnnnnnnnnnnnnnnnnnnnnnnnnnnnnnnnnnnnnnnnnnnnnnnnnnnnnnnnnnnnnnnnnnnnnnnnnnnnnnnnnnnnnnnnnnnnnnnnnnnnnnnnnnnnnnnnnnnnnnnnnnnnnnnnnnnnnnnnnnnnnnnnnnnnnnnnnnnnnnnnnnnnnnnnnnnnnnnnnnnnnnnnnnnnnnnnnnnnnnnnnnnnnnnnnnnnnnnnnnnnnnnnnnnnnnnnnnnnnnnnnnnnnnnnnnnnnnnnnnnnnnnnnnnnnnnnnnnnnnnnnnnnnnnnnnnnnnnnnnnnnnnnnnnnnnnnnnnnntacaagaagctttgcgcaaacgcttctgccgtgcccaagcccccagctccaccatctccctggtgagttgctggcttcagatcctcagctctccctccgagagcatgtcagaaggcattccacggccttcctcagaggacatgggcacagccagaa

SEQ ID NO: 33561 - DNA, 784 bp, Macaca Mulatta
ggggagcgcggacgcggaatatcgcggattccatttctcgcagccgggaaggtcctgggaaaggcgcgagccaggcctggtaggcgcccgcggagaaaaaaacgagtcaactcaaccccatgaactacaacccccgttgccgctttcgcccctcctaaccgttaagtgcgctaagggccatggctgaggtgcacgtgatcgggcagatcatgggggccagcggtttctcggaaagtagcctgttctgcaagtggggcattcacacaggggcggcgtggaagctcctgtcaggcgtgcgggagggccaaacgcaggtggacaccccccagataggggacatggcctactggtcccaccccatcgatctgcacttcgccaccaaaggtcttcaaggctggccccggctccatttccaggtgtggtcccaggacagctttggccgctgccagcttgcaggctatggattttgccatgtgcccagcagcccgggcacacaccagctggcctgccccacctggcggcccctgggcagttggcgagagcagctggcacgggctttcgtgggtggtgggccccagctgctgcatggggacaccatctacagtgggggccgaaccgctatcgcccggcacaccagcttgctgggtgggcacccgtggcaccctggaggattagaccctgccttggctcccgcaaacctttcgaacccggcttattggccgttttgaaagtggcctgaaaagggaaaccccttggtttttccccaaaagggccccaccccaat

SEQ ID NO: 33562 - DNA, 763 bp, Macaca Mulatta
  misc_feature (1)...(763): n = A,T,C or G
ggctgatgaatgcagtgaacacactggacagggatgtcctcaaccagctacatgtacagctcatggagctgaggagctgcaagggttacaagcagtgtaacccccggactcgaaacatggacctgggacttaaagatggaggaagctatgagcaatacaggcagtttcagcgtcgaaagtggccagaaatgaagagaccttcttccaaatcactgggacaactgtgggaaggctgggaaggttaagaaacaacagaggtggaccttcaaaaacacagaggcatcaactgactgcacaggcaacaaaaaaccacgtgggtgatttccagcagacctatgctattggccaggaggcctgagaaagcaagcactcactctcagtcaacatggcaggttctggaggataaccagcaggagcagatagaacttcaagaagtccatttttgcccctgcttttgctttggattatacctcaccagctgcacaaaatgcatttttttcgtatcagaaagtcaccactaaccctccccagaagctcacaaaggaaaacgaagagagcgagcgagatttccttggaaatttcccccaagggcgaaagtcattggaatttttaaatcataggggaaaagcagtcctgttctaaatcctcttattcttttggtttgtcacaaaggaaggaactaagaagacagaggcaacgtggagaggcttgaaacagtgcagaattcgacaatgagtcagttgcccnaaagaaatgacatttc

SEQ ID NO: 33563 - DNA, 2726 bp, Macaca Mulatta
  misc_feature (1)...(2726): n = A,T,C or G
gaaacagagctgtcagtcagtgctgaattagtgcctacctcatcatggaacatttcaagtgaactcaacaaagnnnnnnnnnnnnnnnnnnnnnnnnnnnnnnnnnnnnnnnnnnnnnnnnnnnnnnnnnnnnnnnnnnnnnnnnnnnnnnnnnnnnnnnnnnnnnnnnnnnnnnnnnnnnnnnnnnnnnnnnnnnnnnnnnnnnnnnnnnnnnnnnnnnnnnnnnnnnnnnnnnnnnnnnnnnnnnnnnnnnnnnnnnnnnnnnnnnnnnnnnnnnnnnnnnnnnnnnnnnnnnnnnnnnnnnnnnnnnnnnnnnnnnnnnnnnnnnnnnnnnnnnnnnnnnnnnnnnnnnnnnnnnnnnnnnnnnnnnnnnnnnnnnnnnnnnnnnnnnngatgagtatgaagaagatggattctgtcagccatacagagggattgcatgtgcaagatttattggcaaccgcaccgtctacatggagtctttgcacatgcaaggggaaatagaaaatcagatcacagncagctgccttcactatgattggcacttccagtcacttatctgataagtgttctcagttcgccattccttccctgtgccactatgccttcccgtactgtgatgaaacttcatccgtcccaaagccccgtgacttgtgtcgcgatgaatgtgaaatcctggaaaatgtcctgtgtcaaacagagtacatttttgcaagatcaaatcccatgattctgatgaggctgaaactgccaaactgtgaagatctcccccagccagagagcccagaagctgcaaactgtatccggattggaattcccatggcagaccctataaataaaannnnnnnnnnnnnnnnnnnnnnnnnnnnnnnnnnnnnnnnnnnnnnnnnnnnnnnnnnnnnnnnnnnnnnnnnnnnnnnnnnnnnnnnnnnnnnnnnnnnnnnnnnnnnnnnnnnnnnnnnnnnnnnnnnnnnnnnnnnnnnnnnnnnnnnnnnnnnnnnnnnnnnnnnnnnnnnnnnnnnnnnnnnnnnnnnnnnnnnnnnnnnnnnnnnnnnnnnnnnnnnnnnnnnnnnnnnnnnnnnnnnnnnnnnnnnnnnnnnnnnnnnnnnnnnnnnnnnnnnnnnnnnnnnnnnnnnnnnnnnnnnnnnnnnnnnnnnnnnnnnnnnnnnnnnnnnnnnnnnnnnnnnnnnnnnnnnnnnnnnnnnnnnnnnnnnnnnnnnnnnnnnnnnnnnnnnnnnnnnnnnnnnnnnnnnnnnnnnnnnnnnnnnnnnnnnnnnnnnnnnnnnnnnnnnnnnnnnnnnnnnnnnnnnnnnnnnnnnnnnnnnnnnnnnnnnnnnnnnnnnnnnnnnnnnnnnnnnnnnnnnnnnnnnnnnnnnnnnnnnnnnnnnnnnnnnnnnnnnnnnnnnnnnnnnnnnnnnnnnnnnnnnnnnnnnnnnnnnnnnnnnnnnnnnnnnnnnnnnnnnnnnnnnnnnnnnnnnnnnnnnnnnnnnnnnnnnnnnnnnnnnnnnnnnnnnnnnnnnnnnnnnnnnnnnnnnnnnnnnnnnnnnnnnnnnnnnnnnnnnnnnnnnnnnnnnnnnnnnnnnnnnnnnnnnnnnnnnnnnnnnnnnnnnnnnnnnnnnnnnnnnnnnnnnnnnnnnnnnnnnnnnnnnnnnnnnnnnnnnnnnnnnnnnnnnnnnnnnnnnnnnnnnnnnnnnnnnnnnnnnnnnnnnnnnnnnnnnnnnnnnnnnnnnnnnnnnnnnnnnnnnnnnnnnnnnnnnnnnnnnnnnnnnnnnnnnnnnnnnnnnnnnnnnnnnnnnnnnnnnnnnnnnnnnnnnnnnnnnnnnnnnnnnnnnnnnnnnnnnnnnnnnnnnnnnnnnnnnnnnnnnnnnnnnnnnnnnnnnnnnnnnnnnnnnnnnnnnnnnnnnnnnnnnnnnnnnnnnnnnnnnnnnnnnnnnnnnnnnnnnnnnnnnnnnnnnnnnnnnnnnnnnnnnnnnnnnnnnnnnnnnnnnnnnnnnnnnnnnnnnnnnnnnnnnnnnnnnnnnnnnnnnnnnnnnnnnnnnnnnnnnnnnnnnnnnnnnnnnnnnnnnnnnnnnnnnnnnnnnnnnnnnnnnnnnnnnnnnnnnnnnnnnnnnnnnnnnnnnnnnnnnnnnnnnnnnnnnnnnnnnnnnnnnnnnnnnnnnnnnnnnnnnnnnnnnnnnnnnnnnnnnnnnnnnnnnnnnnnnnnnnnnnnnnnnnnnnnnnnnnnnnnnnnnnnnnnnnnnnnnnnnnnnnnnnnnnnnnnnnnnnnnnnnnnnnnnnnnnnnnnnnnnnnnnnnnnnnnnnnnnnnnnnggccagattgctggtttcattggcctgccaatacctcagaaccagcgattcattcccatcaatggatacccaatacctcctggatatgcagcgtttccagctgcccactaccagccaacaggtcctcccagagtgattcagcactgcccgcctcccaagagtcggtccccaagcagtgccagtgggtcgactagcactggccatgtgactagcttgccctcatcaggatccaatcaggaagcaaatattcctttactaccacacatgtcaattccaaatcatcctggtggaatgggtatcaccgtttttggcaacaaatctcaaaaaccgtacaaaattgatgcaaagcaagcatctttgctaggagatgccaatattcatggacacaccgaatctatgatttctgcagaactgtaa

SEQ ID NO: 33564 - DNA, 652 bp, Macaca Mulatta
ggggcagtcatctaggcaagggctggagccagggctgcagagcattcctcggcccagctggggcagccccgccccatcccccagtggtcctcatgtggaggctggcactaggcggggttttcctggcagccgcccaggcttgtgtcttctgccgcctcccagcccacgacttgtcaggccgcctggctcggctctgcagccggatggagaccaggcagaaggaatgtggggcctccccggacttctcggcctttgccttagatgaggtgtccatgaacaaagtcacagagaagactcacagagtcctgagggtcatggagatcaaagaggctctctcctcactcccttcatattggagttggcttcgaaagatcaagctccccaagtacaccagggaagctctctgtccccctgcctgccggggcagcaccacgctgtacaactgctccacctgcaaggggatggaggtgtcctgctggccccgaaagcgctgcttcccaggaagtcaagatctttgggaagccaagattctgctcctctccgtctttggagctgtcctgcttctgggtgttctgagtctcctggtggagtccaccacctccagcaaaagtggctgtgagacgctgaagctccagctcagctctagatatca

SEQ ID NO: 33565 - DNA, 790 bp, Macaca Mulatta
  misc_feature (1)...(790): n = A,T,C or G
acgcgggcaagaagcgctttgaagtgaaaaagtggaatgcagtagccctctgggcctgggatattgtggttgataactgtgccatctgcaggaaccacattatggatctttgcatagaatgtcaagctaaccaggcgtctgctacttcagaagaatgtaccgtcgcatggggagtctgtaaccatgcttttcacttccactgcatctctcgctggctcaaaacacgacaggtgtgtccattggacaacagagagtgggaattccaaaagtatgggcactaggaaaagacttcttccatcaagcttaattgttttgttattcatttaatgactttccctgctgttacctaattacagattagatggaaccgtgttttttctgctttgttttttcagtttgctgtttctgtagccatattgtattctgtgtcaaataaagtccagttggattcnnnnnnnnnnnnnnnnnnnnnnnnnnnnnnnannnnnnnnnnnnnnnnnnnnnnnnnnnnnnnnnnnnnnnnnnnnnnnnnnnnnnnnnnnnnnnnnnntttcggccccctcggccccctnnnnnnnnnnnnnnnnnnnnnnnnnnngggccccgcgggccccatagggaaaagaaaaacaggggcccaaagtgtttctcccaggagaaaacccgggaacaaaaaaaagggcggggggaaatccccnnnnnnnnnnnnnnnnnnnnnnnnnnnnnnnaacacaaaaagnnnnnnnnnnnnnnnnnnnnnnnaaaaggagggatttcccgaaagaggcta

SEQ ID NO: 33566 - DNA, 222 bp, Macaca Mulatta
agaatctgagtgtctcagaggcaagaggaaaaattctccactatcaggtgaccttgcaggagctgacaggagggaaagttatgacacagaacatcacaggacacacctcctggaccacagtcatttctagaaccggaaattgggctgtggctgtgtctgcagcaaattcaaaaggcaattctctgcccactcgtattaacataatgaacctgtgtgaggcag

SEQ ID NO: 33567 - DNA, 181 bp, Macaca Mulatta
attcttcagaaaagtgtgggcctcctccacctattagcaatgcagataccaagtccttcccgcaaaaagtgtatctgccacagtcaagagtcgagtaccaatgccagtcctactataaacttcagggttctcaatatgtaacatgtagtaatggagagtggtcagagccaccaagatgcat

SEQ ID NO: 33568 - DNA, 3740 bp, Macaca Mulatta
  misc_feature (1)...(3740): n = A,T,C or G
gattgtttagtgtaattttggaacaattaaccaaagaaacagaaggcgggaaccactctagcggcaagtctggaggctttgatgtcaaagccctccgtgcctttcgagtgttgcgaccacttcgactagtgtcaggagtgcccagtnnnnnnnnnnnnnnnnnnnnnnnnnnnnnnnnnnnnnnnnnnnnnnnnnnnnnnnnnnnnnnnnnnnnnnnnnnnnnnnnnnnnnnnnnnnnnnnnnnnnnnnnnnnnnnnnnnnnnnnnnnnnnnnnnnnnnnnnnnnnnnnnnnnnnnnnnnnnnnnnnnnnnnnnnnnnnnnnnnnnnnnnnnnnnnnnnnnnnnnnnnnnnnnnnnnnnnnnnnnnnnnnnnnnnnnnnnnnnnnnnnnnnnnnnnnnnnnnnnnnnnnnnnnnnnnnnnnnnnnnnnnnnnnnnnnnnnnnnnnnnnnnnnnnnnnnnnnnnnnnnnnnnnnnnnnnnnnnnnnnnnnnnnnnnnnnnnnnnnnnnnnnnnnnnnnnnnnnnnnnnnnnnnnnnnnnnnnnnnnnnnnnnnnnnnnnnnnnnnnnnnnnnnnnnnnnnnnnnnnnnnnnnnnnnnnnnnnnnnnnnnnnnnnnnnnnnnnnnnnnnnnnnnnnnnnnnnnnnnnnnnnnnnnnnnnnnnnnnnnnnnnnnnnnnnnnnnnnnnnnnnnnnnnnnnnnnnnnnnnnnnnnnnnnnnnnnnnnnnnnnnnnnnnnnnnnnnnnnnnnnnnnnnnnnnnnnnnnnnnnnnctagcatgcccaccagtgagactgagtctgtgaacacagagaacgtcagcggcgaaggcgagacccgaggctgctgtggaagtctctgnnnnnnnnnnnnnnnnnnnnnnnnnnnnnnnnnnnnnnnnnnnnnnnnnnnnnnnnnnnnnnnnnnnnnnnnnnnnnnnnnnnnnnnnnnnnnnnnnnnnnnnnnnnnnnnnnnnnnnnnnnnnnnnnnnnnnnnnnnnnnnnnnnnnnnnnnnnnnnnnnnnnnnnnnnnnnnnnnnnnnnnnnnnnnnnnnnnnnnnnnnnnnnnnnnnnnnnnnnnnnnnnnnnnnnnnnnnnnnnnnnnnnnnnnnnnnnnnnnnnnnnnnnnnnnnnnnnnnnnnnnnnnnnnnnnnnnnnnnnnnnnnnnnnnnnnnnnnnnnnnnnnnnnnnnnnnnnnnnnnnnnnnnnnnnnnnnnnnnnnnnnnnnnnnnnnnnnnnnnnnnnnnnnnnnnnnnnnnnnnnnnnnnnnnnnnnnnnnnnnnnnnnnnnnnnnnnnnnnnnnnnnnnnnnnnnnnnnnnnnnnnnnnnnnnnnnnnnnnnnnnnnnnnnnnnnnnnnnnnnnnnnnnnnnnnnnnnnnnnnnnnnnnnnnnnnnnnnnnnnnnnnnnnnnnnnnnnnnnnnnnnnnnnnnnnnnnnnnnnnnnnnnnnnnnnnnnnnnnnnnnnnnnnnnnnnnnnnnnnnnnnnnnnnnnnnnnnnnnnnnnnnnnnnnnnnnnnnnnnnnnnnnnnnnnnnnnnnnnnnnnnnnnnnnnnnnnnnnnnnnnnnnnnnnnnnnnnnnnnnnnnnnnnnnnnnnnnnnnnnnnnnnnnnnnnnnnnnnnnnnnnnnnnnnnnnnnnnnnnnnnnnnnnnnnnnnnnnnnnnnnnnnnnnnnnnnnnnnnnnnnnnnnnnnnnnnnnnnnnnnnnnnnnnnnnnnnnnnnnnnnnnnngcctagaaaataaaaagaacaacaaaccagaagtcaaccaggtggccaacagtgacaacaaggtnnnnnnnnnnnnnnnnnnnnnnnnnnnnnnnnnnnnnnnnnnnnnnnnnnnnnnnnnnnnnnnnnnnnnnnnnnnnnnnnnnnnnnnnnnnnnnnnnnnnnnnnnnnnnnnnnnnnnnnnnnnnnnnnnnnnnnnnnnnnnnnnnnnnnnnnnnnnnnnnnnnnnnnnnnnnnnnnnnnnnnnnnnnnnnnnnnnnnnnnnnnnnnnnnnnnngatccgcgtgggctgccacaagctcatcaaccaccacgtcttcaccaacctcatcctcgtcttcatcatgctgagcagcgccgctctggccgcagaggaccccatccgcagccactccttccggaacacnnnnnnnnnnnnnnnnnnnnnnnnnnnnnnnnnnnnnnnnnnnnnnnnnnnnnnnnnnnnnnnnnnnnnnnnnnnnnnnnnnnnnnnnnnnnnnnnnnnnnnnnnnnnnnnnnnnnnnnnnnnnnnnnnnnnnnnnnnnnnnnnnnnnnnnnnnnnnnnnnnnnnnnnnnnnnnnnnnnnnnnnnnnnnnnnnnnnnnnnnnnnnnnnnnnnnnnnnnnnnnnnnnnnnnnnnnnnnnnnnnnnnnnnnnnnnnnnnnnnnnnnnnnnnnnnnnnnnnnnnnnnnnnnnnnnnnnnnnnnnnnnnnnnnnnnnnnnnnnnnnnnnnnnnnnnnnnnnnnnnnnnnnnnnnnnnnnnnnnnnnnnnnnnnnnnnnnnnnnnnnnnnnnnnnnnnnnnnnnnnnnnnnnnnnnnnnnnnnnnnnnnnnnnnnnnnnnnnnnnnnnnnnnnnnnnnnnnnnnnnnnnnnnnnnnnnnnnnnnnnnnnnnnnnnnnnnnnnnnnnnnnnnnnnnnnnnnnnnnnnnnnnnnnnnnnnnnnnnnnnnnnnnnnnnnnnnnnnnnnnnnnnnnnnnnnnnnnnnnnnnnnnnnnnnnnnnnnnnnnnnnnnnnnnnnnnnnnnnnnnnnnnnnnnnnnnnnnnnnnnnnnnnnnnnnnnnnnnnnnnnnnnnnnnnnnnnnnnnnnnnnnnnnnnnnnnnnnnnnnnnnnnnnnnnnnnnnnnnnnnnnnnnnnnnnnnnnnnnnnnnnnnnnnnnnnnnnnnnnnnnnnnnnnnnnnnnnnnnnnnnnnnnnnnnnnnnnnnnnnnnnnnnnnnnnnnnnnnnnnnnnnnnnnnnnnnnnnnnnnnnnnnnnnnnnnnnnnnnnnnnnnnnnnnnnnnnnnnnnnnnnnnnnnnnnnnnnnnnnnnnnnnnnnnnnnnnnnnnnnnnnnnnnnnnnnnnnnnnnnnnnnnnnnnnnnnnnnnnnnnnnnnnnnnnnnnnnnnnnnnnnnnnnnnnnnnnnnnnnnnnnnnnnnnnnnnnnnnnnnnnnnnnnnnnnnnnnnnnnnnnnnnnnnnnnnnnnnnnnnnnnnnnnnnnnnnnnnnnnnnnnnnnnnnnnnnnnnnnnnnnnnnnnnnnnnnnnnnnnnccaactgaaagtgaaaatgtccctgtcccaactgctacacctgggnnnnnnnnnnnnnnnnnnnnnnnnnnnnnnnnnnnnnnnnnnnnnnnnnnnnnnnnnnnnnnnnnnnnnnnnnnnnnnnnnnnnnnnnnnnnnnnnnnnnnnnnnnnnnnnnnnnnnnnnnnnnnnnnnnnnnnnnnnnnnnnnnnnnnnnnnnnnnnnnnnnnnnnnnnnnnnnnnnnnnnnnnnnnnnnnnnnnnnnnnnnnnnnnnnnnnnnnnnnnnnnnnnnnnnnnnnnnnnnnnnnnnnnnnnnnnnnnnnnnnnnnnnnnnnnnnnnnnnnnnnnnnaggtgtgcgacaggtgaggcctggcaggagatcatgctggcctgcctcccagggaagctctgtgaccctgagtcagattacaaccccggggaggagtatacatgtgggagcaactttgccattgtctatttcatcagtttttacatgctctgtgcgtttctg

SEQ ID NO: 33569 - DNA, 749 bp, Macaca Mulatta
ggggaaggctttacaaaaagaggaaggaaaacttccagttaaagtaagctaaaagcctaagaaaactttatattgtcccagctttagtagggaaaaagagggcggtgggggaaaaaggcctttatagaaagaatacacgggtttctagaagaacaaatgagagatgaagagttggggatggtgcttgttcatacaggcctgagtgatctctgcatcgcattcatggccataaaacttccctggagagaagacttacggtgggtttcttgatcttctccctgggagtaaaagccaccagagaggtttctctgaacttgtggagcagcggaaaccacgaggaggaggctcagcattcactcctgagcatgaagccggctcttggtggtgctttttggcagttgccttttgccactgacgatcactcttctcttccgtggtggctgaggcctgaggcaggagtgaaacggaagagttcctggactctctcacaggacttgcaacaagggtgtggcctgtttgcttggccgccatgtgttcaaaccccttgcaggagggggaaacgcggacagacaggtgcagaagccgggacgagtgcttctgggctccgtccccatagtagtgaaacagaaaaagttcccttgtccctctcacagggcatgtgacggggagtggctcacttcttcagtgccccagtgctcaaacctctaggggagcatacggagtgcaggttgtggggctgcgacctcccc

SEQ ID NO: 33570 - DNA, 810 bp, Macaca Mulatta
  misc_feature (1)...(810): n = A,T,C or G
ggagaggagaggagaggagaaatggtgggtagtggaagttcaagcctccatcccttattaatctgtgtaatgggccaacacacctcattccttggattcctggcaagtagaactttctccactaaagtttctgacaaaaggccttctccaaataagacccaaagagacatttgggatttattgcctcctactttctagaaacaaatagaaaaggcgggaagcacagctcacatcattggtggctagttgaaggagtttacataccctaccatgaccctggtatgagttgaagcctgctgctcagaacccactgcaactgtgtgtgtctgtgtctgtgtgttctgcaattccaatcacagatctgcctgccacacagtggagccctctcttggactctgaatgcatagcccagcaaagccaagtaactgaatctcaccatcagaacaggtgacagcagctccattcaagctgtcggaggtacatgaaaattcatttgtcttttggatgttctgggctacaaaatgtctcttaagttacatcggtggaacgtattggtaaaggcagaaactctttggcgtcggcgggattaaagcaaatttccatactccccctgcaagaacaagaccaacataaattcccttgccgccagggccctaagttggagtgggtacggctgttcccatattgcatttgtaggggggtggcaaaccctttgccccaacctgcgacttggggcagaaataaaacatttacacatctggacgctttttgcntggtggtatagagcaccccctttgcagcgtgcgccag

SEQ ID NO: 33571 - DNA, 2738 bp, Macaca Mulatta
  misc_feature (1)...(2738): n = A,T,C or G
tggccagagctttgtgtccactgcaagccctctggcttctggagtgggtgctgctgctcttgggaccttgtgctgcccctccagcctgggccttgaacctggacccagtgcatctcaccttctatgcaggccccaatggcagccactttgggttttcactggacttccacaaggacagccatgggagnnnnnnnnnnnnnnnnnnnnnnnnnnnnnnnnnnnnnnnnnnnnnnnnnnnnnnnnnnnnnnnnnnnnnnnnnnnnnnnnnnnnnnnnnnnnnnnnnnnnnnnnnnnnnnnnnnnnnnnnnnnnnnnnnnnnnnnnnnnnnnnnnnnnnnnnnnnnnnnnnnnnnnnnnnnnnnnnnnnnnnnnnnnnnnnnnnnnnnnnnnnnnnnnnnnnnnnnnnnnnnnnnnnnnnnnnnnnnnnnnnnnnnnnnnnnnnnnnnnnnnnnnnnnnnnnnnnnnnnnnnnnnnnnnnnnnnnnnnnnnnnnnnnnnnnnnnnnnnnnnnnnnnnnnnnnnnnnnnnnnnnnnnnnnnnnnnnnnnnnnnnnnnnnnnnnnnnnnnnnnnnnnnnnnnnnnnnnnnnnnnnnnnnnnnnnnnnnnnnnnnnnnnnnnnnnnnnnnnnnnnnnnnnnnnnnnnnnnnnnnnnnnnnnnnnnnnnnnnnnnnnnnnnnnnnnnnnnnnnnnnnnnnnnnnnnnnnnnnnnnnnnnnnnnnnnnnnnnnnnnnnnnnnnnnnnnnnnnnnnnnnnnnnnnnnnnnnnnnnnnnnnnnnnnnnnnnnnnnnnnnnnnnnnnnnnnnnnnnnnnnnnnnnnnnnnnnnnnnnnnnnnnnnnnnnnnnnnnnnnnnnnnnnnnnnnnnnnnnnnnnnnnnnnnnnnnnnnnnnnnnnnnnnnnnnnnnnnnnnnnnnnnnnnnnnnnnnnnnnnnnnnnnnnnnnnnnnnnnnnnnnnnnnnnnnnnnnnnnnnnnnnnnnnnnnnnnnnnnnnnnnnnnnnnnnnnnnnnnnnnnnnnnnnnnnnnnnnnnnnnnnnnnnnnnnnnnnnnnnnnnnnnnnnnnnnnnnnnnnnnnnnnnnnnnnnnnnnnnnnnnnnnnnnnnnnnnnnnnnnnnnnnnnnnnnnnnnnnnnnnnnnnnnnnnnnnnnnnnnnnnnnnnnnnnnnnnnnnnnnnnnnnnnnnnnnnnnnnnnnnnnnnnnnnnnnnnnnnnnnnnnnnnnnnnnnnnnnnnnnnnnnnnnnnnnnnnnnnnnnnnnnnnnnnnnnnnnnnnnnnnnnnnnnnnnnnnnnnnnnnnnnnnnnnnnnnnnnnnnnnnnnnnnnnnnnnnnnnnnnnnnnnnnnnnnnnnnnnnnnnnnnnnnnnnnnnnnnnnnnnnnnnnnnnnnnnnnnnnnnnnnnnnnnnnnnnnnnnnnnnnnnnnnnnnnnnnnnnnnnnnnnnnnnnnnnnnnnnnnnnnnnnnnnnnnnnnnnnnnnnnnnnnnnnnnnnnnnnnnnnnnnnnnnnnnnnnnnnnnnnnnnnnnnnnnnnnnnnnnnnnnnnnnnnnnnnnnnnnnnnnnnnnnnnnnnnnnnnnnnnnnnnnnnnnnnnnnnnnnnnnnnnnnnnnnnnnnnnnnnnnnnnnnnnnnnnnnnnnnnnnnnnnnnnnnnnnnnnnnnnnnnnnnnnnnnnnnnnnnnnnnnnnnnnnnnnnnnnnnnnnnnnnnnnnnnnnnnnnnnnnnnnnnnnnnnnnnnnnnnnnnnnnnnnnnnnnnnnnnnnnnnnnnnnnnnnnnnnnnnnnnnnnnnnnnnnnnnnnnnnnnnnnnnnnnnnnnnnnnnnnnnnnnnnnnnnnnnnnnnnnnnnnnnnnnnnnnnnnnnnnnnnnnnnnnnnnnnnnnnnnnnnnnnnnnnnnnnnnnnnnnnnnnnnnnnnnnnnnnnnnnnnnnnnnnnnnnnnnnnnnnnnnnnnnnnnnnnnnnnnnnnnnnnnnnnnnnnnnnnnnnnnnnnnnnnnnnnnnnnnnnnnnnnnnnnnnnnnnnnnnnnnnnnnnnnnnnnnnnnnnnnnnnnnnnnnnnnnnnnnnnnnnnnnnnnnnnnnnnnnnnnnnnnnnnnnnnnnnnnnnnnnnnnnnnnnnnnnnnnnnnnnnnnnnnnnnnnnnnnnnnnnnnnnnnnnnnnnnnnnnnnnnnnnnnnnnnnnnnnnnnnnnnnnnnnnnnnnnnnnnnnnnnnnnnnccagataggaattgcgatgttggtgagcgtggggaatctggaagaggctggggagtctgtgtccttccagctgcagatccggagnnnnnnnnnnnnnnnnnnnnnnnnnnnnnnnnnnnnnnnnnnnnnnnnnnnnnnnnnnnnnnnnnnnnnnnnnnnnnnnnnnnnnnnnnnnnnnnnnnnnnnnnnnnnnnnnnnnnnnnnnnnnnnnnnnnnnnnnnnnnnnnnnnnnnnnnnnnnnnnnnnnnnnnnnnnnnnnnnnnnnnnnnnnnnnnnnnnnnnnnnnnnnnnnnnnnnnnnnnnnnnnnnnnnnnnnnnnnnnnnnnnnnnnnnnnnnnnnnnnnnnnnnnnnnnnnnnnnnnnnnnnnnnnnnnnnnnnnnnnnnnnnnnnnnnnnnnnnnnnnnnnnnnnnnnnnnnnnnnnnnnnnnnnnnnnnnnccccagcccctcccccgttcacccggcccaccacaagcgggatcgcagacagatcttcctgccagagcccgagcagccctcgaggcttcaggatccagttc

SEQ ID NO: 33572 - DNA, 1683 bp, Macaca Mulatta
  misc_feature (1)...(1683): n = A,T,C or G
cagtggatcaaaaataaaagatctacaacattcgacaaacactaaaatacagattataaagggggaatcagaagcattagtcagaatttttggcaacagggaaatgaaagcaaaagccaaagctattatagaaacacttactagaaaacaaaaaagctacaactcagaatccagtgtggataatgctgcatcccagccccctactggaataaatctaggcagaaatgacattgctggagaagctcagccattgtcaaattgggatcgaattcgggcagcagtcatggagtgcgaaaacagaaaatgggcagatctaccaccagttaagaaaaatttttacatagaatccaaagcaacaagctgcatgtctgaaatgcaggtaattaactggagaaaggaaaatttcaacataatgtgtgatgacttgaaaagtggtgaaaagcgtctcatcccaaaaccaacttgtaggtttaaagacgcttttcagcaataccctgatcttctgaaaagcataacaagggtagggtttgtaaagccaacgccaattcagtcacaggcatggccaattattctacaaggaatagatcttatagaagttgcacaaaccggaacagggaaaacattgtcctatttaatgcctgggtttattcatgttgattctcaaccattatctagagagcaaaggaatgggcctgnnnnnnnnnnnnnnnnnnnnnnnnnnnnnnnnnnnnnnnnnnnnnnnnnnnnnnnnnnnnnnnnnnnnnnnnnnnnnnnnnnnnnnnnnnnnnnnnnnnnnnnnnnnnnnnnnnnnnnnnnnnnnnnnnnnnnnnnnnnnnnnnnnnnnnnnnnnnnnnnnnnnnnnnnnnnnnnnnnnnnnnnnnnnnnnnnnnnnnnnnnnnnnnnnnnnnnnnnnnnnnnnnnnnnnnnnnnnnnnnnnnnnnnnnnnnnnnnnnnnnnnnnnnnnnnnnnnnnnnnnnnnnnnnnnnnnnnnnnnnnnnnnnnnnnnnnnnnnnnnnnnnnnnnnnnnnnnnnnnnnnnnnnnnnnnnnnnnnnnnnnnnnnnnnnnnnnnnnnnnnnnnnnnnnnnnnnnnnnnnnnnnnnnnnnnnnnnnnnnnnnnnnnnnnnnnnnnnnnnnnnnnnnnnnnnnnnnnnnnnnnnnnnnnnnnnnnnnnnnnnnnnnnnnnnnnnnnnnnnnnnnnnnnnnnnnnnnnnnnnnnnnnnnnnnnnnnnnnnnnnnnnnnnnnnnnnnnnnnnnnnnnnnnnnnnnnnnnnnnnnnnnnnnnnnnnnnnnnnnnnnnnnnnnnnnnnnnnnnnnnnnnnnnnnnnnnnnnnnnnnnnnnnnnnnnnnnnnnnnnnnnnnnnnnnnnnnnnnnnnnnnnnnnnnnnnnnnnnnnnnnnnnnnnnnnnnnnnnnnnnnnnnnnnnnnnnnnnnnnnnnnnnnnnnnnnnnnnnnnnnnnnnnnnnnnnnnnnnnnnnnnnnnnnnnnnnnnnnnnnnnnnnnnnnnnnnnnnnnnnnnnnnnnnnnnnnnnnnnnnnnnnnnnnnnnnnnnnnnnnnnnnnnnnnnnnnnnntcagagtgttccggaagatcttgtagtaatagctgagcaatacaagttaaatcaacaaaagagggacacagaaacacgatcaagaaaacctggacaaaggcacaaggagttt

SEQ ID NO: 33573 - DNA, 713 bp, Macaca Mulatta
catgacgtgctctgaatagcaaagctgtatggcagctaccctgaggatcattgaagagaacatccctgagctattgtccttggacgtgagcaacaacaggctatacaggctggatgacatgtctagcattgttcagaaggcgcccaacctgaagatcctaaacctttctggaaatgaattgaagtctgagcgggagttggacaagataaaggggctgaaactagaagagctctggctcgacggaaactccttgtgtgacaccttccgagaccagtccacctacatcagcgccattcgcgaacgatttcccaagttattacgcctggatggccatgagctacccccgccaattgcctttgatgttgaagcccccacgacgttaccgccctgcaagggaagctattttggaacagaaaacttgaagagtctggtcctgcacttcctacaacagtactatgcaatttatgactctggagaccggcaagggctcctggatgcctaccatgatggggcctgctgttccctgagcattcctttcattcctcagaaccctgcccgaagcagcttggccgagtatttcaaggatagcagaaatgtgaagaagcttaaagaccctaccttgcggttccggctgctgaagcacacgcgtctcaacgttgttgccttcctcaacgagttgcccaaataccagcatgacgtcaattccttcgtgg

SEQ ID NO: 33574 - DNA, 948 bp, Macaca Mulatta
cggccccaagccccgtggcgatggcgccgagccgggcccgcgcgagggcaagcgctcctactccatggagcacttccgctggggcaagccggtgggcaagaagcggcgcccggtgaaggtgtaccccaatggcgccgaggacgagtcggccgaggccttccccctggagttcaagagggagctgaccggccagcggccccgggcgggggatggccccgatggccctgccgacgacggcgcggggccccgggccgacctggagcacagcctgctggtggcggccgagaagaaggatgagggcccctacaggatggagcacttccgctggggcagcccgcccaaggacaagcgctacggcggcttcatgacctccgagaagagccagactcccctggtgacactgttcaaaaacgccatcatcaagaacgcctacaagaagggccagtgagggcacatcagggccctggggctaccctccccagggaggtcgaccccaaagccccttgctctcccctgccctgctgcctcccagcctgggggcggtggtcgcggcagatattcagcctcttaaagctatctgtagtcaggaaataaaacctttcaaatttcacatccacctctgactttgaatgtaaactgtgtgaatgaaataaaaatacgtagccgtcaaataacagcagcatggatcggaggagcaccgtggtttccatgcggtaagctatttcccgggacgtagtgagcatgtaaggaaaatgtgcttcctccccctacccccaaatggatcttccagggatcagatagtttgggtgaaggctcagggtggctccaacacctctaggatggccgtattttccacacactccactgagtggaagactgctcagctagcacacgtgcaaaggcaggattcctgcaagagtgaccccgggtgctcaggggctccccggc

SEQ ID NO: 33575 - DNA, 1110 bp, Macaca Mulatta
atggtggagccaatggatccacgcacattcgtctccaacttcaataacagacctatcctttctggtctgaataccgtctggctgtgctgcgaagtgaaaacaaaggacccttcggggccccctttggacgcaaagatctttcaaggcaaggtgtactccaaggctaagtaccacccagagatgagattcctccgctggttccacaagtggaggcagctgcatcatgaccaggagtacaaggtcacctggtacgtatcctggagcccctgcacaaggtgtgcaaacagtgtggccacgttcctggccaaagacccgaaggttaccctgaccatctttgttgcccgcctctactacttctggaaaccagattaccagcaggcgcttcgcatcctgtgtcagaaaagaggcggtccacatgccaccatgaagatcatgaattataacgaatttcaagactgttggaacaagttcgtggacggccgaggaaagccatttaagcctcggaacaatctgcctaaacattatacattactgcaggccacgctgggggagcttctcagacatttgatggatccaggcacgttcacttccaactttaacaataaaccttgggtcagtggacagcatgagacttacctgtgttacaaggtggagcgcctgcacaacgacacctgggtcccgctgaaccagcacaggggctttctacgcaaccaggctccaaatatacacggtttccctaaaggccgccatgcagagctgtgcttcctggacctgattcccttttggaagctggatggccagcaatacagggttacctgcttcacctcctggagcccctgctttagctgtgcccaggaaatggctaaattcatttcaaataacgaacacgtgagcttgtgcatcttcgctgcccgcatctatgatgatcaaggaagatatcaggaggggctgcgcgccttgcacagggatggggccaaaattgcaatgatgaactacagtgaatttgagtactgctgggacacctttgtggaccgccagggacgtcccttccagccctgggatggactagatgagcacagccaagccctgagtggaaggcttcgggccatt

SEQ ID NO: 33576 - DNA, 1184 bp, Macaca Mulatta
  misc_feature (1)...(1184): n = A,T,C or G
aggtccctgaagacttcatctcccgagagctgtttgacacagtccaagtgtacatcatcaccaagccagagctgcagaacaagcttatcactgtncacagccatggaaaagaagctgatcggctgtcctgtgtgcatcgaacacaagaagtacagccgcaatgccctcctcttcaacctgggcttcgtgtgtgatgcccaggccaagacctgcgccctcgagcccattgttaaaaagctggctggctatctgaccacactagagnagctagagagcagcttcgtgtccacggaggagagcaagcagaagttggtgcccatcatgaccatcttgctggaggagctaaatgcctcgggccggtgcactctgcccattgnnnnnnnnnnnnnnnnnnnnnnnnnnnnnnnnnnnnnnnnnnnnnnnnnnnnnnnnnnnnnnnnnnnnnnnnnnnnnnnnnnnnnnnnnnnnnnnnnnnnnnnnnnnnnnnnnnnnnnnnnnnnnnnnnnnnnnnnnnatcctgccctacattgatgggttccgccacgtccagaagatttcagcagaggcagacgtggagctcaacctggtgcgcattgctatccagaacctgctgnnnnnnnnnnnnnnnnnnnnnnnnnnnnnnnnnnnnnnnnnnnnnnnnnnnnnnnnnnnnnnnnnnnnnnnnnnnnnnnnnnnnnnnnnnnnnnnnnnnnnnnnnnnnnnnnnnnnnnnnnnnnnnnagggcacaagagggccagtctccgggatgtgttccagctatactgcagcctgagccctggcactactgtgcgagacctcattggccgccacccccagcagctgcagcacgttgatgaacgnnnnnnnnnnnnnnnnnnnnnnnnnnnnnnnnnnnnnnnnnnnnnnnnnnnnnnnnnnnnnnnnnnnnnnnnnnnnnnnnnnnnnnnnnnnnnnnnnnnnnnnnnnnnnnnnnnnnnnnnnnnnnnnnnnnnnnnnnnncaggcatgagctaccatgagctggatgagcggcttgaaaatgaccccaacattatcatctgctggaagtgaggctggtggtggctggatggacacattgctgtgggtagtccctcctaccaggaggcttgtcatactgtctagagcttgactcttagttctgtaaataaagacatccatttcaaa

SEQ ID NO: 33577 - DNA, 236 bp, Macaca Mulatta
attatgtgagtttaaggagagaagcaatcagagctgaatatcagaagatgcctgcatttctccatgaagaagagcaacatcacttggagaggctgcaaaaggagggcgaggacatttttcagcaactcaatgaaagcaaagccagaatggaacattcgagggagcttttaagaggaatgtatgaggatctgagggaaatgtgccataaagcagatgtggagctactccaggtacgg

SEQ ID NO: 33578 - DNA, 609 bp, Macaca Mulatta
cccaaagtgctttgcacacattaatattagccactagctgccttgttgagtataagtatccaatgagaggatatagccaattaagtgtgttatggagtacacccattttgacacacttgtaataagagaatctttcatttgcctgccacatgtactgcattctgagaatcttgtaataggaatggagtgtaatgaaacattctgaatactaattgcatatgtatcataaagtaggtcatttaggaaaaaacttctgtccaagctttgtatgaattaaatttataacaaattaaatcttaatagatttaatgcaattttgcaaacaaaattaccttcatgaatttcaaaattcatataaaattagatcttatgcaatacacccttttgaggaggcagtgtaataacctatagtgccattgatccatgagaaaaagattttctggtactactccaaaagtgctttgactgagtatcttatttgaacagtctgcttctatgagacagtttttcatagtatcatttgtataatttgattagattattcagaaacaacaggatgctaaactacacttattcattgtatcttttatcgctttaacaatgatggag

SEQ ID NO: 33579 - DNA, 1407 bp, Macaca Mulatta
  misc_feature (1)...(1407): n = A,T,C or G
ttcatcttgttgatatctggaacatgattgaagccttccgagacaatggccttaatacactggaccataccaccgagatcagtgtgtcccgccttgaaactgtcatctcctccatctactatcagttgaacaagcgccttccttctactcaccaaattagtgtggaacaatctatcagcctcctcctcaactttatgattgctgcatatgacagnnnnnnnnnnnnnnnnnnnnnnnnnnnnnnnnnnnnnnnnnnnnnnnnnnnnnnnnnnnnnnnnnnnnnnnnnnnnnnnnnnnnnnnnnnnnnnnnnnnnnnnnnnnnnnnnnnnnnnnnnnnnnnnnnnnnnnnnnnnnnnnnnnnnnnnnnnnnnnnnnnnnnnnnnnnnnnnnnnnnnnnnnnnnnnnnnnnnnnnnnnnnnnnnnnnnnnnnnnnnnnnnnnnnnnnnnnnnnnnnnnnnnnnnnnnnnnnnnnnnnnnnnnnnnnnnnnnnnnnnnnnnnnnnnnnnnnnnnnnnnnnnnnnnnnnnnnnnnnnnnnnnnnnnnnnnnnnnnnnnnnnnnnnnnnnnnnnnnnnnnnnnnnnnnnnnnnnnnnnnnnnnnnnnnnnnnnnnnnnnnnnnnnnnnnnnnnnnnnnnnnnnnnnnnnnnnnnnnnnnnnnnnnnnnnnnnnnnnnnnnnnnnnnnnnnnnnnnnnnnnnnnnnnnnnnnnnnnnnnnnnnnnnnnnnnnngaaatctcctgcaaagaagctgagccatgcgattagtaaatctttggggtgtgtacccacgagagaacccccgcatcctgtttttcctgagcaaccagagaaaccacttgaccttgcacatatagtnnnnnnnnnnnnnnnnnnnnnnnnnnnnnnnnnnnnnnnnnnnnnnnnnnnnnnnnnnnnnnnnnnnnnnnnnnnnnnnnnnnnnnnnnnnnnnnnnnnnnnnnnnnnnnnnnnnnnnnnnnnnnnnnnnnnnnnnnnnnnnnnnnnnnnnnnnnnnnnnnnnnnnnnnnnnnnnnnnnnnnnnnnnnnnnnnnnnnnnnnnnnnnnnnnnnnnnnnnnnnnnnnnnnnnnnnnnnnnnnnnnnnnnnnnnnnnnnnnnnnnnnnnnnnnnnnnnnnnnnnnnnnnnnnnnnnnnnnnnnnnnnnnnnnnnnnnnnnnnnnnnnnnnnnnnnnnnnnnnnnnnnnnnnnnnnnnnnnnnnnnnnnnnnnnnnnnnnnnnnnnnnnnnnnnnnnnnnnnnnnnnnnnnnnnnnnnnnnnnnnnnnnnnnnnnnnnnnnnnnnnnnnnnnnnnnnnaggcaaaggaaggatgaactggagcagaggatgtcagccctgcaagagagcaggcgggaactgatggtccagctagaagagttgatgaagttgctgaagg

SEQ ID NO: 33580 - DNA, 909 bp, Macaca Mulatta
  misc_feature (1)...(909): n = A,T,C or G
agggaaaaatttatacacaaatgaatatgtggcaattaagttgnnnnnnnnnnnnnnnnnnaccacagctacatttggaatacagattctataagcagttaggatctggagnnnnnnnnnnnnnnnnnnnnnnnnnnnnnnnnnnnnnnnnnnnnnnnnnnnnnnnnnnnnnnnnnnnnnnnnnnnnnnnnnnnnnnnnnnnnnnnnnnnnnnnnnnnnnnnnnnnnnnnnnnnnnnnnnnnnnnnnnnnnnnnnnnnnnnnnnnnnnnnnnnnnnnnnnnnnnnnnnnnnnnnnnnnnnnnnnnnnnnnaaacctgagaacttcttaataggacgaccaggaaacaaaacccagcaagttattcacattatagattttggtttggcaaaggaatatattgatccagagacaaagaaacacataccatacagagaacacaagagccttacaggaacagctagatatatgagcataaacacacatttaggaaaagnagaacaaagtagaagagatgatttagaagctttaggtcatatgttcatgtactttctgagaggcagtcttccttggcaaggcttaaagnnnnnnnnnnnnnnnnnnnnnnnnnnnnnnnnnnnnnnnnnnnnnnnnnnnnnnnnnnnnnnnnnnnnnnnnnnnnnttctagaagaaatggcaattatctccgttatgtaagaaggctagatttttttgaaaaaccagactatgactacttaagaaagctttttactgacttgtttgatcgaaaaggatatatgtttgattatgaatatgactggattggtaaacagttgcctactccagtgggtgcggttcagcaagatcctactctgtcatcaaacagggaagcacatcaacacagagataagatgcaacaatccaaaaacca

SEQ ID NO: 33581 - DNA, 360 bp, Macaca Mulatta
aaagacatcagaggaatgcacgtcagtcaaaaccctttgcatcccttgtagctgggtttagtgaacttgcttggcagtgatatttcagcttggacattttccccttcagtcggcccaagaaatcaaaataaaggaaacacatttcatacactgcaggtaacaaaagtgaaagtattttatcttttcacagcaagaacagtccattttatatataatacaaccaaaattatagaacttttagggttgtgactggctttcgtgcaaatgtctgctcaagctaataagttattgtgagactgagtttcctttaacttataaagctagttgccatatttctattttattttaaaaagtaaacat

SEQ ID NO: 33582 - DNA, 341 bp, Macaca Mulatta
ctaaggtgatggctgacatggctctggggtttccctactctcagaagtacttgttgcgttccatcttcgccagcagcccggtgaagtctgcactgcttttctccccattttgcagatgagattgtggggctcgccagcatcccccacggcttctgagtagctcaggagtggagtcagcaccacgccaggctccccgcgcctgccttgccctcacttgttcctgctctctaacagaggcagcatggtccgcagggcaccatggggccggacagagtgacagcacgagaactgtgcgagaacgacgacctggccaccagcctcgtcctggacccctacctcgg

SEQ ID NO: 33583 - DNA, 115 bp, Macaca Mulatta
cctcttggattctaagtggttccaagcttaacttgagaccttcccttcaaatctaaaatcggcaaaaagtcacttaaaatagtggacttctgtaataaaggttgcctaaaataac

SEQ ID NO: 33584 - DNA, 442 bp, Macaca Mulatta
tggagttgggaaatgtcaccagagtaaaagaatttatatttctgggacttactcaatcccaagacctgagcttggtcttgtttctttttttatgtcttgtgtacatgacgactctgctgggaaacctcctcatcatggtcactgtgacttgtgagtctcgccttcacacccccatgtacttcctgctctgcaatctagccatccttgacatctgcttctcctccataactgctcctaaagtcttgctggaccttctgtcaaagaaaaagaccatatcctatacaagctgcatgacacagatatttctcttccacctccttggtggggcagacattttttctctctctgtgatggcgtttgaccgctacatggccatctccaagcccttgcactatgtgaccatcatgagtaggggtcgatgcactgccctcatctctgcctc

SEQ ID NO: 33585 - DNA, 167 bp, Macaca Mulatta
caggtgctggggttggagtccctgctgggcactgccagcctgtggccactgctcttgggcctcacagtgctacctgccctcctgcagctggtcctgctccccttctgtcccgagagcccccgctacctctatatcatccggaatctcgagggacctgccagaaagag

SEQ ID NO: 33586 - DNA, 601 bp, Macaca Mulatta
  misc_feature (1)...(601): n = A,T,C or G
tttttagtagagacggggtttcaccgtgttagccaggatggtctcgatctcctgacctcgtgatccgcccgcctcggcctcccaaagtgctgggattacaggcttgagccaccgcgcccggccnnnnnnnnnnnnnnnnnnnnnnnnnnnnnnnnnnnnnnnnnnnnnnnnnnnnnnnnnnnnnnnnnnnnnnnnnnnnnnnnnnnnnnnnnnnnnnnnnnnnnnnnnnnnnnnnnnnnnnnnnnnnnnnnnnnnnnnnnnnnnnnnnnnnnnnnnnnnnnnnnngagtccttacagccacaccacaaggtacatccatttgaactataagaagcgcttcttttaaagttcctatttcagcataaagaggctgtccnnnnnnnngaggaatagtttttacctcgtgcctcctgtgggaggctgaggactgcaagaggagaactagcagatacgcctgctcacccctctctggtacttgtggcttgctagtatgttgttattataatctcgggcattgtttgcattgtgtttattaataggnnnnnnnnnnnnnnnnnnnnnnnnnnacagtaaaggctgaattacataaacattgagtaaa

SEQ ID NO: 33587 - DNA, 362 bp, Macaca Mulatta
  misc_feature (1)...(362): n = A,T,C or G
tggccaaacccttgctttcctgggcctttgcaagatgcttggttgtgttgaggtttttaaatatatattttgtactttgtggagagannnnnnnnnnnnnnnnnnnnnnnnnnnnnnnnnnnnnnnnnnnngtgtcaaacattcctgagctggggacccgggggctggtgctgcaggagtgtcctgcccatgccccagttggccccatccctcatccctgtagatagcaggttctattctgtcagtgttaatgattttgttttgttgaaaatttttttcgaatcttaatttattattttttttatatttattgttagaaaatgacttatttctgctctggaataaagttgcagatgattcaa

SEQ ID NO: 33588 - DNA, 928 bp, Macaca Mulatta
cagaaaaccttacagaattatcagaatttctcctcctgggactctcaggtgctcctcaactgcagcccgtcctctttgggctgttcctgtccatgtacctggtcacggtgctggggaacctgctcatcatcctggccgtcagctctgactcccacctccacacccccatgtacttcttcctctccaacctgtcctttgtcgacatctgtttcatctccaccacagtccccaagatgctggtgaatatccaggcacagagcaaacacatctcctacgtgaggtgcctcactcaggtgtattttttaatgatgtttgctggaatggataatttcctactggtcgtgatggcctatgaccggtttgtggccatctgccaccccctgcactacacggtcatcatgaacccctgcctctgtggcctcctggttctggcatcttggttcatcattttctgggtctccctggttcatcttctactgatgaagaggttggccttctccacaggcagagattccccatttcttctgtgaagtggctcaggtcctcaaggtggcctgctctaacaccctcctcaataacattgtcttgtatgtggccacggcactgctgggtgtgtttcctgtagctgggatcctcatctcctactttcagatcgtctcctccttaatgaggatgtcctccaccgagggcaagtacaaagccttttccacctgtgggtctcacctctgtgtggtctccttgttctatggaacaggacttggggtctatctcagttctgctgtgacccattcttcccagagcagctccatggcctcagtgatgtataccatggggccccatgctgaaccccttcatctatagcctgaggaacaaggatgtgaagggggccctggggagactcctcggcagggcagcctcttgtccatga

SEQ ID NO: 33589 - DNA, 2463 bp, Macaca Mulatta
  misc_feature (1)...(2463): n = A,T,C or G
cctgacactgttagaagcaatcttccccatattgaagaaactacaagtgatgatnnngacactgttagaagcaatcttccccatattgaagaaactacaagtgatgatgtaagtgctactaacactaacaacctgaagaagaccatgagagtcgctaaaaacaaatcgaggaacacacaagtcagcaactgaaaatcctaatgatgatgttagtgtagaggaagacaaacaaggaaagccaaataaaaaggtggtaaagacggtgtcccagttgactacacaagatatgaaattggaaactcctgagaaggaagttgattctacacaccagaaagcgcgtacaaagccacagccaggccttgatcatcagaaaagtgagaaggcaaatgagggaagagaagagaatgatttagaagaggacgaagaactgatgcaagcatatcagcgccatgtaactgaagaaatggcaaaggagattaagaagaaaataagaaaaaaactgaaagaacagttgacttactttccctcagatactttattccatgacgacaaannnnnnnnnnnnnnnnnnnnnnnnnnnnnnnnnnnnnnnnnnnnnnnnnnnnnnnnnnnnnnnnnnnnnnnnnnnnnnnnnnnnnnnnnnnnncagtttcttcagattctcatcaagacggtgaaataagctcaatggaacaaaacacagaaggcagcatgcaagatgacacaaaacctaaaccnnnnnnnnnnnnnnnnnnnnnnnnnnnnnnnnnnnnnnnnnnnnnnnnnnnnnnnnnnnnnnnnnnnnnnnnnnnnnnnnnnnnnnnnnnnnnnnnnnnnnnnnnnnnnnnnnnnnnnnnnnnnnnnnnnnnnnnnnnnnnnnnnnnnnnnnnnnnnnnnnnnnnnnnnnnnnnnnnnnnnnnnnnnnnnnnnnnnnnnnnnnnnnnnnnnnnnnnnnnnnnnnnnnnnnnnnnnnnnnnnnnnnnnagtgaacgacctgtttcatcttactatgaaaaagagaatgtggattatattcttcctattatgacccagccatatgattttaaacagttaaaatcaagacttccagagtgggaagaacaaattatatttaatgaaaattttccctatttgcttcgagactctgatgagagtcctaaagtcatcctgttctttgagnnnnnnnnnnnnnnnnnnnnnnnnnnnnnnnnnnnnnnnnnnnnnnnnnnnnnnnnnnnnnnnnnnnnnnnnnnnnnnnnnnnnnnnnnnnttaagcttctgggagccaatggaaaatgcaaacatcaactcaaaacttcgtttgcagctgtattaccccacctactaaaggctcgatcccaaattaaatgttgttgaggtgtttgaatggtggtcaaaatgtccaagaaatcgttacccatcaacactgtatgtaactgtaagaggactgaaagttccagactgtnnnnnnnnnnnnnnnnnnnnnnnnnnnnnnnnnnnnnnnnnnnnnnnnnnnnnnnnnnnnnnnnnnnnnnnnnnnnnnnnnnnnnnnnnnnnnnnnnnnnnnnnnnnnnnnnnnnnnnnnnnnnnnnnnnnnnnnnnnnnnnnnnnnnnnnnnnnnnnnnnnnnnnnnnnnnnnnnnnnnnnnnnnnnnnnnnnnnnnnnnnnnnnnnnnnnnnnnnnnnnnnnnnnnnnnnnnnnnnnnnnnnnnnnnnnnnnnnnnnnnnnnnnnnnnnnnnnnnnnnnnnnnnnnnnnnnnnnnnnnnnnnnnnnnnnnnnnnnnnnnnnnnnnnnnnnnnnnnnnnnnnnnnnnnnnnnnnnnnnnnnnnnnnnnnnnnnnnnnnnnnnnnnnnnnnnnnnnnnnnnnnnnnnnnnnnnnnnnnnnnnnnnnnnnnnnnnnnnnnnnnnnnnnnnnnnnnnnnnnnnnnnnnnnnnnnnnnnnnnnnnnnnnnnnnnnnnnnnnnnnnnnnnnnnnnnnnnnnnnnnnnnnnnnnnnnnnnnnnnnnnnnnnnnnnnnnnnnnnnnnnnnnnnnnnnnnnnnnnnnnnnnnnnnnnnnnnnnnnnnnnnnnnnnnnnnnnnnnnnnnnnnnnnnnnnnnnnnnnnnnnnnnnnnnnnnnnnnnnnnnnnnnnnnnnnnnnnnnnnnnnnnnnnnnnnnnnnnnnnnnnnnnnnnnnnnnnnnnnnnnnnnnnnnnnnnnnnnnnnnnnnnnnnnnnnnnnnnnnnnnnnnnnnnnnnnnnnnnnnnnnnnnnnnnnnnnnnnnnnnnnnnnnnnnnnnnnnnnnnnnnnnnnnnnnnnnnnnnnnnnnnnnnnnnnnnnnnnnnnnnnnnnnattagtagcaaggaaatttgtaggagcagcaaattatcgggagaagattcatagtactttgactccatgtgggacttttctgtttgctggaagtgaggatggtatagtgtatgtttggaacccagaaacagg

SEQ ID NO: 33590 - DNA, 1315 bp, Macaca Mulatta
  misc_feature (1)...(1315): n = A,T,C or G
gaaatgaccacaggtgaacatatccaagatgaaccaggtannnnnnnnnnnnnnnnnnnnnnnnnnnnnnnnnnnnnnnnnnnnnnnnnnnnnnnnnnnnnnnnnnnnnnnnnnnnnnnnnnnnnnnnnnnnnnnnnnnnnnnnnnnnnnnnnnnnnnnnnnnnnnnnnnnnnnnnnnnnnnnnnnnnnnnnnnnnnnnnnnnnnnnnnnnnnnnnnnnnnnnnnnnnnnnnnnnnnnnnnnnnnnnnnnnnnnnnnnnnnnnnnnnnnnnnnnnnnnnnnnnnnnnnnnnnnnnnnnnnnnnnnnnnnnnnnnnnnnnnnnnnnnnnnnnnnnnnnnnnnnnnnnnnnnnnnnnnnnnnnnnnnnnnnnnnnnnnnnnnnnnnnnnnnnnnnnnnnnnnnnnnnnnnnnnnnnnnnnnnnnnnnnnnnnnnnnnnnnnnnnnnnnnnnnnnnnnnnnnnnnnnnnnnnnnnnnnnnnnnnnnnnnnnnnnnnnnnnnnnnnnnnnnnnnnnnnnnnnnnnnnnnnnnnnnnnnnnnnnnnnnnnnnnnnnnnnnnnnnnnnnnnnnnnnnnnnnnnnnnnnnnnnnnnnnnnnnnnnnnnnnnnnnnnnnnnnnnnnnnnnnnnnnnnnnnnnnnnnnnnnnnnnnnnnnnnnnnnnnnnnnnnnnnnnnnnnnnnnnnnnnnnnnnnnnnnnnnnnnnnnnnnnnnnnnnnnnnnnnnnnnnnnnnnnnnnnnnnnnnnnnnnnnnnnnnnnnnnnnnnnnnnnnnnnnnnnnnnnnnnnnnnnnnnnnnnnnnnnnnnnnnnnnnnnnnnnnnnnnnnnnnnnnnnnnnnnnnnnnnnnnnnnnnnnagtatacaccaacaagtattccagaagtccaacaagagaatataatcaatcctcaagacctaacagnagtgaatctagttgctaatgtacctcaagatggagaagatgaacaagcctttattttaactctggtggaaattccaccaatgcagtagaagaaattactgatgccactgcacagttcatgccaaacactttactgccagctcccatattggtcaaatcagtgaatactgaagaaagaggtgacatgagnagtatttgtttaccagcaacttcagttggtcaggatgccgtgggtttatctatttctggaagagataattctaaaaagcctcctgataatttggatcttatatctaggaagagatttaaatgcaggcttgatgaaaatgaccacattcctcctgccaaaaaatgtttgctcactttaagagatgattgtcaagaatatacctctgaggt

SEQ ID NO: 33591 - DNA, 492 bp, Macaca Mulatta
tgtgtgcctggcttgctgggcaggcctggtggccatgatgatcaggtgcatgggagttctggggaggctccaagaactgccaggaacagggatacgagtgccaggctgcatctctcgctcctctgcagagtcggcgggcttcttctcagagatgacagaggacgagttggtggtgctgcagcagatgttctttggcgtcatcatctgtgcactggccacgctggctgctaagggcgacttggtgttcactgccattttcatcggggctgtggcagccatgactggctactggttgtcagagcgcagtgaccgtgtgctggagggcttcatcaagggcagataatcttggccaccacttgtaggatctcctcccacctacgctgcccccagagcttgggctgccctcctgctggacactcaggacagcttggtttatttttgagagtggggtaagcaaccctacctgccttacagagcagcccaggtacccag

SEQ ID NO: 33592 - DNA, 762 bp, Macaca Mulatta
aggtccagtgtgaaagacataagtttatttaacgtggaggtaaatgaaggtgagctgttttcagcgtcttagtttgaccatgaagatgtctatagaattatgtgtagttgttctgtacgattttattttcttcatttatttatttacagtcttatttatgttctgtttaatatatagtttgattctggccattttaaatatttgacacagaagagactatattggaatatttacagctttataagtctttcatcagattagctgttgactttttgtaatacaaaaagtttcagacaagtattaaagaataaaatctgtctcaggctggtagttagcagttgtgaccaagatgcttttggttgttgtatttcacaaaatttcctcatttctaacatgagagatgaacttattttaatataatcctttttctacactttaaaagtcagcaatagtgttatgtatttataggcagcttttaataatcttgtcatatttgtactaacccaaatgattcacagtgacaaaacattttaataacttgatcacaaaaccatatggacaaatacgaattttaatattataaatactatttttaaaaggtagaatttattcgcacagggtaaaaagaatgtaatatttagttctcaagtttgaattatcattatattattacaattttgtatatcagaatcttaagtgttacaggtacaaaaaggatattgctagccaaatgaacaaagtttagctaaatctctgtagcat

SEQ ID NO: 33593 - DNA, 296 bp, Macaca Mulatta
tccttcttaatccaaggactgggctggggtggctggaggggagccagatcccccaggaaggaccctgagggccgccaaacatccgagcccctagctgggaaggggcaggccagtgccccaggggcggctggtacagcacccccttcccggacgggtggcaggccctggagaggaactgagtgtcaccctgatctcaggctgccagcctctgccggcctcccagccgggctcctgaagcccgctgaaaggtcagcgactggaggccttgcagacaactgtctggaggtggctgtcct

SEQ ID NO: 33594 - DNA, 448 bp, Macaca Mulatta
tagggttttcccaataacagatctttgccttctgttctggggcatacccagaccaggggggctttagggtgtcatgagccctgagggggtcacatgggctgcggttaagtagctatcccccaagctggttccaggggcgggttgaggtcaggatggcaagaaagtggacactgaggggccaccttggagcagtccctgattgtaaagcccaagatttagctttcagagttggcctcagcctggagctccagacagatgcctggagtccaggggctggaggggcgaggacgggctgggcaggcggatcggacccctctcccgctgccaggtgctgacctgggcctcctgcacctggcgctggagcaacgctgtcgggagctgcgcgtgcggggcccacgcctggaggaaaacctgccccggggatcggttcccaggaacagcgcgaggg

SEQ ID NO: 33595 - DNA, 3714 bp, Macaca Mulatta
  misc_feature (1)...(3714): n = A,T,C or G
gcctcgtgtgtgctggctcctgcgcgggtagatccgcgagtannnnnnnnnnnnnnnnnnnnnnnnnnnnnnnnnnnnnnnnnnnnnnnnnnnnnnnnnnnnnnnnnnnnnnnnnnnnnnnnnnnnnnnnnnnnnnnnnnnnnnnnnnnnnnnnnnnnnnnnnnnnnnnnnnnnnnnnnnnnnnnnnnnnnnnnnnnnnnnnnnnnnnnnnnnnnnnnnnnnnnnnnnnnnnnnnnnnnnnnnnnnnnnnnnnnnnnnnnnnnnnnnnnnnnnnnnnnnnnnnnnnnnnnnnnnnnnnnnnnnnnnnnnnnnnnnnnnnnnnnnnnnnnnnnnnnnnnnnnnnnnnnnnnnnnnnnnnnnnnnnnnnnnnnnnnnnnnnnnnnnnnnnnnnnnnnnnnnnnnnnnnnnnnnnnnnnnnnnnnnnnnnnnnnnnnnnnnnnnnnnnnnnnnnnnnnnnnnnnnnnnnnnnnnnnnnnnnnnnnnnnnnnnnnnnnnnnnnnnnnnnnnnnnnnnnnnnnnnnnnnnnnnnnnnnnnnnnnnnnnnnnnnnnnnnnnnnnnnnnnnnnnnnnnnnnnnnnnnnnnnnnnnnnnnnnnnnnnnnnnnnnnnnnnnnnnnnnnnnnnnnnnnnnnnnnnnnnnnnnnnnnnnnnnnnnnnnnnnnnnnnnnnnnnnnnnnnnnnnnnnnnnnnnnnnnnnnnnnnnnnnnnnnnnnnnnnnnnnnnnnnnnnnnnnnnnnnnnnnnnnnnnnnnnnnnnnnnnnnnnnnnnnnnnnnnnnnnnnnnnnnnnnnnnnnnnnnnnnnnnnnnnnnnnnnnnnnnnnnnnnnnnnnnnnnnnnnnnnnnnnnnnnnnnnnnnnnnnnnnnnnnnnnnnnnnnnnnnnnnnnnnnnnnnnnnnnnnnnnnnnnnnnnnnnnnnnnnnnnnnnnnnnnnnnnnnnnnnnnnnnnnnnnnnnnnnnnnaggatcacgcagatttgcgaagccatttcttcacagttgggatgaagcttgagacagtgaatatgagcgagccctttgacgtctctcctgcgtcagtgactaaggnnnnnnnnnnnnnnnnnnnnnnnnnnnnnnnnnnnnnnnnnnnnnnnnnnnnnnnnnnnnnnnnnnnnnnnnnnnnnnnnnnnnnnnnnnnnnnnnnnnnnnnnnnnnnnnnnnnnnnnnnnnnnnnnnnnnnnnnnnnnnnnnnnnnnnnnnnnnnnnnnnnnnnnnnnnnnnnnnnnnnnnnnnnnnnnnnnnnnnnnnnnnnnnnnnnnnnnnnnnnnnnnnnnnnnnnnnnnnnnnnnnnnnnnnnnnnnnnnnnnnnnnnnnnnnnnnnnnnnnnnnnnnnnnnnnnnnnnnnnnnnnnnnnnnnnnnnnnnnnnnnnnnnnnnnnnnnnnnnnnnnnnnnnnnnnnnnnnnnnnnnnnnnnnnnnnnnnnnnnnnnnnnnnnnnnnnnnnnnnnnnnnnnnnnnnnnnnnnnnnnnnnnnnnnnnnnnnnnnnnnnnnnnnnnnnnnnnnnnnnnnnnnnnnnnnnnnnnnnnnnnnnnnnnnnnnnnnnnnnnnnnnnnnnnnnnnnnnnnnnnnnnnnnnnnnnnnnnnnnnnnnnnnnnnnnnnnnnnnnnnnnnnnnnnnnnnnnnnnnnnnnnnnnnnnnnnnnnnnnnnnnnnnnnnnnnnnnnnnnnnnnnnnnnnnnnnnnnnnnnnnnnnnnnnnnnnnnnnnnnnnnnnnnnnnnnnnnnnnnnnnnnnnnnnnnnnnnnnnnnnnnnnnnnnnnnnnnnnnnnnnnnnnnnnnnnnnnnnnnnnnnnnnnnnnnnnnnnnnnnnnnnnnnnnnnnnnnnnnnnnnnnnnnnnnnnnnnnnnnnnnnnnnnnnnnnnnnnnnnnnnnnnnnnnnnnnntacagaggcaaaacgtacagggctgtggtcaaaatcgtacggacatctgannnnnnnnnnnnnnnnnnnnnnnnnnnnnnnnnnnnnnnnnnnnnnnnnnnnnnnnnnnnnnnnnnnnnnnnnnnnnnnnnnnnnnnnnnnnnnnnnnnnnnnnnnnnnnnnnnnnnnnnnnnnnnnnnnnnnnnnnnnnnnnnnnnnnnnnnnnnnnnnnnnnnnnnnnnnnnnnnnnnnnnnnnnnnnnnnnnnnnnnnnnnnnnnnnnnnnnnnnnnnnnnnnnnnnnnnnnnnnnnnnnnnnnnnnnnnnnnnnnnnnnnnnnnnnnnnnnnnnnnnnnnnnnnnnnnnnnnnnnnnnnnnnnnnnnnnnnnnnnnnnnnnnnnnnnnnnnnnnnnnnnnnnnnnnnnnnnnnnnnnnnnnnnnnnnnnnnnnnnnnnnnnnnnnnnnnnnnnnnnnnnnnnnnnnnnnnnnnnnnnnnnnnnnnnnnnnnnnnnnnnnnnnnnnnnnnnnnnnnnnnnnnnnnnnnnnnnnnnnnnnnnnnnnnnnnnnnnnnnnnnnnnnnnnnnnnnnnnnnnnnnnnnnnnnnnnnnnnnnnnnnnnnnnnnnnnnnnnnnnnnnnnnnnnnnnnnnnnnnnnnnnnnnnnnnnnnnnnnnnnnnnnnnnnnnnnnnnnnnnnnnnnnnnnnnnnnnnnnnnnnnnnnnnnnnnnnnnnnnnnnnnnnnnnnnnnnnnnnnnngcaggacattgacggccaagcactcctgcttctgacccttccgacggtgcaggagtgcatggagctgaagctggggcccgccatcaagttatgccaccagatcgagagagtcaaagtggctttctacgcccagtatgccaactgagtcggccctcgggaggtggcccgtgatgtgggatgcagtgttggtaaaggtttccaggactgaaactttgattttccgggatatgttaaannnnnnnnnnnnnnnnnnnnnnnnnnnnnnnnnnnnnnnnnnnnnnnnnnnnnnnnnnnnnnnnnnnnnnnnnnnnnnnnnnnnnnnnnnnnnnnnnnnnnnnnnnnnnnnnnnnnnnnnnnnnnnnnnnnnnnnnnnnnnnnnnnnnnnnnnnnnnnnnnnnnnnnnnnnnnnnnnnnnnnnnnnnnnnnnnnnnnnnnnnnnnnnnnnnnnnnnnnnnnnnnnnnnnnnnnnnnnnnnnnnnnnnnnnnnnnnnnnnnnnnnnnnnnnnnnnnnnnnnnnnnnnnnnnnnnnnnnnnnnnnnnnnnnnnnnnnnnnnnnnnnnnnnnnnnnnnnnnnnnnnnnnnnnnnnnnnnnnnnnnnnnnnnnnnnnnnnnnnnnnnnnnnnnnnnnnnnnnnnnnnnnnnnnnnnnnnnnnnnnnnnnnnnnnnnnnnnnnnnnnnnnnnnnnnnnnnnnnnnnnnnnnnnnnnnnnnnnnnnnnnnnnnnnnnnnnnnnnnnnnnnnnnnnnnnnnnnnnnnnnnnnnnnnnnnnnnnnnnnnnnnnnnnnnnnnnnnnnnnnnnnnnnnnnnnnnnnnnnnnnnnnnnctctgtcgcccaggctgtagtgcagtggcacaatctcggttcactacaacctccctctcccgggttcaagcaattctcctgcctcagcctccctagtagctggaattacaggtgcccgccaccacgcctggctaatttttgtacttttattagaggcagggtttcaccatgttggccaggctggtctcgagctcctaatttcagctgatctgcctgccttggcctcccaaagtgctgggattacaggcatgagccactgcgccc

SEQ ID NO: 33596 - DNA, 1017 bp, Macaca Mulatta
atgcccttttgccacaatataattaatatttcctgtgtgaaaaacaactggtcaaatgatgtccgtgcttccctgtacagtttaatggcgctcataattctgaccacattggtcggcaatctgatagttattgtttctatatcacacttcaagcaacttcatactccgacaaattggctcattcattccatggccactgtggactttcttctggggtgtctggtcatgccttacagcatggtgagatctgctgagcactgttggtattttggagaagtcttctgtaaaatccacaccagcaccgacattatgctgagctcagcctccattttccatctgtctttcatctccattgaccgctactatgctgtgtgtgacccattgagatataaagccaagatcaatatcttggttgtttgtgtgatgatcttcattagttggagtgtccctgctgtttttgcatttgggatgatctttctggagctaaacttcaaaggcgctgaagagatatattacaaacatgttcactgcagaggaggttgctctgtgttctttagcaaaatatctggggtactggcctttatgacttctttttacatacctggatctattatgttatgtatctattacagaatatatcttatagctaaagagcaggcaagatcaattaatgatgccaatcagaagctccaaattggattggaaatgaaaaatggaatttcacaaagcaaagaaaggaaagctgtgaagacattggggattgtgatgggagttttcctaatatgctggtgccctttctttgtctgtacagtcatcgacccttttcttcactacactattccacctactttgaacgatgtattgatttggtttggctacttgaactctacatttaatccaatggtttatgcatttttctatccctggtttagaaaagcactgaagatgattctgtttggtaaaattttccaaaaggattcatccaggtgtaaattatttttggaatcgagttcatag

SEQ ID NO: 33597 - DNA, 260 bp, Macaca Mulatta
acgcggggagagcactgcgccgtttgggaacgcaactttgaggaggcagtgcggtggatttcagtgaagttccttatgacttcccctgaaattgcttccttatcatgggggcaaatgaaagtaaaaggctctaatacaacctataaggactgcaaagtatggccagggggtagtcggacttgggattggagagaaacaggaactgagcattctcctggtgtgcagcctgcagatgtgaaggaagttgttgagaagggtgt

SEQ ID NO: 33598 - DNA, 921 bp, Macaca Mulatta
  misc_feature (1)...(921): n = A,T,C or G
ggccacgtggcgctatggcggtcactaccgggaattaaccacggccacactctcagggcgccaagcgccggctcggggacacgccggccaccacctcagccggcnnnnnnnnnnnnnnnnnnnnnnnnnnnnnnnnnnnnnnnnnnnnnnnnnnnnnnnnnnnnnnnnnnnnnnnnnnnnnnnnnnnnnnnnnnnnnnnnnnnnnnnnnnnnnnnnnnnnnnnnnnnnnnnnnnnnnnnnnnnnnnnnnnnnnnnnnnnnnnnnnnnnnnnnnnnnnnnnnnnnnnnnnnnnnnnnnnnnnnnnnnnnnnnnnnnnnnnnnnnnnnnnnnnnnnnnnnnnnnnnnnnnnnnnnnnnnnnnnnnnnnnnnnnnnnngagtcagatggagttcagtatctccgccctatccatccaggagccgagcaacggcaccaccgccagcgagcccagacccctgtccaaagcttcccagggctcccaggccctcaagtcctcccaaggcagcaggtcctccagcctggacgccctgggccccaccaggaaggaggaggaagcatccttctggaagatcaatgccgagaggtcccgaggggaggggcctgaggccgagttccagtcgctgacccctagccagatcaagtccatggagaagggggagaaggtcttgcctccctgctaccggcaggaacctgccccgaaggacagggaggccaagatggaaaggcccagcaccctccgtcaggagcagcgtccccttcccaacgtgagcaccgaacgcgagagagcccagcccgtccaggccttcggcagcacgctgcaggaggccgccccctcccagctcgaggggaagctgccgtctcctgacatcaggcaggacgacggggaagacaccctgttcttggaacccaagtttgcacaggt

SEQ ID NO: 33599 - DNA, 854 bp, Macaca Mulatta
gggctgggcttttcggctctctgatcagcaccatggcggttggcaagaacaagcgccttacgaaaggcggcaaaaagggagccaagaagaaagtggttgatccattttctaagaaagattggtatgatgtgaaagcacctgctatgttcaatataagaaatattggaaagacgctcgtcaccaggacccaaggaaccaaaattgcatctgatggtctcaagggtcgtgtgtttgaagtgagtcttgctgatttgcagaatgatgaagttgcatttagaaaattcaagctgattactgaagatgttcagggcaaaaactgcctgactaacttccatggcatggatcttacccgtgacaaaatgtgttccatggtcaaaaagtggcagacaatgattgaagctcatgttgatgtcaagactaccgatggttacttgcttcgtctgttctgtgttggttttactaaaaaacgcaacaatcagatacggaagacctcttatgctcagcaccaacaggtccgccaaatccggaagaagatgatggaaatcatgacccgagaggtgcagacaaatgacttgaaagaagtggtcaataaaattgattcccagacagcatttggaaaagacataggaaaaggctttgcccaatctaattttatcccctctccatgaaggtccttccgttaaaaaaagtaaaaaatggctgaaaaaagccccaaagttttgaaattggggaaaaagctccaatgggagccttccatgggtggaaagggcgattattttctgggaaaaaaaccacctggggggaacaaaaaaagggtgccttaaattttaaaacagaaccctttatagattaaa

SEQ ID NO: 33600 - DNA, 565 bp, Macaca Mulatta
ccagaaggctgccacatcctgacatccgtgagcagagccacggacccatagccgccctggcgcccgctaggggctctgccacaaggcttctgccttttctgtctgtgactccgtggggcaccttggggctgaggccccagagcctgctctgtcccgggtcccaggagtgtagagggaccacagtttctcagcacggctgccccatccaggcacgctctgctcgttcctcagtagctgcgagctcactgagggcttgctgtccctcccctctgtgcaggtccgggctgggctccagagcacagctgagcagactggcccggcctccctgtcagtgtgctgtgtggggaggacccagggtgggagctggcttttctctagagtggacctcctcccatttgcatgtcagtgtcaaccaagcacttcatgccaaggccagcctagggacatcatcacatactggacccggctgtcctcttggccaggtccccgagctgcttggactcagggtgcttgtccgtcacaggggacgggtgcacctcctcaaagcctaggtatcccacagcct

SEQ ID NO: 33601 - DNA, 213 bp, Macaca Mulatta
ctatttaaaaagacaacggagctaacttaccaggaattttaagaaagtgctaaagaactaaacttactaaacaatctactgctttaaaaatgaaatggatttcttctaacagtccgtacacatgcggtatacttaatactgtgacagatataaatatgactctagtgtaaattatctgcactaatattatatcccagttgctgatttaaaatc

SEQ ID NO: 33602 - DNA, 1912 bp, Macaca Mulatta
  misc_feature (1)...(1912): n = A,T,C or G
atgtcagatgcaaacaaagctgccattgcagcagaaaaggaagctctgaacttgaagttatcccccattgtccatctcccagaaaacataggcgttgatacaccaacacaaagtaagctgctaaaatacagaagatccaaggagcaacagcagaaaattaatcagttagtnaattgatggagccaaaagaaatttagacagaacactggataaaagaacacctctattaccaccacctgattatcctcaaactnnnnnnnnnnnnnnnnnnnnnnnnnnnttcaactacatttatatgaagcaatgtgtagaaagtagtcctatagtacctattcagcaggaatggctggatcacatgttaaggctgatacctgagtctttaaaggaagggaaagaaagagaagaactccttgaaagtctcataaatgaggtatcaagtgactttgaaaacagcatgaagagatatttggnnnnnnnnnnnnnnnnnnnnnnnnnnnnnnnnnnnnnnnnnnnnnnnnnnnnnnnnnnnnnnnnnnnnnnnnnnnnnnnnnnnnnnnnnnnnnnnnnnnnnnnnnnnnnnnnnnnnnnnnnnnnnnnnnnnnnnnnnnnnnnnnnnnnnnnnnnnnnnnnnnnnnnnnnnnnnnnnnnnnnnnnnnnnnnnnnnnnnnnnnnnnnnnnnnnnnnnnnnnnnnnnnnnnnnnnnnnnnnnnnnnnnnnnnnnnnnnnnnnnnnnnnnnnnnnnnnnnnnnnnnnnnnnnnnnnnnnnnnnnnnnnnnnnnnnnnnnnnnnnnnnnnnnnnnnnnnnnnnnnnnnnnnnnnnnnnnnnnnnnnnnnnnnnnnnnnnnnnnnnnnnnnnnnnnnnnnnnnnnnnnnnnnnnnnnnnnnnnnnnnnnnnnnnnnnnnnnnnnnnnnnnnnnnnnnnnnnnnnnnnnnnnnnnnnnnnnnnnnnnnnnnnnnnnnnnnnnnnnnnnnnnnnnnnnnnnnnnnnnnnnnnnnnnnnnnnnnnnnnnnnnnnnnnnnnnnnnnnnnnnnnnnnnnnnnnnnnnnnnnnnnnnnnnnnnnnnnnnnnnnnnnnnnnnnnnnnnnnnnnnnnnnnnnnnnnnnnnnnnnnnnnnnnnnnnnnnnnnnnnnnnnnnnnnnnnnnnnnnnnnnnnnnnnnnnnnnnnnnnnnnnnnnnnnnnnnnnnnnnnnnnnnnnnnnnnnnnnnnnnnnnnnnnnnnnnnnnnnnnnnnnnnnnnnnnnnnnnnnnnnnnnnnnnnnnnnnnnnnnnnnnnnnnnnnnnnnnnnnnnnnnnnnnnnnnnnnnnnnnnnnnnnnnnnnnnnnnnnnnnnnnnnnnnnnnnnnnnnnnnnnnnnnnnnnnnnnnnnnnnnnnnnnnnnnnnnnnnnnnnnnnnnnnnnnnnnnnnnnnnnnnnnnnnnnnnnnnnnnnnnnnnnnnnnnnnnnnnnnnnnnnnnnnnnnnnnnnnnnnnnnnnnnnnnnnnnnnnnnnnnnnnnnnnnnnnnnnnnnnnnnnnnnnnnnnnnnnnnnnnnnnnnnnnnnnnnnnnnnnnnnnnnnnnnnnnnnnnnnnnnnnnnnnnnnnnnnnnnnnnnnnnnnnnnnnnnnnnnnnnnnnnnnnnnnnnnnnnnnnnnnnnnnnnnnnnnnnnnnnnnnnnnnnnnnnnnnnnnnnnnnnnnnnnnnnnnnnnnnnnnnnnnnnnnnnnnnnnnnnnnnnnnnnnnnnnnnnnnnnnnnnnnnnnnnnnnnnnnnnnnnnnnnnnnnnnnnnnnnnnnnnnnagctaattgagaatgctaaacataaaaaagaaaatgaactaatggccaagagagagaaacttattttggaaatagaaaaggaatcacgccgcatggaagagtttacagaatttgcagagctggagcgcatgcaacag

SEQ ID NO: 33603 - DNA, 177 bp, Macaca Mulatta
ctatcggaatccgaataaggtaagggtgtttatcttaaaaatactcatttctcaatgattgtagactgtgtagtcaaaaatttaatattgacccagaaatgtcaatattctttccagaaggtactctttcaagtaaaacagtcatcatggattgataccagttacaattgtaccagt

SEQ ID NO: 33604 - DNA, 720 bp, Macaca Mulatta
  misc_feature (1)...(720): n = A,T,C or G
tacaaacatgtattttctgcaaatctcattatgctggctagagtgatgcagacttgttctcctttttaaagcagtctcaagaataagcatctcttcaaaatgtttctgtgtataatctagtatattttcagagtccattttttcttatgtctttataaggtttacttaacttaaaaacatcttttaaaacaagcttttatcttctgtcttgctatcattgttcctacttccctatgaaaccctgnctacctttggcattaggaccagtctgggttttaaggctctgtgaagcagggttgggttactaaagacagaggaatgtgggggagaggtgagtagttccttcctctttctcctctctggtttatgcttttaacttattttctaccttgataaacttctggaacttggcttttaaatttaactgttctagtttttaagcagtttccaccttgctttggtctaatgcttttctttgaaatgctaacagaattcccaagctttttccagttctagacatctttactagacctttgggggactcttataatggagctgctttagaaaagcactttaattagataatgtattttgactaaaagtcatgagcatgcccagtgagagcttctagctgatctcagaggactggagtgactgagggtaaaatgtctcacagcccatgcagaattttctgtattttaaactgatactgcagtcatt

SEQ ID NO: 33605 - DNA, 777 bp, Macaca Mulatta
  misc_feature (1)...(777): n = A,T,C or G
gggaatcaaaagcatatgtaggcagaaatgtaatactgacaagtggctgcatcattggggcttgttgcaacctaaatacatttgaagtcatccctgagaatacagtgatctatggtgcagactgccttcgtcgggtgcagactgagcgaccacagccccagacactacagctggattttttgatgaaaatcttgccaaattaccaccacctaaagaagactatgaaaggaagctcaactccagtaaagaactaagaacagtatatgacatgaagataacattttgtctttgaccactgtcttttgaatgggcccacagtgtttatgcactcttaacaatgcacagaataatatgtgttcactgtattttataaaattgggttgagaggaaactaatggagtttcattgtaactgtcctttgtaatttatataaatgtattattttcatatatccttgcttcttttctgataatttacagatttagcttttcttttgttgtataaactgctgccacaaattttagttatgtgaaagactgccatgacaagaaaagacatactgttatgtatttacattctagcatagactaaactgaataaaaaggctgataacagcgcctttagtgggcatgatcaggttttctatttgaattaatcttttctcttaatttttattatgtactagttgtattaaagctaatgtgtttacnnnnnnnnnnnnnnnnnnnnnnnnnnnnnnnnnncntgttcggccgccctcgggccctcgaagaagct

SEQ ID NO: 33606 - DNA, 809 bp, Macaca Mulatta
gggctcttgggaagatggcggctgtgtcggtgtatgctccgccggttggaggcttctcttttgataactgtcgcaggaatgccgtcttggaagccgattttgccaagagggggtacaagcttccaaaggcccggaaaactggcacgaccatcgctggggtggtctataaggatggcatagttcttggagcagatacaagagcaactgaaggaatggttgttgctgacaagaactgttcaaaaatacacttcatatctcctaatatttattgttgtggtgctgggacagctgcagacacagacatgacaacccagctcatttcttccaacttggagctccactccctctccactggccgtcttcccagagttgtgacagccaatcggatgctgaagcagatgcttttcaggtatcaaggttacattggtgcagccctagttttaggaagagtagatgttactggacctcccctgtaccgcatctttcctcacggatcaactgataagttgcctttatgtcaccatggggttctgggctcccttgggcggcaatggcctggtatttgaaagataagttttatggcccctaccattgcaggagagagggaaaccccagtaaagctgtgtggagccctaacaccattcggaagtccgtggcaatctttcaacacgaaccttggtggctccccggaaaacccaaacattcgcacccctttatgaccgtccttctcaactcaaaaaaatacaaaagctcgggaaattttttctctcccccgccccctgtttaacaaagccggttggtcccccaaa

SEQ ID NO: 33607 - DNA, 685 bp, Macaca Mulatta
cagggatttctcttacgtgtacttcataggagattctttacaaactgaagataatgtaatagttattttaatatctttaaatatcattctttgtatcttaaatctgtgaagtagaacaatttggtcttagctttacatttttagtaccaaagaaacaccacttaatcttctcttgattgatttttaaagtttaaataccagtacttgagggaccaatattaccatcttaatctttattattcagaattacacagacctaatatcattttattcacatatgtcttactactttaaatcctaccaaagtaacctgggcttaagttttacttgaggattgcatgaattagccaaaagaatggctgactgttgcctttgctcttataaaatcaacaagggaactctcctctccttttaaaaataaatctaaatgattatcttgaaaaagtattgttttccagtgtcactttactcttgaataaaaatgactgcagtgttccccatataatttaacacattgcaaatatgattcaagaatctggcctttttcatgcttggtactctcttatcttgctccattccttacaaagctccttcaaatatgctatgaaattaaagggaacatagtgcttaactctgctccatggattttagaggaaaaaagctaaataattggaaactgttcagg

SEQ ID NO: 33608 - DNA, 113 bp, Macaca Mulatta
gctggaagaagaactgagacagcagaaagaagcagcttgcttcaaggctcgtccaaacacggtcatctctcaggagccctttgttcccaaaaaagagaagaaatcagttgctg

SEQ ID NO: 33609 - DNA, 628 bp, Macaca Mulatta
  misc_feature (1)...(628): n = A,T,C or G
tggcagctatggcctatgatcggtatgctgcaatctgcaaccccttgctttacacagtcctgatatcccataccctttgtttaaagatggtggtntgcgcctatgtgggtggattccttagctctttcattgaaacatactctgtctatcagcatgatttctgtgggcccaatatgatcaaccactttttctgtgacctccccccagtcctggctctgtcctgctctgatcccttcaccagcgaggtggtgaccttcatagtgggtgttctcgttggaatagtgtctgtgctagtggtcctcatctcttacggctacattgttgcctctgttctgaagatcagctcagctacaggtaggaccaaggcctttagcacttgtgcctctcacctgactgctgtgatcctcttctatggttctggattcttcatgtacatgcgacccagttccagctactccctaaacagggacaaggtggtgtccatattctatgccttggtgatccctgtggtgaatcccatcatctacagttttaggaataaggagattaaaaatgccatgaggaaagccatggaaagggacctcaggatttctcatggtggaccattcatttttatgaccttgggcta

SEQ ID NO: 33610 - DNA, 992 bp, Macaca Mulatta
  misc_feature (1)...(992): n = A,T,C or G
aggctccagcaatggttgaacagctggacactgnnnnnnnnnnnnnnnnnnnnnnnnnnnnnnnnnnnnnnnnnnnnnnnnnnnnnnnnnnnnnnnnnnnnnnnnnnnnnnnnnnnnnnnnnnnnnnnnnnnnnnnnnnnnnnnnnnnnnnnnnnnnnnnnnnnnnnnnnnnnnnnnnnnnnnnnnnnnnnnnnnnnnnnnnnnnnnnnnnnnnnnnnnnnnnnnnnnnnnnnnnnnnnnnnnnnnnnnnnnnnnnnnnnnnnnnnnnnnnnnnnnnnnnnnnnnnnnnnnnnnnnnnnnnnnnnnnnnnnnnnnnnnnnnnnnnnnnnnnnnnnnnnnnnnnnnnnnnnnnnnnnnnnnnnnnnnnnnnnnnnnnnnnnnnnnnnnnnnnnnnnnnnnnnnnnnnnnnnnnnnnnnnnnnnnnnnnnnnnnnnnnnnnnnnnnnnnnnnctcctctactaatctctgtgtagaaaatcttcagaaaaataaagattcgaatagtataattaaagatagattgtctcaaacggttaggcagaatactaaattcttttttgacccagtccggaagtgtaatggtcagccagtaccttttcaacaaccaaagcacttcacgggaggagtgatnnnnnnnnnnnnnnnnnnnnnnnnnnnnnnnnnnnnnnnnnnnnnnnnnnnnnnnnnnnnnnnnnnnnnnnnnnnnnnnnnnnnnnnnnnnnnnnnnnnnnnnnnnnnnnnnnnnnnnnnnnnnnnnnnnnnnnnnnnnnnnnnnnnnnnnnnnnnnnnnnnnnnnnnnnnnnnnnnnnnnnnnnnnnnnnnnnnnnnnnnnnnnnnnnnnnnnnnnnnatccctacaatgttatatcatggaacccaggaagaacgtcaaaaattggtaagaaatatttacaaacggaaagggactctgcaaattcatcctgtggtaatcacgtcatttgaaatagccatgagagaccgaaatgcgttaca

SEQ ID NO: 33611 - DNA, 406 bp, Macaca Mulatta
gctgagcccccagggtacttcctgcagctgtctttggcctctctgggaatctcaaacctgtgactcagtgggagagggcatggggctggaaccaggcgggtgggagataggaactggggaaggacctttacagcatgcaagagacgccccggccacggggtcagccagagtggagatgctcacatttgttctacctaacgtgccgcccggggcctcacattcagagccgtgcccactcgggggtctcacacaccgatcctcacccacttgaagcttctgccactcagacttgcatgcagtctctccctgttctggggatctggccccaccggagaccacaacgcaccagtctggacatcccaggagcctgccccagctctcagggggtgggaggtgggggtgctga

SEQ ID NO: 33612 - DNA, 4926 bp, Macaca Mulatta
  misc_feature (1)...(4926): n = A,T,C or G
gaaaaaagagtttgatgtggatactctcagtaaatccgagctgcggatgctcctcagcgtgatggaaggggagctggaggccagagacctcgtcatcgaggccctgcgggctcgcaggaaggaggtatttatccaggaacggtatgggagatttaatctaaatgacccattcctggcactccagagagactatgaagcaggtgctggtgacaaagagaagaagccagtgtgtaccaaccccctctccatccttgaagcagtcatggcccactgcaagaaaatgcaagaaaggatgtccgcacagctggctgctgctgagagcagacaaaagaagnagctggaaatggagaagcttcagctacaagcccttgagcaagagcacaagaagctggccgcccgcctcgaggaagagcgcggcaagaacaagcaggtggtcctgatgctggtcaaagagtgcaagcagctctccggcaaggtcatagaggaggcccagaagctcgaagacataatggccaaactggaagaggaaaagaaaaagacaaatgaattagaagaagaactctctgctgagaaacgaagaagcacagaaatggaagctcagatggaaaaacagctctctgagtttgacaccgagcgggaacagcttcgtgccaagctgaaccgggaagaagcacacaccactgacctcaaagaggagatagacaagatgaagaaaatgattgagcaactgaaaaggggaagtgacagtaaaccaagcctctctcttccacggaagacaaaagataggcgtttggtttccatatctgtgggaacagaaggaactgtgacaaggtctgttgcatgccagacagacctagtgacagaaagtgctgaccatgtgaaaaagttgcctttaaccatgcctgtaaaaccttccacagggagccccctagtttctgcaaatgcaaaagggagcgtgtgcactagtgccacaatggccagaccaggtattgacaggcaggcttcccacggtgacttgattggctcttctgtacccgctttcccacctccaagtgcaaacagaattgaggaaaatggaccaagcactgactcaacaccagatccaaccagtagcacacccccacttcccagtaatgctgcccctcccaccactcagacaccaggcatagctcctcagaactcccaggctccacctatgcacagtttacattcaccatgtgccaacgcctctttgcatccaggtctaaacccacgaatccaagcagctagatttagatttcagggcaatgctaacgacccagaccaaaatggaaatactacccaaagtcctccgtcaagagatatgtcacctacaagtcgtgacaacctagtggccaaacaactagctcggaatactgtgacccaagcactgtcaagatttacaagccctcaagcaggtgctccctcaaggcctggagcgcccccaacaggggatgttggcactcaccctccagtcggtcggaccagtttaaagactcacagtgttgcacgagttgacagaggaaatcctcctcctatccctccaaaaaagccagggctctcccaaactccttctccaccacacccccaactcaaggttattatagacagcagcagggcctcgaacacaggggccaaagttgataacaaaactgtggcttcgcctccttccagtttgccacaagggaacagggtgaccaatgaggacaaccttcctaagtcatcctcccctcagctgccaccaaaaccatccatagatttaactgtggcacctgcaggctgtaccgtttcagccctggccacatctcaggtgggtgcctggcctgctgcaacccccggactgaaccaacctgcatgttcagacagttcccttgtcattcctaccaccattgccttttgctcttccataaaccccgttagtgcctcatcctgtagaccaggtgcctcagacagcctcctggtaacagcatcaggnnncaggctggtcaccctccctaacccctttgctaatgagtggtggtcctgcccccctggctggcaggcccacccttcttcagcaagctgctgcccagggaaatgtcactttattatcaatgctgcttaatgaagaaggactggacattaattactcctgtgaagatggccattctgccttgtattctgctgctaagaatggacatacannnnnnnnnnnnnnnnnnnnnnnnnnnnnnnnnnnnnnnnnnnnnnnnnnnnnnnnnnnnnnnnnnnnnnnnnnnnnnnnnnnnnnnnnnnnnnnnnnnntgtgtagaattattaattgcatatgatgctaacattaatcatgctgctgatggaggacagacacctctatacctggcctgtaaaaatgaaaataaagaatgtattaaactcttgttggaagccggaaccaaccgaagtgtaaaaaccacaggatggctggacaccagttcatgcagctgtggacactggtaatgtggacagcctcaagcttcttatgtaccatagaataccagcttgtggaaattctttcaatgaggaggagtccgagtcaggtgtctttgacttggatggaggagaagagagtcctgaaggcatattcaagcctgttgttcctgcagacctcattaaccacgccaacagagaaggctggactgctgcccacatcgctgcttccaaaggttttaannnnnnnnnnnnnnnnnnnnnnnnnnnnnnnnnnnnnnnnnnnnnnnnnnnnnnnnnnnnnnnnnnnnnnnnnnnnnnnnnnnnnnnnnnnnnnnnnnnnnnnnnnnnnnnnnnnnnnntgctcttaaaatacccttaaggatttcagtgggtgagattgaaccaagcaactatggttctgatgacttggaatgcgaaaacacaatatgtgctttaaatatccgcaaacagacatcatgggatgatttttcaaaagcagtgagtcaagctctgacaaatcatttccaagcaatctcttctgatggatggtggagtctggaagacgtgacttgcaataacaccaccaattccaacatcggcctcagtgcaacaagcatacgatccatcacgctaggnnnnnnnnnnnnnnnnnnnnnnnnnnnnnnnnnnnnnnnnnnnnnnnnnnnnnnnnnnnnnnnnnnnnnnnnnnnnnnnnnnnnnnnnnnnnnnnnnnnnnnnnnnnnnnnnnnnnnnnnnnnnnnnnnnnnnnnnnnnnnnnnnnnnnnnnnnnnnnnnnnnnnnnnnnnnnnnnnnnnnnnnnnnnnnnnnnnnnnnnnnnnnnnnnnnnnnnnnnnnnnnnnnnnnnnnnnnnnnnnnnnnnnnnnnnnnnnnnnnnnnnnnnnnnnnnnnnnnnnnnnnnnnnnnnnnnnnnnnnnnnnnnnnnnnnnnnnnnnnnnnnnnnnnnnnnnnnnnnnnnnnnnnnnnnnnnnnnnnnnnnnnnnnnnnnnnnnnnnnnnnnnnnnnnnnnnnnnnnnnnnnnnnnnnnnnnnnnnnnnnnnnnnnnnnnnnnnnnnnnnnnnnnnnnnnnnnnnnnnnnnnnnnnnnnnnnnnnnnnnnnnnnnnnnnnnnnnnnnnnnnnnnnnnnnnnnnnnnnnnnnnnnnnnnnnnnnnnnnnnnnnnnnnnnnnnnnnnnnnnnnnnnnnnnnnnnnnnnnnnnnnnnnnnnnnnnnnnnnnnnnnnnnnnnnnnnnnnnnnnnnnnnnnnnnnnnnnnnnnnnnnnnnnnnnnnnnnnnnnnnnnnnnnnnnnnnnnnnnnnnnnnnnnnnnnnnnnnnnnnngttcaaaggtcaggcgccctcaccctgcgatcctgtgtgcaagattgtcgactgggctctgtccgtctggcgtcagcttaactcctgcctgtcccgcttgggcacacctgaagcacttcttggaccagaatatttcctgtcttgtcctgtagttcctggacatgcccaagtgacagtgaagtngtggatgtctaagctgtggaacggcgtcatcgcgcccagagttcaagaagcaatattgtcaagagcctctgtgaaaagacaacctggctttggacagacaactgctaaaagacacccgagccaaggacagcaagctgtggtcaaagctgctctcagcatcttgctaaataaagctgtactgcatggctgtcccctccccagagcagnnagaactagaccagcatacagctgatttcaaaggaggaagtttccctttatccatagtttccagttataacagttgtaacaaaaagaaaggagagagtggtgcctggagaaaggtgaacaccagtcctcgcaggaagtctggccgcttctctttacccacctggaataagccagacctaagcaccgaaggtannnnnnnnnnnnnnnnnnnnnnnnnnnnnnnnnnnnnnnnnnnnnnnnnnnnnnnnnnnnnntctttagagaatgatctgtcactgacgttgaatttggatcagagactctctctgggttcggatgacgaagcagatcttgtcaaggaacttcagagcatgtgctccagcaagtctgagtctgatatcagcaagnnnnnnnnnnnnnnnnnnnnnnnnnnnnnnnnnnnnnnnnnnnnnnnnnnnnnnnnnnnnnnnnnnnnnnnnnnnnnnnnnnnnnnnnnnnnnnnnnnnnnaggaggtcagtcctctcagcagccatcaaactactgaatgcagcaacagtaaatcaaagactgagttgggtgtttcaagagttaaatcttttcttcctgttcctagaagtaaagtcaccctgtgttcccagaacaccaaaagaagcagcagcagcagtaatacaaggcaaatagaaatcaacaacaactcaaaagaagagaattggaacttacacaaaaatgaacacctagacaaacctaacaaata

SEQ ID NO: 33613 - DNA, 1240 bp, Macaca Mulatta
  misc_feature (1)...(1240): n = A,T,C or G
ggacgttgatgctactaacccaaattatgaaattatgtgtatgatcagagactttagaggaagtttggattatagaccattaacaacagcagatcctnnnnnnnnnnnnnnnnnnnnnnnnnnnnnnnnnnnnnnnnnnnnnnnnnnnnnnnnnnnnnnnnnnnnnnnnnnnnnnnnnnnnnnnnnnnnnnnnnnnnnnnnnnnnnnnnnnnnnnnnnnnnnnnnnnnnnnnnnnnnnnnnnnnnnnnnnnnnnnnnnnnnnnnnnnnnnnnnnnnnnnnnnnnnnnnnnnnnnnnnnnnnnnnnnnnnnnnnnnnnnnnnnnnnnnnnnnnnnnnnnnnnnnnnnnnnnnnnnnnnnnnnnnnnnnnnnnnnnnnnnnnnnnnnnnnnnnnnnnnnnnnnnnnnnnnnnnnnnnnnnnnnnnnnnnnnnnnnnnnnnnnnnnnnnnnnnnnnnnnnnnnnnnnnnnncagctcgagatgtcttttaatgctaagaagcccaactataaggaagctagaacttcaagtatatgcaaccttctttgaaattttatagtggaaaggnnnnnnnnnnnnnnnnnnnnnnnnnnnnnnnnnnnnnnnnnnnnnnnnnnnnnnnnnnnnnnnnnnnnnnnnnnnnnnnnnnnnnnnnnnnnnnnnnnnnnnnnnnnnnnnnnnnnnnnnnnnnnnnnnnnnnnnnnnnnnnnnnnnnnnnnnnnnnnnnnnnnnnnnnnnnnnnnnnnnnnnnnnnnnnnnnnnnnnnnnnnnnnnnnnnnnnnnnnnnnnnnnnnnnnnnnnnnnnnnnnnnnnnnnnnnnnnnnnnnnnnnnnnnnnnnnnnnnnnnnnnnnnnnnnnnnnnnnnnnnnnnnnnnnnnnnnnnnnnnnnnnnnnnnnnnnnnnnnnnnnnnnnnnnnnnnnnnnnnnnnnnnnnnnnnnnnnnnnnnnnnnnnnnnnnnnnnnnnnnnnnnnnnnnnnnnnnnnnnnnnnnnnnnnnnnnnnnnnnnnnnnnnnnnnnnnnnnnnnnnnnnnnnnnnnnnnnnnnnnnnnnnnnnnnnnnnnnnnnnnnnnnnnnnnnnnnnnnnnnntagggtcaaagaattgactgtagatccaactgctgctggtgatgttcgtccaataatgcaccatccaccaaaccagattgatgacttagagacacagtggggtgtggggagttcccctcagagagatgatctaaaacttctttgtgaacaaaatg

SEQ ID NO: 33614 - DNA, 826 bp, Macaca Mulatta
tcctggtctgagctccccctgccttcctcctcctccttccccaggtcgatcctgagagccgttgtctatgcagaaaggtgcttcctctcctggttctgcgaggacatactgtctcctaacacagactaccaggtcacctggtacacatcttggagcccttgcctagattgtgcaggggaggtggccgagttcctggccaggcacagtaatgtgaagctcgccatctttgctgcccgcctctactacttctgggatacacattaccagcaggggctccgcagcctgagtgagaaaggggcctccgtggagatcatgggctacaaaggtgagatgtgggggactgaggggagagggttcgggagggacagcatgaggggcaggtggggctgcaatgccgtggggcgaggcagtgtccccgggaagcctgaagggatggggccagcgtccactgtaactggcagccaggagacctggcctgggaggggagggaccagggcctggagagaggcctgctgggtcctcactgctttctcctcgttttttttcagattttaaatattgttgggaaaactttgtgtacaatggtgatgagccgttcaagccttggaagggactaaaatacaactttctattcctggacagcaagctgcaggagattctcgagtgagcggtctccccaggcctcatggtctgtctcctctagcctcctgctcatgctgcgcgggcctcccctccaccctggaccagctctgcttttgtctggtcatcctgagcccctcctgccctcagggccatttcacagtgctcccctgcctcatcacctccc

SEQ ID NO: 33615 - DNA, 515 bp, Macaca Mulatta
catggcttcatttaacgcacatgtctatcctcctcccaagctactgagacgataaggtctggatggcgaatttggatgcaagtgtagagttttaaacctccagaatttctaggtagaagatacttaggtaaagttaaatatgctctatttttaggcaaacatatttattaattgaatatagaagaaactgtggacacactcagacagcttactgaattttaagatgtcttctgtatcttagaataccagtcagtcattcagagttctaaaagtgtgctttaaaaaattacagcaccggtaggtctattaacacaagtgccggagtcagcagtagcaagactaatgtgatcataaaacatgacgttaggctcgtctgcagttcttgtgtgaaattcctagtgagtgaggaggctcagcttaaagccatcttgcagagtggcccctcattgtggtcttttgctgggacaaatgctagaaagagactaggtagagcaaaattgttagcttatggctag

SEQ ID NO: 33616 - DNA, 97 bp, Macaca Mulatta
ccgggacggcagccgcaccatgtagtctcccagttcatctaactcttatttctccgttggtccaaccagtcccagcgctgtcgtgctcctctactcg

SEQ ID NO: 33617 - DNA, 589 bp, Macaca Mulatta
  misc_feature (1)...(589): n = A,T,C or G
agccgcccgagtccccgccgccgccactgctgccgccgcagcagcagcagcgtgcgcannnnnnnnnnnnnnnnnnnnnnnnnnnnnnnnnnnnnnnnnnnnnnnnnnnnnnnnnnnnnnnnnnnnnnnnnnnnnnnnnnnnnnnnnnnnnnnnnnnnnnnnnnnnnnnnnnnnnnnnnacagcggcaagatcgtgatcaacgtgggcggcgtgcgccatgagacgtaccgctcgacgctgcgcaccctgccggggacgcggctggccggcctgacggagcccgaggcggcggcacgcttaaaatacgacccgggcgccgacgagttcttctttgaccggcacccgggagtcttcgcgtacgtgctcaactactaccgcaccggcaagctgcactgcccggccgacgtgtgcgggcccctgtttgaggaggagctcggcttctggggcatcgacgagaccgacgtggaggcctgctgctggatgacctaccggcagcaccgcgacgccgaggaggcgctcgaatccttcgaggcgcccgacccagcgggcgccgccaacgccgccaacgccgcgggcgcccacgacgga

SEQ ID NO: 33618 - DNA, 533 bp, Macaca Mulatta
  misc_feature (1)...(533): n = A,T,C or G
atgtctgggggcaaatacgtagactcggagnnnnnnnnnnnnnnnnnnnnnnnnnnnnnnnnnnnnnnnnnnnnnnnnnnnnnnnnnnnnnnnnnnnnnnnnnnnnnnnnnnnnnnnnnnnnnnnnnnnnnnnnnnnnnnnnnnnnnnnnnnnnnnnnnnnnnnnnnnnnnnnnnnnnnnnnnnnnnnnnnnagattgactttgaagatgtgattgcagaaccagaagggacacacagtttcgatggcatttggaaggccagcttcaccaccttcactgtgacgaaatactggttttaccgcttgctgtctgccctctttggcatcccaatggcgctcatctggggcatttacttcgccattctctctttcctgcacatctgggcagttgtaccatgcattaagagcttcctgattgagattcagtgcatcagccgtgtctattccatctacgtccacaccgtctgtgacccactctttgaagctgttgggaaaatattcagcaatgtccgcatcaacttgcagaaagaaata

SEQ ID NO: 33619 - DNA, 813 bp, Macaca Mulatta
cctcctgctgtcttgtgtgtcagtctccctgaagtgaccgtgagcgctcttagcctctggtggcctctccctctgccattgtgacattctttcccctcttcctgagatgccctctgcctgtcctgtgtgtgcttcagccctctttgtttttctgttgtgtgtcctctctccagaggtctggggtgactgctgtggtcttgccttggggtgagctctctggccctaccagagagacctgaggcttgacatttccaagccccatatccctttcctgcccagtgtgagcgggtttggggcttagagcaggagacctgggtaggacagggatcctttgagcaatcccgagaaatcctggagagaggttgtgcctggaggtggccctcgccaagatgctccgggagggtgtccctcctccgcccgcccccaggggcctgctctttgactgaggagaataagggctaccgctcccagcacaggggccacagcccagcctgggggtgggaggggcctgccgcctccagccctggcacagagctccctgactcttgactgcttccttgtttggcagctggaaccacccgatatggaccaagatgcccaatcccatgccagtgtctcctgggttgtggaccccaaaccagactctaagcggagcctcagcaccaagtatgagaccactatcttctaaaacaacccactccctgtctccactagtctcactgtgcctttgccatccgatctttctgctgtcctcaactctgtccttccagctgctgatgccaaggccccaactgcactgggacctgctcctcc

SEQ ID NO: 33620 - DNA, 800 bp, Macaca Mulatta
  misc_feature (1)...(800): n = A,T,C or G
gggcagcgttttcatatccacgatcaattccctctctcagcacagcctggggagggggtcattgttctcatccatcggggatctcagaggctcagagactgcaagctgcttgcccaagtcacacagctagtgaagaccagggcagtttcacctggttgtgactccaagctcagtattctctccactaccccataccagctttggtgccaccaaaagcactccccaaaaggaaggagaatgggacttttcttttgaggcatgcacatctggaattaaggtcaaacgaattctcacattcctctgaaattaaacttctgttaggaacagcagtgttctcacagtgtggggcagccatccttctgatggaaacaatggttttgacactgtccctctttggtagttgcattagtaactttgaaaggtacatgactgagcatagcatataggttaacttgcagaaacagtacgtaggtaattgtagggtgagggattataaatgaaatgtgcaaaatcacttagcagcaactgaagaccattatcaaccacgtggagaaaatcaaactgagcagggctgtgtgaaatatcgttgtaatatgcagactgcgaacactgaactctacgcaactccacaaatgatgttttcaggtgtcatggactgttgccaccatgtattcattcagaagttattaaagtttaaagttgcacatccaannnnnaannnnnnnnnnnnnnnnnnnnnngttcggccgcctcggccccttgaaaaactttctagaacatttcgtttggcgccgcgggcc

SEQ ID NO: 33621 - DNA, 568 bp, Macaca Mulatta
gcacgacgccaacgccatggacgtggtggtccagtaccctctgcaccgcctgcacttctcgcccgcgcacgtggtggtctacggctggtctgttggcggcttcacggccacctgggccaccatgacctacccggggctgggtgcactggtgctggacgccaccttcgacgacctcgtgccgctggcgctgaaggtcatgccccacagctggaagggtctggtggtgcgcaccgtgcgccagcacttcaaccttaacgtggccgagcagctgtgctgctacccggggccggtgctgctgctccgacgcacgcaggacgacgtggtcagcacctcggttcttctgcgccccctgtcacccggcggcgtggagggcaaccggggcaacgagctgctgctgcgcctgctggagcaccgctaccccgccgtgatggcgccggagggccgtgcagtcgtcattcgctggctgcgcgctggcagcttggcgcaagaggccgccttctatgcacgctaccgcgtggacgaggagtggtgcctggcgctgctgcgctcctaccgtgcacgctgcgaa

SEQ ID NO: 33622 - DNA, 913 bp, Macaca Mulatta
cgtgatggggcgcttcccgcagctcctggacccccagcagctggctgccgagatcctctcttacaagtcccagcaccccagtgagtaagctgcccgtggctggaaagggcagcacccccagcctccacgggctgtcaggctgggccttgggccatcgagcagcccattcccagccctgaggcccaccccggagactggacagagggaggattcaagttgggaaggaaacccacaaaccaaagatactgtaggattggttctggcccatgcagcacctctagctgtctgcctgagtgggtcagaaacgatcaccctgttgatacacattgtatctctgtagtttaaggagacgctgccggtaacggcgtcagtccatggctgaggcccaaaccgtcttttctctcggagggtggggagagaggtgggggcagcagaggcctgggctgggtgccctgtgcacgccaccccacttccgccctacccctgggacgttggccttggctggctagttgggcactgtgtgcccgccctccaagggcctcctctatgcctatgaggcctcatccgtgctctcgctgggcatgtggcttcatgtcagtaagcaagatgcttcttaataacctaccttctgccccactctgttccttatcccactgcccctgtaggggtcaagggccctctgtctacactctctcctcctcctccatcctctattcagagtcatctcgcccttccccacaggtgggggaacatgtgtatgtgtacacatgtaaattttaaatattttaagcagaaagtccttacctcctgtaatacatcaataaagtacaatcaatgcgagccctttcaagaggtgattgtctttgttacgctccagggcgttgggctggcctctggggaggaaaggccagca

SEQ ID NO: 33623 - DNA, 810 bp, Macaca Mulatta
  misc_feature (1)...(810): n = A,T,C or G
nnnnnnnnnnnnnnnnnnnnnnnnnnnnnnnnnnnnnnnnnatatttgtacttcttatttgctcctacccttatctaccgtgacagctatcccaggaatcccactgtaagatggggttatgtcgctatgcagtttgcacaggtctttggttgctttttctatgtgtactacatctttgaaagactttgtgcccccttgtttcggaatatcaaacaggagcccttcagcgctcgtgttctggtcctatgtgtatttaactccatcttgccaggtgtgctgattctcttccttactttttttgcctttttgcactgctggctcaatgcctttgctgagatgttacgctttggcgacaggatgttctataaggattggtggaactccacgtcatactctaactattacagaacctgggaatgtggtggtccatgactggctatattactatgcttacaaggactttctctggtttttctccaagagattcaaatctgctgccatgttggctgcctttgctgtaatctgctgtagtacacgaatatgccttggctggttggcttgaactttttctatcccgtggctctttgggctcctcatggttccttggaaatggcttttcaacttcattggtcaatgaaaagccgggaaaaagccaattttggaaatggttatgatgggggacttctcttttttcttgggccaatgggatgcctacctccggctttttattcctcaaaaagggggaatgccccggccaaccattggtccctcttaaaaaaactccccaatttttttggaataaggcccccg

SEQ ID NO: 33624 - DNA, 226 bp, Macaca Mulatta
cgggccatctcctttgtgaccaagaacttcttttccaaagccaatggaaacagaagcagcgctcccaacgtggtggtggtgatggtggatggctggcccacggacaaagtggaggaggcttcgagacttgcgagagagtcaggaatcaacattttcttcatcaccattgaaggtgctgctgaaaatgagaagcagtatgtggtggagcccaactttgcaaacaagg

SEQ ID NO: 33625 - DNA, 150 bp, Macaca Mulatta
taaaaatattaactgacgaagaagcaactgagttaataacaatgactcttaaaacatgtaatagaagatttacaaaagcaattttcatttacctttccagtatgaaaagctatgttaaaatatagaaaactaatctaacctgtagctgta

SEQ ID NO: 33626 - DNA, 128 bp, Macaca Mulatta
caggtgtggacgggacagtgagtggctgggaggaagccagaatcaacagctccagccctctgcgctacaaccgccagatcggggagttcatagtcacccgggctgggctctactacctgtactgtcag

SEQ ID NO: 33627 - DNA, 3334 bp, Macaca Mulatta
  misc_feature (1)...(3334): n = A,T,C or G
agccctgaggcgggcggcggcggaggggccctcaaggcgagcagcgtgcccgcggcgtccgcgggactgcnnnnnnnnnnnnnnnnnnnnnnnnnnnnnnnnnnnnnnnnnnnnnnnnnnngctgcgcaaagtgcggagtgtggagctggaccagctgcctgagccgccgctcttccttgccgcctcaccgccgtcctcctcgacttccccgtcgccggagcccgcggacgcagcggggagtgggaccggcttccagcctgtggcggtgccgccgccccacggagccgcgagccgcggcggcgcccacnnnnnnnnnnnnnnnnnnnnnnnnnnnnnnnnnnnnnnnnnnnnnnnnnnnnnnnnnnnnnnnnnnnnnnnnnnnnnnnnnnnnnnnnnnnnnnnnnnnnnnnnnnnnnnnnnnnnnnnnnnnnnnnnnnnnnnnnnnnnnnnnnnnnnnnnnnnnnnnnnnnnnnnnnnnnnnnnnnnnnnnnnnnnnnnnnnnnnnnnnnnnnnnnnnnnnnnnnnnnnnnnnnnnnnnnnnnnnnnnnnnnnnnnnnnnnnnnnnnnnnnnnnnnnnnnnnnnnnnnnnnnnnnnnnnnnnnnnnnnnnnnnnnnnnnnnnnnnnnnnnnnnnnnnnnnnnnnnnnnnnnnnnnnnnnnnnnnnnnnnnnnnnnnnnnnnnnnnnnnnnnnnnnnnnnnnnnnnnnnnnnnnnnnnnnnnnnnnnnnnnnnnnnnnnnnnnnnnnnnnnnnnnnnnnnnnnnnnnnnnnnnnnnnnnnnnnnnnnnnnnnnnnnnnnnnnnnnnnnnnnnnnnnnnnnnnnnnnnnnnnnnnnnnnnnnnnnnnnnnnnnnnnnnnnnnnnnnnnnnnnnnnnnnnnnnnnnnnnnnnnnnnnnnnnnnnnnnnnnnnnnnnnnnnnnnnnnnnnnnnnnnnnnnnnnnnnnnnnnnnnnnnnnnnnnnnnnnnnnnnnnnnnnnnnnnnnnnnnnnnnnnnnnnnnnnnnnnnnnnnnnnnnnnnnnnnnnnnnnnnnnnnnnnnnnnnnnnnnnnnnnnnnnnnnnnnnnnnnnnnnnnnnnnnnnnnnnnnnnnnnnnnnnnnnnnnnnnnnnnnnnnnnnnnnnnnnnnnnnnnnnnnnnnnnnnnnnnnnnnnnnnnnnnnnnnnnnnnnnnnnnnnnnnnnnnnnnnnnnnnnnnnnnnnnnnnnnnnnnnnnnnnnnnnnnnnnnnnnnnnnnnnnnnnnnnnnnnnnnnnnnnnnnnnnnnnnnnnnnnnnnnnnnnnnnnnnnnnnnnnnnnnnnnnnnnnnnnnnnnnnnnnnnnnnnnnnnnnnnnnnnnnnnnnnnnnnnnnnnnnnnnnnnnnnnnnnnnnnnnnnnnnnnnnnnnnnnnnnnnnnnnnnnnnnnnnnnnnnnnnnnnnnnnnnnnnnnnnnnnnnnnnnnnnnnnnnnnnnnnnnnnnnnnnnnnnnnnnnnnnnnnnnnnnnnnnnnnnnnnnnnnnnnnnnnnnnnnnnnnnnnnnnnnnnnnnnnnnnnnnnnnnnnnnnnnnnnnnnnnnnnnnnnnnnnnnnnnnnnnnnnnnnnnnnnnnnnnnnnnnnnnnnnnnnnnnnnnnnnnnnnnnnnnnnnnnnnnnnnnnnnnnnnnnnnnnnnnnnnnnnnnnnnnnnnnnnnnnnnnnnnnnnnnnnnnnnnnnnnnnnnnnnnnnnnnnnnnnnnnnnnnnnnnnnnnnnnnnnnnnnnnnnnnnnnnnnnnnnnnnnnnnnnnnnnnnnnnnnnnnnnnnnnnnnnnnnnnnnnnnnnnnnnnnnnnnnnnnnnnnnnnnnnnnnnnnnnnnnnnnnnnnnnnnnnnnnnnnnnnnnnnnnnnnnnnnnnnnnnnnnnnnnnnnnnnnnnnnnnnnnnnnnnnnnnnnnnnnnnnnnnnnnnnnnnnnnnnnnnnnnnnnnnnnnnnnnnnnnnnnnnnnnnnnnnnnnnnnnnnnnnnnnnnnnnnnnnnnnnnnnnnnnnnnnnnnnnnnnnnnnnnnnnnnnnnnnnnnnnnnnnnnnnnnnnnnnnnnnnnnnnnnnnnnnnnnnnnnnnnnnnnnnnnnnnnnnnnnnnnnnnnnnnnnnnnnnnnnnnnnnnnnnnnnnnnnnnnnnnnnnnnnnnnnnnnnnnnnnnnnnnnnnnnnnnnnnnnnnnnnnnnnnnnnnnnnnnnnnnnnnnnnnnnnnnnnnnnnnnnnnnnnnnnnnnnnnnnnnnnnnnnnnnnnnnnnnnnnnnnnnnnnnnnnnnnnnnnnnnnnnnnnnnnnnnnnnnnnnnnnnnnnnnnnnnnnnnnnnnnnnnnnnnnnnnnnnnnnnnnnnnnnnnnnnnnnnnnnnnnnnnnnnnnnnnnnnnnnnnnnnnnnnnnnnnnnnnnnnnnnnnnnnnnnnnnnnnnnnnnnnnnnnnnnnnnnnnnnnnnnnnnnnnnnnnnnnnnnnnnnnnnnnnnnnnnnnnnnnnnnnnnnnnnnnnnnnnnnnnnnnnnnnnnnnnnnnnnnnnnnnnnnnnnnnnnnnnnnnnnnnnnnnnngaagccatccagttgggcgtagaagacactttggatggtcaacaggacagctttttgcaggcatctgttcccagtgactatccggaaaccacagagaagagttcccctgagtgcacaatccatttagagaaaactggaaaaggattatgtgctacaaaattgagtgccagttcagaggacatttctgagagactggccagcatttcagtaggaccttctagttcaacaacaacnnnnncaacaacaacagagcaaccaaagccaatggttcaaacaaaaggcaggccccatagtcagtgtttgaactcctctcctttatctcctcattcccaattaatgtttccagccttgtcaagcccttcttcttcggccccatctgtaccagctggcactgcaacagatgtctctaagcatagacttcagggattcgttccctgcaaaataccttctgcatctcctcaaacacagcgcaagttttctctacaattccacagaaactgtcctgaaaacagagactcagataaactttccccagtctttactcagtcaagacccttgccctccagtaatatacacaggccaaagccatctcgacctaccccaggtaatacaagtaaacagggagatccctcaaaaaatagcatgacacttgatctgaacagtagttccaaatgtgatgacaactttggctgtagcagcagtagtagtaatgctgttatacccagtgatgagacggtgttcaccccagtagaggagaaatgcagattagatgtcaatacgagaactcaactccagtat

SEQ ID NO: 33628 - DNA, 1230 bp, Macaca Mulatta
  misc_feature (1)...(1230): n = A,T,C or G
tattgaaattgccaaaaacagaggagcaagatacaggcttggaccagagctggaaatatgnnnnnnnnnnnnnnnnnnnnnnnnnnnnnnnnnnnnnnnnnnnnnnnnnnnnnnnnnnnnnnnnnnnnnnnnnnnnnnnnnnnnnnnnnnnnnnnnnnnnnnnnnnnnnnnnnnnnngcctgtaatgcaccgaaatgtccgctacaactgcagagtgatattcctcaacagnnnnnnnnnnnnnnnnnnnnnnnnnnnnnnnnnnnnnnnnnnnnnnnnnnnnnnnnnnnnnnnnnnnnnnnnnnnnnnnnnnnnnnnnnnnnnnnnnnnnnnnnnnnnnnnnnnnnnnnnnnnnnnnnnnnnnnnnnnnnnnnnnnnnnnnnnnnnnnnnnnnnnnnnnnnnnnnnnnnnnnnnnnnnnnnnnnnnnnnnnnnnnnnnnnnnnnnnnnnnnnnnnnnnnnnnnnnnnnnnnnnnnnnnnnnnnnnnnnnnnnnnnnnnnnnnnnnnnnnnnnnnnnnnnnnnnnnnnnnnnnnnnnnnnnnnnnnnnnnnnnnnnnnnnnnnnnnnnnnnnnnnnnnnnnnnnnnnnnnnnnnnnnnnnnnnnnnnnnnnnnnnnnnnnnnnnnnnnnnnnnnnnnnnnnnnnnnnnnnnnnnnnnnnnnnnnnnnnnnnnnnnnnnnnnnnnnnnnnnnnnnnnnnnnnnnnnnnnnnnnnnnnnnnnnnnnnnnnnnnnnnnnnnnnnnnnnnnnnnnnnnnnnnnnnnnnnnnnnnnnnnnnnnnnnnnnnnnnnnnnnnnnnnnnnnnnnnnnnnnnnnnnnnnnnnnnnnnnnnnnnnnnnnnnnnnnnnnnnnnnnnnnnnnnnnnnnnnnnnnnnnnnnnnnnnnnnnnnnnnnnnnnnnnnnnnnnnnnngccttggacctgcctgctggctctgggattttttaagacgaagccaacaggnnnnnnnnnnnnnnnnnnnnnnnnnnnnnnnnnnnnnnnnnnnnnnnnnnnnnnnnnnnnnnnnnnnnnnnnnnnnnnnnnnnnnnnnnnnnnnnnnnnnnnnnnaggaagtgctggctgatgtcagcaccatcgtgaaccagatcagctacacccctcaggatccccgagacctctgtgggcgcatactgaccacctgctacatggccagcaagaactcctcccaggagacgtgcacccgggccagagagttggcccagcagattggaa

SEQ ID NO: 33629 - DNA, 418 bp, Macaca Mulatta
  misc_feature (1)...(418): n = A,T,C or G
gagacctttagtgaatccaggataagcgagtggacatttcaaccctttactnnnnnnnnnnnnnnnnnnnnnnnnnnnnnnnnnnnnnnnnnnnnnnnnnnnnnnnnnnnnnnnnnnnnnnnnnnnnnnnnnnnnnnnnnnnnnnnnnnnnnnnnnnnnnnnnnnnnnnnnnnnnnnnnnnnnnnnnnnnnnnnnnnnnnnnnnnnnnnnnnnnnnnnnnnnnnnnnnnnnnnnnnnnnnnnnnnnnnnnnnnnnnnnnnnnnnnnnnnnnnnnnnnnnnnnnnnnnnnnnnnnnnnnnnnnnnnnnnnnnnnnnnnnnnnnnagatgcagcacctgctcagggagagggaacaaaacctgcgccacctgcaagggggagaagaagctgttgcacttcatccagctggtcatcatgtg

SEQ ID NO: 33630 - DNA, 853 bp, Macaca Mulatta
acccttgcagtagagggtggttcaggaatggaaagcagagagtggagaagatgaagtccttatctttgtctttgcatacacagagcaagctataccagagaatcagatagcaagccctccttcagaggccaagggagcagaagagccatcgatgggccccttcccaggacagcaggggtagaagtgggagaggggagcatttgtgactattctattactctgacctcccaggactggacctacagagacatctgggactttctgcgtcagttgtttgtcccatactgtatcctgtatgaccgagggtaagggtattaggggaagggaatgggtaagggagtttttagggtgctggaatagggagggccagtaggattgcacaccctaccacatacttgccctctaccctccctgctccagatacacatcactggggagtcgggagaataccgtgcggaacccggctttgaagtgcctgagcccaggaggacaccccacataccgtccagcctacctactggagaacgaagaagaggagcgaaactcccgcacatgacctcccaccctaggagggagggaaggacactgttctagggtataacctggcaataaaccatgcctgtcactgtgcctgttgctctagctgtgtcttcctgctccagaggatgggagaagcagaattgggtcaaatgctgccagctctgactggctgtgctcactttaaggggcagggcagaacaggctggaaaggagctctcactgatggttctcaatgtcagcctcagcaggagcccaccagagggcagaagcaggagttgtgccaaacagggggaaaagggcaatcaggcagggc

SEQ ID NO: 33631 - DNA, 987 bp, Macaca Mulatta
  misc_feature (1)...(987): n = A,T,C or G
ggggattcaggggcggccggctttgttgggtgtgcttggtttggtgtccctgcggctgaccgtgattggtgattcgcagcatcttcgtaaccgctaacaggtcaaaatgcagatcttcgtgaagaccctgaccggcaagaccatcacccttgaggtggagcccagntgnanncaccatcgnaaaaaatgttgaaaaagggccaaaaattcaagggataaagggaagggcattttccccnccggaaccaagaaaaaggtttatttctttttgcgggcaaacccccctggaaaaataggccccccctccttttttagnnnnnnnnnnnnnnnnnnnnnnnnnnnnnnnnnnnttcccccccnnccccccggnngtcaccgcccccctctctttttgcttttaaggaaatgtgaatgccccgcccccctgttttttcnnnnnccccnnnnannnnnncagtgagaggggtgtgtgtttnnnnnnnnnnnnnnnnnnnnntatattttntnctttcttgnnnntgtagagnnnnnnnnnnataaacataaccncannnnnnnnnnnnnnnnnnnnnnnnnnnncctactaccgcattcacccagttggatgagcgcttatcgcctacatatacatgagctccatattaggnntagacaccaaaagtacttttaccgccncgacctatataagtgnactccaccccacaacnncccattgtgtccaaaggacgcacgnnnnaagaagtgtaaataatctcgtaattatatcgccacgatagagtgcacgatagaggacggcaagnccgccccggttatgtcncctacaccgagctgatatcatggaagaactnatatatattagcacccttatatgccccgtgctaacggtttagttacgccgcatacgacaaggcagcagtaaaattcantcacgccatgannagagaaaggaanacncgcgaccgcacacctnctagttctaagccaccg

SEQ ID NO: 33632 - DNA, 164 bp, Macaca Mulatta
agggagcctcactgggactgcgttcaggtcgctcaggtactcatggcagggatggaatttaatccctgcctgattctgaggtctcttctctcatcatgcacttaatgaagcaaccactgattgggcaccccttggccgtaagtttgcagcatcgctgttgattt

SEQ ID NO: 33633 - DNA, 506 bp, Macaca Mulatta
gggacaatggtgggcagttgctcttacatgagccatgtatggagacctgaggcccctttgtcctcactgggtgggccaaggtctgggacctgtgttggactgtgggagtctcaccctcaccttgccaggcctctcccctgcaggactggtactgcactagtctgaggtggccactgcctttgatgaacctttgtgtgccagggtctaagtagggtcgaacacagaagtgggaaggagagaggtgggccaggggctaatggtgtcactgtgtaaagtttttgacttatgagctgtataaatatatgaatacggacaaaataaagtggacttctcttccttgtctttcctaccgccagccctgggtatgacctgctccccccactgggtggagggtctttatgaaatgtacatttcttcttttccctccctcaaatcccacccctgccagttgcctgcacctcacatttcccgtggaacggccttgccttttaggttgggggtcatgg

SEQ ID NO: 33634 - DNA, 243 bp, Macaca Mulatta
  misc_feature (1)...(243): n = A,T,C or G
gggtgtgcccagtgaggccaggcagtgtgactacaccggccagtactactgcagccactgccactggaacgacctggctgtcatccctgcacgcgtggtgcacaactgggactttgagcctcgaaaggtnaggtatctcgctgcagcatgcgctacctggcgctgatggtgtctcggcccgtgctcaggctccgggagatcaaccctctgctgttcaactacgtggaggagctggtggagatt

SEQ ID NO: 33635 - DNA, 1276 bp, Macaca Mulatta
  misc_feature (1)...(1276): n = A,T,C or G
actgcaataaggtcactgatcagtgcctgtccttcttcaaacgctgtggaaacatctgtcacattgacctgaggtactgcaagcaagtcaccaaggaaggctgtgagcagttcatagccgagatgtctgtgagtgtccagttnnnnnnnnnnnnnnnnnnnnnnnnnnnnnnnnnnnnnnnnnnnnnnnnnnnnnnnnnnnnnnnnnnnnnnnnnnnnnnnnnnnnnnnnnnnnnnnnnnnnnnnnnnnnnnnnnnnnnnnnnnnnnnnnnnnnnnnnnnnnnnnnnnnnnnnnnnnnnnnnnnnnnnnnnnnnnnnnnnnnnnnnnnnnnnnnnnnnnnnnnnnnnnnnnnnnnnnnnnnnnnnnnnnnnnnnnnnnnnnnnnnnnnnnnnnnnnnnnnnnnnnnnnnnnnnnnnnnnnnnnnnnnnnnnnnnnnnnnnnnnnnnnnnnnnnnnnnnnnnnnnnnnnnnnnnnnnnnnnnnnnnnnnnnnnnnnnnnnnnnnnnnnnnnnnnnnnnnnnnnnnnnnnnnnnnnnnnnnnnnnnnnnnnnnnnnnnnnnnnnnnnnnnnnnnnnnnnnnnnnnnnnnnnnnnnnnnnnnnnnnnnnnnnnnnnnnnnnnnnnnnnnnnnnnnnnnnnnacattatgcagaactatttttgtacaaattgtttaaaagttatttatgcaaggttgaatgcataccagtgtttttattgttttgagattgccaattntcctgatttccttaaggtaggagagaatttaacgtgtacttcatcgacacaacccatctacaaatgtgcccagatctaacaaagcaggctaagaccttccacttaaaagcatgtttaactggaagttgagagcctgctttgtacctcaagagttacatgagcatgttgtggataaatgtaaattatagttgaagtaagatactctgccaggtttcctctgtagaaaattcacttttctcaaattttaaaatttcgacttcagcctttgcactcaggagggtctgctccagcatgagctcttgtacttacatagatctaatttatacagtgagtcaagacgtagaataaatgctcccacatagcctttcttttgcttttttctctcctctgaagtgtgacttgagttctcatttaggtttgtaacatggctatttcctagttgtaaagttctgcatttataagtgccattgttgtaaggtggtgtttcctagaccttccctgatgcgattttacctttgttgaatttgtataaacaattgta

SEQ ID NO: 33636 - DNA, 454 bp, Macaca Mulatta
gatctgcagcccccaacctaggattccaccgccatcaccacggccctggaaacacctgcacagacactttgagacatgcccgacaacctaattttgtacagagaccccagatctctcaggagaccccctcacagacccctcacaaggcctggggaggcacctgcccagagtccagcctcataaagaacacctattctgtgtcttttgtcttttctagatgcccattgctgatgccccctgtcagccccggtcactggcaaggcaggcattttgatgacactgtggatctcaggcaaagggatcaaagcggcatcaggtatggtaaggaggagagtcttgctaggaaagactaatgtggtaggtcgggagctcaggatggagggcttgggggactatgaagagtagctttaataaaaggtctatctaggagtacaggaatactgcagatactgct

SEQ ID NO: 33637 - DNA, 754 bp, Macaca Mulatta
gggggagctacgccaaccgtccgaggtcgcgcaggcgctggtaccaagttggtccgccggttgccgcgttgtgaggggtgtccgcgcagtgcatcccagccagctcttagtgtggagcagtgaactgtgtgtggttccttctacttgaggatcatacagagagcttcacgtctgaagagagagctgcacatgttagccacagagccacccccaggcatcacatgttggcaagataaagaccaaatggatgatctgcgagctcaaatattaggtggagccaacacaccttatgagaaaggtgtttttaagctagaagttatcattcctgagaggtacccatttgaacctcctcagatccgatttctcactccaatttatcatccaaacattgattctgctggaaggatttgtctggatgttcttaaattgccaccaaaaggtgcttggagaccatccctcaacatcgcaactgtgttgacctctattcagctgctcatgtcagaacccaaccctgatgacccgctcatggctgacatatcctcagaatttaaatataataagccagtcttcctcaagaatgccagacagtggacagagaagcatgcaagacagaaacaaaaggttgatgaggaagagatgcttgataatataccagaggctggcgactccaaagtacacaactcaacacagaaaaaggagggccagttaagctagtaaggcgtagaaaaagaaattttcatccctggataattta

SEQ ID NO: 33638 - DNA, 759 bp, Macaca Mulatta
aaagcagaagccattgcctccattgtttaccttgggtccacctccaccaaaacccaacagaccaccacatgttgacctgacgaaattcctcaaaacctcttctggaaacagtactagcaaaggccagacgtcttactcaacaacttctccgccaccacctccaccatcccatccggccagccagccaccattgccagcatctcacccatcacaaccaccagtcccaagcctacctcccagaaacattaaacctccgtttgacctaaaaaaccctgtcaatgaagacaatcaagatggtgtcatgcactctgatggtgctggaaacctagatgaggaacaagagagtgaaggagaaacatatgaagacatagaagcatccaaagaaagagagaagaaaagagaaaaggaggaaaagaagaggttagcagctggagaaaaaggaacagaaagcagaaagcaaaagaaagaacaagaaataaagaagaaatttaaactaacaggccctattcaagtcatccatcttgcaaaagcttgttgtgatgtcaaaggaggaaagcaatgaactgagcttcaagcaaggagagcaaattgaaatcatccgtatcacagacaacccagaaggaaaatggctgggcagaacagcccaggggttcatatggctatattaaaacaactgctgtagagatcgactatgattctttgaaactgaaaaaagactctcttggtgccccgtcaagaactattgaagatgaccaagaa

SEQ ID NO: 33639 - DNA, 830 bp, Macaca Mulatta
  misc_feature (1)...(830): n = A,T,C or G
gcagcctctggccccgaagctactgctagcaagactcgagagctggcgggcgggggctgaagccgacaggcgcggaagccggcgcggcgtcaagtggagctccgacgcacggaccaggcccatttccctttcatcnnnnnnnnnnnnnnnnnnnnnnnnnnnnnnnnnnnnnnnnnnnnnnnnnnnnnnnnnnnnnnnnnnnnnnnnnnnnnnnnnnnnnnnnnnnnnnnnnnnnnnnnnnnnnnnnnnnnnnnnnnnnnnnnnnnnnnnnnnnnnnnnnnnnnnnnnnnnnnnnnnnnnnnnnnnnnnnnnnnnnnnnnnnnnnnnnnnnnnnnnnnnnnnnnnnnnnnnnnnnnnnnnnnnnnnnnnnnnnnnnnnnnnnnnnnnnnnnnnnnnnnnnnnnnnnnnnnnnnnnnnnnnnnnnnnnnnnnnnnnnnnnnnnnnnnnnnnnnnnnnnnnnnnnnnnnnnnnnnnnnnnnnnnnnnnnnnnnnnnnnnnnnnnnnnnnnnnnnnnnnnnnnnnnnnnnnnnnnnnnnnnnnnnnnnnnnnnnnnnnnnnnnnnnnnnnnnnnnnnnnnnnnnnnnnnnnnnnnnnnnnnnnnnnnnnnnnnnnnnnnnnnnnnnnnnngtagaggagatggtgggcaggctctggaggctgaagcggaggaggggaaggaaacgagtccggaaaccctgggccaatcagacagggctggggcggggtctgctgcagggcttagcgctgcaggcttctggcgggaacgctaacctggtcgatcctgggtctcagccccgcggacagcttttcacgagtcttcaagccttcag

SEQ ID NO: 33640 - DNA, 661 bp, Macaca Mulatta
gcattgtgaaaaatgctgctatgatattattataagccttatgtacttatctttgtatgtttgtatttgtatgtgtgtttctcttgactgtacacctgtgaatggaattactggatgttaagttgataaggaatacaaatcggtaacaaaaccaaagccactaagtcaacctgaaatgagtcctgctgcatctgcagccgtcagaaatgatgtcacaaagcaacgtgctgcaccaaaagtctctcctcatgttaagcctgagcagaaacagagggtggcccagcaggaatctatcagagaagagtttcggaaagactgtttgccagttatggtactgaaagcaacaaagcccttcacgtttgagacccaagaaggcaagcaagagatgtttcatgctacggtggctacagagaaggaattcttctttgtaaaagtttttaatacactgctgaaagataaattcattccaaagagaatgattataatatcaagatattatcagcacagtggtttcttagaggtaaatagcgcctcatgtgtgttagatgctaaatctgaccaaaaggttgatgtcccgctgaacattatcagaaaagctggtgaaaccccaaagatcaacacgcttcaaactcagccccttggaacaattgtgaatgggttg

SEQ ID NO: 33641 - DNA, 296 bp, Macaca Mulatta
cttaggaaattgagaggctgactgaacgactagaagaaaaagagagggagatgcagcagctactgagccagccccagcacgagcgagagaaggaagtcgtcctgctacggaggagcatggcggaaggggagcgcgcccgggccgccagtgatgtcctgtgccgctccttggttaatgagacctttcaactacttagtacgcttaccgccattgcccatatgtgttcagcttctggcccatcgtctggatgaacgacagcatgcacacaggaatgtgggggagagaagtcctgacca

SEQ ID NO: 33642 - DNA, 1252 bp, Macaca Mulatta
  misc_feature (1)...(1252): n = A,T,C or G
cagactgaagggctcccggctgaaggtgaggttctgcaccaatgagtcacagaagtcccgggcagagctggtggggcagcttcggaggctgggatttgacatctctgagggggaggtgaacgccccggcaccggccgcctgccagatcctgaaggagcgaagggtgcgaccatacctgctcatnnnnnnnnnnnnnnnnnnnnnnnnnnnnnnnnnnnnnnnnnnnnnnnnnnnnnnnnnnnnnnnnnnnnnnnnnnnnnnnnnnnnnnnnnnnnnnnnnnnnnnnnnnnnnnnnnnnnnnnnnnnnnnnnnnnnnnnnnnnnnnnnnnnnnnnnnnnnnnnnnnnnnnnnnnnnnnnnnnnnnnnnnnnnnnnnnnnnnnnnnnnnnnnnnnnnnnnnnnnnnnnagtatgcctgtggcatcaaagccgaggtagtggggaagccttctcctgagtttttcaagtctgccctgcaagccataggagtggaagcccaccagnnnnnnnnacccnccaggcccagtgacgagcaccatccggaagtgaaggctgatgggtacgtggacaacctcgcagaggcggtggacctgctgctgcagcacacggacaagtgacagcctcctgggagagccctgcttcctccacccctgcctctcctccaccnnnnnnnnnnnnnnnnnnnnnnnnnnnnnnnnnnnnnnnnnnnnnnnnnnnnnnnnnnnnnnnnnnnnntcctccacccctgcctctcctccacccaccccagtgcccagaccacccaaggccctgacagccctgccctctgccctgctgcacgggcaggcatttgttccctgcctgggtggcctgctcccctgcctgggccctgacttcagctcactgtagtgaagtccaggagggtgggacagacctgtccggcctctgggaatctcccaaaccccagaactcactcacccaccatgcgcacctggtcctttaaatgcgggaaaactccacctaaccagattcagaggcaccggccccgctgccttctcttcagactctttgcatttcagtgaagagcctggaagaaacccaggggcctcctatgcacagatcttgcagcccagaaccaagtcagcctcctgcgactgcctaggcacactgcccaccaccccacccccaaaacaatgccagcccgctgcttttcctgtcctcccaggcacctttgcaaagaccaggggcagctcttgagggaactgtgaaggctcc

SEQ ID NO: 33643 - DNA, 162 bp, Macaca Mulatta
agttcacatggatgcagtggagccaaccacaccagcatcacaagcccccaaatcacccagctctgagtggttggtcaggacctctgcagcagagaaagccacagatgcaactactgctacattttttaaaatgccacaagaaaagagccctggatacagcta

SEQ ID NO: 33644 - DNA, 1133 bp, Macaca Mulatta
  misc_feature (1)...(1133): n = A,T,C or G
aggcaggcagaagtcctgaaggctgacatgacannnnnnnnnnnnnnnnnnnnnnnnnnnnnnnnnnnnnnnnnnnnnnnnnnnnnnnnnnnnnnnnnnnnnnnnnnnnnnnnnnnnnnnnnnnnnnnnnnnnnnnnnnnnnnnnnnnnnnctggaatcacgcctttaagaatcagatcacaacactacaaggccaggcaaagaatcgagcaaatccgaatcgaagtgaagttcaggcaaacctttctctgttcctagaggcagctagtggcnnnnnnnnnnnnnnnnnnnnnnnnnnnnnnnnnnnnnnnnnnnnnnnnnnnnnnnnnnnnnnnnnnnnnnnnnnnnnnnnnnnnnnnnnnnnnnnnnnnnnnnnnnnnnnnnnnnnnnnnnnnnnnnnnnnnnnnnnnnnnnnnnnnnnnnnnnnnnnnnnnnnnnnnnnnnnnnnnnnnnnnnnnnnnnnnnnnnnnnnnnnnnnnnnnnnnnnnnnnnnnnnnnnnnnnnnnnnnnnnnnnnnnnnnnnnnnnnnnnnnnnnnnnnnnnnnnnnnnnnnnnnnnnnnnnnnnnnnnnnnnnnnnnnnnnnnnnnnnnnnnnnnnnnnnnnnnnnnnnnnnnnnnnnnnnnnnnnnnnnnnnnnnnnnnnnnnnnnnnnnnnnnnnnnnnnnnnnnnnnnnnnnnnnnnnnnnnnnnnnnnnnnnnnnnnnnnnnnnnnnnnnnnnnnnnnnnnnnnnnnnnnnnnnnnnnnnnnnnnnnnnnnnnnnnnnnnnnnnnnnnnnnnnnnnnnnnnnnnnnnnnnnnnnnnnnnnnnnnnnnnnnnnnnnnnnnnnnnnnnnnnnnnnnnnnnnnnnnnnnnnnnnnnnnnnnnnnnnnnnnnnnnnnnnnnnnnnnnnnnnnnnnnnnnnnnnnnnnnnnnnnnnnnnnnnnnnnnnnnnnnnnnnnnnnnnnnnnnnnnnnnnnnnnnnnnnnnnnnnnnnnnngtcttttcttggcatcctgtgcaagtgtcctctacagaatgagtctcaggaggagtcctacaatgcctatcctcttccagcagtcaaggtctccatggactggctaagactcagacccagggtctttcaggaggcagtggtggatgaaagacagta

SEQ ID NO: 33645 - DNA, 1027 bp, Macaca Mulatta
  misc_feature (1)...(1027): n = A,T,C or G
cctggaggcttccttgagctgctgagcagaagctgaaacacagaannnnnnnnnnnnnnnnnnnnnnnnnnnnnnnnnnnnnnnnnnnnnnnnnnnnnnnnnnnnnnnnnnnnnnnnnnnnnnnnnnnnnnnnnnnnnnnnnnnnnnnnnnnnnnnnnnnnnnnnnnnnnnnnnnnnnnnnnnnnnnnnnnnnnnnnnnnnnnnnngtcctacacaggatcccggggacctctgcctatgccttccccagcctgggccctgtggcccttgccgagcacacctgcccctgtggggagatcctggagcgccatgaaccactgcctgccaagctggccctggaggaggagcaaaagccannnnnnnnnnnnnnnccaagctgcgccaggctggcgccatgctgctcaannnnnnnnnnnnnnnnnnnnnnnnnnnnnnnnnnnnnnnnnnnnnnnnnnnnnnnnnnnnnnnnnnnnnnnnnnnnnagggaaggtggccggtgacatcttcaaggataatgccatcctgtccaacccggtggccgggctggtggtggggatcctggtgaccgtgctggtgcagagctccagcacctccacgtccatcattgtcagcatggtctcctctggcnnnnnnnnnnnnnnnnnnnnnnnnnnnnnnnnnnnnnnnnnnnnnnnnnnnnnnnnnnnnnnnnnnnnnnnnnnnnnnnnnnnnnnnnnnnnnnnnnnnnnnnnnnnnnnnnnnnnnnnnnnnnnnnnnnnnnnnnnnnnnnnnnnnnnnnnnnnnnnnnnnnnnnnnnnnnnnnnnnnnnnnnnnnnnnnnnnnnnnnnnnnnnnnnnnnnnnnnnnnnnnnnnnnnnnnnnnnnnnnnnnnnnnnnnnnnnnnnnnnnnnnnnnnnnnnnnnnnnnnnnnnnnnnnnnnnnnnnnnnnnnnnncagctggacaagtccgtgataaccagcattgccaccggtgatgagtccctgaggaaccacagtctcatccggatctggtgccacccagactcctt

SEQ ID NO: 33646 - DNA, 803 bp, Macaca Mulatta
gggtttcttggaaaggtatctattacatcctgctagctgactgacaaaactaagcagggagaataaagataattgtattttatgttttgcacacaaacacagaatttgtataaccatatgacttcatagttgtgatctcaaaaaagaaggaatttctcctttgtttcttgcagttaatgtaagaatactttaaatctctaagcttctgaagtgttagaggtagagatggtctagtaaagatgtagtagtaatgttttatccatttagcatgtgtttattttttcatatgtactcaaaggtgacttattggttcacctcagtgatattacatacagctaaaaaaaatcattcattagcaaaaggaaaagtggtctcaacctaacatcagaagtgtttcttattattattttatattgggttgaatattgaactctaacacttttctacatacaaaacactgtcatgaaggttatgcataattgcattatagaggaatgtagtatgtcataagtactttgtaaagatttgacattcaactgtagtatccatatgttgctttaaatttctttatgagccccctgatggaaagacctaaagatgaattttgagaaaaattggaggaaatttgatgaataggttcctgttaaattggttacatgtatcctggcctaaatttcccggttaattaatttatatccaccccaatttactaaaagccagatttggaagaaaacaacccggaggttggtgcaaaaattttcctggggaaaaattgcctttttttaatccctgggggttttcca

SEQ ID NO: 33647 - DNA, 973 bp, Macaca Mulatta
  misc_feature (1)...(973): n = A,T,C or G
ggggctacagtctgtgccatgttgatgtacagtttctgaaattgttttacaagactttgataataaaacccttaaacttatgttcatgttcctgtaaaaccgtatttgtatttatttacactattgaatgtatgacatttacctcattcattttacaaattatttccctttctgtccacatgtttcactatagtaaaaagaggaagtctatcactgtagtgataattgccatcaaaattgtcaaaaatgatttaatttctatccaaaacagtccttttcttagcttagtatcattttactgcttattttttgtgtgagaatggggttggataaagcaatgaactttagtataaacaaatcccacctatatttagcaaatttatattttcggtgaatatagatatttgccttttctggagtagtatagaagctgtcaatgatatgtatttactgtacagtactaaatagtgtattcatttatgaaatgagtagtgtttgggtggatggggttaagggaaaatgagacttggaattgtagcttttatccaagttttgagtataaatagaattttttttttaacctaaaaactgaaatgccatataagcagcattgtttttatggtttgtagtaactttttaaagattttatcaaaaggatttttgtctatagtgagtaaaaagaagttctaataatggtccctaatcactgnnnnnnnnnnnnnnnnnngttggaacacaaatgacattttgttttaaacttcagtagataaaaaggtgaaccatgtgacatggccatttttgtaagacaaaaacaaatttcacgtatggtaaacctaataacatttacagtctgctccctcacttgtaatctctgaatacaaataccctagcttttctaaagggaatnnnnnnnnnnnnnnnnnngcccctgaccagatgctgcagtgaaaaatatccctttcttaggattttt

SEQ ID NO: 33648 - DNA, 411 bp, Macaca Mulatta
  misc_feature (1)...(411): n = A,T,C or G
gggatcaaatccagaattcaagttctttccatgtctggaaaacaggcaggatttatgagaacctttataaatgttgtgaaaaatgaaggaataacggccttatattctggactgaaacctactatgattcgagcattccctgccaatggagcactctttttggcctatgaatatagcaggaagttgatgatgaaccagttggaaacatactgaagtgtcttggtgagcctgagccaagcacaggtgtttgaggactacagttcatctcagggtttcttggagtacaagaccagtgtgaagttattctgatttcttgggaattttgctttttgtcttcctttctaccctacatcttaaactttatggaagaaccccnnnnnnnnnnnnnnnnnnnnnnnnnnnnnnnnnnnn

SEQ ID NO: 33649 - DNA, 1632 bp, Macaca Mulatta
  misc_feature (1)...(1632): n = A,T,C or G
tgtactccacatctgtgaccagtgaaaatctgagtcgccatgatatgcttgcatgggtcaacgactccctgcacctcaactataccaagatagaacagctctgttcagggnnnnnnnnnnnnnnnnnnnnnnnnnnnnnnnnnnnnnnnnnnnnnnnnnnnnnnnnnnnnnnnnnnnnnnnnnnnnnnnnnnnnnnnnnnnnnnnnnnnnnnnnnnnnnnnnnnnnnnnnnnnnnnnnnnnnnnnnnnnnnnnnnnnnnnnnnnnnnnnnnnnnnnnnnnnnnnnnnnnnnnnnnnnnnnnnnnnnnnnnnnnnnnnnnnnnnnnnnnnnnnnnnnnnnnnnnnnnnnnnnnnnnnnnnnnnnnnnnnnnnnnnnnnnnnnnnnnnnnnnnnnnnnnnnnnnnnnnnnnnnnnnnnnnnnnnnnnnnnnnnnnnnnnnnnnnnnnnnnnnnngcagttccacagaggacgtcccccacaggcccaaaaaacatgcagacctctggccggctgagcaacgtggcccccccctgcattctccggaagaatcctccatcagcccgaaatggtggccatgagactgatgcccaaattcttgaactcaaacaacannnnnnnnnnnnnnnnnnnnnnnnnnnnnnnnnnnnnnnnnnnnnnnnnnnnnnnnnnnnnnnnnnnnnnnnnnnnnnnnnnnnnnnnnnnnnnnnnnnnnnnnnnnnnnnnnnnnnnnnnnnnnnnnnnnnnnnnnnnnnnnnnnnnnnnggaaggattcgcaccccctgaggacgatgagattgaagagcatcaacaagaagaccaggacgaatactgagggcggccgcagccctggctgactgcacggcttccccatgcctccctccctgctccactcccacattatagtcctttcctaacacggtcggccgggtgctttgtgtcagtgccgcagcactggggagccagacgagcggggcttgggggcatggggccggaaagcaggcagaagcccgtcctgggtggcgctggcccagttggcgggacccctgtccacacccaccctatttatttctgttgtctctctgttgtgtcacccaacatttcccagggtgctgctgccacccgccccagccagccacctgctcccgacagctagcagctgtgtatttgacaaagtcattggtatatttttacttactggattctccttgcactttacctgttcttttccagagctgacagcacgggctcggggcagtgtgcctggcttggcttcccttccccatggctgggggctggggctggactcacccattctaatttattttgtcttttggcttctcagtaactgaggggaaggctgatgtcaggagagggagagggggctgaggaggtagtgccgtaggcccagggggtcagggagagggaggggggcatgtgagggatggaaatgacctcctggcaccaggctcacccacccaaggccccctgccccagcaccgaagcccactgctgccctgaggcccccagccactccctccagcagcctggttcaccacacagactctgcctggaccccattgtctatctgcttcccacccgccctgcccaccccctgcccctcaggcaccagcct

SEQ ID NO: 33650 - DNA, 2384 bp, Macaca Mulatta
  misc_feature (1)...(2384): n = A,T,C or G
gggccttttcatcagtggcatcgttggggatcggttgaatttgcggtgggttctgtctttcggcatgtgctcttctgcattcgtggnnnnnnnnnnnnnnnnnnnnnnnnnnnnnnnnnnnnnnnnnnnnnnnnnnnnnnnnnnnnnnnnnnnnnnnnnnnnnnnnnnnnnnnnnnnnnnnnnnnnnnnnnnnnnnnnnnnnnnnnnnnnnnnnnnnnnnnnnnnnnnnnnnnnnnnnnnnnnnnnnnnnnnnnnnnnnnnnnnnnnnnnnnnnnnnnnnnnnnnnnnnnnnnnnnnnnnnnnnnnnnnnnnnnnnnnnnnnnnnnnnnnnnnnnnnnnnnnnnnnnnnnnnnnnnnnnnnnnnnnnnnnnnnnnnnnnnnnnnnnnnnnnnnnnnnnnnnnnnnnnnnnngtctctcaggtattgaggcagaagaaaactttgaagaagactcacacaggccattaattaatggtggtgaaaatgaagaggaatatgagccgaattattcaatccaagatgatagttctgtcgcccaagtcaaggcaataagcttctaccaggcgtgttgccttcctggagtcataccggtactcactggcctacgcctgcttgaagttagtgaattactccttcttcttctggctccccttttatctgagtaacaacttcggctggaaggaggcggaagccgacaagctgtccatttggtacgacgttggagggatcgtaggnnnnnnnnnnnnnnnnnnnnnnnnnnnnnnnnnnnnnnnnnnnnnnnnnnnnnnnnnnnnnnnnnnnnnnnnnnnnnnnnnnnnnnnnnnnnnnnnnnnnnnnnnnnnnnnnnnnnnnnnnnnnnnnnnnnnnnnnnnnnnnnnnaggattttttattggtggaccttctaatatgattagttctgctatttccgcggacttgggtcgccaggagctcatccaagggagcagtgaggccttggccactgtcacaggaattggtgatggttcggggagcannnnnnnnnnnnnnnnnnnnnnnnnnnnnnnnnnnnnnnnnnnnnnnnnnnnnnnnnnnnnnnnnnnnnnnnnnnnnnnnnnnnnacaagttgtacaattgtgtttatctcgccattaatagtgagggaaatattctctctcatgcgaaggagacaggctcatatactgagggagtgactggtgcctgcgagacagaaagaacaacgtcagccacatcaggaccgttggggcttcgaatctgccctaatttgggtttctctaggagcaccagcctgaccttggattgtcagggctctctcaacactgccagccacctgagatgctgaccagcggtgaaggctgagcgagttttctacactacaggaattattgttgatgatttttgttgtttcgtgaatgtgctgagtgacctctgactgtgccagcatctttgntgacctctgactgtgccagcatctttgtgtggcctgttgaggtttagcattttaaccttaactgttgttttggatttgaactttctctagcctcaaaaatggagtgaataggaggcaaagccacgcgtggtttgtgttggtgatgtgttccacaaatggaagagatcattgcattttgctttggtaatgagtttatagagagtggctcatctttgnnnnnnnnnnnnnnnnnnnnnnntcaagctggaccgagttgccagcctgccttggacaaagaatccctctgttccctgtggtgggaaagatcacactacatgcctgttgaatggctcagtcactctgtgtctgatccaaaagtcattcagccctagaagcatgaatatcttcaaattattgtcaactgttctcctccatcttcattcaaattaactttggctcctggaagtatttagtcttcctttcaaggaccataaggtacatcagttatctcgaacattccgacatgtaanaaggaccataaggtacatcagttatctcgaacattccgacatgtaactcgcagccgaagcaactccaccccagatctgttgtctgggaactttaggatcctctaggaagctaatctgcttagtctatttttagaggattgatctctggcacaaccgggttcctggagttacctcagctgaggactagaattagagaaaagggaaagaccttttgttctagtaagtgtcaagtacggatgctctttgacttacggtagggttacgtcccaggcaacccattggaagtcaaatgcatctaatacccctgacctactgaacgccacagcttagcctcgtccaccctaaatgtactcagaacacttagaattgcccacagttgggtagaatcatctaacacaaactctgttttataatcaagtgttgaata

SEQ ID NO: 33651 - DNA, 284 bp, Macaca Mulatta
aggagaaatgccggtggttagcttcatcgaaaggaaaacaagtgagaaatttcagctagatttggaaaagaaaaggtactacaaattcaaaagatttcacttttaatactagctctcctgcctgcttgctggggtggtcttgtgaaacgtgatgggttttattcattgggctttaaaagaaaaggtttggcagaactaaaaacaaaacccacatatcatctcaatagatacagaaaaggcttttgataaaattcagcttgacttcatgtaaaaaccctcaacaa

SEQ ID NO: 33652 - DNA, 704 bp, Macaca Mulatta
  misc_feature (1)...(704): n = A,T,C or G
ggggagttttggtctgcaccagccgttcgaaggtgatccagacgcaagatggctgtcctctctaaggaatatggttttgtgcttctaactggtgctgccagctttataatggtggcccacctagccatcaatgtttccaaggcccgcaagaagtacaaagtggagtatcctaccatgtacagcacggaccctgaaaatgggcacctcttcaactgcattcagcgagcccaccagaacacgttggaagtgtatcctcccttcttattttttctagctgttggaggtgtttaccacccgcgtatagcttccggcctgggcttgggctggattgttggacgagttctttatgcttatggctattacacaggagaacccagcaaacgtagtcgaggagccctggggtccatcgccctcctgggtttggtgggcacaaccgtgtgctctgctttccagcatcttggttgggttaaaagtggctttggcagtggatccaaatgctgcctttaaagaattttaggggtttaaaaactcttattcattttaaatgacttacctttatttccagttactttttttttttctaaatataataaagggttacctggcgtcagcctcatannnnnnnnnnnnnnnnnnnnnnnnnnnnnnnnnnnnnnnnnnnnnnnnnnnnnnnnnnnnnnnnnnnnnnnnnnncactggccgtc

SEQ ID NO: 33653 - DNA, 2497 bp, Macaca Mulatta
  misc_feature (1)...(2497): n = A,T,C or G
agaatgggagaccatgactgagaatgaggaggtgacatcaaagccaagtagttctcaaagagcagactctcataaaggaacatcaaaaagacttcaaggaagtgttccccaggtccttgattttgaagaagagtgtgaatggcaagttttggcaagtcagtggggaaatgaaacagatgaaagggcagatacagtgaagaaaggttccctgtgtgaacgagacaagaagaaaaggactccaccagagaaacaaggccaaaagtggaaggaatttggagacagcttgactttcagttcagctatttctgaaactttaataggtactgaaggaaagaagttttataaatgtgatatatgttgtaagcattttaataaaatctcccatcttataaaccatcggagaatccacactggtgagaaacctcataaatgtaaggaatgtggaaaaggctttattcagcgttcgagccttctaatgcatttacggaaccattcaggggagaaaccttataaatgtaatgaatgtgggaaagcattttctcaaagtgcttaccttctaaaccatcagaggatccacactggggagaaaccttataagtgtaaggagtgtggaaagggcttctatagacactacaggcctaattatacatctaaggcgccattcacgggagagaccttataagtgtaatgaatgtgggaaagttttctctcagaatgcttacctcattgaccatnnnnnnnnnnnnnnnnnnnnnnnnnnnnnnnnnnnnnnnnnnnnnnnnnnnnnnnnnnnnnnnnnnnnnnnnnnnnnnnnnnnnnnnnnnnnnnnnnnnnnnnnnnnnnnnnnnnnnnnnnnnnnnnnnnnnnnnnnnnnnnnnnnnnnnnnnnnnnnnnnnnnnnnnnnnnnnnnnnnnnnnnnnnnnnnnnnnnnnnnnnnnnnnnnnnnnnnnnnnnnnnnnnnnnnnnnnnnnnnnnnnnnnnnnnnnnnnnnnnnnnnnnnnnnnnnnnnnnnnnnnnnnnnnnnnnnnnnnnnnnnnnnnnnnnnnnnnnnnnnnnnnnnnnnnnnnnnnnnnnnnnnnnnnnnnnnnnnnnnnnnnnnnnnnnnnnnnnnnnnnnnnnnnnnnnnnnnnnnnnnnnnnnnnnnnnnnnnnnnnnnnnnnnnnnnnnnnnnnnnnnnnnnnnnnnnnnnnnnnnnnnnnnnnnnnnnnnnnnnnnnnnnnnnnnnnnnnnnnnnnnnnnnnnnnnnnnnnnnnnnnnnnnnnnnnnnnnnnnnnnnnnnnnnnnnnnnnnnnnnnnnnnnnnnnnnnnnnnnnnnnnnnnnnnnnnnnnnnnnnnnnnnnnnnnnnnnnnnnnnnnnnnnnnnnnnnnnnnnnnnnnnnnnnnnnnnnnnnnnnnnnnnnnnnnnnnnnnnnnnnnnnnnnnnnnnnnnnnnnnnnnnnnnnnnnnnnnnnnnnnnnnnnnnnnnnnnnnnnnnnnnnnnnnnnnnnnnnnnnnnnnnnnnnnnnnnnnnnnnnnnnnnnnnnnnnnnnnnnnnnnnnnnnnnnnnnnnnnnnnnnnnnnnnnnnnnnnnnnnnnnnnnnnnnnnnnnnnnnnnnnnnnnnnnnnnnnnnnnnnnnnnnnnnnnnnnntttattctgaagaagagcctcattttacatcaaaggttccacactggagagaatctctatgaatgtaaagattgtggcaaggtcttcggttcaaacagaaacctcattgaccatgagagactccataatggggagaagccatatgaatgtcaagagtgtgggaaaacctttattatgagcaaaagttttatggtccatcagaaactccatacacaagagaaagcctacaaatgtgaagattgtgggaaggctttcagttacaattcaagcctgcttgtacatcggagaatccacactggagaaaaaccctttgaatgtggtgagtgtggaagagctttcagttcaaacagaaacctcattgagcataagagaatccacagtggtgagaaaccctatgagtgtgatgagtgtggcaaatgcttcattctgaagaaaagcctcattggacatcagagaattcacacgagggaaaaatcttataaatgtaatgactgtgggaaagtcttcagttaccgctcaaaccttatagcccatcagaggatccacactggcgagaagccctatgcatgcaatgagtgtggaaaaggttttacctacaacagaaacctaattgaacatcaaagaattcacagtggagaaaaaaccttcgaaagtcttatatgtaggaaagtccttacctctagtagaaatcttatggtacatcaaagaatccacactgtaaaaagaccttataaatgtaatgagtgtggaaaagactttagtcagaataaaaacccttgttgtacatcagagaatgcacactggggaaaaaccttatgagtgtgagaagtgtaggaaatcctttacttctaagaggaatttagttggcc

SEQ ID NO: 33654 - DNA, 149 bp, Macaca Mulatta
agagattacacaggaaaactgggatttagtgaattcaaagagctatgggcagctcttaatgcctggaagcaaaacttcatgactgttgatcaagatggaagtggcacagtagaacatcatgagttgcgtcaagccatcggtcttatggg

SEQ ID NO: 33655 - DNA, 170 bp, Macaca Mulatta
cgtggatccttttggtgtttaatatatcagaagagaggaagtatttaaacgtcaaaatcttctaataggcttaaaaaaaataatttaaagaaagtaagttatctgtttagtttttttatatgatcgggaaggggatagggattttgctgtgtgtatgtgatacatagcag

SEQ ID NO: 33656 - DNA, 140 bp, Macaca Mulatta
  misc_feature (1)...(140): n = A,T,C or G
gcttaagtcacccaagagaccagnnnntccagcatctccatcgtctcctgagcacttgcctgcgacacccgcggaatctccagcccagaggtttgaagctcggatagaagacggcaaactgtactatgacaaaagatggt

SEQ ID NO: 33657 - DNA, 89 bp, Macaca Mulatta
aaaatggaaaacttttctgcacaagagaaaatgatcctgtgcgtggcccagatggcaagacccatggcaacaagtgtgccatgtgtaag

SEQ ID NO: 33658 - DNA, 816 bp, Macaca Mulatta
  misc_feature (1)...(816): n = A,T,C or G
ctggtggggagtaaccctccacagaggaattggaaaggaatagcgattgcactgcttgtcattctggtcatctgctccttgatcgtcacctcggtcatacttctgacaccagnnnnnnnnnnnnnnnnnnnnnnnnnnnnnnnnnnnnnnnnnnnnnnnnnnnnnnnnnnnnnnnnnnnnnnnnnnnnnnnnnnnnnnnnnnnnnnnnnngatacagaattcatctacagagaacagaagggaacagtgagactgtggaatgttgaaacaaatacttctactgtcttaatagaaggcnnnnnnnnngaatcattaagagccatcaaagatgaaatatctccggatagagagtatgcacttttttcatacaatgnnnnnnnnatgaagaaagtgaagtccaggaagttgacattgcctcattcaaaatcatgtgactcattagcagtaagtcaagcctgtagcccagcttgtcaccagggctgttttcttcattacatcaccatgtctcttcctcttcactgcctgcgtgactatgtcttggcagtcaatggatacagcacagcattgccagcttgccatgtacaagggggacctgtttcagatattccatggagaccctggctggaggattgcaggagagtcccaggaggcaggactgccaatggcaccaggcttcgcagccatgcacctgcagccctcaggcagcactgtccattgtcatacgagtgtggcaggtgtgaggcatcgcatctgctcaccctggggataatgcacagcagctacaggcagatttcgggccagagagcaaccgagtga

SEQ ID NO: 33659 - DNA, 919 bp, Macaca Mulatta
  misc_feature (1)...(919): n = A,T,C or G
gaatggccccaattcttgcctcatcctatcaccaggctagtagaggaccctccctaagggcgcagctttggcgcaggatctgtccagctcatactttccttcgctgtccctctcgcactccttaggcaagatttcccagtaaagattttctgtgcatattttaaaagtcgtgttaacattcatgataattattagggatctggcagcgtgattggagtatggatggttcnnnnnnnnnnnnnnnnnnnnnnnnnnnnnncgcagcccctatgctccatcccaaccaagaaactgcatttcttggggccaggtgggggctgcctttgccccactgcctcccctgttctgctctatcagtcaacatgtggaaatccaaggaggacaaagactccagccacgctgctaaatagggcnnnnnnnnnnnnnnnnnnnnnnaggtggtaaggttggggattaggccaggcacagagaagcagaactttttttctaaggataaacatctcttccaagaggatggagaatgggttcctcaacaaagtccctttccagtcacctttccatcaaggcactagctccggagggactcctcacactttcacttttactgatttccagaggaaagctagaggatctagttcaggaggcaagaaaatctggccctcaattagctaaatgagctaaaagtagatgctgcctaacagttccctcctcaaagaccaccttggtgctgtgggggtcccttgcctcttcccttcccactggtgcattacaaaacagtgttcttttgaaatgttcatcagaaataggctttttttttaatgttgtgtatctgtatatagtattgtgatgtctgaatgacgatgtactgaatgcaaaaaggaaaaaaaaaccccacaaacatgtttttaaaataaaatat

SEQ ID NO: 33660 - DNA, 284 bp, Macaca Mulatta
tgggacgcgctctaaataattgcaataaaacaaacctttctctgcaaaccatttcctccccgccccctcccctcagcagcagccgtcccgagtgggagtccctgggacatcccagtggccgagctggggcccccagcctgtttgtggggacctcaggtaaggccagggaggcctgatgtggccgtaggagctgcccctccccaacccgccctggtgtggggggtccctaggccaggccctgctccccacccagctaccctgtgcgcctgtgccctgatgggggt

SEQ ID NO: 33661 - DNA, 682 bp, Macaca Mulatta
tgacgtcaccttgtttcatcattttttatgacataattagaaacccatccttcaagcacaatcatcatcacagactttagtcgcttcctaaagcaaggctccgggtgtatttgaaatttttttttttgatttctgaaatgaattgatttttatatttggggcatctctatagaaagtgaccaccaaggccagtaagtacaggaaaaacgtttactaacttcctcagagattcgtgatacgcgtttctccactgacagacatttaaaaacaaacaaccttcagctccgtttcaatcaatcacctcgacttgtttctagcatggacactgccagcaggacagacagggacggagtaaaccgaagtcaatttcagggctctcggcgtgttggatacagaagaaattctagtgcagcctttggtagctaacagtcattgattttataattggagaatgcgtaaagattcatgtttcaaggagaagagcctgcaaatggccaatgaaggaggtaaataaactaagatattccgagggaagggacccaggccgtctcccttccgcaggtctgcagatgaaggggttttttttgaatgaaatgccactgtgcattttcagaaaaaaatctctgataaacagactttgaatggatgtttgttcctcctgattctctcttctctttgtggt

SEQ ID NO: 33662 - DNA, 1144 bp, Macaca Mulatta
  misc_feature (1)...(1144): n = A,T,C or G
ggggaggcggaccgcggtcacgtctgcagagtggtgggtttgtagccggtagattactttatcatctatattgtccgttcaattgctcctcataattagcaaggataacaaggtaacacaaggcttacttacattcacgcaacagaagtgtctctgtggagccactttccagtgaactgcgtactgagagagggatttctggatgaggaccaagcaaagaaccgagaagagtttagggcaggttatgcgagacggaaatggcgcagataacggagggaaggatttgaggggctcaaacagtgtctgtgtttcgcaaaagttggagacattctaggctgcctctcgttgcccccatctcgctctgcgcgggttttggagggcattagattctttcttgtatctccgttgattccagaatcttccgcacttcagtctcctgcagggtgaccatgtcgagacctcggaagaggctggctgggacttctggttcagacaagggactctcaggaaaacgcaccaaaactgagaactcaggtgaggcattagctgaagtggaggactccaaccctcagaagacttcagtcactaaaaactgtgtgaagaatctaagcagccactggctgatgaagtcagagccagagagccgactagagaaaggtgtagatgtgaagttcagcatttgaggatctcaaagcacagcccaaacagacaacatgcctgggaatggtgttccgtaactaccaggctcggaacttccttagagccatgaagctaggagaagaagccttcttctaccatagcaactgcaaagagccaggcatcgcaggacttatgaagatcgtgaaagaggcttacccagaccacacacagtttgaagaaaaacattccccattatgacccgtctagcaaagaggacaaccctaagtggtgcatggtggatgtacagtttgttcggatgatgaagcgtttcattcccctggctgagctaaaatcctatcatcaagctctcaaagttactggtggccccttaaaaaatatgaactctcttcagtcgcccagagattatccaatccaacccctggacccaaagaagaggttttgatttttgtttttggagcccttgganggaaaagggaaacctaat

SEQ ID NO: 33663 - DNA, 247 bp, Macaca Mulatta
  misc_feature (1)...(247): n = A,T,C or G
gtgatccgtgaccacgccggcagcgcttgcctccgggagctggacaagagcaacagccccctcaccatggctctgtgtggctccaaaggtnnnnnnnnnnnnnnnnnnnnnnnnnnnnnnnnnnnnnnnnnnnnnnnnnnnnnnnnnnnnnnnnnnnnnnnnnnnnnnnnnnnnnnnnnnnnnnnnnnnnnnnnnnnnnnnnnnnagctcccagctgccaaaggctttgtggctaatagcttttatt

SEQ ID NO: 33664 - DNA, 544 bp, Macaca Mulatta
  misc_feature (1)...(544): n = A,T,C or G
atgctcatcagagagtcatacaggagaaaaccctactcatgtagtgagtgcgagaaggtctctctttcaggtcacagctcattgtccatcaggaaattcacacaggagggaaaccctatggctgcagtgaatgtgggaaagcctacagttggaaatcacagcttcttttacaccagagaagtcacacaggagtgaaaccctatgaatgcagnnnnnnnnnnnnnnnnnntagctttgaagtctccattcgttgtacaccagagaacgcacacaggagtgaaaccacataaatgcagnnnnnnnnnnnnnnnnnntaggagtaagtcctatctccttgttcacgtccgaatgcatacaggagaacaaccctaccaatgcagcgattgtgggaaagccttcaatatgaagacacagctcatcgtacatcaggcagttcacacaggaaataatccttaccaatgcggtgaatgtgggacagcctttggtaggaaggaacagctcactgcacatctgagagctcacgcaggagagaagccctatggat

SEQ ID NO: 33665 - DNA, 447 bp, Macaca Mulatta
  misc_feature (1)...(447): n = A,T,C or G
aggtgtctggcctgccaccgtgtctcaaggcagcttgcatacactcgggcatgaccaggaagcaacgggagtctgtcctgcagaagnttcgggcagcccaggtacacgtgctgatgctgacacccgaggcactggtgggggcaggaggcctctctccagccacgcagctgcctccagttgcttttgcctgcattgatgaggtccactgcctctcccagtggtcccacaacttccggccctgctacctgcgcgtctgcagggtgnaggtgcttcgggagcgcatgggcgtgcactgcttcctgggtctcacagccacagccacacgccgcactgccagtgacgtggcacagcacctggctgtgaatgaagagcctggcctccatgggccagccccagttcccgccaacctgcacctttccgtgtccatggacagggacacagaccagg

SEQ ID NO: 33666 - DNA, 469 bp, Macaca Mulatta
  misc_feature (1)...(469): n = A,T,C or G
tccttcttctacatctgcttgctgctgggatnnnnnnnnnnnnnnnngtccttttactgtgccatggcgggcagtctcggcctgggccctcatggccacacagaccttctactccacgggccaccagcctgtctttccagccatccattggcatgcagccttcgtgggattcccagagggtcatggctcctgtacttggctgcctgctttgctagtgggagccaacacttttgcctcccacctcctctttgcannnnnnnnnnnnnnnnnnnnnnnnnnnnnnnnnnnnnnnnnnnnnnnnnnnnnnnnnnnnnnnnnnnnnnnnnnnnnnnnnnnnnnnnnnnnnnnnnnnnnnnnnnnnnnnnnnnnnnnnnnnnnnnatggagatgcggctccgggatgcgcctcaccacttctatgcagcactgctgcagctgggcctcaagtacctctttatccttggtgttca

SEQ ID NO: 33667 - DNA, 762 bp, Macaca Mulatta
gggtatgaaatagtcaaactaaaaccaaagatggtcactatggtagagattgaccaaatggtgatcgatgggtgtaagaaatacatgcgaaaaacgtgtggcgatgtcttagacaatcttaaaggagactgctatcaggttctaatagaagactgtattccggtactgaagaggtacgccaaagaagggagagaatttgattatgtgattaatgatttgactgctgttccaatctccacgtctccagaagaagattccacatgggagtttctcagactgattcttgacctctcaatgaaagtgttgaaacaggatgggaaatattttacacaggggaactgtgtcaatctgacagaagcgctgtcgctctatgaagaacagctggggcacctgtattgtcctgtggaattttcgaaggagatcgtctgtgtcccttcatatttggaattgtgggtattttacactgtttgaaagaaagctaaaccttggaagatcaatagcccctaatcacatgtgctgcgaatggccttcctgacctccctatgctgtacatgacatcgaaatgaatcagggcattgattgtgaattcctttagagtttccctttttttaatggataattgttgagttaaaacaaggcaaagtgggcaatggtataggtttggaggaagctctaggggggcgtatgttttttttgtgaaaagcgcagccctggagggaggccgtaaagaagagcccgccccgaaaaacctgcgacgagtgg

SEQ ID NO: 33668 - DNA, 691 bp, Macaca Mulatta
  misc_feature (1)...(691): n = A,T,C or G
gggagctttggattgctggggccgggccccagggaaggtatactgaggggtctataggtttgtgattaaaataataaaagctaggcgtgtttgatgcgcttttaactttnnnnnnnnnnnnnnnnnnnnnnnctataaattataatctactctttattatttatgtatctctctcttattttcttatataccttttctttccattatcttctttcattataactttttaaactttttcttttgtgttctctgtttctattttattatcaattcttttttattatacattttttcctctttattttctcacttctcatctaatttagtatttgattcctccattttttcctataacctctaattaccctctttttttactttcttacctaaactaaacttctcttttattctatttctccatttctttacatttatttttcttttatttttctcctataatattctcatattattttttaatattatttccctattctcctcaaactctatttattatttcctattaactcttcttctatatcactactacactttttcctatatcattaattcttttactttactttctctaatttatcctaattctatattctttaattatctattttatatctcctacctcctttttttcttannnnnnnnnnnnnnnnnnattccctcataatttcta

SEQ ID NO: 33669 - DNA, 463 bp, Macaca Mulatta
ttttggtagttgtttccaaacaggcaactcagcaaatcttaaggactcacctttctttcaaagaaagtagaatctctggagaaatcgacaagggaggctgaccttattatccaagggttaccaggttctattcctcctttgtgaacgtgacgccccagtgaagttggacttttcactctcttgaaatacgccctttgctttcatgtcacccaagccttgagccttttcagtccctctagcccaaatgacatctctccactaaatctatctctaaggttttcatgcatccctcaggggctatcccaattccttccaaaaactttgtcttcggagaaatagggaacctggctcttcctcagatattcactttgctttctctcacccatgcctctgctctggttggcctcatgtctgcctcactcctccaacttcatctctaaactttaacctgtccttcagggac

SEQ ID NO: 33670 - DNA, 464 bp, Macaca Mulatta
  misc_feature (1)...(464): n = A,T,C or G
gacaacagntaacagaatctattagatacaggcatatttaaccttaatatttaaaagtccaaaattatatagaattaatccagatcatatagcaaagaattctgaaaattgaatgcacaattggtcacatgatctttaatgacctgtacactaccatcctgcatattggtttcttttatgctgtcaaatccaggtatattgtgaactgtagttttgttcagtaatgaagataggtgatctccatctgtttctttctcttcagattattattgactcgtttacagttatctttttcctcatttgagcaagtagcacttttttcttttataaattcagatagcattttagactcaggttgctgagattttccaagtatcattcgagaaccatcaagagactcttgttgaaagcatgtaactgaaccaaagctatctatttgtagtgcttcaactgctatagatgaa

SEQ ID NO: 33671 - DNA, 875 bp, Macaca Mulatta
  misc_feature (1)...(875): n = A,T,C or G
ggggcacaacatggcggcggcagctacacagggcgggagaagcggtggtctcggaggcaataatggggctggcggtggttccaactgcgggacaggcagtggccgtagcggcttgttggataagtggaagatagatgataagcctgtaaaaattgacaagtgggatggatcagctgtgaaaaactctttggatgattctgccaaaaaggtacttctggaaaaatacaaatacgtggagaattttggtctaattgacggtcgcctcaccatctgtacaaatctcctgtttctttgccaaaatggcttagatttgggattatatgcaccccttttccagagtcctaactccaattttgagctttgtgcatcttatcctatttttgtgataatggggaattcttaccaatttttacctccataannnnnnnnnnnnnnnnnnnnnattagtaggctccataggaaaaaaatcattagaggaaaaaagcaattcctaaataaaataaatgaaaactccgttccctcaagatcacnnnnnnnnnnnnncannnnnnnnnnnnnnncccgtagagaaatcgaagattctcatacaaagttgtgtaaaaaacaaacgtttctagaggccgttaaactataaatatttatataaaactcccctattgtttaaaatattattttagaaaactaaaaagtagtaactaaatcggattccaacggattaactttatctaaattaacacctaaaaattaaattcactaggctcctactaataacaataaatttacatccacttattatctcctttctaacaacaaaaatttataaaaattagctacctctccctaatgcggcataaaggataatatcttagtctcag

SEQ ID NO: 33672 - DNA, 1661 bp, Macaca Mulatta
  misc_feature (1)...(1661): n = A,T,C or G
ctggcagtggcatgggacatggatccaaagagattaaaactggagtgaaggagtccannnnnnnnnnnnnnnnnnnnnnnnnnnnnnnnnnnnnnnnnnnnnnnnnnnnnnnnnnnnnnnnnnnnnnnnnnnnnnnnnnnnnnnnnnnnnnnnnnnnnnnnnnnnnnnnnnnnnnnnnnnnnnnnnnnnnnnnnnnnnnnnnnnnnnnnnnnnnnnnnnnnnnnnnnnnnnnnnnnnnnnnnnnnnnnnnnnnnnnnnnnnnnnnnnnnnnnnnnnnnnnnnnnntggatcctgtgcaaaaagcggttattaaccatacattttggagtatccattcccccaaagaagaaacaagttatttcttgtaatgtctgtcagcttcgctttaactcnnnnagccaggccgaggcccactacaaaggaagtaaacatgccaagaaggtcaaagcactagaggcaacgaaaaataaacccaaaatggtttcttccaaggacagcgcaaaggctaatcccagctgctccatcactccaatcacaggcaacaactctgacaaatcannnnnnnnnnnnnnnnnnnnnnnnnnnnnnnnnnnnnnnnnnnnnnnnnnnnnnnnnnnnnnnnnnnnnnnnnnnnnnnnnnnnnnnnnnnnnnnnnnnnnnnnnnnnnnnnnnnnnnnnnnnnnnnnnnnnnnnnnnnnnnnnnnnnnnnnnnnnnnnnnnnnnnnnnnnnnnnnnnnnnnnnnnnnnnnnnnnnnnnnnnnnnnnnnnnnnnnnnnnnnnnnnnnnnnnnnnnnnnnnnnnnnnnnnnnnnnnnnnnnnnnnnnnnnnnnnnnnnnnnnnnnnnnnnnnnnnnnnnnnnnnnnnnnnnnnnnnnnnnnnnnnnnnnnnnnnnnnnnnnnnnnnnnnnnnnnnnnnnnnnnnnnnnnnnnnnnnnnnnnnnnnnnnnnnnnnnnnnnnnnnnnnnnnnnnnnnnnnnnnnnnnnnnnnnnnnnnnnnnnnnnnnnnnnnnnnnnnnnnnnnnnnnnnnnnnnnnnnnnnnnnnnnnnnnnnnnnnnnnnnnnnnnnnnnnnnnnnnnnnnnnnnnnnnnnnnnnnnnnnnnnnnnnnnnnnnnnnnnnnnnnnnnnnnnnnnnnnnnnnnnnnnnnnnnnnnnnnnnnnnnnnnnnnnnnnnnnnnnnnnnnnnnnnnnnnnnnnnnnnnnnnnnnnnnnnnnnnnnnnnnnnnnnnnnnnnnnnnnnnnnnnnnnnnnnnnnnnnnnnnnnnnnnnnnnnnnnnnnnnnnnnnnnnnnnnnnnnnnnnnnnnnnnnnnnnnnnnnnnnnnnnnnnnnnnnnnnnnaggaagttgagaaagaaccacacaaggattcagcaagttaagcagtttgtgttgcagcacccccaaacactcacaaaatgcagcctaccacccagctccccaattccaaagagaaacacatcactagattcacgagggcttttagagaccgctcctataatttagtaatctgagcaacataggttttatctccctacttcctccccnnnnnnnnnnnntcaatttgtgtatctcagatatttgatttcttgaacatatattggtcnnnnnnnnnnnnnnnnnnnnnattctctatttttccatgggtatgatctggcttaaaacaa

SEQ ID NO: 33673 - DNA, 839 bp, Macaca Mulatta
aggtggaggtgggcgacaagacccactgggcagtgggtgtatgccgggactccgtgagccgaaagggcgagttgactccactccctgagactggctactggcgggtgcggctatggaatggggacaaatatgcggccaccaccacaccttttacccctttgcacatcaaagtgaaacccaagcgggtaggcatattcctagactatgaggccggcacactgtctttctacaatgtcacagaccgctctcatatctacaccttcactgatacttttactgagaaactttggcccctcttctacccaggcatccgggctggacggaagaatgctgcaccacttaccatcaggcccccaacagattgggagtgacaggttgggatgtgggaataattggggtgaggcagggtcaagtgctacgggcctccttcctgtgtcctgctggaacgtcttcgtgtccacctggttccagtcctgaatcatcatggagaaacacctcggtttctaggatggttttgtgtggagaaggaggtaggactgggctggatgagacagcacagctgtgactccctcctaactgtcagggtggggagctggttcccagaggattgtctaccctgaagtccatcaggttttctgttgcacaaggacgggttggaaaggaaggagaggcttttccagaaacaaaatctgtgagggtctgacttgctcaaaccagaggaggaaacagaaacccctgcacatctttttagggagttctttgacacgggatagtcttgcttcttgaggtagatcacaggggtaagtgacctctaaattcaagaaagatgaatgacagat

SEQ ID NO: 33674 - DNA, 1955 bp, Macaca Mulatta
  misc_feature (1)...(1955): n = A,T,C or G
tactttatattctcagactactttgacatcagatgagtcagtaaaggaccatactactgcaggcagagtagttgctggtcaaatatttcttgattcagaagaatccgaattagaatcctctattcaagaagaggaagacagcctcaagagccaagagggggaaagtgtcacagaagatctcagctttctagagtctccaaatccagaaaacaaggacaatgaagagccaaagaaagtacggaaaccaggnnnnnnnnnnnnnnnnnnnnnnnnnnnnnnnnnnnnnnnnnnnnnnnnnnnnnnnnnnnnnnnnnnnnnnnnnnnnnnnnnnnnnnnnnnnnnnnnnnnnnnnnnnnnnnnnnnnnnnnnnnnnnnnnnnnnnnnnnnnnnnnnnnnnnnnnnnnnnnnnnnnnnnngaagaagaggctgctaagagacggcagatgcaggaagcagaaatgatgtatcaaactggaatgaaaatccttaatggaagcaataagaaaagccaaaaaagagagtnnnnnnnnnnnnnnnnnnnnnnnnnnnnnnnnnnnnnnnnnnnnnnnnnnnnnnnnnnnnnnnnnnnnnnnnnnnnnnnnnnnnnnnnnnnnnnnnnnnnnnnnnnnnnnnnnnnnnnnnnnnnnnnnnnnnnnnnnnnnnnnnnnnnnnnnnnnnnnnnnnnnnnnnnnnnnnnnnnnnnnnnnnnnnnnnnnnnnnnnnnnnnnnnnnnnnnnnnnnnnnnnnnnnnnnnnnnnnnnnnnnnnnnnnnnnnnnnnnnnnnnnnnnnnnnnnnnnnnnnnnnnnnnnnnnnnnnnnnnnnnnnnnnnnnnnnnnnnnnnnnnnnnnnnnnnnnnnnnnnnnnnnnnnnnnnnnnnnngctagtgatatctcgctaacaggaggctcagtagtacagagaatacggctgcctgatgaagtggaaaatccaggaatgaacagtggaatgctagaagaagatttgattcaatattaccagttcctagctgaaaaaggtgatgtgcaagcacaggtacgtnnnnnnnnnnnnnnnnnnnnnnnnnnnnnnnnnnnnnnnnnnnnnnnnnnnnnnnnnnnnnnnnnnnnnnnnnnnnnnnnnnnnnnnnnnnnnnnnnnnnnnnnnnnnnnnnnnnnnnnnnnagatgtattcggaaggaagtgacattgtacctcagagtaatgagacagctctccactactttaagaaagctgctgacatgnnnnnnnnnnnnnnnnnnnnnnnnnnnnnnnnnnnnnnnnnnnnnnnnnnnnnnnnnnnnnnnnnnnnnnnnnnnnnnnnnnnnnnnnnnnnnnnnnnnnnnnnnnnnnnnnnnnnnnnnnnnnnnnnnnnnnnnnnnnnnnnnnnnnnnnnnnnnnnnnnnnnnnnnnnnnnnnnnnnnnnnnnnnnnnnnnnnnnnnnnnnnnnnnnnnnnnnnnnnnnnnnnnnnnnnnnnnnnnnnnnnnnnnnnnnnnnnnnnnnnnnnnnnnnnnnnnnnnnnnnnnnnnnnnnnnnnnnnnnnnnnnnnnnnnnnnnnnnnnnnnnnnnnnnnnnnnnnnnnnnnnnnnnnnnnnnnnnnnnnnnnnnnnnnnnnnnnnnnnnnnnnnnnnnnnnnnnnnnnnnnnnnnnnnnnnnnnnnnnnnnnnnnnnnnnnnnnnnnnnnnnnnnnnnnnnnnnnnnnnnnnnnnnnnnnnnnnnnnnnnnnnnnnnnnnnnnnnnnnnnnnnnnnnnnnnnnnnnnnnnnnnnnnnnnnnnnnnnaggctatactgtggctagaattaagctcggagactatcatttctacggatttggcaccgatgtcgattatgaaactgcatttattcattaccgtctggcttctgagcagcaacacagtgcacaagctatgtttaatctgggatacatgcatgagaaaggtctgggcattaaacaggn

SEQ ID NO: 33675 - DNA, 228 bp, Macaca Mulatta
gtctggacctgttgccttgcccacggagccacctttctggcccacagctcccaccaccacttcctgtatgggctccttgaagaggaccagaaaggggagacctctgcctaggcccacacccggggcctggctgggagtggcatgcgtggcgtgactggcctgctggatgtggagggggcgcatgcagggagcaggatagagtgggacagttgggcgggggcggcgggc

SEQ ID NO: 33676 - DNA, 3253 bp, Macaca Mulatta
  misc_feature (1)...(3253): n = A,T,C or G
aggtctggtagaaggaacagtatcagttgactgagtaggtctccctggcagttgtgattcagaggcctagaaagctgaacccacacctggcaggaagggggtggtttgtgggacctgngctgatgtgtgatgaaattttaagccccagctatagctactacaaagaaaagnnnnnnnnnnnnnnnnnnnnnnnnnnnagacaatgaatgtaaaactatgcaagaatcacaggaaacccacatatccaaccacctagatgaagttgttgctgctgttagcatcactaaaagtaagaagttccaaaacaagctgcctcagacagcactattccagcctcctcgagagaaactccacctcnnnnnnnnnnnnnnnnnnnnnnnnnnnnnnnnnnnnnnnnnnnnnnnnnnnnnnnnnnnnnnnnnnnnnnnnnnnnnnnnnnnnnnnnnnnnnnnnnnnnnnnnnnnnnnnnnnnnnnnnnnnnnnnnnnnnnnnnnnnnnnnnnnnnnnnnnnnnnnnnnnnnnnnnnnnnnnnnnnnnnnnnnnnnnnnnnnnnnnnnnnnnnnnnnnnnnnnnnnnnnnnnnnnnnnnnnnnnnnnnnnnnnnnnnnnnnnnnnnnnnnnnnnnnnnnnnnnnnnnnnnnnnnnnnnnnnnnnnnnnnnnnnnnnnnnnnnnnnnnnnnnnnnnnnnnnnnnnnnnnnnnnnnnnnnnnnnnnnnnnnnnnnnnnnnnnnnnnnnnnnnnnnnnnnnnnnnnnnnnnnnnnnnnnnnnnnnnnnnnnnnnnnnnnnnnnnnnnnnnnnnnnnnnnnnnnnnnnnnnnnnnnnnnnnnnnnnnnnnnnnnnnnnnnnnnnnnnnnnnnnnnnnnnnnnnnnnnnnnnnnnnnnnnnnnnnnnnnnnnnnnnnnnnnnnnnnnnnnnnnnnnnnnnnnnnnnnnnnnnnnnnnnnnnnnnnnnnnnnnnnnnnnnnnnnnnnnnnnnnnnnnnnnnnnnnnnnnnnnnnnnnnnnnnnnnnnnnnnnnnnnnnnnnnnnnnnnnnnnnnnnnnnnnnnnnnnnnnnnnnnnnnnnnnnnnnnnnnnnnnnnnnnnnnnnnnnnnnnnnnnnnnnnnnnnnnnnnnnnnnnnnnnnnnnnnnnnnnnnnnnnnnnnnnnnnnnnnnnnnnnnnnnnnnnnnnnnnnnnnnnnnnnnnnnnnnnnnnnnnnnnnnnnnnnnnnnnnnnnnnnnnnnnnnnnnnnnnnnnnnnnnnnnnnnnnnnnnnnnnnnnnnnnnnnnnnnnnnnnnnnnnnnnnnnnnnnnnnnnnnnnnnnnnnnnnnnnnnnnnnnnnnnnnnnnnnnnnnnnnnnnnnnnnnnnnnnnnnnnnngtgtctccagatccagaccctcttatacggaccacaggacaaaaggactctagccacccagcaggccatgggcatnnnnnnnnnnnnnnnnnnnnnnnnnnnnnnnnnnnnnnnnnnnnnnnnnnnnnnnnnnnnnnnnnnnnnnnnnnnnnnnnnnnnnnnnnnnnnnnnnnnnnnnnnnnnnnnnnnnnnnnnnnnnnnnnnnnnnnnnnnnnnnnnnnnnnnnnnnnnnnnnnnnnnnnnnnnnnnnnnnnnnnnnnnnnnnnnnnnnnnnnnnnnnnnnnnnnnnnnnnnnnnnnnnnnnnnnnnnnnnnnnnnnnnnnnnnnnnnnnnnnnnnnnnnnnnnnnnnnnnnnnnnnnnnnnnnnnnnnnnnnnnnnnnnnnnnnnnnnnnnnnnnnnnnnnnnnnnnnnnnnnnnnnnnnnnnnnnnnnnnnnnnnnnnnnnnnnnnnnnnnnnnnnnnnnnnnnnnnnactgtggctgaaaagcttctcttcaaaagtttggtgcaccctgtgcaggagtcagcccgacatctgcttgtacacacagctccttgcatagatctggaatcagatctggaacagtgaaattcaagaaggaagccctttcttataggaggctaatagggattgagaataacatgagaagaaaatgctaataaagggaaacctgaacgcgctggtgtcagcatgtgtcttcaaagtgcagcctgcctcagagttccttgaagcctgaaaaggggtttgggaaagagcccagtaggaggggcaggaggccaacacacctgacttggcctggnnnnnnnnnnnnnnnnnnnnnnnnnnnnnnnnnnnnnnnnnnnnnnnnnnnnnnnnnnnnnnnnnnnnnnnnnnnnnnnnnnnnnnnnnnnnnnnnnnnnnnnnnnnnnnnnnnnnnnnnnnnnnnnnnnnnnnnnnnnnnnnnnnnnnnnnnnnnnnnnnnnnnnnnnnnnnnnnnnnnnnnnnnnnnnnnnnnnnnnnnnnnnnnnnnnnnnnnnnnnnnnnnnnnnnnnnnnnnnnnnnnnnnnnnnnnnnnnnnnnnnnnnnnnnnnnnnnnnnnnnnnnnnnnnnnnnnnnnnnnnnnnnnnnnnnnnnnnnnnnnnnnnnnnnnnnnnnnnnnnnnnnnnnnnnnnnnnnnnnnnnnnnnnnnnnnnnnnnnnnnnnnnnnnnnnnnnnnnnnnnnnnnnnnnnnnnnnnnnnnnnnnnnnnnnnnnnnnnnnnnnnnnnnnnnnnnnnnnnnnnnnnnnnnnnnnnnnnnnnnnnnnnnnnnnnnnnnnnnnnnnnnnnnnnnnnnnnnnnnnnnnnnnnnnnnnnnnnnnnnnnnnnnnnnnnnnnnnnnnnnnnnnnnnnnnnnnnnnnnnagaccatgcttgctggtacacactggtcccacacccaggcctgtcggacatcagcagtgtgctaaaaaggtgtaagatgtggtcattactcaccgtgtctcctatctagttgacatgggtgaagtctgctaaggggtgaatgttcatatgctcccaatccacattgaagccctaatccccaaagggatggtactagaggatggggccttggagaggtgattaggttatgagggtggagccctgataaatgggattagtgctttataagaagagacaccagagagatgatctctctttccaccatgtgaggacacactgagaaggcagccatctgcaggccaggaagagagccctcaccaggaagtgaatctgttggcaccttgagacttcccagcttccagaactgtaagaaataaatgtttgttgtttaagcctttcaggctatggctttctgttacagcagcctgaactgagagtccctgctgagttttttaaataaatgttaattatgatgtt

SEQ ID NO: 33677 - DNA, 170 bp, Macaca Mulatta
ttcagcttcttgaggttctgtcaaatctattcatttgtccattcattcattcatatatgaggttgtgtacaattatttctatcatctatgatacacaaaaacacaataaaaattgggaaagaatacaaacacaagattatagagtaatagcacataacaaacatacacat

SEQ ID NO: 33678 - DNA, 281 bp, Macaca Mulatta
aaggtacttgaagtttattgagttgcccttgactcagagaaagttttgtcaaagatgtcagcagttgctgttaccagatgactgggggcaacatagtgagcatcaggttctgggtgacgtgtccatcacccagttaagaaggcccagtcaactcctttatccactggaaaacaagaagacaaatgcccagtatttgtttgctgatcggagctgtcagttcttggtagacttactttctgcccttggattcagaagagtactgtgtgttggaacaccaaggt

SEQ ID NO: 33679 - DNA, 1211 bp, Macaca Mulatta
  misc_feature (1)...(1211): n = A,T,C or G
nagctatttggaaagtacaaaaagctttattacagaaatttgttcctgaaattcgagatggtcaaagagaatttgctgctacaaatagnnnnnnnnnnnnnnnnnnnnnnnnnnnnnnnnnnnnnnnnnnnnnnnnnnnnnnnnnnnnnnnnnnnnnnnnnnnnnnnnnnnnnnnnnnnnnnnnnnnnnnnnnnnnnnnnnnnnnnnnnnnnnnnnnnncagaactgttcaagctaagccaagtagtagtagtaaagcttctgatcctccagcatcaaaaactacaactacaaaaaccccttctgtgaaacccaaagttaaacagctaaaagtaaaggctgagccaccaccaaagaaacggaaaaaatggaaagaagaattttcatcatcccaatctgactcatctcctgagatccatactagtagtagtgatgatgagnnnnnnnnnnnnnnnnnnnnnnnnnnnnnnnnnnnnnnnnnnnnnnnnnnnnnnnnnnnnnnnnnnnnnnnnnnnnnnnnnnnnnnnnnnnnnnnnnnnnnnnnnnnnnnnnnnnnnnnnnnnnnnnnnnnnnnnnnnnnnnnnnnnnnnnnnnnnnnnnnnnnnnnnnnnnnnnnnnnnnnnnnnnnnnnnnnnnnnnnnnnnnnnnnnnnnnnnnnnnnnnnnnnnnnnnnnnnnnnnnnnnnnnnnnnnnnnnnnnnnnnnnnnnnnnnnnnnnnnnnnnnnnnnnnnnnnnnnnnnnnnnnnnnnnnnnnnnnnnnnnnnnnnnnnnnnnnnnnnnnnnnnnnnnnnnnnnnnnnnnnnnnnnnnnnnnnnnnnnnnnnnnnnnngagtttgctgtcgatccagagaaaatacagttgtattctttgtatcattcactccatcattataaatatcatgtttatctgatatgtaaggatgaggtaatttcttctcatttatttaaaaaagaaatgtttttcagaacgttaaggagactctagctatggtattttggaatgttttaaagagaattgtgaaacacctgtgtgtatatattttgcctatgtgttctataaataatgattcgatttattgttctgagtctctctgctatgttttgtgctcagatttaccctagcctcaccacctcttgtagcagctataattggtaatgttttaaagctgtcgatgcttgctttacatcgccataataaatgatgttttattg

SEQ ID NO: 33680 - DNA, 867 bp, Macaca Mulatta
  misc_feature (1)...(867): n = A,T,C or G
ggggcgtttctcttgcgccctggtccaagatggcggatgaggccacgcgacgtgttgtgtctgagatcccggtgctgaagactaacgccggaccccgagatcgggagttgtgggtgcagcgactgaaggaggaatatcagtcccttatccggtatgtggagaacaacaagaatgctgacaacgattggttccgactggagtccaacaaggaagggactcggtggtttggaaaatgctggtatatccatgacctcctgaaatatgagtttgacatcgagtttgacattcctttcacatataactactactgccccaaaaattgcagttcctgagctggatggaaagacagcaaaagatgtacaggggtggcaaaatatgcctgactgaagcatttcaaaccctttgtggtgcaggaaatggtgcctcaaatttgggactaaactcatctacaatggcttctggggacttgggtcacatggcctggatattagaaaatcaccttgatataggaattcaaaaaaggcggtcgatcccaaataaaacagtagagaatgcccatcccaatggaataaattcaaaagcccacccttatggtaatggaatagaaagggaacccattttgaaaataaggataaacaaaaaacacggggtgtttacacatgatggcacacacaaaatttttatcgcgatataaattgcgcctttttcttataggaaaatactaaccccaccccaccaccattagtgtttgttattacccatcgaaatataanattttttntaaatccccctcgccactatgccccaagtgttatggcgaanacatattatatttatcacaaaaatattntcacaccaacatgttat

SEQ ID NO: 33681 - DNA, 346 bp, Macaca Mulatta
aagtgtcacagatactttttatacatcaaacaaatgatcatgtgcagtaaaggaattcaatgaataaatgttatttttaagtattttgtcatagttatctcctaaatgaaagtattttgctctttagagaccttttgttttctaatagatgtaaggaagaaattttatctctattctatgagtggaagtgaggtgtactgtaaggaaaaggagcaatgagaaatagagtatagtgctttggatataaacatagaattaggcagaaacaatcctttagttaataagatgtattagtatgggaacttttgtaaaataaacatttagagaaatggaaaagcgaattagg

SEQ ID NO: 33682 - DNA, 668 bp, Macaca Mulatta
tgggtccattaatccagcccggccaattaaatcattgccttcggacttaattggaacgggaccacggaagcgaggtttcactggattccccggcagaaagcgagaagcgcttacgttcggtactgggtagagttctaattcggaagggatacatgaaagaggctggaagtcgatttcttccccacatatgtgcatcttcaatctgactgaggtaacagatactgtagaagagaaaaggcggggaagagaacatgttctctttgctgggggacggaacctttagacaccgcacagggggcagggccgcggacatactgaagccaatcagggaggctgttgttgagcgcgtgctctcacccaatgaaagggttggttgttgcgctgcagttggcaggctgctgcgggaggcggtggcagggaagccggagacagcagggtgacaggtaggcggtggtactgtctttgggggacgcaaagtgctaggtgaagagggtttttcttctccttcggccgcggaaactacagagggtagctggcgtgggtggtctggaaaggcggtagttggtgtgttggtggtcccagaacctctcgtaaaccaggtaacatcttgggagggtcctgaggaggagaaggctgcagccgaggcgggtggaagccgagccctcccc

SEQ ID NO: 33683 - DNA, 1863 bp, Macaca Mulatta
  misc_feature (1)...(1863): n = A,T,C or G
aggattcagaagagcatgctgctggatctcaataaggagatcatgaatgaactgggcgtgaccgtggtgggcgacatcattgccattctcaagcatgccaaagtggtgcaccgtcagnnnnnnnnnnnnnnnnnnnnnnnnnnnnnnnnnnnnnnnnnnnnnnnnnnnnnnnnnnnnnnnnnnnnnnnnnnnnnnnnnnnnnnnnnnnnnnnnnnnnnnnnnnnnnnnnnnnnnnnnnnnnnnnnnnnnnnnnnnnnnnnnnnnnnnnnnnnnnnnnnnnnnnnnnnnnnnnnnnnnnnnnnnnnnnnnnnnnnnnnnnnnnnnnnnnnnnnnnnnnnnnnnnnnnnnnnnnnnnnnnnnnnnnnnnnnnnnnnnnnnnnnnnnnnnnnnnnnnnnnnnnnnnnnnnnnnnnnnnnnnnnnnnnnnnnnnnnnnnnnnnnnnnnnnnnnnnnnnnnnnnnnnnnnnnnnnnnnnnnnnnnnnnnnnnnnnnnnnnnnnnnnnnnnnnnnnnnnnnnnnnnnnnnnnnnnnnnnnnnnnnnnnnnnnnnnnnnnnnnnccacaggagtcttcagccgcctgggggccaccccagaaatggacgaggatctggcttgggacagcgacaatgacagcagcagctctgtcttgcagtatgccggggtcctgaagaagctaggacggggcccagccaaggccagtccccagccagcactgactgtcaaagccaaggccacgagctcagcgacaacggccgctgccccgacactgcggcgcctggcgctttcctcacggtccgggctcgagaggaagccggagtccttgtctaaagtcagcatcatcaagagactgggcgcagctacccttgtgcccgaggcccaggacagccaggtcaccagcaccaagagtaagtcctcagctgaagtcaaggtcaccattaagaggactctggtggggccccgggggagcagctccagcgagggccttggtgcccagatggaccacgcaggcactgtgagcgtgttcaaaagactgggccgcaggaccttctagcccacgtgtgggcggggtgcaggcagcagagcccgtgggcatctgccctggccgccccaggctcctggcttcatcacgcctcccaccagctcctggatgacacagcttgtctccctcgggctctagagctaggcccgagcattcgggggatcaccccatttctcctagcctgggatggtcgtcgcagctggcctggccccctccaggactccccttctctcatgtcctctttgctttcttctctggctgtggcctaaacagaacccacttttctacctctcccaagtgccagggggcctcttcctctcctatattccccttcctcccccgagcacggtctgctgcctcagaccccagcttatcagccctccctgtccccctcaactgagtgggtgtcacctggagggcctcccttcccccactccccactgacctccctcactcctctgcgcctctgctgtgacttctctctctccctgtcttcactctgttcatttctcttctgttttctgtccccgtggcaaggcccgactgtccgctgcgtcctgcccgaccctcctgtacctccggcctcccagcggccccctcgtcggcggtggcgtcgagcctgttgagactgttagccgccctccactcccaggccggagggacctctccagaccctgggctgcggctgaggcgcatccgttttcctgccctgggcgtctttgtctctgaaagtctatggcgggtggtgggcaacgggcactgagaagggaggccagtgcctagagtgaagacagctgctgttttaatatatttttgtgactttc

SEQ ID NO: 33684 - DNA, 396 bp, Macaca Mulatta
atttgttaagtgactaatttgttttttcattttaatactttatcaggtgcaacacagtttatgcctgaccccaagctcatggatcacgggcagtcccacccagaagatatagatatgtacagcactagaagctgaagtagactgcatacagagactacatagaaaactacaagatgtgtgacgttgcaaataatgatgaaaaaaatcatgtaatgggtaactgatacatagagtattacttaaaccaagtttttcccttacatatccaaatgtacaatttgataaattacataagtggttaacagacaaactgaatgcaatgcaaacaatgttaaatgattgatgaggagacttaggtagaagtattagcttgcatttgatgacctttaagggcat

SEQ ID NO: 33685 - DNA, 660 bp, Macaca Mulatta
  misc_feature (1)...(660): n = A,T,C or G
ggaaaagtgtccctggtgtatggggggatttggctggtgctgaagtgtttctgaaatctcaagaactgccataaaatctcacgctgccatttccctgaacatatacatacatatatatatagagagagagacagttttccaaactgtcgcctaggctgagcgcactggcgggatcacagctcactgcagcttcaacctccctggctcaagccatccctccnnnnnnnnnnnnnnnnnnnnnagactacaggtgagtgccaccacactcagctaatttttaaatttttttgtagacgggtctccctacnnnnnnnnnnnnnnnnnnnnnnnnnnagactcaagtgttcctcctgtnnnnnnnnnnnnnnnnnnnnaggttacaggtgtgagccactgtgcccaacagtttcccaagttacataaggggaaaacgtggatgtttgctactgttgttactgggtaggttctgaacagcagagacccaggtgcagggcgcgctggtgaaggcccctctccccaaggtggtagcaggaaaaggtccttgacttgatgaacttggtctgcctctgagccactggaggaagctgtgttttgagctagggttttttggcctaaagccagcatttcctcagtttccctttgtggtttaaaggatatggt

SEQ ID NO: 33686 - DNA, 106 bp, Macaca Mulatta
  misc_feature (1)...(106): n = A,T,C or G
ngatgtccacagaaggaggatttggtggtactagcagcagtgatgcccagcaaagcctacagtcattctggcctcgggtcatggaagaaatccggaatttaacagt

SEQ ID NO: 33687 - DNA, 575 bp, Macaca Mulatta
  misc_feature (1)...(575): n = A,T,C or G
aggatcaggtggctactctttagaaattggaagcctggcagctgtctacagacagaaaatagaagacaattcacannnnnnnnnnnnnnnnnnnnnnnnnnnnnnnnnnnnnnnnnnnnnnnnnnnnnnnnnnnnnnnnnnnnnnnnnnnnnnnnnnnnnnnnnnnnnnnnnnnnnnnnnnnnnnnnnnnnnnnnnnnnnnnnnnnnnnnnnnnnnnnnnnnnnnnnnnnnnnnnnnnnnnnnnnnnnnnnnnnnnnnnnnnnnnnnnnnnnnnnnnnnnnnnnnnnnnnnnnnnnnnnnnnnnnnnnnnnnnnnnnnnnnnnnnnnnnagtgtacgtgccctctgcctcactgttcatgctgtatggaagtctgcaggagggaccagcgtcagggtcagggtcagagagggatgacagaaactcagcagcnccagccacagtagagctgtcatccgcaccctcagctcagaagcgcctctctgaggaaaggaaacctcaggaggaggatgagccagccacgaaaaggcaaagcagggaatatgaagacggcccactgtcgctcgtcatgcccaa

SEQ ID NO: 33688 - DNA, 544 bp, Macaca Mulatta
tgtgtagtggctgaaatatatcagcccatgttagacagaagaagtcagagaagtgaagagagatgtgtggaaatgccatgacttgtggaatttggcactcagccatgtggaaattctgaagctccctgagaatgggatgactcgtgtttgaaggatcttatttaaagttgtttttgtattttcttaaagcaatattcactgttataccttggggacttctttgtttacccattctttcatcctttatatttcatttgtaaactatatttgaacgacattcccccaaaaaattgaaatgtaaagacgaggcagagaataaagggttctatgaaatttggaactttatctctgaatgtaacatccctaataacaaccttcattctaagacagcaaaataaaaatttaacaaccaatgaatagtatttaagaaaatgttgaaataagttttttaaaatagcgttacagactgaagcagtcctgaagcaataggttttcactctcttattgagccaattaaattgacattgctatgacaatttaaaat

SEQ ID NO: 33689 - DNA, 684 bp, Macaca Mulatta
ctggagagagagaaagcacggataagagaggagtatgaagagaaaatcagaaagctggaagataagctggagcaggaaaagagaaaggcgcaaatggagaaaaaactagcagaacaggaggctctctgtgctgtaaggcagcaaggggcaagaatggaagtggagagtcaggataggatacttgaatttatcatgaaagcattagagattgcttcctctattttcttacagctgttcgcggaagactaaacttaatgaaaatctctttgtattttctgtatattctctagcaaccttgccccatacttactcatttagcatagtcagagtgctctagtttctgtctctcaggtgctcataactaaggaccaccattggccattagtagatatttgattgacttaacaagagagggacaaattttcaatttgtgaaactccaaagcagaaagtattggtgcttactaccttgtgaattcttccttagtcacgcagagaaaatgtatgcaagagaccaaagaagatggctccaagctatatcatgttacctctaataaaatattttcttctagattctttctatattagcagataatctccctttgtagcttccactcacttactcttgcgttcagagtcacagtgatcatcttacccatgtggtttgttagaaagaaagaccaat

SEQ ID NO: 33690 - DNA, 163 bp, Macaca Mulatta
gggtctaatggcgattgattgtccacatactggcattgtggactatcggcaggtggctttgtcatttgcccaggatttccaagaagcaggtggctctgtcttgactaattttgaagtaaaagatatgaaatggctaaagaaagtccttcaagaagtatagatg

SEQ ID NO: 33691 - DNA, 276 bp, Macaca Mulatta
ctgattttctttttgtttctcaaataggtacatttgcgggagcacatgggtgaaaagtatacaacttacagtgtgaaagctcgccagttgaaattttttgaagaaaacatgaatttttgagtgtttgtcctaatctgctgccggaattaaagacctatttttagagatttttggcttaaaaaacaagggcaaacagtcatttggaagccattcaccactgttttatatctctttttatatctctttggggttttcctacagaaaagaaattggaca

SEQ ID NO: 33692 - DNA, 765 bp, Macaca Mulatta
gaaaattgctgtccttcatagatgaggatgaagccactagtagttttccaggagtagtgatggatttgctctgagccctcttaaattccctccccatctccttttatatcaggggagggctgttcaggcctggtgctgccagtaaggtagccatccatatgaagggtgaactcagcactttccgcccagccacctcatgccccaccccgccagctgctcaggagatgggatacccatattcagtacttctgaatgttccttctgtaaggacgtcccctgacagcccagtagaaaactaaatgctgtttagatcactgggaaagctcatccttccccaatccattcctcctttaagatgagttcctttccccaaagtgacttttcttcctttctaacagatatctgcaaatgaaatagaaatgcttttgatgaggctgccacgcatgttcaaacaggaattcacgggtgtgggagccacgctggaaaaaagatggaagttgtgtgcctttgaaggaattaaaactacctaactgtgaagacctaaacatctctggaagtgaaaccatgtgaacctggccagggctgtgcgatgggggagcaggaggtgtggggttggtccagcacgcaacctttgtggagccgtcgaagcctgcctttagttatatgtgtggcgttctcttgtgagtggaaatgtaattgtgtaccagttcctttaaataaacaaagcttcatactgtgacagatctgtttcctatgaaaaccaaa

SEQ ID NO: 33693 - DNA, 1368 bp, Macaca Mulatta
  misc_feature (1)...(1368): n = A,T,C or G
gcgttactttggctaaaagaaggtgagcggcactctgcccttccagagcaagcatggagcaacaggatcagagcatgaaagaagngaggctgacgcttgtgcttgccctagcaacccctgatagctgccttcggatcgtccttccagtatgggtacaacgtggctgctgtcaactctccagcnnngctcatgcaacaattttacaatgagacttactacagtaggaccggtgaattcatagaagatttccccttgacgttgctgtggtctgtaaccgtgtccatgtttcccttcggagggtttatcggatccctcctggtcggccccttggtgaataaatttggcagngcagaaaaggggccttgctgttcaacaacatattttctatcgtgcctgcgatcttaatgggatgcagcaaagtcgccaagtcatttgagcttatcattatttccagacttttggtgggaatatgtgcaggtnnnnnnnnnnnnnnnnnnnnnnnnnnnnnnnnnnnnnnnnnnnnnnnnnnnnnnnnnnnnnnnnnnnnnnnnnnnnnnnnnnnnnnnnnnnnnnnnnnnnnnnnnnnnnnnnnnnnnnnnnnnnnnnnnnnnnnnnnnnnnnnnnnnnnnggctggccaatcctgctggggctgaccggggtccccgcggcgttgcagctccttttgctgcccttcttccccgagagccccaggtacctggtgattcagaagaaagacgaagaggccgccaagaaagnagccctacagaggctgcgcggctgggactccgtggacagggaggtggccgagatccggcaggaggatgaggcagagaaggccgcgggcttcatctcggtgctgaagctgttccggatgcgctcgctgcgctggcagctgctgtccgtcatcgtcctcatggccggccagcagctgtcgggcgtcaacgctnatctactactacgcggaccagatctacctgagcgccggcgtgcaggaggaccacgtgcagtatgtgacggccggcaccggggccgtgaacgtggtcannnnnnnnnnnnnnnnnntcgtggtggagctcctgggtcggaggctgctgctgcttactgggcttctccatctgcctcacagcctgctgcgtgctcactgcggctctggcactacaggtgaggacgggccagggnggcctgggatactcgggcccactctgccttcagggaggctgctctccttcccctacaggtcccatacccgcgctgctcatcactgagatcttcgtgcagtcctgtcggccatccgccttcatggggggggggcagcgtgcactggctctccaacttcgccgtggggctgatcttcccattcattcagg

SEQ ID NO: 33694 - DNA, 902 bp, Macaca Mulatta
cttccttagtgacttattttctggctagaggtttatctgtaaatcagaaggcacagatagctatgttttccatgttcctcattttttatgtcctgacacttattgggaacattctcattgtcataactattatctatgaccaccgactccatacccccatggatttcttcctcagcaacctgtcctttattgatgtctgccactccactgtcactgtccccaagatgctgagagacacctggtcagaggaaaagctcatctctttggatgcctgtgtgacccagatgttcttcttgcacctctttgcctgcacagagatcttcctcctcactgtcatggcctatgatcggtatgtggccatttgtaaacccctgcagtacatgatagtgatgaactggaaggtatgcgtgctgctggctgtggccctctggacaggagggaccatccactccatagccctcacctccctcaccatcaagctgccctactgtggtcctgatgagattgacaacttcttctgtgacgtacctcaggtgatcaagctggcctgcactgacacccacgtcattgagatcctcatagtctccaacagtggactgatctccgtggtctgttttgtggtcctggtggtgtcctacgcagtcatcctggtgagtctgaggcagcagatctccaagggcaggcggaaggccctgtccacctgtgcagcccatctcaccgtagttacactgttcctgggacactgcatcttcatctattcccgcccatccaccagcctcccagaggacaaggtggtatctgtgtttttcactgcagtcacccccctgctgaaccccattatctatacccttaggaatgaagaaatgaagagtgccttcaacaagttagtggggagaaaggag

SEQ ID NO: 33695 - DNA, 837 bp, Macaca Mulatta
ctttccgaaccacaaaacaattctgctgaaggaaattcacataaatatgatatattaaagaagaatgtatcaaaaaagtcagttataaaaaatgagagaatcaatggtggaaagaagcttttgaattctaataaaagtggggcagccttcaaccagagcaaatctcttatccttccccagacttgtaatagagctaaaatctatacatgcagtgaatgtgggaaagcctttggcaaacagtcaatcctcaatcgccattggagaattcatacaggagagaagccgtatgaatgtcgtcaatgtgggaagacttttagccatggctcatcccttacacggcatcagataagtcatagtggagagaaaccttacaaatgtgttgaatgtgggaaggcctttagccatggctcatcacttactaaccatcagagcactcacactggagagaaaccatacgaatgtatgaactgtggaaagtcttttagtcgtgtgtcccttctcattcagcatctaagaattcatacgcaagaaaaacgctatgagtgtcgtatatgtggaaaggccttcattcatagttcatctctcattcatcatcagaaaagccatactggagagaaaccttatgaatgtagagaatgtgggaaagctttctgctgtagctcacaccttactcaacatcaaagaattcacagtataaagaaaaagtttgaatgcaacaaatgtctcaaagtctttagtagcctgtcatttcttgttcaacatcagagtattcatactgaagaaaatccttttgaagtttagaaatgcaggaaatccttcaaccagcttgaatcactg

SEQ ID NO: 33696 - DNA, 3245 bp, Macaca Mulatta
  misc_feature (1)...(3245): n = A,T,C or G
atggagcggcccccggggctgcggccgggcgcgggcgggccctgggagatgcgggagcggttgggcaccggcggcttcgggaacgtctgtctgtaccagcatcggnnnnnnnnnnnnnnnnnnnnnnnnnnnnnnnnnnnnnnnnnnnnnnnnnnnnnnnnnnnnnnnnnnnnnnnnnnnnnnnnnnnnnnnnnnnnnnnnnnnnnnnnnnnnnnnnnnnnnnnnnnnnnnnnnnnnnnnnnnnnnnnnnnnnnnnnnnnnnnnnnnnnnnnnnnnnnnnnnnnnnnnnnnnnnnnnnnnnnnnnnnnnnnnnnnnnnnnnnnnnnnnnnnnnnnnnnnnnnnnnnnnnnnnnnnnnnnnnnnnnnnnnnnnnnnnnnnnnnnnnnnnnnnnnnnnnnnnnnnnnnnnnnnnnnnnnnnnnnnnnnnnnnnnnnnnnnnnnnnnnnnnnnnnnnnnnnnnnnnnnnnnnnnnnnnnnnnnnnnnnnnnnnnnnnnnnnnnnnnnnnnnnnnnnnnnnnnnnnnnnnnnnnnnnnnnnnnnnnnnnnnnnnnnnnnnnnnnnnnnnnnnnnnnnnnnnnnnnnnnnnnnnnnnnnnnnnnnnnnnnnnnnnnnnnnnnnnnnnnnnnnnnnnnnnnnnnnnnnnnnnnnnnnnnnnnnnnnnnnnnnnnnnnnnnnnnnnnnnnnnnnnnnnnnnnnnnnnnnnnnnnnnnnnnnnnnnnnnnnnnnnnnnnnnnnnnnnnnnnnnnnnnnnnnnnnnnnnnnnnnnnnnnnnnnnnnnnnnnnnnnnnnnnnntagtttaatagtagaacccatggaaaactggctacagttgatgttgaattgggaccctcagcagagaggaggacctgttgaccttactttgaagcagccaagatgttttgtactaatggatcacattttgaatttgaannnnnnnnnnnnnnnnnnnnnnnnnnnnnnnnnnnnnnnnnnnnnnnnnnnnnnnnnnnnnnnnnnnnnnnnnnnnnnnnnnnnnnnnnnnnnnnnnnnnnnnnnnnnnnnnnnnnnnnnnnnnnnnnnnnnnnnnnnnnnnnnnnnnnnnnnnnnnnnnnnnnnnnnnnnnnnnnnnnnnnnnnnnnnnnnnnnnnnnnnnnnnnnnnnnnnnnnnnnnnnnnnnnnnnnnnnnnnnnnnnnnnnnnnnnnnnnnnnnnnnnnnnnnnnnnnnnnnnnnnnnnnnnnnnntatatagtacaggacagcaaaatacagcttccaattgtacagctgcgtaaagtgtgggctgaagcaatgcactatgtgtctggactaaaagaagactacagcaggctctttcagggacaaagggcagcaatgtnnnnnnnnnnnnnnnnnnnnnnnnnnnnnnnnnnnnnnnnnnnnnnnnnnnnnnnnnnnnnnnnnnnnnnnnnnnnnnnnnnnnnnnnnnnnnnnnnnnnnnnnnnnnnnnnnnnnnnnnnnnnnnnnnnnnnnnnnnnnnnnnnnnnnnnnnnnnnnnnnnnnnnnnnnnnnnnnnnnnnnnnnnnnnnnnnnnnnnnnnnnnnnnnnnnnnnnnnnnnnnnnnnnnnnnnnnnnnnnnnnnnnnnnnnnnnnnnnnnnnnnnnnnnnnnnnnnnnnnnnnnnnnnnnnnnnnnnnnnnnnnnnnnnnnnnnnnnnnnnnnnnnnnnnnnnnnnnnnnnnnnnnnnnnnnnnnnnnnnnnnnnnnnnnnnagatcactcctacagtgacagcacagagatggtgaaaatcattgtgcacactgtgcagagtcaggaccgtgtgctcaaggagctgtttggtcatttgannnnnnnnnnnnnnnnnnnnnnnnnnnnnnnnnnnnnnnnnnnnnnnnnnnnnnnnnnnnnnnnnnnnnnnnnnnnnnnnnnnnnnnnnnnnnnnnnnnnnnnnnnnnnnnnnnnnnnnnnnnnnnnnnnnnnnnnnnnnnnnnnnnnnnnnnnnnnnnnnnnnnnnnnnnnnnnnnnnnnnnnnnnnnnnnnnnnnnnnnnnnnnnnnnnnnnnnnnnnnnnnnnnnnnnnnnnnnnnnnnnnnnnnnnnnnnnnnnnnnnnnnnnnnnnnnnnnnnnnnnnnnnnnnnnnnnnnnnnnnnnnnnnnnnnnnnnnnnnnnnnnnnnnnnnnnnnnnnnnnnnnnnnnnnnnnnnnnnnnnnnnnnnnnnnnnnnnnnnnnnnnnnnnnnnnnnnnnnnnnnnnnnnnnnnnnnnnnnnnnnnnnnnnnnnnnnnnnnnnnnnnnnnnnnnnnnnnnnnnnnnnnnnnnnnnnnnnnnnnnnnnnnnnnnnnnnnnnnnnnnnnnnnnnnnnnnnnnnnnnnnnnnnnnnnnnnnnnctacatttctactatgatcagaagaacatgattttacaagtataacatttttgagtaatttaagcnnnnnnnnnnnnnnnnnnnnnaaaaagtcaatgtacttgtttgaatatttgttntaatgccacagctgtttaggagcatcatcatgacacatttgtgccttcaatcttggtgaaacattatttaactgattaaaaatgccttctatgtattagtttccacttttaactgttgggcataaggccagatgtagttttgtatacagagaagaagacctcaactaataggcattttaagtaaaagttgtctatgttttttctaaaagggctgctcacaagttttatttcttgaagaataaattctacctccttgtgttgcactgaacaggtgctcttcctggcatcataaggagttggtgtaatcattttaaattttactgaaaatttaacagtattcccttctcactgaagggattgtgtatgtatgcttctaatattagttggctttcataaatcatgttgttttgtgtatatgtatttaagatgtacatttaatagtgtcaaagagaagatgcctgttaatttataatgtatttgaaaattacgttttttcatttgtaaaaatgagtcatttgtttaaacaatctttcatgtcttgtcacacaaatttataaaggtctgcaatcctttatctgtaattgtaattccaaaatccaaaaagctctgaaaacaaggtttccataagcttggtgacaaaactcgtttgcttgcaatctaatctgaactgactttgaatgtttttaccccaagtagtgtgactattcctttattttgctgcttgatgatgataagagagggctgctgccacagactctgatgagg

SEQ ID NO: 33697 - DNA, 363 bp, Macaca Mulatta
tgtaatgaatgtggtaaagccttctctcgaatctcatccctcactcttcatgtgagaagtcacacaggggagaaaccctatgaatgtaataaatgtgggaaagccttttctcagtgctcattacttattatacatatgagaagtcatactggtgagaaaccctttgaatgtaatgaatgtgggaaagcattctctcaaagagcatccctttctatacataagagaggtcatacaggtgagagacaccgagtatattaaatggaagaagccctcttaaattcaacccatgttttacttaaaatatcttggcataagctcaaaaaaccaggatctttatggaaaaattttaatactttgttaaaa

SEQ ID NO: 33698 - DNA, 653 bp, Macaca Mulatta
  misc_feature (1)...(653): n = A,T,C or G
gatcgttcttgacgttggctgtggctccgggatcctgtcgttttttgccgcccaagctggagcacggaaaatctacgcggtggaggccagcaccatggcccagcacgccgaggtcnnnnnnnnnnnnnnnnnnnnnnnnnnnnnnnnnnnnnnnnnnnnnnnnnnnnnnnnnnnnnnnnnnnnnnnnnnnnnnnnnnnnnnnnnnnnnnnnnnnnnnnnnnnnnnnnnnnnnnnnnnnnnnnnnnnnnnnnnnnnnnnnnnnnnnnnnnnnnnnnnnnnnnnnnnnnnnnnnnnnnnnnnnnnnnnnnnnnnnnnnnnnnnnnnnnnnnnnnnnnnnnnnnnnnnnnnnnnnnnnnnnnnnnnnnnnnnnnnnnnnnnnnnnnnnnnnnnnnnnnnnnnnnnnnnnnnnnnnnnnnnnnnnnnnnnnnnnnnnnnnnnnnnnnnnnnnnnnnnnnnngggcaggtggtgggcgggggccccgggcctctgcacctggcaccccctcttctctcttggcagcgcctgtctggcttccccagcagccactgccctttgccttccaggatagaaatcccattcaaattccacatgctgcattcagggctggtccatggcctggctttctggtttgacgttgctttcatcggctcca

SEQ ID NO: 33699 - DNA, 756 bp, Macaca Mulatta
ctctccctcggtgagtcctcagccacccagggcccagaaacagaggcctgccgagggaggagcctggcctgtgcccggcagtcggcagtgtgaggtctggagtgtttgagcttctaagagtgaaatgactccttttccttcctggccctcaggggcctctcgaggtcagcctctccaaaacccctacctcagctctgtctgcactgagaaatctccccggtggatgtctgcaaagtctgtgccccaagcctgggagagctatctggggagggggagaggaggcccagcagaatatgccctcgagttagggtttgcgactccgcctccctgggacccagattgggtcagatgcctgtgcttggaggggacaaggttgactgcttagcgggcgcggcgcacagggctgccaggcctggcccctctccgggaaggtcggtcgagagctgagatgggcagccctgtcccttcccccagacccatgtggttttttccaccgtttgttaataaagcctggaaccgctgtgtgcctgtctcatctttgatgcctttcccagtctgtctccggacaccccccgcccatttctgtctggctcctcctttccccagttaacgttaattgttggggggcggtgctggactgggagaaggggaggctgtgagctcagggacagccctgggccctgccagcccttctgagtcacgctccctattaccgaattttttccacctcacagctgcctggtgcgcagggagtgg

SEQ ID NO: 33700 - DNA, 277 bp, Macaca Mulatta
attaccaccattctttctgtcttgccaggtctccatccaatcccaccccaaggaggaaaactggagattgctggaatggttgtgggccagtgggctggcagcagatcctccaggggccgaggatccttcggcatgcaagtggtttctgtcggtgggccaggaaaggggtatgtatccaaataggttggtatgagctagtccccttgggaaaatgcctatgtatccttgggaaaatgcctaggtattaaatccttctattaaagcaagaagtactaac

SEQ ID NO: 33701 - DNA, 671 bp, Macaca Mulatta
atttttgtctacagactcctgatcgttgctcggaccgtctccacagggaagcgaacaaggccttgactcagtacgcggagctgaagttaggaccacagcaccacagcaccctgacaaagtggccaatccaatgagagagctcttatgacgtcattgggtgctagtcagattggtgttgactgatgataggccaaaggccaatgggcggggcttgtttggaaaaggtggtaaatctcacaaagggaaggacagcagttgcagatttctagaaaattccagatgtagaaacttttggtttctgattggcctcaggataggctctgagacaggaattaagagactttgagtgactcatttttgagagaataaccaatcggaagccacagagtggtatgacataacttggtgctaaggggaattgtattcccacccaacaattggctacctgcaggccagaggggagtggctcaaaaggcaggaagcggtaagtaccacggaatggaaggttgccacggcctgggaccttccttgccaccctgacctctgcccctgcacccacagcaaacaacataatctcaaatttgggtgatcttttcaggagagtcattgagtgggtactcagggagtcttagaggaagagatgtgatttaaggtccatttgtttgtttctc

SEQ ID NO: 33702 - DNA, 305 bp, Macaca Mulatta
  misc_feature (1)...(305): n = A,T,C or G
cgggcggcggcggcgcagacgacatgggcgccgggcaccaccacggcgcgcnnnnnnnnnnnnnnnnnnnnnnnnnnnnnnnnnnnnnnnnnnnnnnnnnnnnnnnnnnnnnnnnnnnnnnnnnnnnnnnnnnnnnnnnnnnnnnntgcgcctggaggagcgcttctccgacgaccagctggtgtccatgtcggtgcgcgagctgaaccggcagctccgcggcttcagcaaggaggaggtcatccggctcaagcagaagcggcgcacgctcaagaaccgcggctacgcgcagtcctgccgtttca

SEQ ID NO: 33703 - DNA, 112 bp, Macaca Mulatta
tcaggagggagaaggatccccagccacagcagttgccacccatggacccaaagttgcagaagcagctgaggaaggcagagaaggccgagagggagttccggaagaagttcaa

SEQ ID NO: 33704 - DNA, 1503 bp, Macaca Mulatta
  misc_feature (1)...(1503): n = A,T,C or G
ggggcttcactgtataaataggagaggatgccagcccagaggtaacagaacagcttcaggttatcgaaataacaatgttaaggaaactcttatctcagtcatgcataaatatgcagtgatatggcagaagacaccagagcagatgcagagagccattttgtgaatggattggattatttaataacattaccttactgtggaggaaggattgtaaaaaaaaaatgcctttgagacagtttcttagctttttaattgttgtttctttctagtggtctttgtaagagtgtagaagcattccttctttgataatgttaaatttgtaagtttcaggtgacatgtgaaaccttttttaagatttttctcaaagttttgaaaagctattagccaggatcatggtgtaataagacataacgtttttcctttaaaaaatttaagtgcgtgtgtagagttaagaagctgttgtacatttatgatttaataaaataattctaaaggaaattgtgtaattatagactttttattttaaataagttaaggagtgggtagtataattaaggtccgttgcanagctgttgttatatttgtataagataaatgctggtcagatataagtgtgttgtctgcaattcatcaggattaaattatgtagataacttaagggatatctctgcaaggagaaacacctttttagatcttttagatgctgcttctttaatgcaaggaaaggaaataaccccagcgaggtactcttcagggacacaggtctagtacaagagaactcttgacggctactaagttcagccagtcttaaaaaactgtgctgtttctacaaaactttaactacagtagtttttaaggatgccaacgaaagctgagggtgtagagcaaaatagttctaagcttcagttaaacttctttaggtaagatcttatttacttttcctttcttaattttcctccctaaaagataaactaatactcttaaatggtctttcagtatagtggttcttacgtagtttaacatagctataaattgagtttaacaatttataaactcaagagaataatttttataaaccctgttttccaatctgtcatttacttaaattattttggttgnnnnnnnnnnnnnnnnnnnnnnttcctaccccctccccctccgtgtgaagatttgggtgcttaacatatcatttttttccctgctggaattttagcattgatatgaaccatggacaagtatattctgctgccacaaagactgtaaagtgcttcatttcaacagctgaggcaagccaagtgatcattaataaagctttttcttggttccttcagtgggtgttggtagtaaaatgggaaggtgtctttgctgcaggtaactaatggaagaagtggtcaacccacgaagtccttcaaggaaaataagaaaattcttgtacccatctgaaaaggtaagttcttggttggggggcccttccattttaaaaaaggaccttccttgaaaaaa

SEQ ID NO: 33705 - DNA, 863 bp, Macaca Mulatta
cctgggagtcaggaggcctgttttttgcctgattcttacgtgaaactgggttctggccttgctttttcttggctgggttcttcctagggtgttttgttttagcattctgagaggctaactagctacccctttcttctctggcccaggtgaaaatctggttccagaaccgccgttccaagttcaagaaactctacaagaacggggaggtgccgctggagcacagtcccaataacagtgattccatggcctgcaactcaccaccatcacccgccctctgggacacctcctcccactcgactccggcccctgcccgcagtcagctgcccccgccgctcccatacagtgcctcccccagctacctggacgaccccaccaactcctggtaccacgcacagaacctgagtggaccccacttacagcagcagccacctcagccagccaccctgcaccatgcctcccccgggcccccgcccaaccctggggctgtgtactgagcacccacctgacctgcacccctgacaaaggaccccaggaccaggcagaaggcgcctccgtcctagccactcaggaatcatcgaggagcacagggaaaaggaactccctttccccctcccttgccccttcctccagggacccaagcgcttccagatgacatttgcatggaccaaggatgccccctgaacctccctccctctgcctagacactggggtgcccctccagatgtgggagcattccaccccagtggggacagccgttcccctacatgctccaggagcctggattggcgttaaatggctcatcattttccagcttcttaaacttagtgcctattcccagactggagaccttgggatgggggaga

SEQ ID NO: 33706 - DNA, 416 bp, Macaca Mulatta
cgggacgacgagtcctgtcccagtttgagtttccccaaatgccaagctggggtaaggatttggttctggcggatggttgcgcacccctgcaggcaaaatggaaacgcggccccttgttcaaaagcgaagaattcgaagaattcgaaagagcaacagccgagcgttacagtgaaccggggccttaggactgagcggtggcaacgcaggcgggcgagcgccagggagccccgagaccgtgggcgtgccgggggtgggcgagcgctggggagccctggagaccatgggggtgccgggggtgggcgagtacaggggagccccggagaccatgggggtgccgggggtgggcaagcgccagggagctcccagactgtgggcgtaccgggggtgggcgagcgccagggagccctggagaccat

SEQ ID NO: 33707 - DNA, 176 bp, Macaca Mulatta
ggaagtgctggagtttcagagtcaagaatttatagggaatccagagggcgtggcagcaatgaaccgcacataaagcgtccaatgaacgccttcatggtgtgggctaaagatgaacggagaaagatccttcaagcctttcctgacatgcacaactccaacatcagcaagatattggg

SEQ ID NO: 33708 - DNA, 140 bp, Macaca Mulatta
agacctacaggaagtggagctcggaaggtcgagggggaagacgaggccatgatgcccccatgatagcatatgacgccctccttgcagcaggcaacaactggactgagctgtgtcaccgggccatgtttcatggaggtgag

SEQ ID NO: 33709 - DNA, 564 bp, Macaca Mulatta
  misc_feature (1)...(564): n = A,T,C or G
agtggaccagggtgggttaggtgcccgagccaaagccccaccatccctgccacatagtgcttccttacgtagcaccgggagcatgtcagtggcgtccgcagccctggtggccgaacctgtgcagaatgggagccggtcccggcagcagtcctcttcctccagagagagccctgttcccaaagtgagagcaatccagagacaacagacacagcaggtaggcacgagtgctgaaggggcgtggcttctacttggtccatctgtttcnnngtatgaacaagaaattactaaactgaaggagcgcctgagagtgtccagccggcgactggaggaatatgaacgccgcttgctggtgcaggagcagcagatgcagaagctgctgctggaatacaaggcccgactggaggacagcgaggagcggctccgaagacagcaggaagagaaggacagccagatgaaaagcatcatcagcaggnaggctaatggctgtggaagaagacttgaagaaggatcatgctgagatgcaagcagttattgatgcaaagcagaaaataattgatgcacagg

SEQ ID NO: 33710 - DNA, 574 bp, Macaca Mulatta
tgaaaactcagctgtcactgttcatgttcttacagacaccaggccctctgggaccgctacatgggcaccctccgcggctgcctcctgcgcctctatcatgactgaggcccctcccaatgtcccgcccacactgacaataaagttgccctgagtttggagactggtcctcgctccggggagcaggtgggggacgtgcagatgtgcctgtgtctgtctctgagcacctggtgtccgtgtacaaggatggacatttacagtggcctcttgggaactgggacatatctcagggaatggtgactgtgctccgcccatccaccagaagagtccactcacaagccagacgtcttgtcttggtttattcaggctgtattgagattgggaagatgagcaaaaacctgggggtagggctggcgaggaggcagctggcctaacaggacagaactgagggggccaggtgggttcagggagggcaggagactcggggcttcacatccggtttctgcacacgggcagtgagcgggaacctggtgatgccgcaggtattgctgcctcggtgtagccggaagtagcccta

SEQ ID NO: 33711 - DNA, 1064 bp, Macaca Mulatta
  misc_feature (1)...(1064): n = A,T,C or G
ggggcctatgagacttgcgctaagcggaagttggtcctcttttccgtggcgcctcggaggcgttcagctgcttcaagatgaagctgaacatctccttcccagccactggctgccagaaactcattgaagtggacgatgaacgcaaacttcgtactttttatgagaagcgtatggccacagaagttgctgctgacgctctgggtgaagaatggaagggttatgtggtccgaatcattggtgggaacgacaaacaatgtttccccatgaagcagggtgtcttgacccatggccgtgtccacctgctactgaataatgggcattcctgttacagaccagggagaacgggagatagaaagagaaaatcagttcgtggttgcattgtggatgccaatctggaacgtatctcaattaggttnnnnnnnnnnnnnnnnnnngactaatggatattaccagggaaccaaaccgaataacaaccagttttcctttctcaggtccttggggacccctctataaaagaaatcattaacctagaaaagcccccgacgaagccagcgttatatcaaaaatgctatctccttttctgggtcaagtgaagtggaaacttgttcacctgacgtcatgatacaagtatcactcaatgggactgtaagaacaatgaaagtacgcctcccatatagatgactcgctagacaggtgctagagggaggtactagtgtagataacaatatccttcttgcgttaatctctgttgtaggacctacccccacaagatagaatgtggaggaattccggttatacacttgggattaaaatacacgaagtnncgattggtacacacacccacgctaaaagccatgacgtggaaaagagggatcgagacgaacgaatagncttggtcgctctgtagtaatgtgcaaggagcaacatactgtgtacttttgtgagggaatatatgtacaagtatggtgatcaaagagtccttcaccgcaatacacaatataacgctcctaaanaacacgttattgaaagctgatccattgtgttacgttatagaaatatgttct

SEQ ID NO: 33712 - DNA, 92 bp, Macaca Mulatta
gaaccatattctaagatatgaaccactgcagctaagcaaatgacaaataaaggtcatctgactcagtcaaagatacctattgtgaggccaaa

SEQ ID NO: 33713 - DNA, 1340 bp, Macaca Mulatta
  misc_feature (1)...(1340): n = A,T,C or G
ggaatatttggagttttcctggtcttattggatgtggctctnnnnnnnnnnnnnnnnnnnnnnnnnnnnnnnnnnnnnnnnnnnnnnnnnnnnnnnnnnnnnnnnnnnnnnnnnnnnnnnnnnnnnnnnnnnnnnnnnnnnnnnnnnnnnnnnnnnnnnnnnnnnnnnnnnnnnnnnnnnnnnnnnnnnnnnnnnnnnnnnnnnnnnnnnnnnnnnnnnnnnnnnnnnnnnnnnnnnnnnnnnnnnnnnnnnnnnnnnnnnnnnnnnnnnnnnnnnnnnnngatggacacgtttatttcgacttctacgacttatcattctgataagagtttttcatctggctcatctaaaaagacaacttggaaagctgataagaaggctggtnggtttcaggaaacaaaaggcgatacaaaagggatggatttgacctagacctcacttatattacnnnnnnnnnnnnnnnnnnnnnnnnnnnnnnnnnnnnnnnnnnnnnnnnnnnnnnnnnnnnnnnnnaggaagttgtacagtttctagacaagaaacatccaaaccactatcgagtctacaatctatgcagnnnnnnnnnnnnnnnnnnnnnnnnnnnnnnnnnnnnnnnnnnnnnnnnnnnnnnnnnnnnnnnnnnnnnnnnnnnnnnnnnnnnnnnnnnnnnnnnnnnnnnnnnnnnnnnnnnnnnnnnnnnnnnnnnnnnnnnnnnnnnnnnnnnnnnnnnnnnnnnnnnnnnnnnnnnnnnnnnnnnnnnnnnnnnnnnnnnnnnnnnnnnnnnnnnnnnnnnnnnnnnnnnnnnnnnnnnnnnnnnnnnnnnnnnnnnnnnnnnnnnnnnnnnnnnnnnnnnnnnnnnnnnnnnnnnnnnnnnnnnnnnnnnnncagaatagatatgttggatattttgcacaagttttcataactacaactggaatctccctccaagaaagacactgtttataaaaagattcgttatttattcgattcatggnnnnnnnnnnnnnnnnnnnnnnnnnnnnnnnnnnnnnnnnnnnnnnnnnnnnnnnnnnnnnnnnnnnnnnnnnnnnnnggtatttcatgacactgaaacagacagggtaataattgatgtgttcaactgtccacctctgtatgatgatgtgaaagtgcaagtttcctcttnnnnnnnnnnnnnnnnnnnnnnnnnnnnnnnnnnnnnnnnnnnnnnnnnnnnnnnnnnnnnnnnnnnnnnnggctttatctacaaagaaatgaattggataatcttcataaacaaaaaacatggaaaatgtatcaaccacaatatgcagtagagacgtattttgatagagaaatga

SEQ ID NO: 33714 - DNA, 1287 bp, Macaca Mulatta
  misc_feature (1)...(1287): n = A,T,C or G
ttggaggagttggagtcccagcagccccatctatcacagctgtgactgtgaacaagagcctgctgaccccccttaacctggagattgaccccaatgcccagagggtgaagaaggatgagaaggagcaaatcaagacccttaacaacaagtttgcctccttcattgacaaggtnnnnnnnnnnnnnnnnnnnnnnnnnnnnnnnnnnnnnnnnnnnnnnnnnnnnnnnnnnnnnnnnnnnnnnnnnnnnnnnnnnnnnnnnnnnnnnnnnnnnnnnnnnnnnnnnnnnnnnnnnnnnnnnnnnnnnnnnnnnnnnnnnnnnnnnnnnnnnnnnnnnnnnnnnnnnnnnnnnnnnnnnnnnnnnnnnnnnnnnnnnnnnnntatgaagaggaagtggtatgtcgggccaatgctgagaatgagtttgtggctctgaagaaggnnnnnnnnnnnnnnnnnnnnnnnnnnnnnnnnnnnnnnnnnnnnnnnnnnnnnnnnnnnnnnnnnnnnnnnnnnnnnnnnnnnnnnnnnnnnnnnnnnnnnnnnnnnnnnnnnnnnnnnnnnnnnnnnnnnnnnnnnnnnnnnnnnnnnnnnnnnnnnnnnnnnnnnnnnnnnnnnnnnnnnnnnnnnnnnnnnnnnnnnnnnnnnnnnnnnnnnnnnnnnnnnnnnnnnnnnnnnnnnnnnnnnnnnnnnnnnnnnnnnnnnnnnnnnnnnnnnnnnnnnnnnnnnnnnnnnnnnnnnnnnnnnnnnnnnnnnnnnnnnnnnnnnnnnnnnnnnnnnnnnnnnnnnnnnnnnnnnnnnnnnnnnnnnnnnnnnnnnnnnnnnnnnnnnnnnnnnnnnnnnnnnnnnnnnnnnnnnnnnnnnnnnnnnnnnnnnnnnnnnnnnnnnnnnnnnnnnnnnnnnnnnnnnnnnnnnnnnnnnnnnnnnnnnnnnnnnnnnnnnnnnnnnnnnnnnnnnnnnnnnnnnnnnnnnnnnnnnnnnnnnnnnnnnnnnnnnnnnnnnnnnnnnnnnnnnnnnnnnnnnnnnnnnnnnnnnnnnnnnnnnnnnnnnnnnnnnnnnnnnnnnnnnnnnnnnnnnnnnnccgtcagcagctcccggggaggcctggtgtgcgggcctgagcctttggttgccagctccaccctctcccgcagcggggtcaccttctcaggcagcagcagcgtctgtgccaccagtggtgtcctggcttcctgcggcccgaaacggggtggagcccaggtcgccccggccactggggacctgcagagcactggtaccaggagtggctc

SEQ ID NO: 33715 - DNA, 189 bp, Macaca Mulatta
cgggaaaccttccattctttgctgctgatcgtgggattccatttgggtagttttcacgttcgtggatagactcgtatctgtgaccagtgtcagccaccgcggatggcaagagacctaatcggaccggccctgccgcccggcttcaaggcccgcggaacagcggaggacgaagagcgggacccgagccct

SEQ ID NO: 33716 - DNA, 564 bp, Macaca Mulatta
  misc_feature (1)...(564): n = A,T,C or G
aagacagttgacttggttttgcacagtgtaacagcgcagttgcattctggccactttgacctcatagctcctaaatgatgagtttgtcattnttatgaactcatgacaggataataaggttgaagacctgctgtagttagataggggctttaatgcttcccatgcaccggtcatctggacaaaagcataagccaaacatcctgtttaaactgtagaataaccagatagtcccatcaggataaagacttcatctagatgatgcccctcagagatgcctttagtgtagctggcttggggtatcagcatatttgaggtatagttagataaacggtacagggtctgcatactgttaaaccatagtttgtggcacccgcttctctaactccacctgttagaagctatgtgtttgaaggaataaatcagtgcagtgtaaataaaatgcttttgtaaggagaagattaatccaggtttgcatgatttttttaaaaacaactctaaacatgatacaaaaaagtgggtgaaagtaaatgttcccagaatggatgtggggaaaatatagcaata

SEQ ID NO: 33717 - DNA, 924 bp, Macaca Mulatta
ctccccatctctttagtccccttcctttcgcttcctcttttataatgtcacataaatcagggacagtaggatcacattataacctactttgtcacagggattcgatttttcttatatcaaatcatgtttcctgaaacccagctggggcatatgcactcaatgtcttaatacatagctattaatgtaccgggtattggccttgcccctgaatatcagcaatatattataaaaggttccagtagatgagacgattgagtctgagtacaattgcagtaaattctgccaataaagatattgtactgttacggtcttagagttaaggccacttgaatgcagtatgcacattcatgtaaacagacaatcagggtaggcctagaataaccacaaaaattctattggccttactacagccgcctatgtgtagaacaatggaggagatagtttgtggtccattattgtaccctgtttcatccattagccagcatcagaatctctctttcaggtcatttattaaatacgattgaaatgtttaaaagttcctaaacatgattcgtgattattaaaatatcatatgactgataaaagactttaagaactttagatattacctgttgcctcaaaatgtaacagaaattattcttggagctttctttttagctatcctaattactgcaaataaatatttgttcttatagttttaaatctaaaagaaaaatcttttggttttgttttaaaaccttaaacttgaagtcatattaataaaattaatatattgtacatagtggaaaattttcagtagctaatttaaaatttcaaaaaatgctattaaagaattttgattcatatatttaaactttttagttatgcatgcttcttattaaccaaaaaatgataataccattcagtttagtgagcagtatgaga

SEQ ID NO: 33718 - DNA, 791 bp, Macaca Mulatta
gggggagaaactgccaagcaagttcaagaagttctatgcggagtttgaaagtttaatggacccttcaaggaaccacagggcctacaggctgacggtagctaagctggaaccgcctctcatccccttcatgcctttgctcattaaagatatgacatttactcatgaggggaacaagacgttcattgacaatctagtaaactttgaaaaaatgcgcatgattgcaaatacggccagaacagtgagatactacaggagccaacccttcaatcctgatgcagctcaagctaataagaaccatcaggatgtccggagttatgtacggcaattaaatgtgattgacaaccagagaactttatcacagatgtcacacagattagagcctcgtcgaccatagacatttcaaatgcccagagcaacagtttgtctccagtccacaatctttcaaaaatgccatttatgctactactgactgtattgccactagagaattccacaaaacaagcaaaaacacatcctgagacacctcagggctgcattcagcttaccagctacctggcaagagaaggaattatttgacttgcctaaagcttacacactctagcttaggaatccccagtttgtggttacccctgtttcatttccacttgtgccatcttctctgctgaagtgttgaataaggcccctcgtgaaagagtttggtagaaataccccttgtcagagaactagcaagccccctggacatttggtttcttaagagtgttttatggggaatgagatgttgctacaaaatg

SEQ ID NO: 33719 - DNA, 1300 bp, Macaca Mulatta
  misc_feature (1)...(1300): n = A,T,C or G
ccaggtacagagcatgaagcagacaaacagcagcctacgccaagccctggagggcggcattgatccactccgccccccggagnnnnnnnnnnnnnnnnnnnnnnnnnnnnnnnnnnnnnnnnnnnnnnnnnnnnnnnnnnnnnnnnnnnnnnnnnnnnnnnnnnnnnnnnnnnnnnnnnnnnnnnnnnnnnnnnnnnnnnnnnnnnnnnnnnnnnnnnnnnnnnnnnnnnnnnnnnnnnnnnnnnnnnnnnnnnnnnnnnnnnnnnnnnnnnnnnnnnnnnnnnnnnnnnnnnnnnnnnnnnnnnnnnnnnnnnnnnnnnnnnnnnnnnnnnnnnnnnnnnnnnnnnnnnnnnnnnnnnnnnnnnnnnnnnnnnnnnnnnnnnnnnnnnnnnnnnnnnnnnnnnnnnnnnnnnnnnnnnnnnnnnnnnnnnnnnnnnnnnnnnnnnnnnnnnnnnnnnnnnnnnnnnnnnnnnnnnnnnnnnnnnnnnnnnnnnnnnnnnnnnnnnnnnnnnnnnnnnnnnnnnnnnnnnnnnnnnnnnnnnnnnnnnnnnnnnnnnnnnnnnnnnnnnnnnnnnnnnnnnnnnnnnnnnnnnnnnnnnnnnnnnnnnnnnnnnnnnnnnnnnnnnnnnnnnnnnnnnnnnnnnnnnnnnnnnnnnnnnnnnnnnnnnnnnnnnnnnnnnnnnnnnnnnnnnnnnnnnnnnnnnnnnnnnnnnnnnnnnnnnnnnnnnnnnnnnnnnnnnnnnnnnnnnnnnnnnnnnnnnnnnnnnnnnnnnnnnnnnnnnnnnnnnnnnnnnnnnnnnnnnnnnnnnnnnnnnnnnnnnnnnnnnnnnnnnnnnnnnnnnnnnnnnnnnnnnnnnnnnnnnnnnnnnnnnnnnnnnnnnnnnnnnnnnnnnnnnnnnnnnnnnnnnnnnnnnnnnnnnnnnnnnnnnnnnnnnnnnnnnnnnnnnnnnnnnnnnnnnnnnnnnnnnnnnnnnnnnnnnnnnnnnnnnnnnnnnnnnnnnnnnnnnnnnnnnnnnnnnnnnnnnnnnnnnnnnnnnnnnnnnnnnnnnnnnnnnnnnnnnnnnnnnnnnnnnnnnnnnnnnnnnnnnnnnnnnnnnnnnnnnnnnnnnnnnnnnnnnnnnnnnnnnnnnnnggggccttacagcagcagaggctggaagggaagttctgtcttcaggggccagctgggaaacgctaaggagctgtgggtgcccgccaggcccaccttccagaagcttggagaaatgggggttgggaacttatgcagacatggatttacttttcaacatgttttaaaaat

SEQ ID NO: 33720 - DNA, 505 bp, Macaca Mulatta
  misc_feature (1)...(505): n = A,T,C or G
agttccacatttatacccagtattgcactaactatccaaggtnnnnnnnnnnnnnnnnnnnnnnnnnnnnnnnnnnnnnnnnnnnnnnnnnnnnnnnnnnnnnnnnnnnnnnnnnnnnnnnnnnnnnnnnnnnnnnnnnnnnnnnnnnnnnnnnnnnnnnnnnnnnnnnnnnnnnnnnnnnnnnnnnnnnnnnnnnnnnnnnnnnnnnnnnnnnnnnnnnnnnnnnnnnnnnnnnnnnnnnnnnnnnnnnnnnnnnnnnnnnnnnnnnnnnnnnnnnnnnnnnnnnnnnnnnnnnnnnnnnnnnnnnnnnnnnnnnnnnncaggagatacagagtttgctcactaactggaaggggccagacctgaccagctatggggaactggtgcttgagggaaccttccgcatccagcgagccaagaatgagcggacactcttcctcttcgacaagctgctgctcatcacgaagaagagagacgacacgtttacatacaaagctcacatcct

SEQ ID NO: 33721 - DNA, 322 bp, Macaca Mulatta
agttatttccattgtgtttgttttttaaaagcattatgatactgaaaaaggaaaccagagtaacttaccaacgtgtctcctggattttactttgaagcctattgttataatttctgtagaataaagtcttgggaggaaattccttgtacatttgtatttatgatgtatgtttttagggtgaagtaagggaaataatgtggatcttatttaatagcaaatatcttctgttctgtattgatccattgaaaaaaatgttggcaggtttatttttaaggaaaagttaaacagaatattcagactattgcatttgaaaatctgggtg

SEQ ID NO: 33722 - DNA, 2081 bp, Macaca Mulatta
  misc_feature (1)...(2081): n = A,T,C or G
ggtacaagaaaattccccaggacacagagctggattggagcctttctttgattttattgtttctattaatggttcaagattannnnnnnnnnnnnnnnnnnnnnnnnnnnnnnnnnnnnnnnnnnnnnnnnnnnnnnnnnnnnnnnnnnnnnnnnnnnnnnnnnnnnnnnnnnnnnnnnnnnnnnnnnnnnnnnnnnnnnnnnnnnnnnnnnnnnnnnnnnnnnnnnnnnnnnnnnnnnnnnnnnnnnnnnnnnnnnnnnnnnnnnnnnnnnnnnnnnnnnnnnnnnnnnnnnnnnnnnnnnnnnnnnnnnnnnnnnnnnnnnnnnnnnnnnnnnnnnnnnnnnnnnnnnnnnnnnnnnnnnnnnnnnnnnnnnnnnnnnnnnnnnnnnnnnnnnnnnnnnnnnnnnnnnnnnnnnnnnnnnnnnnnnnnnnnnnnnnnnnnnnnnnnnnnnnnnnnnnnnnnnnnnnnnnnnnnnnnnnnnnnnnnnnnnnnnnnnnnnnnnnnnnnnnnnnnnnnnnnnnnnnnnnnnnnnnnnnnnnnnnnnnnnnnnnnnnnnnnnnnnnnnnnnnnnnnnnnnnnnnnnnnnnnnnnnnnnnnnnnnnnnnnnnnnnnnnnnnnnnnnnnnnnnnnnnnnnnnnnnnnnnnnnnnnnnnnnnnnnnnnnnnnnnnnnnnnnnnnnnnnnnnnnnnnnnnnnnnnnnnnnnnnnnnnnnnnnnnnnnnnnnnnnnnnnnnnnnnnnnnnnnnnnnnnnnnnnnnnnnnnnnnnnnnnnnnnnnnnnnnnnnnnnnnnnnnnnnnnnnnnnnnnnnnnnnnnnnnnnnnnnnnnnnnnnnnnnnnnnnnnnnaggtctgatgcctttaccagcaggactgcccaacctccccagcctcaacctcaacctcccagcaccacacatcatgccaggggttggcttacccgaacttgtaaacccaggtnnnnnnnnnnnnnnnnnnnnnnnnnnnnnnnnnnnnnnnnnnnnnnnnnnnnnnnnnnnnnnnnnnnnnnnnnnnnnnnnnnnnnnnnnnnnnnnnnnnnnnnnnnnnnnnnnnnnnnnnnnnnnnnnnnnnnnnnnnnnnnnnnnnnnnnnnnnnnnnnnnnnnnnnnnnnnnnnnnnnnnnnnnnnnnnnnnnnnnnnnnnnnnnnnnnnnnnnnnnnnnnnnnnnnnnnnnnnnnnnnnnnnnnnnnnnnnnnnnnnnnnnnnnnnnnnnnnnnnnnnnnnnnnnnnnnnnnnnnnnnnnnnnnnnnnnnnnnnnnnnnnnnnnnnnnnnnnnnnnnnnnnnnnnnnnnnnnnnnnnnnnnnnnnnnnnnnnnnnnnnnnnnnnnnnnnnnnnnnnnnnnnnnnnnnnnnnnnnnnnnnnnnnnnnnnnnnnnnnnnnnnnnnnnnnnnnnnnnnnnnnnnnnnnnnnnnnnnnnnnnnnnnnnnnnnnnnnnnnnnnnnnnnnnnnnnnnnnnnnnnnnnnnnnnnnnnnnnnnnnnnnnnnnnnnnnnnnnnnnnnnnnnnnnnnnnnnnnnnnnnnnnnnnnnnnnnnnnnnnnnnnnnnnnnnnnnnnnnnnnnnnnnnnnnnnnnnnnnnnnnnnnnnnnnnnnnnnnnnnnnnnnnnnnnnnnnnnnnnnnnnnnnnnnnnnnnnnnnnnnnnnnnnnnnnnnnnnnnnnnnnnnnnnnnnnnnnnnnnnnnnnnnnnnnnnnnnnnnnnnnnnnnnnnnnnnnnnnnnnnnnnnnnnnnnnnnnnnnnnnnnnnnnnnnnnnnnnnnnnnnnnnnnnnnnnnnnnnnnnnnnnnnnnnnnnnnnnnnnnnnnnnnnnnnnnnnnnnnnnnnnnnnnnnnnnnnnnnnnnnnnnnnnnnnnnnnnnnnnnnnnnnnnnnnnnnnnnnnnnnnnnnnnnnnnnnnnnnnnnnnnnnnnnnnnnnnnnnnnnnnnnnnnnnnnnnnnnnnnnnnnnnnnnnnnnnnnnnnnnnnaggtgtcacagttttaaaccagaaggtggcactctgtggtcttttgcccataatagctatactggggaaagcatagatacagcaataaagtacagtaatttta

SEQ ID NO: 33723 - DNA, 89 bp, Macaca Mulatta
agcattggcttccaggttaggtctgtcaattcctgatctcacaccaaagcaagttgacatgtggcaaacacgtcttagtacacatttgg

SEQ ID NO: 33724 - DNA, 260 bp, Macaca Mulatta
aggagcctggatggaggtgaggctgctgaacggcacagggaggtgctcaggccgtgtggaagttctcgtccagggcacgtggggtaccgtgtgtgatgatctctgggacctggctgaggccaccgtcgtgtgccgccagctgcagtgtggccaggctctggcagcccccacaggagcccactttggggcaggctctgggaagatcttactggatgatatgcagtgtgtgggcagtgagagccacctggggcagtgcatgc

SEQ ID NO: 33725 - DNA, 1487 bp, Macaca Mulatta
  misc_feature (1)...(1487): n = A,T,C or G
actgtgggatccaccctggcctagaaggaatggatgctcttccttatattgatttaattgatccagctgagattgatctcctattaattagtcannnnnnnnnnnnnnnnnnnnnnnnnnnnnnnnnnnnnnnnnnnnnnnnnnnnnnnnnnnnnnnnnnnnnnnnnnnnnnnnnnnnnnnnnnnnnnnnnnnnnnnnnnnnnnnnnnnnnnnnnnnnnnnnnnnnnnnnnnnnnnnnnnnnnnnnnnnnnnnnnnnnnnnnnnnnnnnnnnnnnnnnnnnnnnnnnnnnnnnnnnnnnnnnnnnnnnnnnnnnnnnnnnnnnnnnnnnnnnnnnnnnnnnnnnnnnnnnnnnnnnnnnnnnnnnnnnnnnnnnnnnnnnnnnnnnnnnnnnnnnnnnnnnnnnnnnnnnnnnnnnnnnnnnnnnnnnnnnnnnnnnnnnnnnnnnnnnnnnnnnnnnnnnnnnnnnnnnnnnnnnnnnnnnnnnnnnnnnnnnnnnnnnnnnnnnnnnnnnnnnnnnnnnnnnnnnnnnnnnnnnnnnnnnnnnnnnnnnnnnnnnnnnnnnnnnnnnnnnnnnnnnnnnnnnnnnnnnnnnnnnnnnnnnnnnnnnnnnnnnnnnnnnnnnnnnnnnnnnnnnnnnnnnnnnnnnnnnnnnnnnnnnnnnnnnnnnnnnnnnnnnnnnnnnnnnnnnnnnnnnnnnnnnnnnnnnnnnnnnnnnnnnnnnnnnnnnnnnnnnnnnnnnnnnnnnnnnnnnnnnnnnnnnnnnnnnnnnnnnnnnnnnnnnnnnnnnnnnnnnnnnnnnnnnnnnnnnnnnnnnnnnnnnnnnnnnnnnnnnnnnnnnnnnnnnnnnnnnnnnnnnnnnnnnnnnnnnnnnnnnnnnnnnnnnnnnnnnnnnnnnnnnnnnnnnnnnnnnnnnnnnnnnnnnnnnnnnnnnnnnnnnnnnnnnnnnnnnnnnnnnnnnnnnnnnnnnnnnnnnnnnnnnnnnnnnnnnnnnnnnnnnnnnnnnnnnnnnnnnnnnnnnnnnnnnnnnnnnnnnnnnnnnnnnnnnnnnnnnnnnnnnnnnnnnnnnnnnnnnnnnnnnnnnnnnnnnnnnnnnnnnnnnnnnnnnnnnnnnnnnnnnnnnnnnnnnnnnnnnnnnnnnnnnnnnnnnnnnnnnnnnnnnnnnnnnnnnnnnnnnnnnnnnnnnnnnnnnnnnnnnnnnnnnnnnnnnnnnnnnnnnnnnnnnnnnnnnnnnnnnnnnnnnnnnnnnnnnnnnnnnnnnnnnnnnnnnnnnnnnnnnnnnnnnnnnnnnnnnnnnnnnnnnnnnnnnnnnnnnnnnnnnnnnnnnnnnnnnnnnnnnnnnnnnnnnnnnnnnnnnnnnnnnnnnnnnnnnnnnnnnnnnnnnnnnnattatactgacttggcaatgagcactgtaaagcagacccaggccattccatatactggtccctttaatttgctctattaccagctgcagaagttgacaggt

SEQ ID NO: 33726 - DNA, 916 bp, Macaca Mulatta
  misc_feature (1)...(916): n = A,T,C or G
ggggctcacactctccacagcgtggtggttctgttgctcacaggacaacttgcctttgctgattttgaagagagttgtgctatgatgtggcaaaagtatccaggaagcaggcagtcaattcctctgggaataaaggtccttttcggcggtgtgttcggtgctgggggctttgcccttgtgtattacctcntacnaaagtttcattccaagagtttatattacnagttggcggtggagcacctgcgaagccntcccgaggcnnntgaagctctgggccctccncncnnnnncnnnnannncnagcncnncgntnggntannntttcntggagnntgntgnnnnnnnnnnnnnnnnnnnnnnnnnnnnnnnnnnnnnnnnnntgccccccccnnccnccccccccccccccaggggggcccccttccncaantgcccccccnccccagcntttctttctncctccccccctctttcttctttttcctgtctttctctccccctcctttttcctctcttgtccttccttttcccccttttccctctcttttcctcttnctcttcctcctttctcctctcctctcttttcttttctccttcttttcccttctcctcttccctctccttcctccttgtctctggcctggcccccttttcttgtgcctttgcctgtcccggcgttgccgtggtttgttccttgtgtctctcgcgggtctggtgggtttgtcttccccgtgtgttcgtgtgtcggggccctgtctgctcgctttggtccgctctctcgggggtcgccctgtgtccggtctcgttgccggtcggttctcccgtggtgtccgcggcgcgctttctggctgtgctctcttgctgggtgctctcgtctgcgtgtcgtttctgctctgtctccgtgtgtcttgctgct

SEQ ID NO: 33727 - DNA, 679 bp, Macaca Mulatta
aaggaatggaaagagtggataataaaatgcctggctgttctccaaaaataaggaccttcaaataggagtgattgaaataaatgactacttgcatgttatgctttcatttgggtgggatacttcatcggaataaactactgatcttgtgctgtgtcagagtaacagactagaaccttctttcaggtacctgaattgaaactgaataataaaaactctagaaactctttatcttcttatcttactggcctggtctgtggcagcaagcactttatttccattccccaaatatgtttatgtctcccaagaaagctgggactggtggtaacgagcaagtaaataacttgaaaaagaacggtagatatcccaaggaaccaaccaacataatttccagggggtgattttgtttttagaagagctgctcccctctgttaggcccagccaagtcacatttttggacgtctgtgggctctgatcgtcaccacagccctcctcttccgagagacttccttactctctggagtgcattacctcatttttttctcttgctggttgtcaccttatccctgaaagaatgaacagcttgtatcagtttttagccgcttaaaatatgacgtctcaggaatatttgtaagtgaaaataacaatggtccatagactaccacaacatttggtggtggga

SEQ ID NO: 33728 - DNA, 863 bp, Macaca Mulatta
gggctctttccttgcctaacgcagccatggctcgtggtcccaagaagcatctgaagcgggtagcagctccaaagcattggatgctggataaattgaccggtgtgtttgctcctcgtccatccaccggtccccacaagttgagagagtgtctccccctcatcatcttcctaaggaacagacttaagtatgccctgacaggagatgaagtaaagaagatttgcatgcagcggttcattaagatcgatggcaaggtccgaactgatataacctaccctgctggattcatggatgtcatcagcattgacaagacgggaaagaatttccgtctgatctatgacaccaaaggtcgctttgctgtacatcgtattacacctgaggaggccaagtacaagttatgcaaagtgagaaagatctttgtgggcacaaaaggaatccctcatctggtgactcatgatgcccgcaccatcccgctaacccgattccccttttaaggtgaatgaaaaccattcagaattgatttggaaaatgagcaagatttacagatttcatcaaagttcaactctggttaaccagtgtaatggtgaactgagaaggagctatcccaggaaaaaaattgggggtgaatgaccaggcagaaaagggacagcccggggattttttggaacctgggtacactcctaataaaaggacaattgagcgacatgcctttgttcccactagtagactttcatatcacttattagatatattggggtagatggctaacaaaaaacaggtaaattttcttcctaccccgctagggaaaagggattatcgacaccgtctactagtttgaatagaacaacgaagatgagctagcagag

SEQ ID NO: 33729 - DNA, 3640 bp, Macaca Mulatta
  misc_feature (1)...(3640): n = A,T,C or G
tggtgatcgccagtgcaagctggatgcttggacgcgccgctgtcagtccaacgcagaccccgcccacgacgtcggcgattcttgtagcccgcgggtcccgcgcggctctcgttgccatggtgatcaccgccgctggctctagctaaccaggccgcgcctagccccagctttcgcagccannnnnnnnnnnnnnnnnnnnnnnnnnnnnnnnnnnnnnnnnnnnnnnnnnnnnnnnnnnnnnnnnnnnnnnnnnnnnnnnnnnnnnnnnnnnnnnnnnnnnnnnnnnnnnnnnnnnnnnnnnnnnnnnnnnnnnnnnnnnnnnnnnnnnnnnnnnnnnnnnnnnnnnnnnnnnnnnnnnnnnnnnnnnnnnnnnnnnnnnnnnnnnnnnnnnnnnnnnnnnnnnnnnnnnnnnnnnnnnnnnnnnnnnnnnnnnnnnnnnnnnnnnnnnnnnnnnnnnnnnnnnnnnnnnnnnnnnnnnnnnnnnnnnnnnnnnnnnnnnnnnnnnnnnnnnnnnnnnnnnnnnnnnnnnnnnnnnnnnnnnnnnnnnnnnnnnnnnnnnnnnnnnnnnnnnnnnnnnnnnnnnnnnnnnnnnnnnnnnnnnnnnnnnnnnnnnnnnnnnnnnnnnnnnnnnnnnnnnnnnnnnnnnnnnnnnnnnnnnnnnnnnnnnnnnnnnnnnnnnnnnnnnnnnnnnnnnnnnnnnnnnnnnnnnnnnnnnnnnnnnnnnnnnnnnnnnnnnnnnnnnnnnnnnnnnnnnnnnnnnnnnnnnnnnnnnnnnnnnnnnnnnnnnnnnnnnnnnnnnnnnnnnnnnnnnnnnnnnnnnnnnnnnnnnnnnnnnnnnnnnnnnnnnnnnnnnnnnnnnnnnnnnnnnnnnnnnnnnnnnnnnnnnnnnnnnnnnnnnnnnnnnnnnnnnnnnnnnnnnnnnnnnnnnnnnnnnnnnnnnnnnnnnnnnnnnnnnnnnnnnnnnnnnnnnnnnnnnnnnnnnnnnnnnnnnnnnnnnnnnnnnnnnnnnnnnnnnnnnnnnnnnnnnnnnnnnnnnnnnnnnnnnnnnnnnnnnnnnnnnnnnnnnnnnnnnnnnnnnnnnnnnnnnnnnnnnnnnnnnnnnnnnnnnnnnnnnnnnnnnnnnnnnnnnnnnnnnnnnnnnnnnnnnnnnnnnnnnnnnnnnnnnnnnnnnnnnnnnnnnnnnnnnnnnnnnnnnnnnnnnnnnnnnnnnnnnnnnnnnnnnnnnnnnnnnnnnnnnnnnnnnnnnnnnnnnnnnnnnnnnnnnnnnnnnnnnnnnnnnnnnnnnnnnnnnnnnnnnnnnnnnnnnnnnnnnnnnnnnnnnnnnnnnnnnnnnnnnnnnnnnnnnnnnnnnnnnnnnnnnnnnnnnnnnnnnnnnnnnnnnnnnnnnnnnnnnnnnnnnnnnnnnnnnnnnnnnnnnnnaggatccatcacagtgttccaggcaacgtggacttgtcaaagtcagctcctgccggagaggccacctgccattccccctgggagttttctcttgtcagcaggacttacagttctgggtgtcagagcttcaggcctcactgtccttctgccccggatgctcaaggttcctgggaagaccagcacctctggaggacaatggacaaagtctcttagaccttttctggctgaagggttgtctctggcacctctgagatccctaggtcctgccctcctggtcagtgggccaggatgtgcagaacaaccactcaggcctttctggcccacctggacagnnnnnnnnnnnnnnnnnnnnnnnnnnnnnnnnnnnnnnnnnnnnnnnnnnnnnnnnnnnnnnnnnnnnnnnnnnnnnnnnnnnnnnnnnnnnnnnnnnnnnnnnnnnnnnnnnnnnnnnnnnnnnnnnnnnnnnnnnnnnnnnnnnnnnnnnnnnnnnnnnnnnnnnnnnnnnnnnnnnnnnnnnnnnnnnnnnnnnnnnnnnnnnnnnnnnnnnnnnnnnnnnnnnnnnnnnnnnnnnnnnnnnnnnnnnnnnnnnnnnnnnnnnnnnnnnnnnnnnnnnnnnnnnnnnnnnnnnnnnnnnnnnnnnnnnnnnnnnnnnnnnnnnnnnnnnnnnnnnnnnnnnnnnnnnnnnnnnnnnnnnnnnnnnnnnnnnnnnnnnnnnnnnnnnnnnnnnnnnnnnnnnnnnnnnnnnnnnnnnnnnnnnnnnnnnnnnnnnnnnnnnnnnnnnnnnnnnnnnnnnnnnnnnnnnnnnnnnnnnnnnnnnnnnnnnnnnnnnnnnnnnnnnnnnnnnnnnnnnnnnnnnnnnnnnnnnnnnnnnnnnnnnnnnnnnnnnnnnnnnnnnnnnnnnnnnnnnnnnnnnnnnnnnnnnnnnnnnnnnnnnnnnnnnnnnnnnnnnnnnnnnnnnnnnnnnnnnnnnnnnnnnnnnnnnnnnnnnnnnnnnnnnnnnnnnnnnnnnnnnnnnnnnnnnnnnnnnnnnnnnnnnnnnnnnnnnnnnnnnnnnnnnnnnnnnnnnnnnnnnnnnnnnnnnnnnnnnnnnnnnnnnnnnnnnnnnnnnnnnnnnnnnnnnnnnnnnnnnnnnnnnnnnnnnnnnnnnnnnnnnnnnnnnnnnnnnnnnnnnnnnnnnnnnnnnnnnnnnnnnnnnnnnnnnnnnnnnnnnnnnnnnnnnnnnnnnnnnnnnnnnnnnnnnnnnnnnnnnnnnnnnnnnnnnnnnnnnnnnnnnnnnnnnnnnnnnnnnnnnnnnnnnnnnnnnnnnnnnnnnnnnnnnnnnnnnnnnnnnnnnnnnnnnnnnnnnnnnnnnnnnnnnnnnnnnnnnnnnnnnnnnnnnnnnnnnnnnnnnnnnnnnnnnnnnnnnnnnnnnnnnnnnnnnnnnnnnnnnnnnnnnnnnnnnnnnnnnnnnnnnnnnnnnnnnnnnnnnnnnnnnnnnnnnnnnnnnnnnnnnnnnnnnnnnnnnnnnnnnnnnnnnnnnnnnnnnnnnnnnnnnnnnnnnnnnnnnnnnnnnnnnnnnnnnnnnnnnnnnnnnnnnnnnnnnnnnnnnnnnnnnnnnnnnnnnnnnnnnnnnnnnnnnnnnnnnnnnnnnnnnnnnnnnnnnnnnnnnnnnnnnnnnnnnnnnnnnnnnnnnnnnnnnnnnnnnnnnnnnnnnnnnnnnnnnnnnnnnnnnnnnnnnnnnnnnnnnnnnnnnnnnnnnnnnnnnnnnnnnnnnnnnnnnnnnnnnnnnnnnnnnnnnnnnnnnnnnnnnnnnnnnnnnnnnnnnnnnnnnnnnnnnnnnnnnnnnnnnnnnnnnnnnnnnnnnnnnnnnnnnnnnnnnnnnnnnnnnnnnnnnnnnnnnnnnnnnnnnnnnnnnnnnnnnnnnnnnnnnnnnnnnnnnnnnnnnnnnnnnnnnnnnnnnnnnagttcatttgacccttcccattcgcaggccatccggcttgtgtccagcttttagctcttaccgatggtgctgcaatggccattcttgtagttacagcttcgcatactcaggaaggcctctggactgtggcccccagcctcgtccactaagtgcagcctgtggtcgggcagacagcactggggtccattgggaagaccaggttcactgggcataagcttcacaggacaggagaacatggccatggtggactgtcgttctccacagctcccttcccttgcc

SEQ ID NO: 33730 - DNA, 350 bp, Macaca Mulatta
  misc_feature (1)...(350): n = A,T,C or G
cagtccccttgaactgtttgagttcctgtgggtggacttcgtggtggagaatagcactggtgggggcgtagcggtcactcgccccgtcacgtggcagctggagtaccccggccaggcccctgaagcagagaaggacaaaatggtgtgggaaatcctggtgtcagagcgagacatcagagcccttatcccactggccaaggnaggctgaggagctggtgaatacagcaccactgactggagtgccccagcatgtccccgtgcgccttgtcactgtggacggcgggggggccttggtggaggtgacagagcatgtcggctgtgagtcggccaacacgcaggtcctgcaggtg

SEQ ID NO: 33731 - DNA, 88 bp, Macaca Mulatta
gcttgtttacaaattgatcctgctgacaggatatcatctagtgatcttttgcatcatgagtattttactagagatggatttattgaaa

SEQ ID NO: 33732 - DNA, 414 bp, Macaca Mulatta
  misc_feature (1)...(414): n = A,T,C or G
ggaatcctgcaactgaaagaagataccattgaaagtttgttggctgcagcttgtcttctgcagctgactcaggtcattgatgtttgctccaattttctcataaagcagctccatccttcaaactgcttagggattcgatcatttggagacgcgcaaggctgtacagaacttctgaatgtggcacacaaatacactatggnggaacacttcattgaggtaataaaaaaccaagaattcctcctgcttccagctaatgaaatttcaaaacttctgtgcagtgatgacattaatgtgcctgatgaagagaccatttttcatgctctaatgcagtgggtggggcatgatgtgcagaataggcaaggagaactggggatgctgctttcttacatcagactgccattactcccaccacag

SEQ ID NO: 33733 - DNA, 313 bp, Macaca Mulatta
gaataactgggagatgaaacaggaagctctatgacacacttgatcgaaatatgacagacaccgaaaatcaggactcagccccctccagcacctctacctgttgcccgccgatcacagacgggatgcagctgaaagattccctggggcctggttctgaccgcccgctgtggactctgaggcctctgcatttgcgggtggtctgcctgtgatattttggtcatggtctggtctggtcggtttcccatttgtctggccagtctctatgtgtcttaatcccttgtccttcattaaaagcaaaactaaagaaaacaga

SEQ ID NO: 33734 - DNA, 670 bp, Macaca Mulatta
gttaacagaacatgttggcattcagtcttctagagaatgccttcacaacgaagttctccaacctgaaaaatatgtgtaaacaggcaattatccctataaggaggaaaactagtactgcactaattaaatatcatagtttagtgtgaaaaaaaaatgaggacatttttgctacagaaggacctgcttttgtctgcagttgtgattataggcataggtttaggagcagttactaccagagaatttcaaactagagattaagggataagagctgggtagataataattaaccataggtcatttatttaagaggagtcttaagcactaaagatggtccctcatttgctgagtaaactaagtggtttttcttcaaactgaccagataatccatctcttggcctttgaggccagtattggagactaggcttgtggtaagcattttgttaaaatcatacaggagatttggcaagaataaatcgacatgtgtttgtaagaagtacaggaatcagaagatctttctattctaatcctcacgttaagtaattacagttgagttgggagtttgagtactactagcaagctctggctaaagtcagccataacgtgggagtcgtttttcctctctaggcctcagtctccccatctgaaaatgaagctgtggttctgaatggtc

SEQ ID NO: 33735 - DNA, 919 bp, Macaca Mulatta
gggaaaacgttcttcgccgagagtcgtcggggtttcctgcttcaacagtgcttggacggaacccggcgctcgtcccccatcccggccggccgcccatagccagccttccgtctcctcttcaccgcgtcctcggactgccccaagggccccgccgccgctccagcgccgcgcagccaccgccgccgccgcctgtccttagcctccgccatgacgaccgcgtccacctcgcaggtgcgccagaactaccaccaggactcagaggccgccatcaaccgccagatcaatctggagctctacgcttcctacgtttacctgtccatgtcttactactttgaccgcgatgatgtggctttgaagaactttgccaaatactttcttcaccaatctcatgaggaaagggaacatgccgagaaactgatgaagctgcagaaccaacgaggtggccgaatcttccttcaggatattaagaaaccagactatgacgactgggagagcgggctgaatgcaatggagtgtgctttacatttggaaaaaaatgtgaatcagtcactactggaactgcacaaactggccactgacaaaaatgacccccatttgtgtgacttcattgagacacattacctgaatgagcaggtgaaagccatcaaagaattgggtgaccacgtgaccaacttgcgcaagatgggagcacccgaatctggcttggcagagtatctctttgacaagcacaccctgggagacagtgataatgaaagctaagcctcaggctaatttccctatagccatggggtgacttccctggtcaccaaggcagtgcatgcatgttggggtttcctttaccttttctataagttgtaccaaaacatccacttaagttctttgatttgtaccattccttcaaataaagacatttggtacc

SEQ ID NO: 33736 - DNA, 183 bp, Macaca Mulatta
actttgttcctgtcacctatatgctgcctgctgactacaacctgtttgtagaggagttccggaagagcccgtccagcacctggatcatgaagccttgtggcaaggcccagggaaagggcatcttccttatcaacaagctctcacagatcaaaaagtggtcccgggacagcaagacgtcttcgt

SEQ ID NO: 33737 - DNA, 190 bp, Macaca Mulatta
accaacttagtatgccattgtactatattaatcaagttttttaaatcttttggattttgtttgtttacctagttgatctcattgtggctatttttatttcatcacaaagctgctagttatttcaagtaggccacaacatttccttattttacagttttcaaagtgctttctcaaatgtgcatttttcaga

SEQ ID NO: 33738 - DNA, 538 bp, Macaca Mulatta
ccccagtgactgtattactgagagcaccacctctgatgcttcggaacatgcctctcaatctgttccaatggtgactacatccactggcactttatctacaacaaatgaaacagcaacaggtgatgatggagatgaagtatttgtggaggcagaatctgaaggtattagttcagaagcaggcctagaaattgatagccagcaggaagaagagcctgtcaagcatctgatgagtcagatctcccctccaccagccaggatcctccttctagctcatctgtagatacaagtagtagtcaaccaaagcctttcagacgagtaagacttcagacaacattgagacaaggtgtccgtggtcgtcagtttaacagacagagaggtgtgagccatgcaatgggagggagaggaggaataacatagaggaaatattcattaatcggtctgtaaacaataacaatagtgactaacgatttcaaatctgttacacgtgtaatgattgtcaagtttaaaaacatttcgatatctaacctggtatactcat

SEQ ID NO: 33739 - DNA, 80 bp, Macaca Mulatta
tttttaagctcccctgagccggtgctgcgctcctctaattgggactccgagccggggctatttctggcgctggagcggct

SEQ ID NO: 33740 - DNA, 301 bp, Macaca Mulatta
aaaaagcaactgctttcctgatctgcaacttggctggatgctaagatgtcagtggacatgaatagccaggggtctgacagcaatgaagaggactatgacccaaattgtgaggaagaggaagaagaagaggatgaagaccctggggacatagaggactattacgtgggagtagccagcgatgtggagcagcagggggctgatgcctttgatcccgaggagtaccagttcacttgcttgacctacaaggaatctgagggtgccctcaatgagcacatgaccagcttagcttctgtcctaaagg

SEQ ID NO: 33741 - DNA, 715 bp, Macaca Mulatta
gggctttttctttcggcggagcgcggcggcaagatggccgtgcaaatttccaagaagaggaagtttgtcgctgatggcatcttcaaggctgaactgaatgagtttcttactcgcggagctggctgaagatggctactctggagttgaggtgcgagtttacaccaaccaggacagaaatcattatcttagccaccagaacacagaatgttcttggtgagaagggccggcggattcgggaactgactgctgtagttcagaagaggtttggctttccagagggcagtgtagagctttatgctgaaaaggtggccactagaggtctgtgtgccattgcccaggcagagtctctgcgttacaaactcctagagggcttgctgtgcggagggcctgctatggtgtgctgcggttcatcatggagagcggggccgaaaggtgcgaggtcggtgggtctgggaaactccaaggacagaaggcgaaatccatgaaagttggggatggccctggtggtcgcacgcgggaagacccgggtggacgagcgagccttgaacactggctggggcccccgggtgggtgccttccgaaaaggggggtggggcctggggccctccaaaggggggaagagaaacctgttgcgggcgccccgggaggacaccccagcggggggggcaaaagagggggagcacccattacagaaaaagagcccgccatagggccg

SEQ ID NO: 33742 - DNA, 942 bp, Macaca Mulatta
  misc_feature (1)...(942): n = A,T,C or G
ggattgcggatatgttttcccacgaggagaatggccctgagccagactgggttttatcagaacgggagcagtttaacgaattccgggatctgaacaaggacgggaagttggacaaagatgagattcgccactggatcctccctcaagattatgatcatgcacaggctgaggccaggcatctggtatatgagtcagacaaaaacaaggatgagaagctaactaaagaggaaatattggagaattggaacatgttcgttggaagccaagctaccaattatggggaagatctcacaaaaaatcatgatgagctttgatagacgctcaccaggatatggcagactgtcataggcattctgttattgtcttggattgttgctacaattgtctaatttacagcagttgtgttcccacaaaaagcaagtttgtaccttggattggggtataaaaattgtttttcgctcagtatttactggaaaatggacatcactattctttcagtaagatttctctcaaaacacatgaaaaccttggtaaattgcagttctctctggggatatcttggtacaacatgactttttaaaagnnnnnnnnnnnnnnnnnnnnnttaaaaccttaaaggggaaagaaaaacttgaaaaaaccccctggttcttccaaaagttttaatggggtttggggggaaagggcagttgattattgaagtgaccgccatgtatttttccctaccagatttttttatatttggccactggttaaataatttggaaaaggggaaaattctggatttaagccaaaagggggtgatcccccccaagggtaaacccttatttccaaaaacaaagtcctaaataattttccaaaattccttttcttttcccgcgaaatttttataaccttcggaaaactgttttcccctttaaataataaaagatggggggggtg

SEQ ID NO: 33743 - DNA, 267 bp, Macaca Mulatta
  misc_feature (1)...(267): n = A,T,C or G
gtctagacgtgttgggatgttggctgtactcttgaaggtggttcgcacggagagtcttttgggcctttggaaagggatgtcccctntccattgtgagatgtgtccctggcgttggaatctactttggcactctctactctttgaagcagtatttcttgcgaggccatcccccaaccgccctggagtcgatcatgctgggggtgggctctcgctctgttgcaggggtctgtatgtcacctatcacggtaatcaagacgcgctatgagn

SEQ ID NO: 33744 - DNA, 2785 bp, Macaca Mulatta
  misc_feature (1)...(2785): n = A,T,C or G
tacattagctgggaggacttgtcaccctccaccccacattgctgagctgcctcttgtgcctctggcacagccaggcaccttatggttatggtgtaaggagtatgcccagcccctgaggggagagatgcatgggatatgcacccaggtttcttttgcagtatttagaatcgtttttagagggtggtgtgtctgacaccatgcctttgcacctttccatgaaatgacactcactggtctttgcatcgtgggcataaaatgttcacctttttgccagatgagtacacccagaatgctaatttttctgttcatcgtgtacgctattctagtgcttgtggcccagtactgtctatgagttgttgtgctcctgtttctgaggttgtcgtgtgagttctgtacaaaaagcccccacaagtctgtccactggaaatgcatctatgaggtcagcaaggatatcatgagatttttgctcacagtcatgtgaaaacaaaatctcagctctttattcattaccttcatttagttttaataccaaaacaaagagaatgcaaagttaagcacacttgaccaatgcaagtcttaagttgtttttataaatgatctgtagttccgtggcttgcatgggtgcacctatcatctttagaacgatgtacactgatgttcatctcataaatgtcactctttagagaatgttannnnnnnnnnnnnnnnnnnnnnnnnnnnnnnnnnnnnnnnnnnnnnnnnnnnnnnnnnnnnnnnnnnnnnnnnnnnnnnnnnnnnnnnnnnnnnnnnnnnnnnnnnnnnnnnnnnnnnnnnnnnnnnnnnnnnnnnnnnnnnnnnnnnnnnnnnnnnnnnnnnnnnnnnnnnnnnnnnnnnnnnnnnnnnnnnnnnnnnnnnnnnnnnnnnnnnnnnnnnnnnnnnnnnnnnnnnnnnnnnnnnnnnnnnnnnnnnnnnnnnnnnnnnnnnnnnnnnnnnnnnnnnnnnnnnnnnnnnnnnnnnnnnnnnnnnnnnnnnnnnnnnnnnnnnnnnnnnnnnnnnnnnnnnnnnnnnnnnnnnnnnnnnnnnnnnnnnnnnnnnnnnnnnnnnnnnnnnnnnnnnnnnnnnnnnnnnnnnnnnnnnnnnnnnnnnnnnnnnnnnnnnnnnnnnnnnnnnnnnnnnnnnnnnnnnnnnnnnnnnnnnnnnnnnnnnnnnnnnnnnnnnnnnnnnnnnnnnnnnnnnnnnnnnnnnnnnnnnnnnnnnnnnnnnnnnnnnnnnnnnnnnnnnnnnnnnnnnnnnnnnnnnnnnnnnnnnnnnnnnnnnnnnnnnnnnnnnnnnnnnnnnnnnnnnnnnnnnnnnnnnnnnnnnnnnnnnnnnnnnnnnnnnnnnnnnnnnnnnnnnnnnnnnnnnnnnnnnnnnnnnnnnnnnnnnnnnnnnnnnnnnnnnnnnnnnnnnnnnnnnnnnnnnnnnnnnnnnnnnnnnnnnnnnnnnnnnnnnnnnnnnnnnnnnnnnnnnnnnnnnnnnnnnnnnnnnnnnnnnnnnnnnnnnnnnnnnnnnnnnnnnnnnnnnnnnnnnnnnnnnnnnnnnnnnnnnnnnnnnnnnnnnnnnnnnnnnnnnnnnnnnnnnnnnnnnnnnnnnnnnnnnnnnnnnnnnnnnnnnnnnnnnnnnnnnnnnnnnnnnnnnnnnnnnnnnnnnnnnnnnnnnnnnnnnnnnnnnnnnnnnnnnnnnnnnnnnnnnnnnnnnnnnnnnnnnnnnnnnnnnnnnnnnnnnnnnnnnnnnnnnnnnnnnnnnnnnnnnnnnnnnnnnnnnnnnnnnnnnnnnnnnnnnnnnnnnnnnnnnnnnnnnnnnnnnnnnnnnnnnnnnnnnnnnnnnnnnnnnnnnnnnnnnnnnnnnnnnnnnnnnnnnnnnnnnnnnnnnnnnnnnnnnnnnnnnnnnnnnnnnnnnnnnnnnnnnnnnnnnnnnnnnnnnnnnnnnnnnnnnnnnnnnnnnnnnnnnnnnnnnnnnnnnnnnnnnnnnnnnnnnnnnnnnnnnnnnnnnnnnnnnnnnnnnnnnnnnnnnnnnnnnnnnnnnnnnnnnnnnnnnnnnnnnnnnnnnnnnnnnnnnnnnnnnnnnnnnnnnnnnnnnnnnnnnnnnnnnnnnnnnnnnnnnnnnnnnnnnnnnnnnnnnnnnnnnnnnnnnnnnnnnnnnnnnnnnnnnnnnnnnnnnnnnnnnnnnnnnnnnnnnnnnnnnnnnnnnnnnnnnnnnnnnnnnnnnnnnnnnnnnnnnnnnnnnnnnnnnnnnnnnnnnnnnnnnnnnnnnnnnnnnnnnnnnnnnnnnnnnnnnnnnnnnnnnnnnnnnnnnnnnnnnnnnnnnnnnnnnnnnnnnnnnnnnnnnnnnnnnnnnnnnnnnnnnnnnnnnnnnnnnnnnnnnnnnnnnnnnnnnnnnnnnnnnnnnnnnnnnnnnnnnnnnnnnnnnnnnnnnnnnnnnnnnnnntacatatatacttatataatattatcttgcccacctggacctttaatcacttctgagcatgagaatgtcccaatagcattgagtttttcaagtggtggttttagataagtgggagagagaacaacccggctggcttgaaccatggagctaattcccacaagggatgtagactgactggtgacccagagagaaataatcttcctcttccctaaagtctcactaagatgtgaagtttacaggtgctctccactgggtcttcgattgaccttgttaggtaacatctaaccagcaggtttttttagtccctgaagcttaccagggagggtcaggttaattttct

SEQ ID NO: 33745 - DNA, 1037 bp, Macaca Mulatta
  misc_feature (1)...(1037): n = A,T,C or G
aatggagaatgaagccttttcaaattcgcctcccagnnnnnnnnnnnnnnnnnnnnnnnnnnnnnnnnnnnnnnnnnnnnnnnnnnnnnnnnnnnnnnnnnnnnnnnnnnnnnnnnnnnnnnnnnnnnnnnnnnnnnnnnnnnnnnnnnnnnnnnnnnnnnnnnnnnnnnnnnnnnnnnnnnnnnnnnnnnnnnnnnnnnnnnnnnnnnnnnnnnnnnnnnnnnnnnnnnnnnnnnnnnnnnnnnnnnnnnnnnnnnnnnnnnnnnnnnnnnnnnnnnnnnnnnnnnnnnnnnnnnnnnnnnnnnnnnnnnnnnnnnnnnnnnnnnnnnnnnnnnnnnnnnnnnnnnnnnnnnnnnnnnnnnnnnnnnnnnnnnnnnnnnnnnagatagatatgatactaattcatcagcaaattgaacttctggaannnnnnnnnnnnnnnnnnnnnnnnnnnnnnnnnnnnnnnnnnnnnnnnnnnnnnnnnnnnnnnnnnnnnnnnnnnnnnnnnnnnnnnnnnnnnnnnnnnnnnnnnnnnnnnnnnnnnnnnnnnnnnnnnnnnnnnnnnnnnnnnnnnnnnnnnnnnnnnnnnnnnnnnnnnnnnnnnnnnnnnnnnnnnnnnnnnnnnnnnnnnnnnnnnnnnnnnnnnnnnnnnnnnnnnnnnnnnnnnnnnnnnnnnnnnnnnnnnnnnnnnnnnnnnnnnnnnnnnnnnnnnnnnnnnnnnnnnnnnnnnnnnnnnnnnnnnnnnnnnnnnnnnnnnnnnnnnnnnnnnnnnnnnnnnnnnnnnnnnnnnnnnnnnnnnnnnnnnnnnagattacatctcttgatgaacaaatagtggttggcaggatttataagcactggtctgggcttttaagagaggcatttacagatgctgacaactttggaatccaattccatagagaccttgatgttaaaatgaaagccgtgatgattggagaaagtttcctcattgactacatgttttttgaaagaactaggtaatgactggaatgtcagagtgtgggagtggattaatg

SEQ ID NO: 33746 - DNA, 842 bp, Macaca Mulatta
tcccatcatcaaatgactgccgataaggaaacctctttggtggctgtttcttgggtgcatctgtcctttctgttccccagtactgccctcaattcctgagagccctggagcggtttcctaccattcccttcttttagctgcttgttttaagtcctttttatgtgacattccctacccccaatgttgtcagctgcttatgaaactcagccaggttgtctaacctggggtcaagtttgggtgactggtgcagagttacttcctaaaaggccactctccctgcttttggatttcgtagtttctctgtcagtagcatgatcccaccgccgtggtctatgatcaccgtgctttgtgaaactgtgcatccccttgtagcctctctcagtgtctgtggcatttttgtgacttcccagcactagaataagttttcctgccaaaacgagtgaggtgcttgacgccctctggactttcccacttcccaacatggaagaattgtgaactttccatcagactgcctccctggccctccccattcttctcctgttggttactctgggtctgacacaggcccatgagatgtcttataaagcctccaatggctttatcctacctagatcccttccagcccattttacttagactatgtcattgtgagaccaccagtcctttcatttgaattctgtgaatctccaccttgcctatctttgggtggaacctggacagtactgtcgccttcttccaaccctcttcccctacatccctggcactggttgttttctgtgaaaacagcagtgaacaggttcagttttgaactggccctgaggaaacaggtcaggagttgtatt

SEQ ID NO: 33747 - DNA, 442 bp, Macaca Mulatta
agaattgttctccttcccctcctttgacgtgaggccttcagtaaagagctatagaacatcagtaccttgttataccacagatttttcttgcattagggcacagtgttaaattttttggaggtaaatatactatttataattgttatatatagtaggagggggtgtgtgtctcaggcctttctgaagttgtaagacttaaataatccatctgcatcccaagtcctatttcataaggatattcataaaagaattccatggtgaatccttgtctgaaataggtcctgccttcccggtttctgtaaatctttgcatttaagacattcaatcaatactgaaggaaattttttttctgaatgtaggtttgagtgagaggcacctctgctttcccttagaaaccctcatatactcctgcaccgttaagctgtgatggcaacgggtgata

SEQ ID NO: 33748 - DNA, 553 bp, Macaca Mulatta
ctgcatatctccaaacaattactagtaaatattaatttgcttacatgctatttatgcttgcattttacaggcacagcccgccagtatgtacaaaatatttgtctagttcatcttttcttaaatttcaaggcatttttaacatcaggattgagaaactgtatttgataaggagaaagaatagcaagaagtatacttagcttgctctttaaatcttaaaattttggtatgtgttcctatgtattcgtcttccagtaacgtttttataaaatgacagaagagttcatatttgtgaaaagcaaattacagattcctgagagaaagacagtagaagtcaattatggaaaacaaatcataaggtcttaactttagctttacaagtaatttgactatgattttctcttatccatcagtgttcgaccacctaagaaaagttggaaaaagatcttcaagctttcagggaggagagaaaacacttagttcattggctttagtatttgctcttcaacactacaagcccactcccctttacttcatggattagattgatgcagcc

SEQ ID NO: 33749 - DNA, 2552 bp, Macaca Mulatta
  misc_feature (1)...(2552): n = A,T,C or G
tgatctggtaccattgcacaatgcctgttcttatggtcattatgaagtaactgaacttttggtcaagnnnnnnnnnnnnnnnnnnnnnnnnnnnnnnnnnnnnnnnnnnnnnnnnnnnnnnnnnnnnnnnnnnnnnnnnnnnnnnnnnnnnnnnnnnnnnnnnnnnnnnnnnnnnnnnnnnnnnnnnnnnnnnnnnnnnnnnnnnnnnnnnnnnnnnnnnnnnnnnnnnnnnnnnnnnnnnnnnnnnnnnnnnnnnnnnnnnnnnnnnnnnnnnnnnnnnnnnnnnnnnnnnnnnnnnnnnnnnnnnnnnnnnnnnnnnnnnnnnnnnnnnnnnnnnnnnnnnnnnnnnnnnnnnnnnnnnnnnnnnnnnnnnnnnnnnnnnnnnnnnnnnnnnnnnnnnnnnnnnnnnnnnnnnnnnnnnnnnnnnnnnnnnnnnnnnnnnnnnnnnnnnnnnnnnnnnnnnnnnnnnnnnnnnnnnnnnnnnnnnnnnnnnnnnnnnnnnnnnnnnnnnnnnnnnnnnnnnnnnnnnnnnnnnnnnnnnnnnnnnnnnnnnnnnnnnnnnnnnnnnnnnnnnnnnnnnnnnnnnnnnnnnnnnnnnnnnnnnnnnnnnnnnnnnnnnnnnnnnnnnnnnnnnnnnnnnnnnnnnnnnnnnnnnnnnnnnnnnnnnnnnnnnnnnnnnnnnnnnnnnnnnnnnnnnnnnnnnnnnnnnnnnnnnnnnnnnnnnnnnnnnnnnnnnnnnnnnnnnnnnnnnnnnnnnnnnnnnnnnnnnnnnnnnnnnnnnnnnnnnnnnnnnnnnnnnnnnnnnnnnnnnnnnnnnnnnnnnnnnnnnnnnnnnnnnnnnnnnnnnnnnnnnnnnnnnnnnnnnnnnnnnnnnnnnnnnnnnnnnnnnnnnnnnnnnnnnnnnnnnnnnnnnnnnnnnnnnnnnnnnnnnnnnnnnnnnnnnnnnnnnnnnnnnnnnnnnnnnnnnnnnnnnnnnnnnnnnnnnnnnnnnnnnnnnnnnnnnnnnnnnnnnnnnnnnnnnnnnnnnnnnnnnnnnnnnnnnnnnnnnnnnnnnnnnnnnnnnnnnnnnnnnnnnnnnnnnnnnnnnnnnnnnnnnnnnnnnnnnnnnnnnnnnnnnnnnnnnnnnnnnnnnnnnnnnnnnnnnnnnnnnnnnnnnnnnnnnnnnnnnnnnnnnnnnnnnnnnnnnnnnnnnnnnnnnnnnnnnnnnnnnnnnnnnnnnnnnnnnnnnnnnnnnnnnnnnnnnnnnnnnnnnnnnnnnnnnnnnnnnnnnnnnnnnnnnnnnnnnnnnnnnnnnnnnnnnnnnnnnnnnnnnnnnnnnnnnnnnnnnnnnnnnnnnnnnnnnnnnnnnnnnnnnnnnnnnnnnnnnnnnnnnnnnnnnnnnnnnnnnnnnnnnnnnnnnnnnnnnnnnnnnnnnnnnnnnnnnnnnnnnnnnnnnnnnnnnnnnnnnnnnnnnnnnnnnnnnnnnnnnnnnnnnnnnnnnnnnnnnnnnnnnnnnnnnnnnnnnnnnnnnnnnnnnnnnnnnnnnnnnnnnnnnnnnnnnnnnnnnnnnnnnnnnnnnnnnnnnnnnnnnnnnnnnnnnnnnnnnnnnnnnnnnnnnnnnnnnnnnnnnnnnnnnnnnnnnnnnnnnnnnnnnatgatgtcagcgctcttctgacagcagccatgcccccttctgcgctgccttcttgttacaagcctcaagtgctcaatggtgtgagaagcccaggagccactgcagatgctctctcttcaggtccatctagcccatcaagcctttctgcagccagcagtcttgacaacttatctgggagtttttcagaactgtcttcagtagttagttcaagtggaacagagggtgcttccggtttggagaaaaaggaggnnnnnnnnnnnnnnnnnnnnnnnnnnnnnnnnnnnnnnnnnnnnnnnnnnnnnnnnnnnnnnnnnnnnnnnnnnnnnnnnnnnnnnnnnnnnnnnnnnnnnnnnnnnnnnnnnnnnnnnnnnnnnnnnnnnnnnnnnnnnnnnnnnnnnnnnnnnnnnnnnnnnnnnnnnnnnnnnnnnnnnnnnnnnnnnnnnnnnnnnnnnnnnnnnnnnnnnnnnnnnnnnnnnnnnnnnnnnnnnnnnnnnnnnnnnnnnnnnnnnnnnnnnnnnnnnnnnnnnnnnnnnnnnnnnnnnnnnnnnnnnnnnnnnnnnnnnnnnnnnnnnnnnnnnnnnnnnnnnnnnnnnnnnnnnnnnnnnnnnnnnnnnnnnnnnnnnnnnnnnnnnnnnnnnnnnnnnnnnnnnnnnnnnnnnnnnnnnnnnnnnnnnnnnnnnnnnnnnnnnnnnnnnnnnnnnnnnnnnnnnnnnnnnnnnnnnnnnnnnnnnggtctccttttgtgaatgcaattatccacaaaggctttgatgaaaggcatgcgtacataggtggcatgtttggagctggcatttattttgctgaaaactcttccaaaagcaatcaatatgtatatggaattggaggcggtactgggtgtccagttcacaaagacagatcttgttacatttgccacagg

SEQ ID NO: 33750 - DNA, 319 bp, Macaca Mulatta
  misc_feature (1)...(319): n = A,T,C or G
tgctttggttttttaaccctagacttggaatggaaaattatctatgtgggctctgcagaaagtgaagaatacgatcaagttttagactctgttttagtgggccctgttcctgcaggaaggcatatgtttgtatttcaggnaggctgatgcacctaatccaggactcattccagatgcagatgcagtaggcgtaactgttgtgctaattacttgtacctatcgaggacaagaatttattagagttggctattatgtaaataatgaatatactgagacagaattaagggaaaatccgccagtaaaaccagacttttctaag

SEQ ID NO: 33751 - DNA, 3822 bp, Macaca Mulatta
  misc_feature (1)...(3822): n = A,T,C or G
gagaattcatactggtgaaaaaccctatgaatgtaaagaatgtggaaaagcttttagaatcagttcgcagctggctactcatcagagaattcatactggagagaagccttatgaatgtattgaatgtggaaatgctttcaaacagagatcacaccttgcccaacatcagaaaactcatacaggagagaaaccttatgagtgtaatgaatgcgggaaagccttcagccaaacttccaatcttactcaacatcaaagaattcatactggagagaaaccctataaatgtactgaatgtggaaaggcttttagtgatagctcatcctgtgctcaacatcaaagactccacactggccaaaggccctatcagtgttttgaatgtgggaaggcattcagaagaaagttatccttaatttatcatcaaagaggtcatactggagaagaaccttaagaatgtagtgcatgtggccaagcctttagttatcatcaatcccttactgttaatcagagatgtcccactggttgaaaaacataaacgtaagaaatgtagaaaaaccttcagccagaggctggcaagatggctgaataggaacagctctggtctgcagttcccaatgagagcaacacagaaggtgggtgatttctgtatttccaactgaggtacccggctcatttcattgggactggttagacagtgggtgcagcccatggagggcgagccgaagcagggtggggcgtaacctcatctgggaagtgcaaggagtcggggatctccctcccctagccaagggaagccatgagggactgtgccatgaggaatggtgcactctggtgcagatactaagcttttcacatggtctttgcaacccatagaccaggagattcccttgggtgcctatgccaccaaggtcctgggtttaagcacaaaactgggcagccatttgggtagagaccaagctagctgcaggagttttctttgataccccagatggcacccggannnnnnnnnnnnnnnnnnnnnnnnnnnnnnnnnnnnnnnnnnnnnnnnnnnnnnnnnnnnnnnnnnnnnnnnnnnnnnnnnnnnnnnnnnnnnnnnnnnnnnnnnnnnnnnnnnnnnnnnnnnnnnnnnnnnnnnnnnnnnnnnnnnnnnnnnnnnnnnnnnnnnnnnnnnnnnnnnnnnnnnnnnnnnnnnnnnnnnnnnnnnnnnnnnnnnnnnnnnnnnnnnnnnnnnnnnnnnnnnnnnnnnnnnnnnnnnnnnnnnnnnnnnnnnnnnnnnnnnnnnnnnnnnnnnnnnnnnnnnnnnnnnnnnnnnnnnnnnnnnnnnnnnnnnnnnnnnnnnnnnnnnnnnnnnnnnnnnnnnnnnnnnnnnnnnnnnnnnnnnnnnnnnnnnnnnnnnnnnnnnnnnnnnnnnnnnnnnnnnnnnnnnnnnnnnnnnnnnnnnnnnnnnnnnnnnnnnnnnnnnnnnnnnnnnnnnnnnnnnnnnnnnnnnnnnnnnnnnnnnnnnnnnnnnnnnnnnnnnnnnnnnnnnnnnnnnnnnnnnnnnnnnnnnnnnnnnnnnnnnnnnnnnnnnnnnnnnnnnnnnnnnnnnnnnnnnnnnnnnnnnnnnnnnnnnnnnnnnnnnnnnnnnnnnnnnnnnnnnnnnnnnnnnnnnnnnnnnnnnnnnnnnnnnnnnnnnnnnnnnnnnnnnnnnnnnnnnnnnnnnnnnnnnnnnnnnnnnnnnnnnnnnnnnnnnnnnnnnnnnnnnnnnnnnnnnnnnnnnnnnnnnnnnnnnnnnnnnnnnnnnnnnnnnnnnnnnnnnnnnnnnnnnnnnnnnnnnnnnnnnnnnnnnnnnnnnnnnnnnnnnnnnnnnnnnnnnnnnnnnnnnnnnnnnnnngtgcaaaaagactgaaaattccaaaaaccagaacacctcttctcctcagaggggtcacaactcctctccagcaagggaacaaaactggtttgagaatgagtttgacaaattgacagaagtaggcttcagaaggtgggtaataacaaacccctctgagctaaaggagcaggttctaatccaatgcaaggaagctaagaaccttgaaaaaaggtttgaggtattgnnnnnnnnnnnnnnnnnnnnnnnnnnnnnnnnnnnnnnnnnnnnnnnnnnnnnnnnnnnnnnnnnnnnnnnnnnnnnnnnnnnnnnnnnnnnnnnnnnnnnnnnnnnnnnnnnnnnnnnnnnnnnnnnnnnnnnnnnnnnnngtcttaacaatgtaaagaatgtgcaaatgtcttcagacgaaatgcacaccttgctcatcagtgagttcatttcaggcatccagctctccctcacccactacatcaccaagtcctgtggatatatctgctaaatacttttggaatttatccacttcttttcgttccccagttcaaaacacagtcatttcaccttgactactatttcagtcattacacaggtgtccaaccttttgtcttccctgggccacattggaagaagaaaaattgtcttgtgccacacatacaatacagtaacattaacaatagctgatgagctaagnnnnnnnnnnntctatgcataattttagtgatacaccacctcaaataagcataaaagtccgcacattcaatgggttggatacccgtgaattccaaaacttcatcctcttttgtccctttcgagttaacattacagccacagtgacccttgaaaaatgcaaattaaattactctcttaaaactctagttaaaatacttgatgtacatagggtgcttagcaaaatgatcagctcatactaagtgcttggtaaatgttagataagtattcttcagagttgatgtaagttatttttaaacagtgtattcttgaaagcagtttggcaatcgtaaaaattttggaaccgaaacagtatcnnnnnnnnnnnnnnnnnnnnnnnnnnnnnnnnnnnnnnnnnnnnnnnnnnnnnnnnnnnnnnnnnnnnnnnnnnnnnnnnnnnnnnnnnnnnnnnnnnnnnnnnnnnnnnnnnnnnnnnnnnnnnnnnnnnnnnnnnnnnnnnnnnnnnnnnnnnnnnnnnnnnnnnnnnnnnnnnnnnnnnnnnnnnnnnnnnnnnnnnnnnnnnnnnnnnnnnnnnnnnnnnnnnnnnnnnnnnnnnnnnnnnnnnnnnnnnnnnnnnnnnnnnnnnnnnnnnnnnnnnnnnnnnnnnnnnnnnnnnnnnnnnnnnnnnnnnnnnnnnnnnnnnnnnnnnnnnnnnnnnnnnnnnnnnnnnnnnnnnnnnnnnnnnnnnnnnnnnnnnnnnnnnnnnnnnnnnnnnnnnnnnnnnnnnnnnnnnnnnnnnnnnnnnnnnnnnnnnnnnnnnnnnnnnnnnnnnnnnnnnnnnnnnnnnnnnnnnnnnnnnnnnnnnnnnnnnnnnnnnnnnnnnnnnnnnnnnnnnnnnnnnnnnnnnnnnnnnnnnnnnnnnnnnnnnnnnnnnnnnnnnnnntgatatcaaaccaaggggaaaaaaatgaaagtataggtgagtttacttagttatatacaaaaggaaattattagcctctattgatggagaacagaggctctgaataaatggagatccataacatgatcctagatgaatatttcaatattgtaatcctgtaagttacttttacattgacagttctgaaattcatgttgagtgttaattagggagctatcagaagggagattttgtagaaggtcatatcccatgggtttttttatattgcagaagtgttttcgatgtatcattgggggagattaaatgtctttgacagttatccaactggaaataaagtcagcatcccatt

SEQ ID NO: 33752 - DNA, 3258 bp, Macaca Mulatta
  misc_feature (1)...(3258): n = A,T,C or G
cctggatcagtgacattagagcaggaaccgccccttcatgcaggaaccacatcaaatcaagctgcagcttgatcgcgttcaactccgacnnnnnnnnnnnnnnnnnnnnnnnnnnnnnnnnnnnnnnnnnnnnnnnnnnnnnnnnnnnnnnnnnnnnnnnnnnnnnnnnnnnnnnnnnnnnnnnnnnnnnnnnnnnnnnnnnnnnnnnnnnnnnnnnnnnnnnnnnnnnnnnnnnnnnnnnnnnnnnnnnnnnnnnnnnnnnnnnnnnnnnnnnnnnnnnnnnnnnnnnnnnnnnnnnnnnnnnnnnnnnnnnnnnnnnnnnnnnnnnnnnnnnnnnnnnnnnnnnnnnnnnnnnnnnnnnnnnnnnnnnnnnnnnnnnnnnnnnnnnnnnnnnnnnnnnnnnnnnnnnnnnnnnnnnnnnnnnnnnnnnnnnnnnnnnnnnnnnnnnnnnnnnnnnnnnnnnnnnnnnnnnnnnnnnnnnnnnnnnnnnnnnnnnnnnnnnnnnnnnnnnnnnnnnnnnnnnnnnnnnnnnnnnnnnnnnnnnnnnnnnnnnnnnnnnnnnnnnnnnnnnnnnnnnnnnnnnnnnnnnnnnnnnnnnnnnnnnnnnnnnnnnnnnnnnnnnnnnnnnnnnnnnnnnnnnnnnnnnnnnnnnnnnnnnnnnnnnnnnnnnnnnnnnnnnnnnnnnnnnnnnnnnnnnnnnnnnnnnnnnnnnnnnnnnnnnnnnnnnnnnnnnnnnnnnnnnnnnnnnnnnnnnnnnnnnnnnnnnnnnnnnnnnnnnnnnnnnnnnnnnnnnnnnnnnnnnnnnnnnnnnnnnnnnnnnnnnnnnnnnnnnnnnnnnnnnnnnnnnnnnnnnnnnnnnnnnnnnnnnnnnnnnnnnnnnnnnnnnnnnnnnnnnnnnnnnnnnnnnnnnnnnnnnnnnnnnnnnnnnnnnnnnnnnnnnnnnnnnnnnnnnnnnnnnnnnnnnnnnnnnnnnnnnnnnnnnnnnnnnnnnnnnnnnnnnnnnnnnnnnnnnnnnnnnnnnnnnnnnnnnnnnnnnnnnnnnnnnnnnnnnnnnnnnnnnnnnnnnnnnnnnnnnnnnnnnnnnnnnnnnnnnnnnnnnnnnnnnnnnnnnnnnnnnnnnnnnnnnnnnnnnnnnnnnnnnnnnnnnnnnnnnnnnnnnnnnnnnnnnnnnnnnnnnnnnnnnnnnnnnnnnnnnnnnnnnnnnnnnnnnnnnnnnnnnnnnnnnnnnnnnnnnnnnnnnnnnnnnnnnnnnnnnnnnnnnnnnnnnnnnnnnnnnnnnnnnnnnnnnnnnnnnnnnnnnnnnnnnnnnnnnnnnnnnnnnnnnnnnnnnnnnnnnnnnnnnnnnnnnnnnnnnnnnnnnnnnnnnnnnnnnnnnnnnnnnnnnnnnnnnnnnnnnnnnnnnnnnnnnnnnnnnnnnnnnnnnnnnnnnnnnnnnnnnnnnnnnnnnnnnnnnnnnnnnnnnnnnnnnnnnnnnnnnnnnnnnnnnnnnnnnnnnnnnnnnnnnnnnnnnnnnnnnnnnnnnnnnnnnnnnnnnnnnnnnnnnnnnnnnnnnnnnnnnnnnnnnnnnnnnnnnnnnnnnnnnnnnnnnnnnnnnnnnnnnnnnnnnnnnnnnnnnnnnnnnnnnnnnnnnnnnnnnnnnnnnnnnnnnnnnnnnnnnnnnnnnnnnnnnnnnnnnnnnnnnnnnnnnnnnnnnnnnnnnnnnnnnnnnnnnnnnnnnnnnnnnnnnnnnnnnnnnnnnnnnnnnnnnnnnnnnnnnnnnnnnnnnnnnnnnnnnnnnnnnnnnnnnnnnnnnnnnnnnnnnnnnnnnnnnnnnnnnnnnnnnnnnnnnnnnnnnnnnnnnnnnnnnnnnnnnnnnnnnnnnnnnnnnnnnnnnnnnnnnnnnnnnnnnnnnnnnnnnnnnnnnnnnnnnnnnnnnnnnnnnnnnnnnnnnnnnnnnnnnnnnnnnnnnnnnnnnnnnnnnnnnnnnnnnnnnnnnnnnnnnnnnnnnnnnnnnnnnnnnnnnnnnnnnnnnnnnnnnnnnnnnnnnnnnnnnnnnnnnnnnnnncagccaaagtgagcgccagctgctcctgtatgaagctgaggccctggctggcggacccttggcggtgctgggcctggacgtggctccctcaaccctgctgcccagctacgacccagacactggcctggtgctcctgaccggcaagnnnnnnnnnnnnnnnnnnnnnnnnnnnnnnnnnnnnnnnnnnnnnnnnnnnnnnnnnnnnnnnnnnnnnnnnnnnnnnnnnnnnnnnnnnnnnnnnnnnnnnnnnnnnnnnnnnnnnnnnnnnnnnnnnnnnnnnnnnnnnnnnnnnnnnnnnnnnnnnnnnnnnnnnnnnnnnnnnnnnnnnnnnnnnnnnnnnnnnnnnnnnnnnnnnnnnnnnnnnnnnnnnnnnnnnnnnnnnnnnnnnnnnnnnnnnnnnnnnnnnnnnnnnnnnnnnnnnnnnnnnnnnnnnnnnnnnnnnnnnnnnnnnnnnnnnnnnnnnnnnnnnnnnnnnnnnnnnnnnnnnnnnnnnnnnnnnnnnnnnnnnnnnnnnnnnnnnnnnnnnnnnnnnnnnnnnnnnnnnnnnnnnnnnnnnnnnnnnnnnnnnnnnnnnnnnnnnnnnnnnnnnnnnnnnnnnnnnnnnnnnnnnnnnnnnnnnnnnnnnnnnnnnnnnnnnnnnnnnnnnnnnnnnnnnnnnnnnnnnnnnnnnnnnnnnnnnnnnnnnnnnnnnnnnnnnnnnnnnnnnnnnnnnnnnnnnnnnnnnnnnnnnnnnnnnnnnnnnnnnnnnnnnnnnnnnnnnnnnnnnnnnnnnnnnnnnnnnnnnnnnnnnnnnnnnnnnnnnnnnnnnnnnnnnnnnnnnnnnnnnnnnnnnnnnnnnnnnnnnnnnnnnnnnnnnngctgtatctggggtcagctgctgctcatcagctgcccactagcatgtagccaggggtgcagggtggcgggaggtcagtagcatgtccccaggcaggccctgggcaccctgtctcccctggtatcaaagaagacctgggctggtcccagcctgggttggcctcataaaagatctttggtcactccacactgccccatcttgcctgctgtctcagttctggtcaagcgccttgggggctggccccccaccaggccttctggagcagcaccagtctcagggccctgggaccagctgccctgcttcccaggtttgtagccaggagaaggggggctcgcagagctgatggtccaataagggg

SEQ ID NO: 33753 - DNA, 577 bp, Macaca Mulatta
  misc_feature (1)...(577): n = A,T,C or G
gtgtatcacagattcattgcgcagccaaggctacaattcatcccaagacttgccatccctggtcctggactttgtaaagttgcacccactgatggctcggcccgttgtgcccacacgtggacggcccctgctgctcaagcgcaatgtacgctacacacaccttacagggacacctgtcaccacgcctgctggacccacctatgacctgctctttctgggcacannnnnnnnnnnnnnnnnnnnnnnnnnnnnnnnnnnnnnnnnnnnnnnnnnnnnnnnnnnnnnnnnnnnnnnnnnnnnnnnnnnnnnnnnnnnnnnnnnnnnnnnnnnnnnnnnnnnnnnnnnnnnnnnnnnnnnnnnnnnnnnnnnnnnnnnnnnnnnnnnnnnnnnnnnnnnnnnnnnnnnnnnnnnnnnnnnnnnnnnnnnnnnnnnnnnnnnnnnnnnnnnnnnnnnnnnnnnnnnnnnnnnnnnnnnnnnnnnnnnnnnnnnnnnnnnnnnnnnnnnnnnnnnnnnnnnnnnnnnnnnnnnnnnnncatagagagaggtaatcgaggctgtgagagcagcagggatacag

SEQ ID NO: 33754 - DNA, 306 bp, Macaca Mulatta
  misc_feature (1)...(306): n = A,T,C or G
tttatttggttttagttgtgtgcttttcatttgcagaagttagtaactgcatctcatctactgcaccaaagttctcgattttaggagcccagctttagtcatttgaacatgcttcnnnnnnnnnnnnnnnnnnnnnnnnnnatacttttgatctataatgatagctcaataactttgtcaaggaaagctctaatatatgcagtgatggtttatgaaagggtgtggcaattttaaatttatattgtgttttatgttcaaataaagtggcatctacattcatgtgatttattggtcaccatgaccatt

SEQ ID NO: 33755 - DNA, 827 bp, Macaca Mulatta
gcctgggcagggtttgcatgggccattgttcggaagcgaagctgttgagtcccaggtgtgcagacgtaaatctgcgatgggtcccatcaggtgccatccggaaaggccaggccattcacatgctgtcgcctctgggctttgcaaacctgcagaggtggccggtcctgtgctccaggccttgtccctggcccgtctgctctggagctgagatgagctaactctccctctccccccaggagccccgcagagcaggaaggaggccgaccctgcacccccgacgcctggcgcgtcctccctgagccagctgggtgcgtacctggacagtgacgacagcaacggcagcaactgagccctcctaggacccctgccctgggtcagggccacacatccagcttcagccacattgaggccggcgttgctggtggtcggggcaggaggccttggcgtaaccggagaccctacagacaagtgccagcgtgctccaagcacgtagggccaacagggacctcaaccctgggaggtcgcttctctctgccctcaccagcctctcaacacatcggggacacctgctgctcctgcctccacctgtcaccatgcttagggctgcagtatccctagtgcgtctcagcttccaacactacttcagggtgtcagtgtctggggcactgggcgagcccactggcctctagacggcctcatctcttccttccacaaactgtctagaaccaataaaaggaaatctgccaaccgcccgggccccttctctctcccagagtctgaggaggccccaggacaaggctctgttagcacaattggaggggcattca

SEQ ID NO: 33756 - DNA, 554 bp, Macaca Mulatta
ctgaggcagaagccgtatcacatctaccacctgtgaggtccacataatgtgcatcatttacctcctgaacctgctgaaggaagcagacctctgtttctccctatttgctagaagaaatcatgaatagtcttgagtcttcctctctgacaagttagggcatggacttgacccagctttgtgccagagaacccaatatgagtgttgttggcagcttgccaagaaggactcttctttcaagacatgttggtttcatgtgacacctccatggattttttccagcctctaagtcaccaactttggaactgcctgcctcacattgctttgttttttacaataataaaggtattattatttaagctacctttatcttggcatttgatttactctttaaggtggttcaaaaacagaattgggccctgccagctttacagagtaaacacctttggagggagagggaggtgtcatattatttgtatgcctcagagacaacagtataatggaaaaatacaactgtctttccagttttggcataatctgaatttgaattattgccc

SEQ ID NO: 33757 - DNA, 783 bp, Macaca Mulatta
  misc_feature (1)...(783): n = A,T,C or G
gggtcatatcttcacaatggtgctcttttcatggggtattatccattcagtcatcgtaggggatttgaagatcttgatttgttttagaatgatgcacatttcgtgtattccagtttgtttattacttatttgggattgcatcagaagtgtctggagaataattatttgattatgactctttttttaaaataggaaaattggacattaagcatcacaaatcatactaaaaattggctagttaaatgaatctattgggattttctataagtattctgcctttgcagaaacagatttggtgaatttgaatctcaatttgagtaatctaatcgttctttctagctaatggaaaatgattttacttagcagtgttatcttggtgtgttaagagttaggtttaacataaaggttattttctcctgatatagatcacataacagaatgcaccagtcatcagctattcagttggtaagcttccaggaaaaagtacaggcagaaagagtttgaaacttgaatagctcccagatttcagtcttttcctgtttttgttaactttgnnnnnnnnnnnnnnnnnntgattggttttaattgaaggaaagatttgtactacagctcttttgttgtaaagagttgtattgttcttttcccccaaagtggtttcagaaatattttaggagatgtaagatctttacaaaaagacacttgatacttgtttttcaaaccagtatacaaggataagcttcccaggctgcataanagggaagaagaggggaaaatgtttttgtn

SEQ ID NO: 33758 - DNA, 2099 bp, Macaca Mulatta
  misc_feature (1)...(2099): n = A,T,C or G
tctgtcttcctctgtgccaaagtggccctcttcctccactcccaggggcggcaaagatgccgacggtagcctcgccaaggacgagagggagactgccatcgcacttgcccctcgcggagggagcctggctcctgcgaagcgacctctcccccaacctccaggcaactcccccagggcctcccacctcccttccctaccgccgcctcgaagcgctgccacggcgaaccccgtcgcgggcacccacccctggcccaggtacaccacacgcgccccgcccggccactccaccactccgatgctgtccttgcgccagaggatgatgcatgccagattccgtaaccctctctcccgacagcctgccagaccctcttacagacaaggtnnnnnnnnnnnnnnnnnnnnnnnnnnnnnnnnnnnnnnnnnnnnnnnnnnnnnnnnnnnnnnnnnnnnnnnnnnnnnnnnnnnnnnnnnnnnnnnnnnnnnnnnnnnnnnnnnnnnnnnnnnnnnnnnnnnnnnnnnnnnnnnnnnnnnnnnnnnnnnnnnnnnnnnnnnnnnnnnnnnnnnnnnnnnnnnnnnnnnnnnnnnnnnnnnagatctggaagggacccctgtggtgagtcctgacggcctcccactctttgggcaggggcgacatggcacacctctggccagtgcccaagataagccaattttgagtctggaggaaagccactggtgggcttggaggtcatcaaannnnnnnnnnnnnnnnnnnnnnnnnnnnnnnnnnnnnnnnnnnnnnnnnnnnnnnnnnnnnnnnnnnnnnnnnnnnnnnnnnnnnnnnnnnnnnnnnnnnnnnnnnnnnnnnnnnnnnnnnnnnnnnnnnnnnnnnnnnnnnnnnnnnnnnnnnnnnnnnnnnnnnnnnnnnnnnnnnnnnnnnnnnnnnnnnnnnnnnnnnnnnnnnnnnnnnnnnnnnnnnnnnnnnnnnnnnnnnnnnnnnnnnnnnnnnnnnnnnnnnnnnnnnnnnnnnnnnnnnnnnnnnnnnnnnnnnagatgagttctcaggcttggagaccgacactgcagtacccacggaagaggcctacgttatatatgatgaannnnnnnnnnnnnnnnnnnnnnnnnnnnnnnnnnnnnnnnnnnnnnnnnnnnnnnnnnnnnnnnnnnnnnnnnnnnnnnnnnnnnnnnnnnnnnnnnnnnnnnnnnnnnnnnnnnnnnnnnnnnnnnnnnnnnnnnnnnnnnnctccttacgtgacatacctaaataaagacccatcagccccatgctctctgactgatgcactggatcacttccaagtggacagcctggatgaaatcatccccaatgacctgaggaggagtgacctgcctccccagcattctccccgcaacatcaccgtggtggccgtgnnnnnnnnnnnnnnnnnnnnnnnnnnnnnnnnnnnnnnnnnnnnnnnnnnnnnnnnnnnnnnnnnnnnnnnnnnnnnnnnnnnnnnnnnnnnnnnnnnnnnnnnnnnnnnnnnnnnnnnnnnnnnnnnnnnnnnnnnnnnnnnnnnnnnnnnnnnnnnnnnnnnnnnnnnnaggtattattttaaagtgcaagcacaaaatcctcacggctacggacctatcagcccttcggtctcatttgacgccgaatcagnnnnnnnnnnnnnnnnnnnnnnnnnnnnnnnnnnnnnnnnnnnnnnnnnnnnnnnnnnnnnnnnnnnnnnnnnnnnnnnnnnnnnnnnnnnnnnnnnnnnnnnnnnnnnnnnnnnnnnnnnnnnnnnnnnnnnnnnnnnnnnnnnnnnnnnnnnnnnnnnnnnnnnnnnnnnnnnnnnnnnnnnnnnnnnnnnnnnnnnnnnnnnnnnnnnnnnnnnnnnnnnnnnnnnnnnnnnnnnnnnnnnnnnnnnnnnnnnnnnnnnnnnnnnnnnnnnnnnnnnnnnnnnnnnnnnnnnnnnnnnnnnnnnnnnnnnggctactatcgccagtatcgtcaggagcccgtcagctttgggaacattggctttggaaccccctactattacgtgggctggtacgagtgtggggtctccatccctggaaagtggtaatcacag

SEQ ID NO: 33759 - DNA, 1584 bp, Macaca Mulatta
  misc_feature (1)...(1584): n = A,T,C or G
gaggggaagggagccggatcgccgacctgagcgggaggcggcggtggcggccatggcggcagatggagagcgttccccgctgctgtctgagcccatcgacggtggcgcgggcggcaacggtttagtggggccaggcgggagtggggctgggcccgggggaggcctgaccccctccgcaccaccgtacggagccgnnnnnnnnnnnnnnnnnnnnnnnnnnnnnnnnnnnnnnnnnnnnnnnnnnnnnnnnnnnnnnnnnnnnnnnnnnnnnnnnnnnnnnnnnnnnnnnnnnnnnnnnnnnnnnnnnnnnnnnnnnnnnnnnnnnnnnnnnnnnnnnnnnnnnnnnnnnnnnnnnnnnnnnnnnnnnnnnnnnnnnnnnnnnnnnnnnnnnnnnnnnnnnnnnnnnnnnnnnnnnnnnnnnnnnnnnnnnnnnnnnnnnnnnnnnnnnnnnnnnnnnnnnnnnnnnnnnnnnnnnnnnnnnnnnnnnnnnngcaaaagaatcatcaacctggggcctgtgcatcccggacctctgagtccagaaccacaacccatgggtgtcagggttatctgtggacattgcaagaatacctttctnnnnnnnnnnnnnnnnnnnnnnnnnnnnnnnnnnnnnnnnnnnnnnnnnnnnnnnnnnnnnnnnnnnnnnnnnnnnnnnnnnnnnnnnnnnnnnnnnnnnnnnnnnnnnnnnnnnnnnnnnnnnnnnnnnnnnnnnnnnnnnnnnnnnnnnnnnnnnnnnnnnnnnnnnnnnnnnnnnnnnnnnnnnnnnnnnnnnnnnnnnnnnnnnnnnnnnnnnnnnnnnnnnnnnnnnnnnnnnnnnnnnnnnnnnnnnnnnnnnnnnnnnnnnnnnnnnnnnnnnnnnnnnnnnnnnnnnnnnnnnnnnnnnnnnnnnnnnnnnnnnnnnnnnnnnnnnnnnnnnnnnnnnnnnnnnnnnnnnnnnnnnnnnnnnnnnnnnnnnnnnnnnnnnnnnnnnnnnnnnnnnnnnnnnnnnnnnnnnnnnnnnnnnnnnnnnnnnnnnnnnnnnnnnnnnnnnnnnnnnnnnnnnnnnnnnnnnnnnnnnnnnnnnnnnnnnnnnnnnnnnnnnnnnnnnnnnnnnnnnnnnnnnnnnnnnnnnnnnnnnnnnnnnnnnnnnnnnnnnnnnnnnnnnnnnnnnnnnnnnnnnnnnnnnnnnnnnnnnnnnnnnnnnnnnnnnnnnnnnnnnnnnnnnnnnnnnnnnnnnnnnnnnnnnnnnnnnnnnnnnnnnnnnnnnnnnnnnnnnnnnnnnnnnnnnnnnnnnnnnnnnnnnnnnnnnnnnnnnnnnnnnnnnnnnnnnnnnnnnnnnnnnnnnnnnnnnnntcctgtgggggtggggtcagccgctgctctgtacagaaccacaggaactgatgtgtatataactatttaatgtgggatatgttcccctattcctgtatttcccttaattcctccttccaaccttttttnnnncccagttgcagtatttaactgggctgggtagagttgctcagtctttgggggagattagggacttatcctgtgcttgtaaataaataaggtcatgactct

SEQ ID NO: 33760 - DNA, 372 bp, Macaca Mulatta
ggggccactctgtctggtgctggtctcctactcatgcatcctggtggccatcctgaggatccagtctggggtgggccgcagaaaggccttctctacctgctcctcccacctctgtgtggtgggactcttctttggcagtgccattgtcatgtacatggccccaaattcccaccatcctgaggagcagcagaaagttctttccctgttttacagccttttcaacccaatgctgaaccccctgatatacagcctgaggaatgcagaggtcaagggagccctgaggagggcactgaggaaggagagactgatgtgaaacatctcaaagggaaccatggggagggagccttgctccctgcaaaatatgtaagttgg

SEQ ID NO: 33761 - DNA, 738 bp, Macaca Mulatta
tggtggtgggtagcatcacaagaaaccagcctgaaaatcaggtccagccagtccaagcacatggcctcccatctgggagagcccactgtcccactccacatgtctgggcacctgccctgggctgaggccaggctgctccaggggcctcttgagccctcacctgccacacagcaacccaggttaaatacagcccatgcacaaagccacaggccaaagcctatggaattgtttttaatcatcaaatttcaccatgtttatagctggttcctggaggtgtgcagtgccctcttgcctcttcaaacctacagcttctctttgccatttgtggatttcacgtcactccacatagaagcgttacagcctggcatccccagtctttgccttcttccagctgcctcgacagcactgcggcctgtccctattgcccaggcacgccatttccaagggcaggaaggagcagtgtcctgaagcccatcttctctgtgactgtcttaggtgatgtgtagccccctccatctttccactcaacaatttctcacccctgtcctgctgcatggtccggagtctgggacctacttcgttttttgttatttatgaccttgtttaaagaaaataaatatctcccaacctttattggtctggtctttctctctgaattgtccttatttctgctgatatgggggcaggggacagttcatcggacttatggaactccgagaaaaccctttccctatagcc

SEQ ID NO: 33762 - DNA, 2848 bp, Macaca Mulatta
  misc_feature (1)...(2848): n = A,T,C or G
ggagcttcctctgcagaagggagatattgtttacatttataagcaaattgatcagaactggtatgaaggagaacaccacggccgggtgggaatcttcccacgcacctnnnnnagcttcttcctcctgctgagaaggctcagcccaaaaagttgacaccagtgcaggttttggaatatggagaagctattgctaagtttaactttaatggtgatacacaggtagaaatgtccttcagaaagnnnnnnnnnnnnnnnnnnnnnnnnnnnnnnnnnnnnnnnnnnnnnnnnnnnnnnnnnnnnnnnnnnnnnnnnnnnnnnnnnnnnnnnnnnnnnnnnnnnnnnnnnnnnnnnnnnnnnnnnnnnnnnnnnnnnnnnnnnnnnnnnnnnnnnnnnnnnnnnnnnnnnnnnnnnnnnnnnnnnnnnnnnnnnnncagcaacctcaagcccagcagcgaagagtcacccccgacaggagtcaagacctcacaagattnnnnnnnnnnnnnnnnnnnnnnnnnnnnnnnnnnnnnnnnnnnnnnnnnnnggaactacgcgatggagatatcgttgatgtcatggaaaaatgtgacgatggatggtttgttggtnnnnnnnnnnnnnnnnnnnnnnnnnnnnnnnnnnnnnnnnnnnnnnnnnnnnnnnnnnnnnnnnnnnnnnnnnnnnnnnnnnnnnnnnnnnnnnnnnnnnnnnnnnnnnnnnnnnnnnnnnnnnnnnnnnnnnnnnnnnnnnnnnnnnnnnnnnnnnnnnnnnnnnnnnnnnnnnnnnnnnnnnnnnnnnnnnnnnnnnnnnnnnnnnnnnnnnnnnnnnnnnnnnnnnnnnnnnnnnnnnnnnnnnnnnnnnnnnnnnnnnnnnnnnnnnnnnnnnnnnnnnnnnnnnnnnnnnnnnnnnnnnnnnnnnnnnnnnnnnnnnnnnnnnnnnnnnnnnnnnnnnnnnnnnnnnnnnnnnnnnnnnnnnnnnnnnnnnnnnnnnnnnnnnnnnnnnnnnnnnnnnnnnnnnnnnnnnnnnnnnnnnnnnnnnnnnnnnnnnnnnnnnnnnnnnnnnnnnnnnnnnnnnnnnnnnnnnnnnnnnnnnnnnnnnnnnnnnnnnnnnnnnnnnnnnnnnnnnnnnnnnnnnnnnnnnnnnnnnnnnnnnnnnnnnnnnnnnnnnnnnnnnnnnnnnnnnnnnnnnnnnnnnnnnnnnnnnnnnnnnnnnnnnnnnnnnnnnnnnnnnnnnnnnnnnnnnnnnnnnnnnnnnnnnnnnnnnnnnnnnnnnnnnnnnnnnnnnnnnnnnnnnnnnnnnnnnnnnnnnnnnnnnnnnnnnnnnnnnnnnnnnnnnnnnnnnnnnnnnnnnnnnnnnnnnnnnnnnnnnnnnnnnnnnnnnnnnnnnnnnnnnnnnnnnnnnnnnnnnnnnnnnnnnnnnnnnnnnnnnnnnnnnnnnnnnnnnnnnnnnnnnnnnnnnnnnnnnnnnnnnnnnnnnnnnnnnnnnnnnnnnnnnnnnnnnnnnnnnnnnnnnnnnnnnnnnnnnnnnnnnnnnnnnnnnnnnnnnnnnnnnnnnnnnnnnnnnnnnnnnnnnnnnnnnnnnnnnnnnnnnnnnnnnnnnnnnnnnnnnnnnnnnnnnnnnnnnnnnnnnnnnnnnnnnnnnnnnnnnnnnnnnnnnnnnnnnnnnnnnnnnnnnnnnnnnnnnnnnnnnnnnnnnnnnnnnnnnnnnnnnnnnnnnnnnnnnnnnnnnnnnnnnnnnnnnnnnnnnnnnnnnnnnnnnnnnnnnnnnnnnnnnnnnnnnnnnnnnnnnnnnnnnnnnnnnnnnnnnnnnnnnnnnnnnnnnnnnnnnnnnnnnnnnnnnnnnnnnnnnnnnnnnnnnnnnnnnnnnnnnnnnnnnnnnnnnnnnnnnnnnnnnnnnnnnnnnnnnnnnnnnnnnnnnnnnnnnnnnnnnnnnnnnnnnnnnnnnnnnnnnnnnnnnnnnnnnnnnccaccaggaactcgaggtgattggggagacagacacaggaaaatgaacttaatcaagagagaccgtgataagtgctgagaagggcgtgagggaggaagagatgaattttccctggaggaatcctagaaagcattgtcatatttccatctccattagctcacttttaaacaactagggtgctggaagaacctttgtctgagggtagttcatagctggaaatacctggaatattttccagagtctccaaactgtcatctccccccacagatacacatccaagctcacaaataggagtaacaattataggtggtagggttgtatacaggaagccctggctgtctgcatatagctcagaattaccccaggaccattgtcccaaagtctaaagtctttacaggtaggcaaaatttgttttcaatgcctgtggctcagctgctgtcacaaatacccatcttaggatcccaccagcttcccaccctccaccagacagccgcagtaccctcactttctccctattgttctttcaaatcctgttctcaggaaagaaactgccactaattcattcacactaaagtgtaagtgattgataataggaatgagttacctcttcccacagacatttgtttttaagtatgacagagcagggccttaatcccaagggaaaaggctatggcactggagggggtgagctttctgggtagaaggagacgtcctgattttccttaagacccagtaagagtaagacgtcttgctttggaaggtctgctccaccatctaagagcactnnnnnnnnnnnnnnnnnnnnnnnnnnnnnnnnngtctctgagggaatatagtaaaaatgcatatgcacgtgcaatttgcacggcagcatttcaccgat

SEQ ID NO: 33763 - DNA, 565 bp, Macaca Mulatta
atgaagcgacttcaaattgttcagcaaagctagtcattagggagcaggcactaccactaacacatcccagaagaggaggcaagggcacccatcccagtgcccacctagcactgtgacagctggataacaaaaacttgtcaacaaaagaaagaggtggtattcccctcagttcatctttaccgaagacactctatgcttcattaatctcaactgacagcaataaatattctcagcaagtttgacttgacttttgttcagatttttcttgtttaaagagcttataaaataaccattgatacctctttcactgccttgatctttcaaaatggatgaaggtataccaggtctacccaataatgtttatagtatacatctataatcatgggcattcattaagaattattcacgggccacctacagatatagaaaacaatataaatgcaaaattgaacttataaaagttataatgtactttcccaactcttataacgatagtcatacatagtatggcggctgacatcagttaagtcttctcattaagtggttattttcctctagatccttt

SEQ ID NO: 33764 - DNA, 280 bp, Macaca Mulatta
  misc_feature (1)...(280): n = A,T,C or G
cacttgcaacagccggaatgggaacccggtccccaagatcacgtggtatcgcaacgggcatcgcctggaggtgcccgtagagatgaacccancccagagggctacatgaccaaccgcacggaccgggaggcctcgagactgctgtccctcaccagcactctctacctgcggctccgcagggatgaccgatatgccagcttccactgtgctgcccactacagcctgcccaatggccgccacggccgactggacaaccccaccttccacctcgccctgcact

SEQ ID NO: 33765 - DNA, 236 bp, Macaca Mulatta
  misc_feature (1)...(236): n = A,T,C or G
gtgattttgtgtccgttttgcttttcagtgtcttgtcagaaacaaccagccttgaaggnaggctacaagtgacaaggaagattctgtttcaaatatacccccagaaataaaggatgcacaaatatctgggacagnnnnnnnnnnnnnnnnnnnnnnnnnnnaggctacaagtgacaaggaagattctgtttcaaatatacccccagaaataaaggatgcacaaatatctgggacag

SEQ ID NO: 33766 - DNA, 991 bp, Macaca Mulatta
  misc_feature (1)...(991): n = A,T,C or G
cgaaactaagaggattaagttacatcatgctgatgacagcttcctggtcctcacgacagagggaattaacttcatggtgaatagtcacgagatttgtgactttgtcaatcagtgccatgatcccaacgaagcagcccatgcggtgactgaacaggcaatacagtacggtactgaggataacagtactgcagtagtagtgccttttggtgcctggggaaaatataagaactctgaaatcaacttctcattcagcagaagctttgcctccagtggacgatgggcctgattaccagctgggactttgagtttctgtgcaacagtttttcactgagcatgtcaagaaactgataaactcaaaaatgtctcctgactcactagatcagcgcacaagtcagtgtaaaccactaagttttttcataaatgctcatcatatttatggtcagctgtacatgttcagtgtaaatatatgtgtagtgaagctactgtgagtctttaaatggaaagagcaaatgagaagtggtttggatacacttggtgagagatgagagtgtcacattaataatttttaagactcttaggcagctctggttttcttttgatcatttttattctttattcatttgaacacgtttttgaagttcttcaaaactagtcagtttgaattttgacagctattcaatatgtgatctccaaannnnnnnnnnnnnnnnnnnagacttcgctaatcctaaaatgcaagtttttatttttaataactgtaccaagaaataagtatgaaaacagttctctgttaccatattttgtattctggaccacttactgatgaaagtaactgtgcaaaagaaatcaatttggactgggcgcannnnnnnnnnnnnnnnnnnnnnnnnnnnnnnngagggccaagtggggcagatcaccctgagggtcaggaatttcaagaacagccctggcccaaaagggtgaaaaccctgtttcccaatggggaaaa

SEQ ID NO: 33767 - DNA, 270 bp, Macaca Mulatta
  misc_feature (1)...(270): n = A,T,C or G
ctgctggagaaagcagaggcacgggagagggagcgggagaaggaggaggcacgcaggatgcggcgcagggaagctgcctttcgaagcatgctgaggcaggctgtgcctgctctggagctaggcactgcctgggaagaggtcnaggtccgtgagcgttttgtgtgtgactcagcctttgagcagattaccctggagtcggagcggatccggctcttccgggagttcctacaggtgctggagnagcagactgaatgccagcacctccacacc

SEQ ID NO: 33768 - DNA, 457 bp, Macaca Mulatta
  misc_feature (1)...(457): n = A,T,C or G
aggtgatggtcggtacggcagcgatgacgaccctggatctgnnnnnnnnnnnnnnnnnnnnnnnnnnnnnnnnnnnnnnnnnnnnnnnnnnnnnnnnnnnnnnnnnnnnnnnnnnnnnnnnnnnnnnnnnnnnnnnnnnnnnnnnnnnnnnnnnnnnnnnnnnnnnnnnnnnnnnnnnnnnnnnnnnnnnnnnnnnnnnnnnnnnnnnnnnnnnnnnnncccctagtgaaatactccgcgttgcacacgcagtctgcagagccgccaccacccgaaccagccaggatctgagggccctgtccagctgtaggcgtgcacagtggtgccaccgcttgtcacccggctccccccttctccccacccttcatttggacccacagctgctgtgctgctctgtgtcgtcggctccttgttggtctaagttttccggacgagctctgggggtttgtgagtttgg

SEQ ID NO: 33769 - DNA, 757 bp, Macaca Mulatta
cactgctgctggtgctctccatgctcaacctcctggactacaagtggcacaaggagccgctgcagcagtgcatccccgacgggccgctgggtgccgcagcaggggcagctggaggcagctgggggcgcccggggcctcctccggccgcgccgccccgtgctcatgcccgtttggacctccgcactccttaccgacctcccgctgccgccgtcggggcggctcctgcagccgcggcagggatggcggggtttgcggcccctgcaggcaatggcactcggggcaccgggagcgtcggggacaagcggcagctggtgtacgtgttcaccacgtggcgctctggctcgtcgttcttcggcgagctattcaatcagaatcccgaggtgttctttctctacgagccagtgtggcatgtatggcaaaaactgtatccgggggacgccgtttccctgcagggggcagcgcgggacatgctgagcgctctgtaccgctgcgacctctctgtcttccaactgtatagccccgcgggcagcggggggcgcaacctcaccacgctgggcatcttcggcgcagccaccaacaaggtagtgtgctcgtcaccactctgccccgcctaccgcaaggaggttgtggggttggtggacgaccgcgtgtgcaagaagtgcccgccgcagcgcctggcgcgtttcgaggaggaatgccgcaagtaccgcacgctagtcataaagggtgtgcgcgtcttcgacgtggcggtgttggc

SEQ ID NO: 33770 - DNA, 354 bp, Macaca Mulatta
cataaactcctgaactctctccttttcttacagatgtgatgcccttcctctttgatctttaaccccaagaagcaggagccagctaatgctttattaaatttaccgtcagtagccttctgtgtgtgtctatggaggtgtgggggtctctaaggatggggttaagggtggaggtggagatcaactccaacattggagatgggacgccttcagcttacagatgctcctgaggcaatggggcaggtgcctgctgtgcagcaaaaggagtccgtaattttctttcctcaaaggaggaaaatgcacagccttctaaagcatcttggagcaatttccattttcctgaattatgaagataat

SEQ ID NO: 33771 - DNA, 773 bp, Macaca Mulatta
  misc_feature (1)...(773): n = A,T,C or G
gcagatgtgagaactcaagattcagggctgctcttctaggaaacaagtctgccataatctccagctgtgttggaatctgttaactnnnnnnnnnnnnnnnnnnnnnnnnnnnnnnnnnnnnnnnnnnnnnnnnnnnnnnnnnnnnnnnnnnnnnnnnnnnnnnnnnnnnnnnnnnnnnnnnnnnnnnnnnnnnnnnnnnnnnnnnnnnnnnnnnnnnnnnnnnnnnnnnnnnnnnnnnnnnnnnnnnnnnnnnnnnnnnnnnnnnnnnnnnnnnnnnnnnnnnnnnnnnnnnnnnnnnnnnnnnnnnnnnnnnnnnnnnnnnnnnnnnnnnnnnnnnnnnnnnnnnnnnnnnnnnnnnnnnnnnnnnnnnnnnnnnnnnnnnnnnnnnnnnnnnnnnnnnnnnnnnnnnnnnnnnnnnnnnnnnnnnnnnnnnnnnnnnnnnnnnnnnnnnnnnnnnnnnnnnnnnnnnnnnnnnnnnnnnnnnnnnnnnnnnnnnnnnnnnnnnnnnnnnnnnnnnnnnnnnnnnnnnnnnnnnnnnnnnnnnnnnnnnnnnnnnnnnnnnnnagggacagttttaattccaggaaccactcagctgacccagaaagacattctctacagactacagtcttcaaaagcaaactgcatcatcaccaatgatgttttagccccagcagtagatgctattgcacccaaatgtgaaaatctgcactccaagctgattgtatcagagaactccagagaggggtgggggaaccttaaggagatgatga

SEQ ID NO: 33772 - DNA, 300 bp, Macaca Mulatta
tcatcacaaagcttctggagttcagtagaggggtcaggacccatggggctggccttgttgggcagaatcaaggattgggcccagttagtgtagctaagcacgcctgggggcctgaggagggtggggcccttccctcaagagcagcctggtctgtgtgtccaggcggctttggttccccacgttctacagctgtggggtactatgtgtcaaggagcaaatgcatgtgggccctagagcagattgcttatgtttaaatttcttcctaagttggccctgggtaagttactgacagtttcattt

SEQ ID NO: 33773 - DNA, 830 bp, Macaca Mulatta
tgtatatcggctgggcggccaccgcgctgctcatggtaggcggcggcctcttgtgctgcggcgcctgggtctgcaccagccgtcccgacctcagcttccccgtgaagtattcggcgccgcggcggcccacggccaccggcgactacgacaagaagaactacgtctgagggcgctgggcacggcgggggccctcctgccagctacgcctgcgaggcgttggatgagcctggggagcccgcatggaccggcggcttccgccggtagcgccgcgcgcaggcaccgcagaacgtccggctctgcaccccgacgcggttcctcgatgggctcctgcctgcgcccgcagctgaccctctcctgccaccagccgggccctgcccttaacagacggactcggacagtttccttttctgtgcgcggcgctgtttccacaggcagagcgggtgtcagactgaggatgccgcttcccctccaagacgctgggggtcttggctgttgccttacttcccagaggctcctgctgacttcggaggggcggatggagagcccagggaccccaccggagagatgtgtacagctggtctttaccccatcagcagggcccgagcccaggggccagttacttggcctggacctcccggtctcactccaacatctccccaggcaaggcttgtgggcaccggagcttgagagtgggcgggagtgggaaggctaagaatctacttagtaaatggtttgaactctctcccgcctgtgtcctgttctctgtccagccatctcccgtgtccagcagccccattcatcacccaccagccccgccctcccaaggactc

SEQ ID NO: 33774 - DNA, 435 bp, Macaca Mulatta
cacttactcaagtcagtcttgttgtacactatcaacaactcagtttctttttcctctgccgtcaaatgtgtgtgcaacctaatgataaaggagccaaagttttctagcaagactctccacagagctccgtactcatttacctttaactcacagtttgaatttggaaagaaacacaaatggattgagattgatgtgaccagcctccttcaacctttagtggcctccaacaagagaagtattcatatgtctataaattttacatgcatgaaagaccagctggagcatccttcagcacagaatggtttgtttaacatgactcttctggttcccccatcactgatcttatatttgaatgacacaagtgctcaggcttatcacaggtggtattccctttactataaaaggaggccttcccagggtcctgaccaggagaga

SEQ ID NO: 33775 - DNA, 228 bp, Macaca Mulatta
  misc_feature (1)...(228): n = A,T,C or G
nggtgctgagggtccccgcctggcctcacctagtggcagcaccagctcagggctggaggtggtggctcctgagggtacctcagccccaggtggtggcccgggaaccctggatgacagtgccaccatttgccgtgtctgccagaagccaggtgatctggtcatgtgcaaccagtgtgagttttgtttccacctggactgtcacctgccggccctgcaggatgtaccagg

SEQ ID NO: 33776 - DNA, 192 bp, Macaca Mulatta
tggaaggcgcctccctgttctggagaagagatctgaggtcctgccttagaaatgaacgttaaaccctcagggagccatgacccagggaccttcacactccccaatgtttgttacttgttatccctcccccaacctccccaacctgcctctgttttccccagagtgattagcagtaaaacccttcaatgaaaa

SEQ ID NO: 33777 - DNA, 953 bp, Macaca Mulatta
  misc_feature (1)...(953): n = A,T,C or G
nagtcgcatgaagctgaggtcttaaagcagctggctgagaaacgagagcacgagaaagaagtgcttcagaaggcaatagaagagaacaacaacttcagtaaaatggcagaagagaaactgacccacaaaatggaagctaacaaagagaaccgagaggcacaaatggctgccaaactggaacgtttgcgagagaagnnggataagcactttgaagaagtgcggaagaacaaagaatccaaagaccctcctttaaagactgaagctgactaatttgctctgacaactgactttctccccatccccttcctaaatatccaaagactgtactggccagtgtcattttattttttccctcctgacaaatattttagaagctaatgtaggactgtataggtagattcagactgtaagatgttgttttaggggctaaaggggagaaactaaaagtgttttactctttttctaaagtgttggtctttctaatgtagctatttttcttgttgcatcttttctacttcagtacacttggtgtactgggttaatggctagtactgtattggctctgtgaaaacatatttgtgaaaagagtatgtagtggcttcttttgaactgttagatgctgaatatctgttcacttttcaatcccaattctgtcccaatcttaccagatgctactggacttgaatggttaataaaactgcacagtgctgttggtggcagtgacttctttcgagttaggttaataaatcaagccatagagaccctcctggttgatacttgttccagatggggccttggggctggtagaaataccaaggcacaaatgaccgcacgttctctgccctcagtttcttgccccagtgtggtttgcattgtctccctccacaatggccgctttgtttggatgcctcagcccaggtcagctgttactatattctttcagatgtttattt

SEQ ID NO: 33778 - DNA, 509 bp, Macaca Mulatta
ctgtgcgaaccgctccttaccatccatttttaactctttcggaaataacacctcacagcagcttcctgcttttgtacagacctttgtaacaagtgtacagaaaacccgtttggtttgagaaacagatgatgaactcatcgtgctggtttttctctgagcacaaacttttaggctgtatgcagccagccttgggagtctcgttgagtgtccggcgtggatccacagggccagatcaccctgcgggagcgccacacgcatccactttggattcggcgggtgaagacagaactctgagagtctgcaggcagctcctgtgctttttatttccggctcttcggatgtcttctagacatttactatcattgcacctgaataaaaaatcacttttaccttcctaatttaaaaagacaaaacagaaatgtacgttccttcgctacctttagtctttctgttcacatttttataaatctgaacattgagaatgttctatctaaatttgtacagtgtga

SEQ ID NO: 33779 - DNA, 642 bp, Macaca Mulatta
ctggggcaggaaagaacttggtacctataggttcccctcccatcctcacccctttctaactccaaaggctagtgcggcagcagggaaagtggcacaaattagtctaggaaagagaagcagaggctgcatcctgaagggtcttttaggtcttattaaagttccagataagaagaatgcttcattctgctcgatttgacattttgcaaggggaccatttggtatatgtagtacacacctcatcctataagctagtaagtttcacttgttttgttctgttcaccaaacatgacagtaaagacgtgtcttgaaagcactcaggattttagtgttgtcttatgtggtgcttatctttttttctgttgtttttcagggtataatcgactacattttctattctaaacctcagctgaacaccttaggcatcctgggccctctggaccaccactggctggttgagaataacatcagtggctgcccgcaccccctcattccctctgaccacttctcactttttgcacaactggagctcttactgcctttcctgccccaagtcaacggcatccaccttcctggcaggaggtagtcaagcaccttcagaggacagccttgattcacttgtaaacttgtgaaaatctgaacata

SEQ ID NO: 33780 - DNA, 164 bp, Macaca Mulatta
gggagatggagaaacacctgctgctcctctccgagctcctgccagactggctcagccttcaccacattcgcaccgacacctacgtcaagctggacaaggccgcggacctggccagcatcactgcacgcctggcccgccaggcccgcgctgaagaggggctgtga

SEQ ID NO: 33781 - DNA, 693 bp, Macaca Mulatta
  misc_feature (1)...(693): n = A,T,C or G
ggaagggccatgtgtcactaatagaaagtcctcgaggctggactgatgtggggaaaacaccttttccttctagttntgagagacttcctcttgggccccaggaggagcgattccctgactttgacacacatggccaccttggtgcaaaacccttgtggtatgaaaaaacaaattcattttttatgtcctcttctttctacctttcagaatagacttaaatcccttaaacccagacatcttctaggagctgacctccaataactggttaccagtgtgtcagacaatctggactttcccctcaaaagagcagtggttcctgtttctaggttggggatcttcagataaattgtgtcattttcatttcacttcctgaaagccagggtcagctcacgacaagttgttaaacagcatatgctaaatgtgaaatgtcaaccctcactctaaactttccctgttcagagcatcagaggaagacttcactggatgttacagtggctttctgatttttggtagtccattgaagaagggagtttgaaagttgttgtatactgttaacgattgtctgcccatgtgctgcccaaaataccacgattctttatggaaattatctttaataaagctggatacagtttggcttgggaaaaagaaatgcacaaagaaggcaaagtgagcttgtgctgttctgaagaataa

SEQ ID NO: 33782 - DNA, 95 bp, Macaca Mulatta
  misc_feature (1)...(95): n = A,T,C or G
nttcagcctccatccctgtgacctcatcagtctcagatcctggagtgggctccatttccccagcttctccaaagatctccctggcccccacagat

SEQ ID NO: 33783 - DNA, 154 bp, Macaca Mulatta
aggtgatcccaaaacgaaccaacagaccaggcatcagcacaacagaccggggttttccacgagcccgctaccgcgcccggaccaccaactacaacagttcccgctctcgattctacagtggttttaacagcaggccccggggtcgtgtctacag

SEQ ID NO: 33784 - DNA, 944 bp, Macaca Mulatta
ccggggaccgccgggctccccggggaggacatgagaaccaagtggcggcccctgagtgggaggacatgggcgcctactcctacccagtgagcgctgccggccgtgcctcaccctgcagcttctttgaacgctaatacggcagggccgggggcagcccgagcaagaaggcggacggccgcgccagcccgctctacgccagctacaaggccgacagcttctcggagggggacgacctctcccagggccacctggcagagccctgcttcctgcgggcgggcggcgacctgagcctcagccccggccgctcggctgacccactgcccggctacgcacccagcgaggggggggacggggacaggctcggggtgcagctgtgtggggccgccagcagccctgagcccgagcagggttccagggactccttggagccaagctccatggaggcctccccggagatgcaccctgccgcccgcctcagcccccagcaggcctttccgcggactggtggcacggggctgagccgcaaggacagcctcaccaaggcccagctctacggaaccttgctcaactgagcgcctgcgtgcaggcctggccgtgggcccctccccaccagcccacggtgccccaaaggggccggccccacctctccccagcccccgctgttcccccgcccctgccaacaggagtctgtccctcccagcacctcctctcctccccaaccctgtaggcctgagaggaggatcccccacaccgcggtgtccacccagccccgccccgtggaactccacttagaacgtttttcacacgtccttcccccatgtgagaggagcatccccccttttataaagcgaaactatttttatagagaaaaagggtctttcttaacgcacttggcctccagctccctggacggctgccttggcgtttcaacacaaagctccttt

SEQ ID NO: 33785 - DNA, 840 bp, Macaca Mulatta
gccccaaggagaggggtcctggcctgggcccattcccctgtagtaacctcaggggccggccacgccctgctcccggagccccgccttggccacgcccccgtgtcttgcactcccgcggcccctgcaggtcaagaactgctcttgggaagtcgcatatcccccccctgaggctggatccctcatcttctgaccttgggttctgggctgtgaaggggacggaggtgtccccgcacgtttgtattctgtataaatacatgcattaataaatgtatattgtgaccgttcagggcttgaagatgtcagaagcggccggccaagcaaggggtggggggtggtgccaggggtcggttcaggtctgggaccccagactgtcaccctgtccaccactttggggctgtgtcgtacatcaaaatagaagggggttgcaagtgacttcgcgagtggcacataattgctggtaagagtcaccaaggagcagatcccggaagcccccgctccaggaaactggaaatagcagagctgacccctggccagcctgagatcccaagctgctcctttcactctcctcgctggtctagtgcagagccgcgtgccctgggcctgagcgtggatggttatcaggagtgataagccttttgaaattctgtttaacattaacttgggactggtgcagactttctctggggaaggtacagtaccttccagaagagcctctggaggtctgtcggcaggggtgtgtgggcacctcggtggtgtccacctcagacacggttctgggttgtgggtgggtttgctgcaggcccactgggtgctgagcacagagcagcacccacttaagac

SEQ ID NO: 33786 - DNA, 271 bp, Macaca Mulatta
ggtaaccatgctccccctgcacgcggctcagactcgggcagaggcccgttccacgcggtgccggcggggctcgccctctcctgcccttccctgctggagatggacccccggaacgaacagggcagctctgcgcccggcctcagagttctagtattatattttaaccgtgctaacttgtcaagtgctgactctactcccgtttgtacgtggtgttattattgaaatgtattgtttgagctcaaaaggcccgaccacccctcttcgggctgct

SEQ ID NO: 33787 - DNA, 520 bp, Macaca Mulatta
tcagattaagtctctcagcaaaaatctgtgagaaaacagtcctaaagagagttttgaaagagttatggaagctagttctcaataaaatagaaaaacaaatcgttcttcctcctctgacagatcaaacagtaagtatataaagtttagttatgcttccactaacccatctgtttttggtttaagtgaatggttttcatccagatgaaatactaattaaatcccttttgggaaaaagtgtttggtatccagtttcttaacaatgatcatataaattatagtttcctatccagtccattttaaatagtggcaatagcagtcaaacttcgtgttgtttgacagtcagaacttaacctcttaaaacatgtatcaaagttctatttatagtgttatctggtttacacatgtagtttttatttaattttactgacctcaagaaaatagaattaagatacgatgtatccactgtgcttctttcttaaattttacagtttaaggagatagttacaccactgctatttgg

SEQ ID NO: 33788 - DNA, 756 bp, Macaca Mulatta
  misc_feature (1)...(756): n = A,T,C or G
gggtgccaatcctgttggccctaaactgtcaaggaggcttcatttcaccattcgattttttgcattttaggaggcaactgattgttttggtatgtacagattactcatgtataccccatttccttccagtcagcccaacattttccaccagtctatctgtccccgtctctgaaatccatccttctcttccctctaaaccttttgagtatcatcatgtactggtggtttctcggttccatctcatccattttgttttcaatggagactacagtgtcagccagctcagccttggcttttaactcagtattccagtccatagggtggtgaaaagttgctacaaggctgcaggcactggcagtgggaagaggcagatgactagatggacttctgtgcttttagctggttgacaagtaccactcccactctgaacaacatctggccttccctgcaaagagtgtactgtacttgaagcagagcactcacacataaatggctgtgtatggaattgcttgccaaagaagtttctagcctttccctttcccctaactgcatcagggaagaattcttatctctagcttagtttccacatgaggtttttctgagaaaagggcctgggacaagaagtctgtcatgtagttaagtaggcaagaaatcctactaaatcagttttgtttgaaaagttgttttgtccatatggatttttttaaaagtcaaggtttaatttccnnnnnnnnnnnnnnnnnnnnnnaaaaatta

SEQ ID NO: 33789 - DNA, 133 bp, Macaca Mulatta
ggacctcaccacggaatgtgctactgcaaacaaccctacagccatcacgcctgacgagtacttcaatgaagagtttgatctgaaagacagggacattggaaggccgaaagagctgacgattagaacacagaag

SEQ ID NO: 33790 - DNA, 131 bp, Macaca Mulatta
ggcgagctgaaggaaatcaagcaagacatctccagcctgcgctatgagcttcttgaggaaaagtctcaagctaccggtgagctggcagacctgattcaacaactcagcgagaagtttggaaagaacttaaa

SEQ ID NO: 33791 - DNA, 2500 bp, Macaca Mulatta
  misc_feature (1)...(2500): n = A,T,C or G
ggcaccaaagagacagcatttatttatgctgtgatggctgcaggcctggcgcattctgtgaccaggtcatgcagtgcaggcaacatgacagagtgttcctgcgactccaccttgcagaatggcggctcagcaagtgaaggatggcactgggggggctgctccgatgatgtacagtatggcatgtgcatcagcagaaatttcctagaattctccatcagaaaccccacgggcaaagaaaccaaagtactattagcaatgatcctacataacaatgaagccggaaggcaggnnnnnnnnnnnnnnnnnnnnnnnnnnnnnnnnnnnnnnnnnnnnnnnnnnnnnnnnnnnnnnnnnnnnnnnnnnnnnnnnnnnnnnnnnnnnnnnnnnnnnnnnnnnnnnnnnnnnnnnnnnnnnnnnnnnnnnnnnnnnnnnnnnnnnnnnnnnnnnnnnnnnnnnnnnnnnnnnnnnnnnnnnnnnnnnnnnnnnnnnnnnnnnnnnnnnnnnnnnnnnnnnnnnnnnnnnnnnnnnnnnnnnnnnnnnnnnnnnnnnnnnnnnnnnnnnnnnnnnnnnnnnnnnnnnnnnnnnnnnnnnnnnnnnnnnnnnnnnnnnnnnnnnnnnnnnnnnnnnntggccgaggttacacacccacgtggtccggcacgtggagaggtgtgagtgtaagttcgtctggtgctgctatgtccgttgcaggaggtgtgaaagcatgactgatgtccacacttgcaagtaaccactccatccagccttggacaagatgcctcagcaatacacaatggcattgcaaccagaagggtgcccctccctgtgcagctagtaaagttgacttttgcagtggaatccccagaaccttggacgtctctgagagtttcccttacctgatcgacatattttccttcatctgatcaacccattgatcgtgtggatttcttgggattctaatgttgaaaaggtttatattcaccttttggtgatttggggaatatatattgacatacgaggaaaataatctgtttcctaagcaagaaataacaggaaagatccctcatgccaggaggcctgccacactcaggataagatccttgaatatggaacttagttacaggactcaataatggtgggtgaacattagtcatttttaaaagacacctcttatatcaataaggagacattaacctgaatctcatttattctctcagtattttaattgaagaaatcatactgcttgtgcgtagacagaagatgttgaaaagttaacataagcattgggtgctgacttaccctttcatgcactcccaaagaaaggnnnnnnnnnnaatcttcttaagtgatacaatatccctaaaaaaatggtcgttacagatgtttagtgacaaagaatcatatgtataaagtaaaatgaatgatttagattttnnnnnnnnnnnnnnnnnnnnnnnnnnnnnnnnnnnnnnnnnnnnnnnnnnnnnnnnnnnnnnnnnnnnnnnnnnnnnnnnnnnnnnnnnnnnnnnnnnnnnnnnnnnnnnnnnnnnnnnnnnnnnnnnnnnnnnnnnnnnnnnnnnnnnnnnnnnnnnnnnnnnnnnnnnnnnnnnnnnnnnnnnnnnnnnnnnnnnnnnnnnnnnnnnnnnnnnnnnnnnnnnnnnnnnnnnnnnnnnnnnnnnnnnnnnnnnnnnnnnnnnnnnnnnnnnnnnnnnnnnnnnnnnnnnnnnnnnnnnnnnnnnnnnnnnnnnnnnnnnnnnnnnnnnnnnnnnnnnnnnnnnnnnnnnnnnnnnnnnnnnnnnnnnnnnnnnnnnnnnnnnnnnnnnnnnnnnnnnnnnnnnnnnnnnnnnnnnnnnnnnnnnnnnnnnnnnnnnnnnnnnnnnnnnnnnnnnnnnnnnnnnnnnnnnnnnnnnnnnnnnnnnnnnnnnnnnnnnnnnnnnnnnnnnnnnnnnnnnnnnnagcagtaaggttaattgaattctcttttcatattagttatgcttaactcataaggttattataataagttatattagtaaaagtcttaactggaaaaatcgaaatcaggagtagtgatcagtttgatttgatatcctggatatttattatattttatgtaatgctgcatttctatttgagtgttgagtggtctttcttgttttaatattcatgcatgtatattcatcatattttacaagattcctggtaaaaattacagggctctatttaaggttgtattttaatgtaaatgcttatgttttttatgaattgttaaatatttcagtattatatagaaaaaataattttctaaattcagaatggacaaagagaatattcattttcttattaataagataaagaaatgtttccctgccctactgtcttcattctatttctctttaattttattcactgaggcagagaaacaatttttgaaaaagagcaaacccatggaaaatgtctcaggtctaatattaaaatcaagactaagcatttaactgtg

SEQ ID NO: 33792 - DNA, 1373 bp, Macaca Mulatta
  misc_feature (1)...(1373): n = A,T,C or G
ggaagcgatgaatgagatgaacgacgagctgcaggagaatgcacgtgagacagaactggagctgcgggagcagctggacatggcgggcgcgcgggttcgtgaggcccagaagcgtgtggaggcagcccaggagacggttgcagactaccagcagaccattaagaagtaccgccagctgaccgcccatcttcagnnnnnnnnnnnnnnnnnnnnnnnnnnnnnnnnnnnnnnnnnnnnnnnnnnnnnnnnnnnnnnnnnnnnnnnnnnnnnnnnnnnnnnnnnnnnnnnnnnnnnnnnnnnnnnnnnnnnnnnnnnnnnnnnnnnnnnnnnnnnnnnnnnnnnnnnnnnnnnnnnnnnnnnnnnnnnnnnnnnnnnnnnnnnnnnnnnnnnnnnnnnnnnnnnnnnnnnnnnnnnnnnnnnnnnnnnnnnnnnnnnnnnnnnnnnnnnnnnnnnnnnnnnnnnnnnnnnnnnnnnnnnnnnnnnnnnnnnnnnnnnnnnnnnnnnnnnnnnnnnnnnnnnnnnnnnnnnnnnnnnnnnnnnnnnnnnnnnnnnnnnnnnnnnnnnnnnnnnnnnnnnnnnnnnnnnnnnnnnnnnnnnnnnnnnnnnnnnnnnnnnnnnnnnnngccctctctcagtgcattgtgcatgtgtataagaaagtgggcagcctctaccctgagatgagtgcccatgagcgttcattgtatttcctcattgaactgtctgcacaaggatcaactggatgagactgtcaatgtggagcctctcaccaaggccatcaaatactatcagntcagcatctatacagcatccaccttgccgaacagcctgaggactgtactatgcagctggctgaccacattaagnnnnnnnnnnnnnnnnnnnnnnnnnnnnnnnnnnnnnnnnnnnnnnnnnnnnnnnnnnnnnnnnnnnnnnnnnnnnnnnnnnnnnnnnnnnnnnnnnnnnnnnnnnnnnnnnnnnnnnnnnnnnnnnnnnnnnnnnnnnnnnnnnnnnnnnnnnnnnnnnnnnnnnnnnnnnnnnnnnnnnnnnnnnnnnnnnnnnnnnnnnnnnnnnnnnnnnnnnnnnnnnnnnnnnnnnnnnnnnnnnnnnnnnnnnnnnnnnnnnnnnnnnnnnnnnnnnnnnnnnnnnnnnnnnnnnnnnnnnnnnnnnnnnnnnnnnnnnnnnnnnnnnnnnnnnnnnnnnnnnnnnnnnnnnnnnnnnnnnnnnnnnnnnnnnnngcagatctatgggaccccttccagcagcccctatgagtgtgtgcgccagtcatgcaacatcctcatcagtaccatgaacaagctggccacagccatgcaggagggggagtatgatgcagagcggccccccagcaa

SEQ ID NO: 33793 - DNA, 3093 bp, Macaca Mulatta
  misc_feature (1)...(3093): n = A,T,C or G
ggccagaagcagctggaaaagactcagaaatcatcacagtgaatgggattctgggagagtcagtcactttccccgtaaatatccaagaaccccagcaagttacaaacattgcttggacttctaaaacatctgttgcttttgtaacaccaggagactcagaaatggcacccatagttgctgtgacccacagaaattattatgaacggatacatgccttaggtccgaagtacgatctggtcattagcgatctgaggatggaagacgcaggagactacaaagcagacataaatacacaggctgagccctacaccaccaccaagcgctacaacctgcaagtctatcgnnnnnnnnnnnnnnnnnnnnnnnnnnnnnnnnnnnnnnnnnnnnnnnnnnnnnnnnnnnnnnnnnnnnnnnnnnnnnnnnnnnnnnnnnnnnnnnnnnnnnnnnnnnnnnnnnnnnnnnnnnnnnnnnnnnnnnnnnnnnnnnnnnnnnnnnnnnnnnnnnnnnnnnnnnnnnnnnnnnnnnnnnnnnnnnnnnnnnnnnnnnnnnnnnnnnnnnnnnnnnnnnnnnnnnnnnnnnnnnnnnnnnnnnnnnnnnnnnnnnnnnnnnnnnnnnnnnnnnnnnnnnnnnnnnnnnnnnnnnnnnnnnnnnnnnnnnnnnnnnnnnnnnnnnnnnnnnnnnnnnnnnnnnnnnnnnnnnnnnnnnnnnnnnnnnnnnnnnnnnnnnnnnnnnnnnnnnnnnnnnnnnnnnnnnnnnnnnnnnnnnnnnnnnnnnnnnnnnnnnnnnnnnnnnnnnnnnnnnnnnnnnnnnnnnnnnnnnnnnnnnnnnnnnnnnnnnnnnnnnnnnnnnnnnnnnnnnnnnnnnnnnnnnnnnnnnnnnnnnnnnnnnnnnnnnnnnnnnnnnnnnnnnnnnnnnnnnnnnnnnnnnnnnnnnnnnnnnnnnnnnnnnnnnnnnnnnnnnnnnnnnnnnnnnnnnnnnnnnnnnnnnnnnnnnnnnnnnnnnnnnnnnnnnnnnnnnnnnnnnnnnnnnnnnnnnnnnnnnnnnnnnnnnnnnnnnnnnnnnnnnnnnnnnnnnnnnnnnnnnnnnnnnnnnnnnnnnnnnnnnnnnnnnnnnnnnnnnnnnnnnnnnnnnnnnnnnnnnnnnnnnnnnnnnnnnnnnnnnnnnnnnnnnnnnnnnnnnnnnnnnnnnnnnnnnnnnnnnnnnnnnnnnnnnnnnnnnnnnnnnnnnnnnnnnnnnnnnnnnnnnnnnnnnnnnnnnnnnnnnnnnnnnnnnnnnnnnnnnnnnnnnnnnnnnnnnnnnnnnnnnnnnnnnnnnnnnnnnnnnnnnnnnnnnnnnnnnnnnnnnnnnnnnnnnnnnnnnnnnnnnnnnnnnnnnnnnnttcgcttgaggcagatgcagcccttcccccgagtgcctggcttggggagcagaatgtgggctgcatataagcacagtcatccctttgtctgggatctttgtgcagggcacgacaggcttaataagtccaaacacagatgacagtgctgtgtgggtctctgtcagagttgtggctctcagccatgtagacacactctccaaatggagtgttggaaaatgttctttctgtacagtctagagaccgctgggacactttccttggactgctacttcagaaacctcataggattttctttctggccaagatttccttctgtatcactccaagcagcctcagcagaagaagcagccatgcccagtattcccgctctccaaaaggagttgaccagcttatatttctcatacttctggggaactgggtgtaatccaaccatcaaaatagaccttgcaagaaacagagtcattctccagaaggaactggggagatgatggtgcagatgatgaaactgggttcattccagttccaaaggctcagagaactacggggtttaagctgagacagaatgcccccatcccggcatcccccacaaacagtccaccagccagcttacacaggcattaactctccacaatgaggaggaatcattcacagctgagcaggacatttatatgatcatttgaggaagtgtttcccttatgtgttagcacttataatcagctaactcgtaagtccccatgaacagtcctaggctggacagcagaaacgggctgcatttaagcagataaagacatcagtcccagtaaatgaatccatagactcatctagcaccaactaccattagcactatgttaggagctgcaaggccccaaaatagaagatgtgcataatgtctgtccttgtgtagctcaggagacaattccagcacagacactacagttaacgctgaactgaagctgcaagtaatggcatgaacagtcaaaaaagactttatgagggggctgggctgaagctgggccttgaaggatggatgaaatttggatagagaatgatgaagacagagggcctccaagtgagagaagcatgaaaaatgagcaggggcctggatcagtggggtgtattcagagcacctctccagatgcatgctcacagtcccttgcctatgtgtggcagagtgccccagccaaatgtgtgccctcaccccatgtccatttccatgtccttcaacacccacctcaaatggtacctcttctgtaaagctttccctggtatcaggagtcaaaattaatcaaggatcttttcacactgctgtttcttcccctttggtccttctatcactaaaactcatctcattctgccttactgcataactaattatttgttttcctcactacattgtacatgtgggaagtacagatagacagaagccagctgggggtggtggctcacgcctgtaatcctaacactttgggaggccaaggcaggctgattacctgaggtcagaagttcaagattagtctggccaacatggtgaaactccatctctactaaaaatacaaaattagccaggtatggtggcacacatctgtagtcccagctactctggaggctgaggcaggagaatcgcttgaacccaggaagtggaggttgcagtgagctgagatcacagcactgcactccagcctgggagagacacagtgaagttccatctcgaaaaa

SEQ ID NO: 33794 - DNA, 1323 bp, Macaca Mulatta
  misc_feature (1)...(1323): n = A,T,C or G
cagggccggcatatgggtgagggggcaccccctggggcctgagctgccccgcacaggatgccccgtgccccccacttcatgccctnnnnnnnnnnnnnnnnnnnnnnctcactttcccatactcaggccgcctttccccaggaccccctccctctgttgatttctgaccttcaaggtnnnnnnnnnnnnnnnnnnnnnnnnnnnnnnnnnnnnnnnnnnnnnnnnnnnnnnnnnnnnnnnnnnnnnnnnnnnnnnnnnnnnnnnnnnnnnnnnnnnnnnnnnnnnnnnnnnnnnnnnnnnnnnnnnnnnnnnnnnnnnnnnnnnnnnnnnnnnnnnnnnnnnnnnnnnnnnnnnnnnnnnnnnnnnnnnnnnnnnnnnnnnnnnnnnnnnnnnnnnnnnnnnnnnnnnnnnnnnnnnnnnnnnnnnnnnnnnnnnnnnnnnnnnnnnnnnnnnnnnnnnnnnnnnnnnnnnnnnnnnnnnnnnnnnnnnnnnnnnnnnnnnnnnnnnnnnnnnnnnnnnnnnnnnnnnnnnnnnnnnnnnnnnnnnnnnnnnnnnnnnnnnnnnnnnnnnnnnnnnnnnnnnnnnnnnnnnnnnnnnnnnnnnnnnnnnnnnnnnnnnnnnnnnnnnnnnnnnnnnnnnnnnnnnnnnnnnnnnnnnnnnnnnnnnnnnnnnnnnnnnnnnnnnnnnnnnnnnnnnnnnnnnnnnnnnnnnnnnnnnnnnnnnnnnnnnnnnnnnnnnnnnnnnnnnnnnnnnnnnnnnnnnnnnnnnnnnnnnnnnnnnnnnnnnnnnnnnnnnnnnnnnnnnnnnnnnnnnnnnnnnnnnnnnnnnnnnnnnnnnnnnnnnnnnnnnnnnnnnnnnnnnnnnnnnnnnnnnnnnnnnnnnnnnnnnnnnnnnnnnnnnnnnnnnnnnnnnnnnnnnnnnnnnnnnnnnnnnnnnnnnnnnnnnnnnnnnnnnnnnnnnnnnnnnnnnnnnnnnnnnnnnnnnnnnnnnnnnnnnnnnnnnnnnnnnnnnnnnnnnnnnnnnnnnnnnnnnnnnnnnnnnnnnnnnnnnnnnnnnnnnnnnnnnnnnnnnnnnnnnnnnnnnnnnnnnnnnnnnnnnnnnnnnnagaggagtcaggatggggcccggactcgggtgtatgaggacagggtcccctcacccaggnccagaccaggatcctgtgcaggaatagggggagctgccttgttctcctcttctcgagacctccctgatgatgtcctgaccttcatcaaggctcacccgctgctggaccccgctgtaccgcctgccacccatcagcctctactcactctcactagcagg

SEQ ID NO: 33795 - DNA, 1260 bp, Macaca Mulatta
aatcatacggaagagggactcagtgaaagtaaagaatatgatcaatgtggagaagccttcagtcagattctcaatcttaatctgaacaagaaaattcctactatagtaagaccatgtgaatgtagtttgtgtgggaaagtcttcatgcatcattcatcccttagtagacacatcagatctcaccttggacacaaaccttatgactatcaggaatatggagagaaaccataccaatgtaagcagtgtgggaaagccttcagttcttgtcaatcctttcgaagacatgaaagaactcacactggtgagaaaccctatgcatgtccggaatgcgggaaagccttcatttctctcccaagtgttcgaaggcacatgattaagcacactggagatggaccatataaatgtcaggaatgtgggaaagcctttgaccgccccagtttatttcaaatacatgaaagaacgcacactggagagaaaccctatgaatgtcaggaatgtgcaaaagctttcatttctctcacaagttttcaaagacatatgattaggcacactggagatggaccttataaatgtcaggaatgtggaaaagcctttgaccgccccagtttatttcgaatacatgaaagaactcatactggagagaaaccccatgaatgtaaacagtgtgggaaggccttcatttctttcacaaattttcaaagtcatatgattaggcacactggggatggaccttataaatgtaaagtatgtgggagagcctttatttttcccagttatgttcgaaagcatgaaagaactcatactggggagaaaccctatgaatgtaataaatgtggtaaaaccttcagttcttccagtaatgttcgaacacatgaaaggactcacactgggagagaagccctatgaatgtaaggaatgcgggaaagccttcatttctctcccaagcgttcgaagacacatgataaagcacactggagatggaccttataaatgtcaggtatgcggtagagcctttgactgtcccagttcatttcaaatacatgaaagaactcacactggagagaaaccctatgaatgtcaggtatgtgggaaagccttcatttctcttaaaaggattagaaaacatatgatactgcacactggagatggaccttataaatgtcaggtatgtggtaaagcctttgactgtcctagttctgtccgaacacatgaaagaactcatactggagaaaaaccctatgaatgtaaagaatgtgggaa

SEQ ID NO: 33796 - DNA, 753 bp, Macaca Mulatta
  misc_feature (1)...(753): n = A,T,C or G
ggattctagaggccgagcggccgacnnnnnnnnnnnnnnnnnnnnnnnnnnnnnnnnnnnnnnnnnnnggtctcagtctgtcgcccaagctggagtgcagtggcacaatcatggctcactacagcctcaacctcctgggctcaagtaatcctctcatgtcagcttcctgagatgtgtgccaccatgcccggctaattatttaatttttttttatagagacaaggcaatgtaacttatatcttagccaaatttacttttgaaaattcatgtgtcgttaagatataacttgctaacaaagatgtgtggcatattttggctaaaaatcttaattttaaaaaattgatttcaaagagtcaggaaaaggttgaggtactctctggaaacttttgtgttggagtataattttaattcaaacagaaggatgtgtaagaatctcttagtaactccctttcctaggagttgttcaatccacctctagacctattagattctgagctccatgaggtcagggaccattttgtctctttcatcattataataccagtggcctaccagtgtctacctaatggatagatgccaaaaacctgtttgacagataaacacttctagaaacaagttatctgtggtcccacatacttgaagaaatgtgcctgcttttgcattcattaatttaacnnnnnnnnnnnnnnnnnnnnnnnnnnnnncgaactctctccgttgccctaaggctggaaattgtaatgatgccattct

SEQ ID NO: 33797 - DNA, 515 bp, Macaca Mulatta
  misc_feature (1)...(515): n = A,T,C or G
atggattgccaagaaaatgagtactgggaccaatggggacggtgtgtcacctgccaacggtgtggtcctggacaggagctatccaagnnnnnnnnnnnnnnnnnnnnnnnnnnnnnnnnnnnnnnnnnnnnnnnnnnnnnnnnnnnnnnnnnnnnnnnnnnnnnnnnnnnnnnnnnnnnnnnnnnnnnnnnnnnnnnnnnnnnnnnnnnnnnnnnnnnnnnnnnnnnnnnnnnnnnnnnnnnnnnnnnnnnnnnnnnnnnnnnnnnnnnnnnnnnnnnnnnnnnnnnnnnnnnnnnnnnnnnnnnnnnnnnnnnnnnnnnnnnnnnnnnnnnnnnnnnnnnnnnnnnnnnngtgccttccagttgagcttagtggaggcagatgcacccacagtgccccctcaggaggccgcacttgttgcactggtgagcagcctgctagtggtgtttaccctggccttcctggggctcttcttcctctactgcaagcagttcttcaacagacattgccagcgt

SEQ ID NO: 33798 - DNA, 2552 bp, Macaca Mulatta
  misc_feature (1)...(2552): n = A,T,C or G
agttgtctctgtgggaagtttgtcctccgtccattgcgaccatgccgcagatactcaacttcaggcagctctgggnnnnnnnnnnnnnnnnnnnnnnnnnnnnnnnnnnnnnnnnnnnnnnnnnnnnnnnnnnnnnnnnnnnnnnnnnnnnnnnnnnnnnnnnnnnnnnnnnnnnnnnnnnnnnnnnnnnnnnnnnnnnnnnnnnnnnnnnnnnnnnnnnnnnnnnnnnnnnnnnnnnnnnnnnnnnnnnnnnnnnnnnnnnnnnnnnnnnnnnnnnnnnnnnnnnnnnnnnnnnnnnnnnnnnnnnnnnnnnnnnnnnnnnnnnnnnnnnnnnnnnnnnnnnnnnnnnnnnnnnnnnnnnnnnnnnnnnnnnnnnnnnnnnnnnnnnnnnnnnnnnnnnnnnnnnnnnnnnnnnnnnnnnnnnnnnnnnnnnnnnnnnnnnnnnnnnnnnnnnnnnnnnnnnnnnnnnnnnnnnnnnnnnnnnnnnnnnnnnnnnnnnnnnnnnnnnnnnnnnnnnnnnnnnnnnnnnnnnnnnnnnnnnnnnnnnnnnnnnnnnnnnnnnnnnnnnnnnnnnnnnnnnnnnnnnnnnnnnnnnnnnnnnnnnnnnnnnnnnnnnnnnnnnnnnnnnnnnnnnnnnnnnnnnnnnnnnnnnnnnnnnnnnnnnnnnnnnnnnnnnnnnnnnnnnnnnnnnnnnnnnnnnnnnnnnnnnnnnnnnnnnnnnnnnnnnnnnnnnnnnnnnnnnnnnnnnnnnnnnnnnnnnnnnnnnnnnnnnnnnnnnnnnnnnnnnnnnnnnnnnnnnnnnnnnnnnnnnnnnnnnnnnnnnnnnnnnnnnnnnnnnnnnnnnnnnnnnnnnnnnnnnnnnnnnnnnnnnnnnnnnnnnnnnnnnnnnnnnnnnnnnnnnnnnnnnnnnnnnnnnnnnnnnnnnnnnnnnnnnnnnnnnnnnnnnnnnnnnnnnnnnnnnnnnnnnnnnnnnnnnnnnnnnnnnnnnnnnnnnnnnnnnnnnnnnnnnnnnnnnnnnnnnnnnnnnnnnnnnnnnnnnnnnnnnnnnnnnnnnnnnnnnnnnnnnnnnnnnnnnnnnnnnnnnnnnnnnnnnnnnnnnnnnnnnnnnnnnnnnnnnnnnnnnnnnnnnnnnnnnnnnnnnnnnnnnnnnnnnnnnnnnnnnnnnnnnnnnnnnnnnnnnnnnnnnnnnnnnnnnnnnnnnnnnnnnnnnnnnnnnnnnnnnnnnnnnnnnnnnnnnnnnnnnnnnnnnnnnnnnnnnnnnnnnnnnnnnnnnnnnnnnnnnnnnnnnnnnnnnnnnnnnnnnnnnnnnnnnnnnnnnnnnnnnnnnnnnnnnnnnnnnnnnnnnnnnnnnnnnnnnnnnnnnnnnnnnnnnnnnnnnnnnnnnnnnnnnnnnnnnnnnnnnnnnnnnnnnnnnnnnnnnnnnnnnnnnnnnnnnnnnnnnnnnnnnnnnnnnnnnnnnnnnnnnnnnnnnnnnnnnnnnnnnnnnnnnnnnnnnnnnnnnnnnnnnnnnnnnnnnnnnnnnnnnnnnnnnnnnnnnnnnnnnnnnnnnnnnnnnnnnnnnnnnnnnnnnnnnnnnnnnnnnnnnnnnnnnnnnnnnnnnnnnnnnnnnnnnnnnnnnnnnnnnnnnnnnnnnnnnnnnnnnnnnnnnnnnnnnnnnnnnnnnnnnnnnnnnnnnnnnnnnnnnnnnnnnnnnnnnnnnnnnnnnnnnnnnnnnnnnnnnnnnnnnnnnnnnnnnnnnnnnnnnnnnnnnnnnnnnnnnnnnnnnnnnnnnnnnnnnnnnnnnnnnnnnnnnnnnnnnnnnnnnnnnnnnnnnnnnnnnnnnnnnnnnnnnnnnnnnnnnnnnnnnnnnnnnnnnnnnnnnnnnnnnnnnnnnnnnnnnnnnnnnnnnnnnnnnnnnnnnnnnnnnnnnnnnnnnnnnnnnnnnnnnnnnnnnnnnnnnnnnnnnnnnnnnnnnnnnnnnnnnnnnnnnnnnnnnnnnnnnnnnnnnnnnnnnnnnnnnnnnnnnnnnnnnnnnnnnnnnnnnnnnnnnnnnnnnnnnnnnnnnnnnnnnnnnnnnnnnnnnnnnnnnnnnnnnnnnnnnnnnnnnnnnnnnnnnnnnnnnnnnnnnnnnnnnnnnnnnnnnnnnnnnnnnnnnnnnnnnnnnnnnnnnnnnnnnnnnnnnnnnnnnnnnnnnnnnnnnnnnnnnnnnnnnnnnnnnnnnnnnnnnnnnnnnnnnnnnnnnnnnnnnnnnnnnnnnnnnnnnnnnnnnnnnnnnnnnnnnnnnnnnnnnnnnnnnnnnnnnnnnnnnnnnnnnnnnnnnnnnnntgtctagaaatgagcaggtttacaagtactgttctaaatgttaacacctgttgcacttatattctttccatttgctatcatgtcagtgaactccaggagtgctttctttgcaacttgtgtaacatttttctgttttttcaggttttactgatgaggcttgtgaggccaatcaaaataatgtttgtgatctctactactgttgattttgcccttggagcaaactgaataaagcaacaagatgaaaactg

SEQ ID NO: 33799 - DNA, 840 bp, Macaca Mulatta
  misc_feature (1)...(840): n = A,T,C or G
ggggctcttttcccggctggaaccatggagggtgcggaagagaagaagaaggttcctgctgtgccagaaacccttaagaaaaagcgaaggaatttcgcagagctgaagataaagcgcctgagaaagaagtttgcccaaaagatgcttcgaaaggcaaggaggaagcttatctatgaaaaagcgaagcactatcacaaggaatataggcagatgtacagaactgaaattcgaatggcgaggatggcaagaaaagctggcaacttctatgtacctgctgaacccaaattggcgtttgtcatcaggatcagaggtatcaatggcgtgagcccaaaggtccgaaaggtattgcagcttttgcgccttcgtcaaatcttcaatggaacctttgtgaagctcaacaaggcttcgattaacatgctgaggattgtagagccatatattgcatgggggtaccccaatctgaagtcagtaaatgagctaatctacaagcgtggttatggcaaaatcaataagaagcgaattgctttgacagataacgctttgattgctcgatctcttgggaaatatggcatcatctgcatggaggatctggattcatgggatctatactggtgggaaaacgccttccaaaaaggcagaataaccttcccgggggcccttttcaagttgatcttcctccccgaaggggggtaagtggaggaaaaaggaacccccccgcttttgtataaaaaagggcggaaaaagccctggcccaccgggggaaaaaaccaaatatccagcggggttttttannnnnnnnnnnnnnnccgggggggcgccccacccatttatattattttt

SEQ ID NO: 33800 - DNA, 297 bp, Macaca Mulatta
atggccctgctactggccctcagcctgctggttctctggacctccccagccccaactctgagtggcaccaatgatgctgaagactgctgcctgtctgtgacccagaaacccatccccgggtacatcgtgaggaatttccgctaccttctcatcaaggatggctgcagggtgcctgctgtggtgttcaccacactgaggggccgccagctctgtgcacccccagaccagtcctgggtagaacgcatcatccagagactgcagaggacctcaaccaagatgaagcgccgcagcagttaa

SEQ ID NO: 33801 - DNA, 221 bp, Macaca Mulatta
ggcacagcgtggagggacgggaccctaaagggctttgacccaagggagggtggggtaagaatgttctgagacattcttgggcgacaaagaggactgagcacctgttccccagctcccaggactgagagcctgcagagacaagctggggcagggcgaggggtggcagggaacttcagggtgggaggtgcatggggcaggcgggagaaggaagaacagagagg

SEQ ID NO: 33802 - DNA, 342 bp, Macaca Mulatta
tactcacactgaagtgacaaagtccagagaaggtggagaactgggagcagtcagagcaagggctgcaggatggtcagcggcagcctctgctttcctccagtccacagacactactcctgtctctaacttgcccatgggctggagctgtgttaattttgctctcaaatattatagatgtcttaacatcttccttggggatcccactgaaaagtaataacatcagaacacattattgcactctcagatatatcttaaaatacatactgtatctaaaattttgcattttggatgaataaacactctttctcattaatcaaataaaccaattaataagaactaatg

SEQ ID NO: 33803 - DNA, 2133 bp, Macaca Mulatta
  misc_feature (1)...(2133): n = A,T,C or G
cacaacattcttagattgcaaagaacagttataaaataattatcttatatgtgcttttcattatttttagtgtcacggcttcaaaaatgaaacattttaattgccctaaagaaactgtannnnnnnnnnnnnnnnnnnnnngcactttaaatccggtttgtgttttgtcaacttgagctggaatcttttttgttactttgaaggtgataaatagttttcaaatctactgatttgtgtactgtggcataagtatctttgaatttgggtggtgaaaggagaccttcagcaatttttagtctaggcaagagaattgttgggaatgtgacttctaaattttacaatagagcagttattttaaggtcatggttaacatttcttaaggttcaactgaaattcagttaaaatttcagagctaagaggaacttaaatcttagctaanaattacctgttgtagatagtattaattagattgtttgcagctattaattcatcataaaggtaaaatgaagaaactccctttttgaataaaagaaaattatttctaatttaataggctagtagttatttctgcnnnnnnnnnnnnnnnnnnnnnnnnnnnnnnnnnnnnnnnnnnnnnnnnnnnnnnnnnnnnnnnnnnnnnnnnnnnnnnnnnnnnnnnnnnnnnnnnnnnnnnnnnnnnnnnnnnnnnnnnnnnnnnnnnnnnnnnnnnnnnnnnnnnnnnnnnnnnnnnnnnnnnnnnnnnnnnnnnnnnnnnnnnnnnnnnnnnnnnnnnnnnnnnnnnnnnnnnnnnnnnnnnnnnnnnnnnnnnnnnnnnnnnnnnnnnnnnnnnnnnnnnnnnnnnnnnnnnnnnnnnnnnnnnnnnnnnnnnnnnnnnnnnnnnnnnnnnnnnnnnnnnnnnnnnnnnnnnnnnnnnnnnnnnnnnnnnnnnnnnnnnnnnnnnnnnnnnnnnnnnnnnnnnnnnnnnnnnnnnnnnnnnnnnnnnnnnnnnnnnnnnnnnnnnnnnnnnnnnnnnnnnnnnnnnnnnnnnnnnnnnnnnnnnnnnnnnnnnnnnnnnnnnnnnnnnnnnnnnnnnnnnnnnnnnnnnnnnnnnnnnnnnnnnnnnnnnnnnnnnnnnnnnnnnnnnnnnnnnnnnnnnnnnnnnnnnnnnnnnnnnnnnnnnnnnnnnnnnnnnnnnnnnnnnnnnnnnnnnnnnnnnnnnnnnnnnnnnnnnnnnnnnnnnnnnnnnnnnnnnnnnnnnnnnnnnnnnnnnnnnnnnnnnnnnnnnnnnnnnnnnnnnnnnnnnnnnnnnnnnnnnnnnnnnnnnnnnnnnnnnnnnnnnnnnnnnnnnnnnnnnnnnnnnnnnnnnnnnnnnnnnnnnnnnnnnnnnnnnnnnnnnnnnnnnnnnnnnnnnnnnnnnnnnnnnnnnnnnnnnnnnnnnnnnnnnnnnnnnnnnnnnnnnnnnnnnnnnnnnnnnnnnnnnnnnnnnnnnnnnnnnnnnnnnnnnnnnnnnnnnnnnnnnnnnnnnnnnnnnnnnnnnnnnnnnatgtgcaggttgttatataggtaaactcatctcatgtcaaggggttttgttgtacagattattttgtcacccaggtgctaagcctagtacccagtagttatttttcttgctcttctccctccttcccaccctccaccctcaagtaggccccagtgtttgttgttcccttctttgtgtccttgagttctcatcatttagctcctacttctaagtgagaacgtatagtatttggttttctgttctgtgttagtttgctaaggataatggcctccaggtcagatggaatatctatcacatagacctgttgttacagggtaggatcggatgatggacactgaagtactcagcgtgctaagttcagttgctctccctagcctccttttggcttcagagtcttttgattccatctatcctggcattttttgtgtgctgatgtttagttcctgattggctttagctgtactaataggaagggagttgtcttttcaagcagtcttaaaaggtggtcagtcaaaaggccagagtctgaatcccttctatggcttaaataatttgaggatcaagtccagtatcttgttaatgccctgttctactgtgccaggcactatctt

SEQ ID NO: 33804 - DNA, 1757 bp, Macaca Mulatta
  misc_feature (1)...(1757): n = A,T,C or G
ttccagcacacagagtctccggaatacgtgttgtgtgtccagnnnnnnnnnnnnnnnnnnnnnnnnnnnnnnnnnnnnnnnnnnnnnnnnnnnnnnnnnnnnnnnnnnnnnnnnnnnnnnnnnnnnnnnnnnnnnnnnnnnnnnnnnnnnnnnnnnnnnnnnnnnnnnnnnnnnnnnnnnnnnnnnnnnnnnnnnnnnnnnnnnnnnnnnnnnnnnnnnnnnnnnnnnnnnnnnnnnnnnnnnnnnnnnnnnnnnnnnnnnnnnnnnnnnnnnnnnnnnnnnnnnnnnnnnnnnnnnnnnnnnnnnnnnnnnnnnnnnnnnnnnnnnnnnnnnnnnnnnnnnnnnnnnnnnnnnnnnnnnnnnnnnnnnnnnnnnnnnnnnnnnnnnnnnnnnnnnnnnnnnnnnnnnnnnnnnnnnnnnnnnnnnnnnnnnnnnnnnnnnnnnnnnnnnnnnnnnnnnnnnnnnnnnnnnnnnnnnnnnnnnnnnnnnnnnnnnnnnnnnnnnnnnnnnnnnnnnnnnnnnnnnnnnnnnnnnnnnnnnnnnnnnnnnnnnnnnnnnnnnnnnnnnnnnnnnnnnnnnnnnnnnnnnnnnnnnnnnnnnnnnnnnnnnnnnnnnnnnnnnnnnnnnnnnnnnnnnnnnnnnnnnnnnnnnnnnnnnnnnnnnnnnnnnnnnnnnnnnnnnnnnnnnnnnnnnnnnnnnnnnnnnnnnnnnnnnnnnnnnnnnnnnnnnnnnnnnnnnnnnnnnnnnnnnnnnnnnnnnnnnnnnnnnnnnnnnnnnnnnnnnnnnnnnnnnnnnnnnnnnnnnnnnnnnnnnnnnnnnnnnnnnnnnnnnnnnnnnnnnnnnnnnnnnnnnnnnnnnnnnnnnnnnnnnnnnnnnnnnnnnnnnnnnnnnnnnnnnnnnnnnnnnnnnnnnnnnnnnnnnnnnnnnnnnnnnnnnnnnnnnnnnnnnnnnnnnnnnnnnnnnnnnnnnnnnnnnnnnnnnnnnnnnnnnnnnnnnnnnnnnnnnnnnnnnnnnnnnnnnnnnnnnnnnnnnnnnnnnnnnnnnnnnnnnnnnnnnnnnnnnnnnnnnnnnnnnnnnnnnnnnnnnnnnnnnnnnnnnnnnnnnnnnnnnnnnnnnnnnnnnnnnnnnnnnnnnnnnnnnnnnnnnnnnnnnnnnnnnnnnnnnnnnnnnnnnnnnnnnnnnnnnnnnnnnnnnnnnnnnnnnnnnnnnnnnnnnnnnnnnnnnnnnnnnnnnnnnnnnnnnnnnnnnnnnnnnnnnnnnnnnnnnnnnnnnnnnnnnnnnnnnnnnnnnnnnnnnnnnnnnnnnnnnnnnnnnnnnnnnnnnnnnnnnnnnnnnnnnnnnnnnnnnnnnnnnnnnnnnnnnnnnnnnnnnnnnnnnnnnnnnnnnnnnnnnnnnnnnnnnnnnnnnnnnnnnnnnnnnnnnnnnnnnnnnnnnnnnnnnnnnnnnnnnnnnnnnnnnnnnnnnnnnnnnnnnnnnnnnnnnnnnnnnnnnnnnnnnnnnnnnnnnnnnnnnnnnnnnnnnnnnnnnnnnnnnnnnnnnnnnnnnnnnnnnnnnnnnnnnnnnnnnnnnnnnnnnnnnnnnnnnnnnnnnnnnnnnnnnnnggctatcagtgtacctgtctctcacagtttacgggaagaaactgtgaatctgagattacagcctgcttcccaaacccctgccggaatggaggatcctgcgatccaataggaaacactttcatctgcaattgtaaagctgggctcactggagtcacg

SEQ ID NO: 33805 - DNA, 1062 bp, Macaca Mulatta
  misc_feature (1)...(1062): n = A,T,C or G
tgagaagagactattcagatatcaccaatccaggccccccgaagactctaccaactgctgtacaaaagatctcccagtatgcgtgtcagagaagaaccactttaaacaactgtaaccagatattcacggnnnnnnnnnnnnnnnnnnnnnnnnnnnnnnnnnnnnnnnnnnnnnnnnnnnnnnnnnnnnnnnnnnnnnnnnnnnnnnnnnnnnnnnnnnnnnnnnnnnnnnnnnnnnnnnnnnnnnnnnnnnnnnnnnnnnnnnnnnnnnnnnnnnnnnnnnnnnnnnnnnnnnnnnnnnnnnnnnnnnnnnnnnnnnnnnnnnnnnnnnnnnnnnnnnnnnnnnnnnnnnnnnnnnnnnnnnnnnnnnnnctctttacttctgtatttggagtggggttgaagacttctgagaagtggttcaggatgggtttcagaactctgagtaaagtaaggtcggacgaaagcctgaaatttacacgaatgcagagagcagnnnnnnnnnnnnnnnnnnnnnnnnnnnnnnnnnnnnnnnnnnnnnnnnnnnnnnnnnnnnnnnnnnnnnnnnnnnnnnnnnnnnnnnnnnnnnnnnnnnnnnnnnnnnnnnnnnnnnnnnnnnnnnnnnnnnnnnnnnnnnnnnnnnnnnnnnnnnnnnnnnnnnnnnnnnnnnnnnnnnnnnnnnnnnnnnnnnnnnnnnnnnnnnnnnnnnnnnnnnnnnnnnnnnnnnnnnnnnnnnnnnnnnnnnnnnnnnnnnnnnnnnnnnnnnnnnnnnnnnnnnnnnnnnnnnnnnnnnnnnnnnnnnnnnnnnnnnnnnnnnnnnnnnnnnnnnnnnnnnnnnnnnnnnnnnnnnnnnnnnnnnnnnnnnnnnnnnnnnnnnnnnnnnnnnnnnnnnnnnnnnnnnnnnnnnnnnnnnnnnnnnnnnnnnnnnnnnnnnnnnnnnnnnnnnnnnnnnnnnnnnnnnnnnnnnnnnnnnnnnnnngcagtttgagagagacctccggcgctatgccacacatgaacggaagatgattctggataaccatgctttatatgacaagaccaa

SEQ ID NO: 33806 - DNA, 2467 bp, Macaca Mulatta
  misc_feature (1)...(2467): n = A,T,C or G
caggtctcagcgtatcctttgccggagcatcgcnnnnnnnnnnnnnnnnnnnnnnnnnnnnnnnnnnnnnnnnnnnnnnnnnnnnnnnnnnnnnnnnnnnnnnnnnnnnnnnnnnnnnnnnnnnnnnnnnnnnnnnnnnnnnnnnnnnnnnnnnnnnnnnnnnnnnnnnnnnnnnnnnnnnnnnnnnnnnnnnnnnnnnnnnnnnnnnnnnnnnnnnnnnnnnnnnnnnnnnnnnnnnnnnnnnnnnnnnnnnnnnnnnnnnnnnnnnnnggcaagcagatatgctactgtcagtgaaagagtgcatgctcaagtgcagcagtttctaaaagaaggttatttaagggaggagatggttctggacaatatcccaaagcttctgaactgcctgagagactgcaatgttgccatccgatggctgatgcttcatacagcagactcagnagcctgtgacccaaacaacaaacgctttcgtcaaatcaaggaccagattctaacagactctcggtacaatcccaggatcctcttccagctgctattggatactgcacaatttgagtttatactcaaagagnagatgttcaagcaaatgctttcagaaaagcaaaccaaatgggagcattataagaaagagggttcggagcggatgactgagcttgctgatgtcttttcgggagtgaaacccnnnnnnnnnnnnnnnnnnnnnnnnnnnnnnnnnnnnnnnnnnnnnnnnnnnnnnnnnnnnnnnnnnnnnnnnnnnnnnnnnnnnnnnnnnnnnnnnnnnnnnnnnnnnnnnnnnnnnnnnnnnnnnnnnnnnnnnnnnnnnnnnnnnnnnnnnnnnnnnnnnnnnnnnnnnnnnnnnnnnnnnnnnnnnnnnnnnnnnnnnnnnnnnnnnnnnnnnnnnnnnnnnnnnnnnnnnnnnnnnnnnnnnnnnnnnnnnnnnnnnnnnnnnnnnnnnnnnnnnnnnnnnnnnnnnnnnnnnnnnnnnnnnnnnnnnnnnnnnnnnnnnnnnnnnnnnnnnnnnnnnnnnnnnnnnnnnnnnnnnnnnnnnnnnnnnnnnnagcttgcctctgccctggatctgccccttcttcgtattaatcaggcaaatagcccggatctgctcagcgtgtcgcagtactattctggagagttggtatcctatgtgagaaaagnnnnnnnnnnnnnnnnnnnnnnnnnnnnnnnnnnnnnnnnnnnnnnnnnnnnnnnnnnnnnnnnnnnnnnnnnnnnnnnnnnnnnnnnnnnnnnnnnnnnnnnnnnnnnnnnnnnnnnnnnnnnnnnnnnnnnnnnnnnnnnnnnnnnnnnnnnnnnnnnnnnnnnnnnnnnnnnnnnnnnnnnnnnnnnnnnnnnnnnnnnnnnnnnnnnnnnnnnnnnnnnnnnnnnnnnnnnnnnnnnnnnnnnnnnnnnnnnnnnnnnnnnnnnnnnnnnnnnnnnnnnnnnnnnnnnnnnnnnnnnnnnnnnnnnnnnnnnnnnnnnnnnnnnnnnnnnnnnnnnnnnnnnnnnnnnnnnnnnnnnnnnnnnnnnnnnnnnnnnnnnnnnnnnnnnnnnnnnnnnnnnnnnnnnnnnnnnnnnnnnnnnnnnnnnnnnnnnnnnnnnnnnnnnnnnnnnnnnnnnnnnnnnnnnnnnnnnnnnnnnnnnnnnnnnnnnnnnnnnngattcaagattggcaaagcatgtaccagtccactcatattccaatacccaagtttacccctgtggatgagtctgtaacgtttattggtcgactctgcagagaaatcctgcggatcacagacccaaannnnnnnnnnnnnnnnnnnnnnnnnnnnnnnnnnnnnnnnnnnnnnnnnnnnnnnnnnnnnnnnnnnnnnnnnnnnnnnnnnnnnnnnnnnnnnnnnnnnnnnnnnnnnnnnnnnnnnnnnnnnnnnnnnnnnnnnnnnnnnnnnnnnnnnnnnnnnnnncagaatttcctcagtatgtttcagaaaattatcctgagagacagaactgttcaggacactttaaaaaccctcatgaatgctgtcagtcccctaaaaagtattgnnnnaattcaaataaaatttatttttccgccattgccaaaacacagaagatttggactgcgtatctcgaggctataatgaaggnnnnnnnnnnnnnnnnnnnnnnnnnnnnnnnnnnnnnnnnnnnnnnnnnnnnnnnnnnnnnnnnnnnnnnnnnnnnnnnnnnnnnnnnnnnnnnnnnnnnnnnnnnnnnnnnnnnnnnnnnnnnnnnnnnnnnnnnnnnnnnnnnnnnnnnnnnnnnnnnnnnnnnnnnnnnnnnnnnnnnnnnnnnnnnnnnnnnnnnnnnnnnnnnnnnnnnnnnnnnnnnnnnnnnnagatatacataacaacaaagcgcttaccctattttccaattgtcaactttctatttttgatcgctccagttgccaaaaacttcagtacaa

SEQ ID NO: 33807 - DNA, 234 bp, Macaca Mulatta
agggatcgcaatcacccttcagtaccttatcgttattatgaaccttttggacctgatgaatgtaccatgtacctctcccatgagcgaggacgcaagggcagtcatcaccgctttatcacagagaaacgagtctttaataactgcgcacggacattccataatcacttttttcaaccagactggaaaccagaatcacttgcgtataatcatcctgagaataaacctgtgttctaa

SEQ ID NO: 33808 - DNA, 411 bp, Macaca Mulatta
ggaggtgtacggaaattaatgaataaacattttgagtttccctagtattgaaggaagttgtacttcttgtcagaaagattaaaaaaatcaagttgaaatgatgtttgaatttcaagaaaagaggctgctgtcagtaccctctcattagatgtgttaattggttagcactccactgcacatgctaatgacttcctctgacagccacacacagaatcttgatgaaaaaagagcagagcatttgccttgttacatagtctgttacaagccagatatattgctagctctcaagaattgtaatatattaagaactacaacttatttgattaaaactcagctgtatagatccttttataaagcaccttttgttaaccatcagcctttcattggtattttaaaagcaaggcagatagt

SEQ ID NO: 33809 - DNA, 1002 bp, Macaca Mulatta
  misc_feature (1)...(1002): n = A,T,C or G
gcctggccacgttgctaggggacctcccagcccgctgctgagatctggcactgcacagcctctttcaggcagagaaactgataaggagacggttgcctgctcaccccaaaaggnnnnnnnnnnnnnnnnnnnnnnnnnnnnnnnnnnnnnnnnnnnnnnnnnnnnnnnnnnnnnnnnnnnnnnnnnnnnnnnnnnnnnnnnnnnnnnnnnnnnnnnnnnnnnnnnnnnnnnnnnnnnnnnnnnnnnnnnnnnnnnnnnnnnnnnnnnnnnnnnnnnnnnnnnnnnnnnnnnnnnnnnnnnnnnnnnnnnnnnnnnnnnnnnnnnnnnnnnnnnnnnnnnnnnnnnnnnnnnnnnnnnnnnnnnnnnnnnnnnnnnnnnnnnnnnnnnnnnnnnnnnnnnnnnnnnnnnnnnnnnnnnnnnnnnnnnnnnnnnnnnnnnnnnnnnnnnnnnnnnnnnnnnnnnnnnnnnnnnnnnnnnnnnnnnnnnnnnnnnctgggcacccatacacgtcttcattggccacttgtgcctttctgacctggccgtggctctgttccaagtgctgccccagctggcctggaaggccaccgaccgcttccgtgggccggatgccctgtgtcgggctgtgaagtatctgcagatggtgggcatgtatgcctcctcctacatgatcctggccatgacgctggaccgccaccgcgccatctgccgtcccatgctggcgtatcgccatgtaggtggggctcactggaaccggccagtgctggtggcttgggccttctcgctccttctcagcctgccccagctcttcatctttgcccagcgcaatgtgggaggtggcagcggggtcaccgactgctgggccagctttgtggagccctggggccgtcgcacctacgtcacctggatcgccctgatggtgtttgtggcacctaccctgggtatcgctgcctgccaggtgctcatcttccgggagattcacaccagtctggtgccagggcc

SEQ ID NO: 33810 - DNA, 636 bp, Macaca Mulatta
tcaggctcccatggtgcaccagcctgaccagtacgggtaggtagcaacgcaccccgacttgctgcgggacctgggcgttttctctgcaactgttaaagatcgtgccacctggccacgaaaggaacacccaaaccaagaaagcgaaacacctaacaggaaatccatctccgagggggttgtccttgtgtccatttttgttggtgtgtttgtttcgttttcctttcgtattaacagtactgtggccgttcggtggaaacccgcatgtgtcctcaggccctgtctgcatggctttcggcatggctgctttccttcatgcctgagagggaaatagaaactttgatctgtgtcgaagacacggagtcaccaactctggcgtcatttcccccattgttgtcgttgttttgtctaggaacctgtgttgtgcagcgctgttctcatgactgtattctcactcctgccactacagtgagcggctgccatacccacccccaaattaagagcacagcatctcatttgacaagacaatcactgcagttgagctgacacaggctattcacaggacttaggaggggtttcattatatcaccaccaagcaaatgtctgtgccaaagacttctattattttcttctccagcg

SEQ ID NO: 33811 - DNA, 199 bp, Macaca Mulatta
agttcaacagatgcattacctctcagctcatcaagtggtttagcaatttccgtgagttttactacattcagatggagaagtacgcgcgtcaagccatcaacgatggggtcaccagtactgaagagctgtctataaccagagactgtgagctgtacagggctctgaacatgcactacaataaagcaaatgactttgaggt

SEQ ID NO: 33812 - DNA, 691 bp, Macaca Mulatta
ggggagaggtctcggggctggtagtagcgctgcctgcaatccagcaccaagactgcaaacgaagccagaaagatggtggccagcacacctatggcaacaatcaccacggtctccatgcttccggggagctcctgactcagtctccctcacatcctcctcatgggctaaagctgctggaagtggcaaattgggggaagaggatggcaggagctaggttcctccatgacacctccggagacctgagggcctcaagcggcagctccggggcacatcccgctgcgctcccaagatggcccctcagatggcaaagtcagcgagagatttatcccatctcctgtgagttctcttctcctttttgcactctccaccctagacatctgggccacaattgccagaagcctccgagtgctccatttcactttcctccttccaagtctccccgtgtgtcatctctctggtcacagtggtgtcccaaccagtggtccctgcagtttcctgacactgaaacctgctcagccagacggcacaactcccatcatgcagcaactctgtgccaggcatcggacttccaggctcataaacgtggaaatctgttagctgaaaaataagtgctccagcccattatagctgggaagaagcttataaaaagactttataaaccaagccgagtaatatttctgaacagctgcgg

SEQ ID NO: 33813 - DNA, 458 bp, Macaca Mulatta
atggcgcgtactaagcagaccgctcgtaaatccacaggcggtaaagcaccgcgcaagcagctggcgactaaagcagctcgcaagagcgctccagccacgggtggcgtgaagaagcctcatcgctaccgccctggtaccgtggctttgcgcgagattcgtcgctaccagaagtccaccgagcttcttatccggaagctgccgtttcagcgcctggtgcgagaaatcgctcaggacttcaagaccgacctgcgctttcagagttccgctgtgatggcactgcaggaggcctgcgaggcttacttggtggggctttttgaggacaccaacctgtgcgctatccatgccaaacgcgtcaccatcatgcctaaggacatccagcttgcccgccgcattcgtggcgagagagcgtaaatcgttttgagtgccaaccttcaacccaaaggctcttttcagagcca

SEQ ID NO: 33814 - DNA, 169 bp, Macaca Mulatta
agttacttacaatgcatctttagatgctatcatttccagtacaaccagcaatacaaagagtgtggtgctagcttggagagagaaatcaaaaaagcatcttcatatgacatccttcaacattgcccagggcattcatgcttttgattatcactctcggctcaatttaatt

SEQ ID NO: 33815 - DNA, 2810 bp, Macaca Mulatta
  misc_feature (1)...(2810): n = A,T,C or G
gaactgcctcattcacctcagaacctcctggccagccctaattcttcccacagccacgccgtggtgctctcttgggtccggccctttgacggaaacagtcctattctttattacatcgtggagctgtctgaaaacanactctccgtggaaagtgcatctgtcaaatgttggccccgagatgacaggcgtcaccgtgggcggcctgactccggctcgcacctatcaattccgggtgtgcgcagtgaacgaagtgggcaggggccagtacagcgctgagacaagcaggnaggttgatgctacctgaagaaccacccagtgctcccccgaaaaatatagtggccagtgggcggaccaatcaatccattatggtccagtggcagccgcccccagaaacagagcacaacggggtgttgcgtggttacatcctcaggcannnnnnnnnnnnnnnnnnnnnnnnnnnnnnnnnnnnnnnnnnnnnnnnnnnnnnnnnnnnnnnnnnnnnnnnnnnnnnnnnnnnnnnnnnnnnnnnnnnnnnnnnnnnnnnnnnnnnnnnnnnnnnnnnnnnnnnnnnnnnnnnnnnnnnnnnnnnnnnnnnnnnnnnnnnnnnnnnnnngtgcccaccgcgcccccgcagaacgtgcagacggaagccgtgaactccaccaccattcagttcctgtggaaccctccacctcagcagtttatcaacggcatcaaccagggatacaagnnnnnnnnnnnnnnnnnnnnnnnnnnnnnnnnnnnnnnnnnnnnnnnnnnnnnnnnnnnnnnnnnnnnnnnnnnnnnnnnnnnnnnnnnnnnnnnnnnnnnnnnnnnnnnnnnnnnnnnnnnnnnnnnnnnnnnnnnnnnnnnnnnnnnnnnnnnnnnnnnnnnnnnnnnnnnnnnnnnnnnnnnnnnnnnnnnnnnnnnnnnnnnnnnnnnnnnnnnnnnnnnnnnnnnnnnnnnnnnnnnnnnnnnnnnnnnnnnnnnnnnnnnnnnnnnnnnnnnnnnnnnnnnnnnnnnnnnnnnnnnnnnnnnnnnnnnnnnnnnnnnnnnnnnnnnnnnnnnnnnnnnnnnnnnnnnnnnnnnnnnnnnnnnnnnnnnnnnnnnnnnnnnnnnnnnnnnnnnnnnnnnnnnnnnnnnnnnnnnnnnnnnnnnnnnnnnnnnnnnnnnnnnnnnnnnnnnnnnnnnnnnnnnnnnnnnnnnnnnnnnnnnnnnnnnnnnnnnnnnnnnnnnnnnnnnnnnnnnnnnnnnnnnnnnnnnnnnnnnnnnnnnnnnnnnnnnnnnnnnnnnnnnnnnnnnnnnnnnnnnnnnnnnnnnnnnnnnnnnnnnnnnnnnnnnnnnnnnnnnnnnnnnnnnnnnnnnnnnnnnnnnnnnnnnnnnnnnnnnnnnnnnnnnnnnnnnnnnnnnnnnnnnnnnnnnnnnnnnnnnnnnnnnnnnnnnnnnnnnnnnnnnnnnnnnnnnnnnnnnnnnnnnnnnnnnnnnnnnnnnnnnnnnnnnnnnnnnnnnnnnnnnnnnnnnnnnnnnnnnnnnnnnnnnnnnnnnnnnnnnnnnnnnnnnnnnnnnnnnnnnnnnnnnnnnnnnnnnnnnnnnnnnnnnnnnnnnnnnnnnnnnnnnnnnnnnnnnnnnnnnnnnnnnnnnnnnnnnnnnnnnnnnnnnnnnnnnnnnnnnnnnnnnnnnnnnnnnnnnnnnnnnnnnnnnnnnnnnnnnnnnnnnnnnnnnnnnnnnnnnnnnnnnnnnnnnnnnnnnnnnnnnnnnnnnnnnnnnnnnnnnnnnnnnnnnnnnnnnnnnnnnnnnnnnnnnnnnnnnnnnnnnnnnnnnnnnnnnnnnnnnnnnnnnnnnnnnnnnnnnnnnnnnnnnnnnnnnnnnnnnnnnnnnnnnnnnnnnnnnnnnnnnnnnnnnnnnnnnnnnnnnnnnnnnnnnnnnnnnnnnnnnnnnnnnnnnnnnnnnnnnnnnnnnnnnnnnnnnnnnnnnnnnnnnnnnnnnnnnnnnnnnnnnnnnnnnnnnnnnnnnnnnnnnnnnnnnnnnnnnnnnnnnnnnnnnnnnnnnnnnnnnnnnnnnnnnnnnnnnnnnnnnnnnnnnnnnnnnnnnnnnnnnnnnnnnnnnnnnnnnnnnnnnnnnnnnnnnnnnnnnnnnnnnnnnncaggcccaccagtgaggctcgtattccccgaagtgagactcacctccgtgcggattgtgtggcaacctccggaggagcccaacggcatcatcctgggnnnnnnnnnnnnnnnnnnnnnnnnnnnnnnnnnnnnnnnnnnnnnnnnnnnnnnnnnnnnnnnnnnnnnnnnnnnnnnnnnnnnnnnnnnnnnnnnnnnnnnnnnnnnnnnnnnnnnnnnnnnnnnnnnnnnnnnnnnnnnnnnnnnnnnnnnnnnnnnnnnnnnnnnnnnnnnnnnnnnnnnnnnnnnnnnnnnnnnnnnnnnnnnnnnnnnnnnnnnnnnnnnnnnnnnnnnnnnnnnnnnnnnnnnnnnnnnnnnnnnnnnnnnnnnnnnnnnnnnnnnnnnnnnnnnnnnnnnnnnnnnnnnnnnnnnnnnnnnnnnnnnnnnnnnnnnnnnnnnnnnnnnnnnnnnnnnnnnnnnnnnnnnnnnnnnnnnnnnnnnnnnnnnnnnnnnnnnnnnnnnnnnnnnnnnnnnnnnnnnnnnnnnnnnnnnnnnnnnnnnnnnnnnnnnnnnnnnnnnnnnnnnnnnnnnnnnnnnnnnnnnnnnnnnnnnnnnnnnngttccaggagagcccccgggatctgtctcagcaacgccacacaccacgtcctctgtcctgatacagtggca

SEQ ID NO: 33816 - DNA, 215 bp, Macaca Mulatta
  misc_feature (1)...(215): n = A,T,C or G
agatgagttctcaggcttggagaccgacactgcagtacccacggaagaggcctacgttatatatgatgaagnnnnnnnnnnnnnnnnnnnnnnnnnnnnnnnnnnnnnnnnnnnnnnnnnnnnnnnnnccacaccgggggtcatcgcagaagaaggtgccatcagttcctttcctgaagaagaatttgatctggctggaaggaaacgatttgttg

SEQ ID NO: 33817 - DNA, 777 bp, Macaca Mulatta
  misc_feature (1)...(777): n = A,T,C or G
gggttctcagaagcgaactatctccaccccnnnnnnnnnnnnnnnnnnnnnnnnnnnnnnnnnnnnnnnnnnnnnnnnnnnnnnnnnnnnnnnnnnnnnnnnnnnnnnnnnnnnnnnnnnnnnnnnnnnnnnnnnnnnnnnnnnnnnnnnnnnnnnnnnnnnnnnnnnnnnnnnnnnnnnnnnnnnnnnnnnnnnnnnnnnnnnnnnnnnnnnnnnnnnnnnnnnnnnnnnnnnnnnnnnnnnnnnnnnnnnnnnnnnnnnnnnnnnnnnnnnnnnnnnnnnnnnnnnnnnnnnnnnnnnnnnnnnnnnnnnnnnnnnnnnnnnnnnnnnnnnnnnnnnnnnnnnnnnnnnnnnnnnnnnnnnnnnnnnnnnnnnnnnnnnnnnnnnnnnnnnnnnnnnnnnnnnnnnnnnnnnnnnnnnnnnnnnnnnnnnnnnnnnnnnnnnnnnnnnnnnnnnnnnnnnnnnnnnnnnnnnnnnnnnnnnnnnnnnnnnnnnnnnnnnnnnnnnnnnnnnnnnnnnnnnnnnnnnnnnnnnnnnnnnnnnnnnnnnnnnnnnnnnnnnnnnnnnnnnnnnnnnnnnnnnnnnnnnnnnnnnnnnnnnnnnnnnnnnnnnnnnnnnnnnnnnnnnnnnnnnnnnnnnnnnnnnnnnnnnagactttgagcaaagcatggtcctggttgcctgtgggccatacaccacgtctgacagcatcacgtatgaccccctgctcgacctgattgctgtcatcaaccatgaccggccagatgtctgcatcct

SEQ ID NO: 33818 - DNA, 198 bp, Macaca Mulatta
atctgtgtgtatgtacatagtagacatgtgcgtgtgtgaatagctgtctgtgtgtgggtgtgtgagaggctggttcattgtgtgtgtgtttgtgggggggcgggtgagtgttcagagagggcccctttaactcttgtgttacttctcctggggtacattttacaggaaaataatatactgtacaagttttgtttacct

SEQ ID NO: 33819 - DNA, 677 bp, Macaca Mulatta
gacaaggcggccttcgtgatgcctccggctctgggcgaagtgggcggccacctgggcggcgcagccgtgtgcctcccgggccccagccccaccaagcacttcctggcagcgcccaagggcgccctgagcctgcaggagctggagcggcagttcgaggagacgcagatgaagctgttcgggcgcgcgcagctggaggctgagaggaacgcggggggcctcctggccttcgcgctggccgagaacgtggcagccgcgcggccctacttcccgctgcccgacccgtgggccgcgggcctggccggcctccctgggctcgccggcctcaaccacgtggcctccatgtccgaagccaacaactaggaagatcactgtcgactccagcccaccagccctccagtccttctccctccaggcccgctcttccccaccccatggatctgaacttttcattttaaaaacacaaagggaaaatggaaaaaaaataataatactatcagtgatggcattttcccaggctcctaaagcagctgcctccttttgctgttctaagatgggcatctcttcccaaaagaccaggagcccgggcctccctccctggctctctctctggctctcatgtagaaatttgcaccggcccaagccacacagccttaaggcccaggggcacttaggagctg

SEQ ID NO: 33820 - DNA, 847 bp, Macaca Mulatta
ttttctttcttgggattctctagtttgggaaagcatcagataaccatctctggggttttcctaactgtctgcattttaactctggctggtaatatcatcattgtgactattgtctgcattgaccatcatcttcacactcccatgtgtttcttcctaagcatgctggctagttcagagatggtgtacacactggttattgtgccatgattgctttgcagcctcatttttcataaccagcgtatctccttggcaggctgcacaacccaaatgttcttttttgttatcttggccattaataattgcttcctgcttactgcaatgggctatgactgctatgtggctgtctgcaggcccctgaggtacactgtcatcatcagcaagggcctatgtgcccagctggtatgtgggtcctttggcattggtctatggcagttctccatgtgacagccatgttcagtttgcccttctgtggcacagtggtggaccacttcttttgtgacatttacccagtcatgaaactttcttgcattgatatcactatcgatgagataataaattacggtgtaagttaatttgtgatttttgtgcccagaggcctgatatttacctcctatgtcctcatcatctctttcatccttaaaattgcctcaactgagggctggaagaagacctttgccacctgtgcctcccacctcactgtggtcattgtccaccgtggctgttcctctactacctacctcaagcccaagtcagaaaactctacagaacaagacctccttctgtcagtgacccacaccatcattgctcccctgctgaaccctgttgtttacagtttgagaaacaagga

SEQ ID NO: 33821 - DNA, 620 bp, Macaca Mulatta
  misc_feature (1)...(620): n = A,T,C or G
atcacagaactcatacaggagaaaaaccttataattgtagccagtgtggtaaagccttctcccaaaagtcacagctcacatcccatcagcggacacatacaggagagaaaccctannnnnnnnnnnnnnnnnnnnnnnnnnnnnnnnnnnnnnnnnnnnnnnnnnnnnnnnnnnnnnnnnnnnnnnnnnnnnnnnnnnnnnnnnnnnnnnnnnnnnnnnnnnnnnnnnnnnnnnnnnnnnnnnnnnnnnnnnnnnnnnnnnnnnnnnnnnnnnnnnnnnnnnnnnnnnnnnnnnnnnnnnnnnnnnnnnnnnnnnnnnnnnnnnnnnnnnnnnnnnnnnnnnnnnnnnnnnnnnnnnnnnnnnnnnnnnnnnnnnnnnnnnnnnnnnnnnnnnnnnnnnnnnnnnnnnnnnnnnnnnnnnnnnnnnnnnnnnnnnnnnnnnnnnnnnnnnnnnnnnnnnnnnnnnnnnnnnnnnnnnnnnnnnnnnnnnnnnnnnnnnnnnnnnnnnnnnnnnnnnnnnnnnnnnnnnnnnnnnnnnnnnnnnnnnnnnnnnnnnnnnnnnnnnnnnnnnnnnnnnnnnnnnnnnnnnnnnnnngaactcatacaggagaaaaaccttat

SEQ ID NO: 33822 - DNA, 443 bp, Macaca Mulatta
ccaccagaaggaaccacgtggaaagtccactttgtgaccccggtgttccagccagagggagccggtgcctgctatggaagaaaagtctgcccatgctttggggaaaaagtactccaccacgatccacctttgctctttgacctctcaagagacccttctgagacccacgtcctcacaccagcctcagagcctgtgttctatcaggtgatggaacgagtccagcgggctgtgcgggaacaccagcggacactcagcccggttcctctgcagctggacaggctgggcaacatctggagaccatggctgcagccctgctgtggcccattccccctctgctggtgccttagggaagacggcccacaataaatgtctgcaatgaaaagctggaaccccgattcctaaattttgtcactcaaagtgaaacaaaccagctgaccgtggtg

SEQ ID NO: 33823 - DNA, 474 bp, Macaca Mulatta
  misc_feature (1)...(474): n = A,T,C or G
tccaagcccttcaggagttccaagggaacacnnnnnnnnnnnnnnnnntctctcaagatggcagatggctaagtaagagtctgaatttcttcagtacacggctgtcggtcctgntcctgaggccagggatttttaacgggatggggtgatgagtggtggataccacaattcctggtgaaaaacactcttccagcccaaaagcttcttgatgcagagaaaagagcctggatttacagaaacatatagatctagtttgaattccagatcgagtttgcagttgtgaaatcttgaaggtattacttaacttcactacagattgtctagaagacctttctaggggttatctgattctagaagggtctatacctgtccttgtctttaagctatttgacagctctacgtgttgtagaaaactgataataatacaaatgattgttgtccatggaaatgcaaataaattttgtacagtgaaga

SEQ ID NO: 33824 - DNA, 713 bp, Macaca Mulatta
cgccccagcccagggcacgcccctggcccctttctgttcccaagtgcacgatgctgctgtgactgaggagtggacgatgctcgtgtgtcctctgcaagcccctgctgtggcttagttggttactggttatgtgtccctctgagtgtgtctttgagcgtgtctaccttcccctctccactcccagaagaccaaactgccttcccctcagggctcaagagcgtgtgtctgtggggctggtgtgaacccactgttgtgtgtccttgagacatttgtgttgtggttccttgtccttgtccctggcgttgtaactgtccactgcaggagtctggctcacccttctctttgacctggcacgactgggcgcctggagcagtttcactctgtgaggaatgagggaaccctggggctcgccctctcagaggaagggcacagagaggaagggaagaattggggggcagctggagcgagtggcagcctccctgcttccttctgcattcccaagctggcagctactgcgcggggcccgcaagtgtgggctgctgcctgctacagcctccatcactgcagtggagcagcaaattccctgtggcctgccacgccttcggcatcagaggacggagtgggcgaggctcgtggagtcccagggaccactggctgctctgcctgagcatcagggagtgggcaggaaaggccaagctgggtttgcacatctg

SEQ ID NO: 33825 - DNA, 1441 bp, Macaca Mulatta
atggcaaacagtgcctcacctgaacagaatcaaaatactgttcagtcatcaacaacagcatcccactgatgcagggcaacctccccactctgaccttgtctggaaagatccgagtgacagttactttcttcctttttctactctctgcgacctttaatgcttctttcctgctgaaacttcagaagtggacacagaagaaagagaaagggaaaaagctgtcaagaatgaagctgctcttaaaacatctgaccttagccaacctgttggagactctgattgtcatgccactggatgggatgtggaacattacagtccaatggtatgctggagagttcctctgcaaagttctcagttatctaaagcttttctccatgtatgccccagctttcatgatggtggtgatcagcctggaccgctccctggctatcacgaggcccctagctttgaaaagcagcagcaagctcggacagtccatggttggcctggcctggatcctcagtagtgtctttgcaggaccacagttatacatcttcaggatgattcatctagcagacagctccggacagacaaaagttttctctcaatgtgtaacacactgcagttttccacaatggtggcatcaagcattttataactttttcaccttcagctgcctcttcatcatccctcttctcatcatgctgatctgcaatgcaaaaatcatcttcaccctgacacgggtccttcatcaggatccccacaaactacaactgaatcagtccaagaacaatataccaagagcacggctgaagactctaaaaatgacagttgcatttgccacttcattcactgtctgctggactccctactatgtcctaggaatttggtattggtttgatcctgaaatgttaaacagggtgtcagacccagtaaatcacttcttctttctctttgcctttttaaacccatgctttgatccacttatctatggatatttttctctgtgattgatagactacacaagaagtcatatgaagaagggtaaggtcatgaatctctccatctgggaatattaacacaaatgttggagcatgtttacatacaaacaaagcaggatttacacttaagttgtccttcttttagaacctccattttcagagcctcaattattaaggaaaaatcttcaggaaaaatactaaaatattttctcgtcatcatcagcttctaaattaatctctgccttttctgacctcatataacacattatgtaggtttcttatcactttctctttgcataataatgtacaaatatttaaaatacctgcagcctaaggcacaagaatgccaaaaaatcaaaggcgagaaaccacaacacaggtctaaacttagcatgctttggtgagtttttctccaaaaggggcatattagcaattagagttttatactatatagtacatagagc

SEQ ID NO: 33826 - DNA, 1746 bp, Macaca Mulatta
  misc_feature (1)...(1746): n = A,T,C or G
cttcagggagaggccgcaccgggcctgctcacccaggggctgcccctgcagactctcccaaggggcccagggatattcctcgcgccgcgagtggacgcttccatccaccccgtggggagttgtgggaagggcctctgcgcgtggctactctgagcacactggaataatcagatagttgcataatttgagaaaccacagcctggagacggaatgatgcagactcctatccgagagacacctgttctattttcgctgtggttcgtgaggacgcgtcctaggctgttctgagaagcccatgtctgcgcttccaggcctgggaagacctctgaccccactgacagtgctgggccctcagtcgggcctgccatgcgtaccactttctgttctaagaccgggctgcccagctgtggcctggaggaaacctggcannnnnnnnnnnnnnnnnnnnnnnnnnnnnnnnnnnnnnnnnnnnnnnnnnnnnnnnnnnnnnnnnnnnnnnnnnnnnnnnnnnnnnnnnnnnnnnnnnnnnnnnnnnnnnnnnnnnnnnnnnnnnnnnnnnnnnnnnnnnnnnnnnnnnnnnnnnnnnnnnnnnnnnnnnnnnnnnnnnnnnnnnnnnnnnnnnnnnnnnnnnnnnnnnnnnnnnnnnnnnnnnnnnnnnnnnnnnnnnnnnnnnnnnnnnnnnnnnnnnnnnnnnnnnnnnnnnnnnnnnnnnnnnnnnnnnnnnnnnnnnnnnnnnnnnnnnnnnnnnnnnnnnnnnnnnnnnnnnnnnnnnnnnnnnnnnnnnnnnnnnnnnnnnnnnnnnnnnnnnnnnnnnnnnnnnnnnnnnnnnnnnnnnnnnnnnnnnnnnnnnnnnnnnnnnnnnnnnnnnnnnnnnnnnnnnnnnnnnnnnnnnnnnnnnnnnnnnnnnnnnnnnnnnnnnnnnnnnnnnnnnnnnnnnnnnnnnnnnnnnnnnnnnnnnnnnnnnnnnnnnnnnnnnnnnnnnnnnnnnnnnnnnnnnnnnnnnnnnnnnnnnnnnnnnnnnnnnnnnnnnnnnnnnnnnnnnnnnnnnnnnnnnnnnnnnnnnnnnnnnnnnnnnnnnnnnnnnnnnnnnnnnnnnnnnnnnnnnnnnnnnnnnnnnnnnnnnnnnnnnnnnnnnnnnnnnnnnnnnnnnnnnnnnnnnnnnnnnnnnnnnnnnnnnnnnnnnnnnnnnnnnnnnnnnnnnnnnnnnnnnnnnnnnnnnnnnnnnnnnnnnnnnnnnnnnnnnnnnnnnnnnnnnnnnnnnnnnnnnnnnnnnnnnnnnnnnnnnnnnnnnnnnnnnnnnnnnnnnnnnnnnnnnnnnnnnnnnnnnnnnnnnnnnnnnnnnnnnnnnnnnnnnnnnnnnnnnnnnnnnnnnnnnnnnnnnnnnnnnnnnnnnnnnnnnnnnnnnnnnnnnnnnnnnnnnnnnnnnnnnnnnnnnnnnnnnnnnnnnnnnnnnnnnnnnnnnnnnnnnnnnnatgacccccgccctccagggtcagtgtttggctgctcttgtgcctgcccacctgcctccctgtgcctgggcctgtcatgtgcctgcacacaggagggtctcgtggcgtttgccctacacggatgggctgtcctaggagccgctggagagtcaccttggtggggatgccacaagcctgggcaccaggttccccccggccagccttcattcccacacggggtatttttgtccatcacgtgggacaacctaggattgggggaaaattcagtacactc

SEQ ID NO: 33827 - DNA, 574 bp, Macaca Mulatta
  misc_feature (1)...(574): n = A,T,C or G
ctggcgctgaaggagtctgcaggtgccgcgggcagcggcaagaaggcggccgccggggcccaggcctcgcaggctcaactcggggaggccgccgggccggcctccgagactccggctggcaccgagtcgcttcactcgagcgcctccccgtgccaggagcacaagcgagggggcctgggagagatgaaggggacgcctgctgcagcactgagccccccagagccggcgccctctcccgggcagcagcagcaggccgcggcccacctgctgggcccgccccaccacccaggcctgccacctgaggcccacctgaagccggagcaccactacgccttcaaccacccgttctccatcaacaacctcatgtcctcggagcagcannnnnnnnnnnnnnnnnnnnnnnnnnnnnnnnnnaaatggacctcaaggcctacgaacaggtgatgcactaccccggctacggttcccccatgcctggcagcttggccatgggcccggtcacgaacaaaacgggcctggacgcttcgcccctggccgcagatacctcttactaccagggggtgtactcccggcc

SEQ ID NO: 33828 - DNA, 284 bp, Macaca Mulatta
cccctgacggtagaggtgcagatccttctcaaccagtgccgctcggcggaggaggctctgcgcatgttcgccgtgtagggctgtgggcaataaacgctgttcccagcactcccgcctcggcgtctgtccgccgcgcgcgtcggggtgggcgggcgtggcgccggcgtcctggggaggaggagcagcctctgcccgacccgctcgtgcggaccccaggaccgggcacgggacccgtgcgtccagccccgggcgctgcggagactcgctgctgggacccgggaggg

SEQ ID NO: 33829 - DNA, 2762 bp, Macaca Mulatta
  misc_feature (1)...(2762): n = A,T,C or G
tctacctgagcatcgtactctccgtcgtggtcatcatcaccggctgcttctcctattatccnnnnnnnnnnnnnnnnnnnnnnnnnnnnnnnnnnnnnnnnnnnnnnnnnnnnnnnnnnnnnnnnnnnnnnnnnnnnnnnnnnnnnnnnnnnnnnnnnnnnnnnnnnnnnnnnnnnnnnnnnnnnnnnnnnnnnnnnnnnnnnnnnnnnnnnnnnnnnnnnnnnnnnnnnnnnnnnnnnnnnnnnnnnnnnnnnnnnnnnnnnnnnnnnnnnnnnnnnnnnnnnnnnnnnnnnnnnnnnnnnnnnnnnnnnnnnnnnnnnnnnnnnnnnnnnnnnnnnnnnnnnnnnnnnnnnnnnnnnnnnnnnnnnnnnnnnnnnnnnnnnnnnnnnnnnnnnnnnnnnnnnnnnnnnnnnnnnnnnnnnnnnnnnnnnnnnnnnnnnnnnnnnnnnnnnnnnnnnnnnnnnnnnnnnnnnnnnnnnnnnnnnnnnnnnnnnnnnnnnnnnnnnnnnnnnnnnnnnnnnnnnnnnnnnnnnnnnnnnnnnnnnnnnnnnnnnnnnnnnnnnnnnnnnnnnnnnnnnnnnnnnnnnnnnnnnnnnnnnnnnnnnnnnnnnnnnnnnnnnnnnnnnnnnnnnnnnnnnnnnnnnnnnnnnnnnnnnnnnnnnnnnnnnnnnnnnnnnnnnnnnnnnnnnnnnnnnnnnnnnnnnnnnnnnnnnnnnnnnnnnnnnnnnnnnnnnnnnnnnnnnnnnnnnnnnnnnnnnnnnnnnnnnnnnnnnnnnnnnnnnnnnnnnnnnnnnnnnnnnnnnnnnnnnnnnnnnnnnnnnnnnnnnnnnnnnnnnnnnnnnnnnnnnnnnnnnnnnnnnnnnnnnnnnnnnnnnnnnnnnnnnnnnnnnnnnnnnnnnnnnnnnnnnnnnnnnnnnnnnnnnnnnnnnnnnnnnnnnnnnnnnnnnnnnnnnnnnnnnnnnnnnnnnnnnnnnnnnnnnnnnnnnnnnnnnnnnnnnnnnnnnnnnnnnnnnnnnnnnnnnnnnnnnnnnnnnnnnnnaggtggcagagattccctttaattccaccaacaagtaccannnnnnnnnnnnnnnnnnnnnnnnnnnnnnnnnnnnnnnnnnnnnnnnnnnnnnnnnnnnnnnnnnnnnnnnnnnnnnnnnnnnnnnnnnnnnnnnnnnnnnnnnnnnnnnnnnnnnnnnnnnnnnnnnnnnnnnnnnnnnnnnnnnnnnnnnnnnnnnnnnnnnnnnnnnnnnnnnnnnnnnnnnnnnnnnnnnnnnnnnnnnnnnnnnnnnnnnnnnnnnnnnnnnnnnnnnnnnnnnnnnnnnnnnnnnnnnnnnnnnnnnnnnnnnnnnnnnnnnnnnnnnnnnnnnnnnnnnnnnnnnnnnnnnnnnnnnnnnnnnnnnnnnnnnnnnnnnnnnnnnnnnnnnnnnnnnnnnnnnnnnnnnnnnnnnnnnnnnnnnnnnnnnnnnnnnnnnnnnnnnnnnnnnnnnnnnnnnnnnnnnnnnnnnnnnnnnnnnnnnnnnnnnnnnnnnnnnnnnnnnnnnnnnnnnnnnnnnnnnnnnnnnnnnnnnnnnnncagtgctgccaaagccattgtggtgcatggtacagaactaaaggacttacagtcacagcagcttgatcagatcctccagaaccacactgagattgtgtttgctcggacctcccctcagcagaagctcatcattgtcgagggatgtcagaggctggngggagccattgtggccgtgacgggtgacggggtgaacgactcccctgcgctgannnnnnnnnnnnnnnnnnnnnnnnnnnnnnnnnnnnnnnnnnnnnnnnnnnnnnnnnnnnnnnnnnnnnnnnnnnnnnnnnnnnnnnnnnnnnnnnnnnnnnnnnnnnnnnnnnnnggccgcctgatctttgacaacctgaagaaatccatcatgtacaccctgaccagcaacatccctgagatcacccccttcctgatgttcatcatcctcggtatacccctgcctctgggaaccataaccatcctctgcattgatctcggcactgacatggnnnnnnnnnnnnnnnnnnnnnnnnnnnnnnnnnnnnnnnnnnnnnnnnnnnnnnnnnnnnnnnnnnnnnnnnnnnnnnnnnnnnnnnnnnnnnnnnnnnnnnnnnnnnnnnnnnnnnnnnnnnnnnnnnnnnnnnnnnnnnnnnnnnnnnnnnnnnnnnnnnnnnnnnnnnnnnnnnnnnnnnnnnnnnnnnnnnnnnnnnnnnnnnnnnnnnnnnnnnnnnnnnnnnnnnnnnnnnnnnnnnnnnnnnnnnnnnnnnnnnnnnnnnnnnnnnnnnnnnnnnnnnnnnnnnnnnnnnnnnnnnnnnnnnnnnnnnnnnnnnnnnnnnnnnnnnnnnnnnnnnnnnnnnnnnnnnnnnnnnnnnnnnnnnnnnnnnnnnnnnnnnnnnnnnnnnnnnnnnnnnnnnnnnnnnnnnnnnnnnnnnnnnnnnnnnnnnnnnnnnnnnnnnnnnnnnnnnnnnnnnnnnnnnnnnnnnnnnnnnnnnnnnnnnnnnnnnnnnnnnataacctggtggctctgtgccattccctacagtattctcatcttcatctatgatgaaatcagaaaactcctcatccgtcagcacccggnnggctgggtggagagggagacgtactactaaactcagcagaggaagagcttcctgtgacacaggggtgtcgtgagagctggggtggggccagagattataagtttgacacaaca

SEQ ID NO: 33830 - DNA, 210 bp, Macaca Mulatta
cccgtggtgctcagatgccatggcgcttcactggggcaggaatcgccgcggtctccatagcaggcaagatgatgtccgcagcagccatcgccaacggcggtggggtttctgcggggagcctggtggctattctgcagactgtgggggcagccggaatctccacatcatccaacattctcctgtgcctctgttgggtcactgttgggggcc

SEQ ID NO: 33831 - DNA, 566 bp, Macaca Mulatta
  misc_feature (1)...(566): n = A,T,C or G
aacaggataattcagacaacaacaccatctttgtgcaaggcctgggtgagaatgttacaattgagtctgtggctgattacttcaagcagattggtattattaagnnnnnnnnnnnnnnnnnnnnnnnnnnnnnnnnnnnnnnnnnnnnnnnnnnnnnnnnnnnnnnnnnnnnnnnnnnnnnnnnnnnnnnnnnnnnnnnnnnnnnnnnnnnnnnnnnnnnnnnnnnnnnnnnnnnnnnnnnnnnnnnnnnnnnnnnnnnnnnnnnnnnnnnnnnnnnnnnnnnnnnnnnnnnnnnnnnnnnnnnnnnnnnnnnnnnnnnnnnnnnnnnnnnnnnnnnnnnnnnnnnnnnnnnnnnnnnnnnnnnnnnnnnnnnnnnnnnnnnnnnnnnnnnnnnnnnnnnnnnnnnnnnnnnnnnnnnnnnnnnnnnnnnnnnnnnnnnnnnnnnnnnnnnnnnnnnnnnncacctgtgagaatatgaacttctcttggaggaatgaatgcaaccagtgtaaggcccctaaaccagatggcccaggagggggaccaggtggctctcacatgggngg

SEQ ID NO: 33832 - DNA, 4656 bp, Macaca Mulatta
  misc_feature (1)...(4656): n = A,T,C or G
ttttggctgcctctgtcggtctgttcagttaccacgtgaaccgccgacggagacccgtagtgggggaggcggcggcagcgttaagtgagaaaggaaaaaagacaacgaggaaaaaggaggtgtcagggtagggcnnnnnnnnnnnnnnnnnnnnnnnnnnnnnnnnnnnnnnnnnnnnnnnnnnnnnnnnnnnnnnnnnnnnnnnnnnnnnnnnnnnnnnnnnnnnnnnnnnnnnnnnnnnnnnnnnnnnnnnnnnnnnnnnnnnnnnnnnnnnnnnnnnnnnnnnnnnnnnnnnnnnnnnnnnnnnnnnnnnnnnnnnnnnnnnnnnnaggtgttatgaacacaaacagtatagaaatggattgaaattctgtaaacaaatactttctaatcccaaatttgcagagcatggagnnnnnnnnnnnnnnnnnnnnnnnnnnnnnnnnnnnnnnnnnnnnnnnnnnnnnnnnnnnnnnnnnnnnnnnnnnnnnnnnnnnnnnnnnnnnnnnnnnnnnnnnnnnnnnnnnnnnnnnnnnnnnnnnnnnnnnnnnnnnnnnnnnnnnnnnnnnnnnnnnnnnnnnnnnnnnnnnnnnnnnnnnnnnnnnnnnnnnnnnnnnnnnnnnnnnnnnnnnnnnnnnnnnnnnnnnnnnnnnnnnnnnnnnnnnnnnnnnnnnnnnnnnnnnnnnnnnnnnnnnnnnnnnnnnnnnnnnnnnnnnnnnnnnnnnnnnnnnnnnnnnnnnnnnnnnnnnnnnnnnnnnnnnnnnnnnnnnnnnnnnnnnnnnnnnnnnnnnnnnnnnnnnnnnnnnnnnnnnnnnnnnnnnnnnnnnnnnnnnnnnnnnnnnnnnnnnnnnnnnnnnnnnnnnnnnnnnnnnnnnnnnnnnnnnnnnnnnnnnnnnnnnnnnnnnnnnnnnnnnnnnnnnnnnnnnnnnnnnnnnnnnnnnnnnnnnnnnnnnnnnnnnnnnnnnnnnnnnnnnnnnnnnnnnnnnnnnnnnnnnnnnnnnnnnnnnnnnnnnnnnnnnnnnnnnnnnnnnnnnnnnnnnnnnnnnnnnnnnnnnnnnnnnnnnnnnnnnnnnnnnnnnnnnnnnnnnnnnnnnnnnnnnnnnnnnnnnnnnnnnnnnnnnnnnnnnnnnnnnnnnnnnnnnnnnnnnnnnnnnnnnnnnnnnnnnnnnnnnnnnnnnnnnnnnnnnnnnnnnnnnnnnnnnnnnnnnnnnnnnnnnnnnnnnnnnnnnnnnnnnnnnnnnnnnnnnnnnnnnnnnnnnnnnnnnnnnnnnnnnnnnnnnnnnnnnnnnnnnnnnnnnnnnnnnnnnnnnnnnnnnnnnnnnnnnnnnnnnnnnnnnnnnnnnnnnnnnnnnnnnnnnnnnnnnnnnnnnnnnnnnnnnnnnnnnnnnnnnnnnnnnnnnnnnnnnnnnnnnnnnnnnnnnnnnnnnnnnnnnnnnnnnnnnnnnnnnnnnnnnnnnnnnnnnnnnnnnnnnnnnnnnnnnnnnnnnnnnnnnnnnnnnnnnnnnnnnnnnnnnnnnnnnnnnnnnnntaagcacgctggaaatattaaagaagctgcaaggtggatggatgaggcccaggccttagacacagcagacagatttatcaactccaaatgtgcaaaatacatgctaaaagccaacctaattaaagaagctgaagaaatgtgctcaaagtttacaaggnnnnnnnnnnnnnnnnnnnnnnnnnnnnnnnnnnnnnnnnnnnnnnnnnnnnnnnnnnnnnnnnnnnnnnnnnnnnnnnnnnnnnnnnnnnnnnnnnnnnnnnnnnnnnnnnnnnnnnnnnnnnnnnnnnnnnnnnnnnnnnnnnnnnnnnnnnnnnnnnnnnnnnnnnnnnnnnnnnnnnnnnnnnnnnnnnnnnnnnnnnnnnnnnnnnnnnnnnnnnnnnnnnnnnnnnnnnnnnnnnnnnnnnnnnnnnnnnnnnnnnnnnnnnnnnnnnnnnnnnnnnnnnnnnnnnnnnnnnnnnnnnnnnnnnnnnnnnnnnnnnnnnnnnnnnnnnnnnnnnnnnnnnnnnnnnnnnnnnnnnnnnnnnnnnnnnnnnnnnnnnnnnnnnnnnnnnnnnnnnnnnnnnnnnnnnnnnnnnnnnnnnnnnnnnnnnnnnnnnnnnnnnnnnnnnnnnnnnnnnnnnnnnnnnnnnnnnnnnnnnnnnnnnnnnnnnnnnnnnnnnnnnnnnnnnnnnnnnnnnnnnnnnnnnnnnnnnnnnnnnnnnnnnnnnnnnnnnnnnnnnnnnnnnnnnnnnnnnnnnnnnnnnnnnnnnnnnnnnnnnnnnnnnnnnnnnnnnnnnnnnnnnnnnnnnnnnnnnnnnnnnnnnnnnnnnnnnnnnnnnnnnnnnnnnnnnnnnnnnnnnnnnnnnnnnnnnnnnnnnnnnnnnnnnnnnnnnnnnnnnnnnnnnnnnnnnnnnnnnnnnncagtgtgtccatgtaaagatttaccggatacagttagaacagtattaaaacaagaaatgaatcgtctttttggagcaacgaatccaaagaattttaatgaaacttttctgaaaaggaattctgattcattgccacacagattatcagnnnnnnnnnnnnnnnnnnnnnnnnnnnnnnnnnnnnnnnnnnnnnnnnnnnnnnnnnnnnnnnnnnnnnnnnnnnnnnnnnnnnnnnnnnnnnnnnnnnnnnnnnnnnnnnnnnnnnnnnnnnnnnnnnnnnnnnnnnnnnnnnnnnnnnnnnnnnnnnnnnnnnnnnnnnnnnnnnnnnnnnnnnnnnnnnnnnnnnnnnnnnnnnnnnnnnnnnnnnnnnnnnnnnnnnnnnnnnnnnnnnnnnnnnnnnnnnnnnnnnnnnnnnnnnnnnnnnnnnnnnnnnnnnnnnnnnnnnnnnnnnnnnnnnnnnnnnnnnnnnnnnnnnnnnnnnnnnnnnnnnnnnnnnnnnnnnnnnnnnnnnnnnnnnnnnnnnnnnnnnnnnnnnnnnnnnnnnnnnnnnnnnnnnnnnnnnnnnnnnnnnnnnnnnnnnnnnnnnnnnnnnnnnnnnnnnnnnnnnnnnnnnnnnnnnnnnnnnnnnnnnnnnnnnnnnnnnnnnnnnnnnnnnnnnnnnnnnnnnnnnnnnnnnnnnnnnnnnnnnnnnnnnnnnnnnnnnnnnnnnnnnnnnnnnnnnnnnnnnnnnnnnnnnnnnnnnnnnnnnnnnnnnnnnnnnnnnnnnnnnnnnnnnnnnnnnnnnnnnnnnnnnnnnnnnnnnnnnnnnnnnnnnnnnnnnnnnnnnnnnnnnnnnnnnnnnnnnnnnnnnnnnnnnnnnnnnnnnnnnnnnnnnnnnnnnnnnnnnnnnnnnnnnnnnnnnnnnnnnnnnnnnnnnnnnnnnnnnnnnnnnnnnnnnnnnnnnnnnnnnnnnnnnnnnnnnnnnnnnnnnnnnnnnnnnnnnnnnnnnnnnnnnnnnnnnnnnnnnnnnnnnnnnnnnnnnnnnnnnnnnnnnnnnnnnnnnnnnnnnnnnnnnnnnnnnnnnnnnnnnnnnnnnnnnnnnnnnnnnnnnnnnnnnnnnnnnnnnnnnnnnnnnnnnnnnnnnnnnnnnnnnnnnnnnnnnnnnnnnnnnnnnnnnnnnnnnnnnnnnnnnnnnnnnnnnnnnnnnnnnnnnnnnnnnnnnnnnnnnnnnnnnnnnnnnnnnnnnnnnnnnnnnnnnnnnnnnnnnnnnnnnnnnnnnnnnnnnnnnnnnnnnnnnnnnnnnnnnnnnnnnnnnnnnnnnnnnnnnnnnnnnnnnnnnnnnnnnnnnnnnnnnnnnnnnnnnnnnnnnnnnnnnnnnnnnnnnnnnnnnnnnnnnnnnnnnnnnnnnnnnnnnnnnnnnnnnnnnnnnnnnnnnnnnnnnnnnnnnnnnnnnnnnnnnnnnnnnnnnnnnnnnnnnnnnnnnnnnnnnnnnnnnnnnnnnnnnnnnnnnnnnnnnnnnnnnnnnnnnnnnnnnnnnnnnnnnnnnnnnnnnnnnnnnnnnnnnnnnnnnnnnnnnnnnnnnnnnnnnnnnnnnnnnnnnnnnnnncagaccagcttctttttcttgcagttacagatgtaatttcctttttgttgtctaacacaaggtaccaaatatgatgcaataaattgttttgaaaaacagttgtgtgaatatttcaactaatctgtgttgggcttctgtgaaatacacaggtggaaacagaggtgcaagccagaggcaatgtaataatgctgtaaggctagtgcagatgggaactttttagaaggggctaagtgctggtgtcagggaaattctataatgaagtagaatgctgctcctgcattaagatttcattgaaggcaaggatggtggcaggtactatgaatgtaactcataatttaaaaggaaaactaaaaactattttgattgggaaaatgagccttaatttgttaaacctatacactgagaactagcctcaggcttaatattctcattgcatttgcagatctgagcaaataagattaagtaaaatgaatcaattgtatatataattgacctttttgtggaacatgtagtttatagaaagtatactctaaagggaatttgccgaagaccttttactgactgaacagttgtgctacaatcaacctttcatagtacataacctgcattccacatcccagtctaacagttcagtagtgatgtaa

SEQ ID NO: 33833 - DNA, 190 bp, Macaca Mulatta
gatacaagtggggaaaatattctgacctaatactcctgttcccctagccttttgttcatgccttctgaggacatatgatgaatggaggaacggacgcagtatgagaaaatcacaggcagaagggatgagctcacatgctttcccattttctcttttgtcccttctgctggttaagagatttggaccagtg

SEQ ID NO: 33834 - DNA, 738 bp, Macaca Mulatta
  misc_feature (1)...(738): n = A,T,C or G
agagccttactaagtccatgcggtggagtggggcagccatgtctacttcttcatcggggagatcgcgatggagtttaannnnnnnnnnnnnnnnnnnnnnnnnnnnnnnnnnnnnnnnnnnnnnnnnnnnnnnnnnnnnnnnnnnnnnnnnnnnnnnnnnnnnnnnnnnnnnnnnnnnnnnnnnnnnnnnnnnnnnnnnnnnnnnnnnnnnnnnnnnnnnnnnnnnnnnnnnnnnnnnnnnnnnnnnnnnnnnnnnnnnnnnnnnnnnnnnnnnnnnnnnnnnnnnnnnnnnnnnnnnnnnnnnnnnnnnnnnnnnnnnnnnnnnnnnnnnnnnnnnnnnnnnnnnnnnnnnnnnnnnnnnnnnnnnnnnnnnnnnnnnnnnnnnnnnnnnnnnnnnnnnnnnnnnnnnnnnnnnnnnnnnnnnnnnnnnnnnnnnnnngcctgggtgctgcgcagcccccgggatgcagtacaatgcctccagcgccctgccggacgacatcctaaactttgtcaagacccaccctctgatggacgaggcggtgccctcgctgggccacgcgccctggatcgtgcggaccctgatgaggnnnaggcaccagctgactcgagtggctgtggacgtgggagccggcccctggggcaaccagactgttgtcttcctgggttctgaggcagggaccgtcctcaagttcctcgtccggcccaacgccagtacctcagggacatctgggctca

SEQ ID NO: 33835 - DNA, 207 bp, Macaca Mulatta
  misc_feature (1)...(207): n = A,T,C or G
ntccagagaccacctcccaggccctgccaacctccacgacagaaatcgaggaagcgtctgaagggccaggtgtagatgagatgcaggtgttcgctcctgccaacaccctgccctcccggagtgaggcggccgctgtgcagccagtgattgggatcagccagcgggtgcggatgaactccaaggagaaaaaggacctgggaactctgg

SEQ ID NO: 33836 - DNA, 1228 bp, Macaca Mulatta
  misc_feature (1)...(1228): n = A,T,C or G
agctgtgcttggggcggggcctggcgtgtattcgaaacgacggcgccggctgagagaagatggcgtttcagccgcggcggcatcgctccccttgtgcaacgccgccccagggtgacttttgtgatggcactgagagggcgattgacgaagcttcttttacgacttccatggagnnnnnnnnnnnnnnnnnnnnnnnnnnnnnnnnnnnnnnnnnnnnnnnnnnnnnnnnnnnnnnnnnnnnnnnnnnnnnnnnnnnnnnnnnnnnnnnnnnnnnnnnnnnnnnnnnnnnnnnnnnnnnnnnnnnnnnnnnnnnnnnnnnnnnnnnnnnnnnnnnnnnnnnnnnnnnnnnnnnnnnnnnnnnnnnnnnnnnnnnnnnnnnnnnnnnnnnnnnnnnnnnnnnnnnnnnnnnnnnnnnnnnnnnnnnnnnnnnnnnnnnnnnnnnnnnnnnnnnnnnnnnnnnnnnnnnnnnnnnnnnnnnnnnnnnnnnnnnnnnnnnnnnnnnnnnnnnnnnnnnnnnnnnnnnnnnnnnnnnnnnnnnnnnnnnnnnnnnnnnnnnnnnnnnnnnnnnnnnnnnnnnnnnnnnnnnnnnnnnnnnnnnnnnnnnnnnnnnnnnnnnnnnnnnnnnnnnnnnnnnnnnnnnnnnnnnnnnnngctgaaagagaagatagtgctaacgcacactcgcttaaaatcactaatgaagattctgagtgaagtgactcctgaccagtccaagccagaaaactgatcttgtaccagagcttgagtgtcaggttcaggctttattgctgtcttcaacaacaggtgctgtttagtcatttctnnnnnnnnnnnnnnnnnnnnnnnnnnngggaaatgcagtttctatctaccattaggctgattgtccaaatgatttgtgaagctgtttttagaagatgagaaactaaggattcttctgttttatagctatttgccttaagaacttagattctgattgaattcataatacttatttctgaagatgtctttgactgtaaatttaggaattaagatgcaaagtcccatgtgtcctctgatctaaagttgcatggttggtctgaaaatacagttgggcttaatgttgagttctagtactcctgaatggcgcagttgttatgaatattaataaatcattttttaacttatgtaaaatacagatcataatattctataggtaatgtttaataaactgcctgaataatataca

SEQ ID NO: 33837 - DNA, 3376 bp, Macaca Mulatta
  misc_feature (1)...(3376): n = A,T,C or G
acatgcacaccacagagcgtggcgatggaacagtaaccgggcttgtgagagggctctacagtatcaactaggagacaagatccacggattcaccgtaaaccaggtnnnnaggtgacatctgttcccgagccgttcctgatggccatgaagctcagccacgatgacacaagagccatgtatttacacctggccagagaagacaggaataatctgttcagnagcgtgcagttcggcaccactcccatggacagcaccggtgttcctcacattcttgagcacaccgtcctttgtgggtctcggaaatatccgtgcagaagaccctttcttcaaaatgttgaacccgtccctctccacgttcatgaacgccttcacagnnnnnnnnnnnnnnnnnnnnnnnnnnnnnnnnnnnnnnnnnnnnnnnnnnnnnnnnnnnnnnnnnnnnnnnnnnnnnnnnnnnnnnnnnnnnnnnnnnnnnnnnnnnnnnnnnnggcaggaaggatggcggctggaacatgagaactccagcgacccccagatgcccttggtctttaaaggagtcatctttaatgagatgaagggagggttnnnncaatgagaggatattcccccaacaccttcaaaacagacttcttcccaaccacacatactcagtggtctccgggggtgacccaccgtgcatcccggagcttacatgggagcagcttaagcaatttcatgccactcactatcacccaagcaatgccaggtnnnnnnnnnnnnnnnnnnnnnnnnnnnnnnnnnnnnnnnnnnnnnnnnnnnnnnnnnnnnnnnnnnnnnnnnnnnnnnnnnnnnnnnnnnnnnnnnnnnnnnnnnnnnnnnnnnnnnnnnnnnnnnnnnnnnnnnnnnnnnnnnnnnnnnnnnnnnnnnnnnnnnnnnnnnnnnnnnnnnnnnnnnnnnnnnnnnnnnnnnnnnnnnnnnnnnnnnnnnnnnnnnnnnnnnnnnnnnnnnnnnnnnnnnnnnnnnnnnnnnnnnnnnnnnnnnnnnnnnnnnnnnnnnnnnnnnnnnnnnnnnnnnnnnnnnnnnnnnnnnnnnnnnnnnnnnnnnnnnnnnnnnnnnnnnnnnnnnnnnnnnnnnnnnnnnnnnnnnnnnnnnnnnnnnnnnnnnnnnnnnnnnnnnnnnnnnnnnnnnnnnnnnnnnnnnnnnnnnnnnnnnnnnnnnnnnnnnnnnnnnnnnnnnnnnnnnnnnnnnnnnnnnnnnnnnnnnnnnnnnnnnnnnnnnnnnnnnnnnnnnnnnnnnnnnnnnnnnnnnnnnnnnnnnnnnnnnnnnnnnnnnnnnnnnnnnnnnnnnnnnnnnnnnnnnnnnnnnnnnnnnnnnnnnnnnnnnnnnnnnnnnnnnnnnnnnnnnnnnnnnnnnnnnnnnnnnnnnnnnnnnnnnnnnnnnnnnnnnnnnnnnnnnnnnnnnnnnnnnnnnnnnnnnnnnnnnnnnnnnnnnnnnnnnnnnnnnnnnnnnnnnnnnnnnnnnnnnnnnnnnnnnnnnnnnnnnnnnnnnnnnnnnnnnnnnnnnnnnnnnnnnnnnnnnnnnnnnnnnnnnnnnnggtttagaattacggactcaacaaagcaaacctcaagatgcctcctgcctgccggcgttgaaagtgtcagatattgagcccaccatacctgtcacagagttgggcgtggtcctgacagnnggagatatccctgttcagtactgcgcccagcccaccaatggcgtggtgtatttccgggccttctccagcctgaacacactccccgaggagctgaggccctatgtgcccctcttctgcagcgtcctcaccaannnnnnnnnnnnnnnnnnnnnnnnccggaagcagactcagcagatagaactgaagaccggagggatgagcgcttctccccgcgtgctccccgacgactcgcacatggacacctacgagcagnnnnnnnnnnnnnnnnnnnnnnnnnnnnnnnnnnnnnnnnnnnnnnnnnnnnnnnnnnnnnnnnnnnnnnnnnnnnnnnnnnnnnnnnnnnnnnnnnnnnnnnnnnnnnnnnnnnnnnnnnnnnnnnnnnnnnnnnnnnnnnnnnnnnnnnnnnnnnnnnnnnnnnnnnnnnnnnnnnnnnnnnnnnnnnnnnnnnnnnnnnnnnnnnnnnnnnnnnnnnnnnnnnnnnnnnnnnnnnnnnnnnnnnnnnnnnnnnnnnnnnnnnnnnnnnnnnnnnnnnnnnnnnnnnnnnnnnnnnnnnnnnnnnnnnnnnnnnnnnnnnnnnnnnnnnnnnnnnnnnnnnnnnnnnnnnnnnnnnnnnnnnnnnnnnnnnnnnnnnnnnnnnnnnnnnnnnnnnnnnnnnnnnnnnnnnnnnnnnnnnnnnnnnnnnnnnnnnnnnnnnnnnnnnnnnnnnnnnnnnnnnnnnnnnnnnnnnnnnnnnnnnnnnnnnnnnnnnnnnnnnnnnnnnnnnnnnnnnnnnnnnnnnnnnnnnnnnnnnnnnnnnnnnnnnnnnnnnnnnnnnnnnnnnnnnnnnnnnnnnnnnnnnnnnnnnnnnnnnnnnnnnnnnnnnnnnnnnnnnnnnnnnnnnnnnnnnnnnnnnnnnnnnnnnnnnnnnnnnnnnnnnnnnnnnnnnnnnnnnnnnnnnnnnnnnnnnnnnnnnnnnnnnnnnnnnnnnnnnnnnnnnnnnnnnnnnnnnnnnnnnnnnnnnnnnnnnnnnnnnnnnnnnnnnnnnnnnnnnnnnnnnnnnnnnnnnnnnnnnnnnnnnnnnnnnnnnnnnnnnnnnnnnnnnnnnnnnnnnnnnnnnnnnnnnnnnnnnnnnnnnnnnnnnnnnnnnnnnnnnnnnnnnnnnnnnnnnnnnnnnnnnnnnnnnnnnnnnnnnnnnnnnnnnnnnnnnnnnnnnnnnnnnnnnnnnnnnnnnnnnnnnnnnnnnnnnnnnnnnnnnnnnnnnnnnnnnnnnnnnnnnnnnnnnnnnnnnnnnnnnnnnnnnnnnnnnnnnnnntgggaagagcatgcacggcctggccatactcggacccgagaaccccaaaatcgccaaggacccatcctggatcatcagatgagtggccctggcacgcccgactgtgcaggagcccctgagaaaatcggcctctagagctgaatatgaaaagtcagaaatgctactgctttttccaagaacattatgtcatnnnnnnnnnnnnnnnnnnnnnnnnnnnnnnnnnnnnnnnnnnnnnncttaagagcaacaaggaagacattcattgaaatagttatgcacaaagtgccaaagatgcaccacatagaatttactttctactgacaaaggctagttttacctcattagttctagaatatttaagaatctaaaaataaagggcaactctgacttaa

SEQ ID NO: 33838 - DNA, 326 bp, Macaca Mulatta
cagaaaggaagaggaacctttttctaatcacttgttttgttttgactctacatgtaagacaggactgcagcattcgatgtgtgtcctcaagaacttgtctcgggtctgaaaaagctgagaagaatagaggagacattgcccaactcttcggccctccccctgcacacctgttttctcatttgccctttgagcacttttacttaaacttgcttctagttgcttttatcactgccacaaaacagccatcaagagccagctgctttccaggtgaacattggaaatgagaatctttgaaactttagcaatatatgttgcaccagatttta

SEQ ID NO: 33839 - DNA, 194 bp, Macaca Mulatta
ccggccgcgatggcggctacgccggagtcctcgctggaggacccactggggagctttgtgcgcgttttggagaagcgggatggtacggtgctacgactacagcagtatggctccggcggcgtgggttgcgttgtttgggacgctgccattgtcctttctaaatacctggaaacgcccgagttttctggtgacgg

SEQ ID NO: 33840 - DNA, 134 bp, Macaca Mulatta
tgatgatgcgggtgtgctggttggtgagacaggacagccggcaccagcgaatcagacttccacatttggaagcagttgtgattgggcgtggcccagagaccaaaatcactgataagaaatgttctcgacagcaa

SEQ ID NO: 33841 - DNA, 431 bp, Macaca Mulatta
  misc_feature (1)...(431): n = A,T,C or G
ggccctgatggatggtggcatggacctcaacatggagcagggcatggcagagngcaccttaaggatgtgatcctactgacagccattgtgcaggtgctcagctgcttctctctctatgtctggtccttctggcttctggnggctccaggccgggccctttacctcctgtgggtgaatgtgctgggcccctggttcactgcagacagtggcaccccagcaccagagcacaatgagaaacggcagcgccgacaggagcggcggcagatgaagcggttatagccattgacattgtgaccacaggccactggccctggttgactctgtcaaggtgcacggccccccatgcctggagcaatgagggtctagtctaggggccaaaagcagtctgaggtattgggtatactttatagggtcgttgaataaatggctta

SEQ ID NO: 33842 - DNA, 156 bp, Macaca Mulatta
gcttgcctattctttacagaggaaggaggcccaattaattgtggtgttacttgtaattagtgccctgtgtactttttctttttatgtgaaaatttaataaaagataccctgtcttgtaaactctattttgaaataaactattcttgaattcctcat

SEQ ID NO: 33843 - DNA, 715 bp, Macaca Mulatta
  misc_feature (1)...(715): n = A,T,C or G
caggaaaatgccacttcagtgacataagtagtatacatatttttgactaattaatgtatcctttntcagtctcatggacttcgctttcctttgtcacatttggatgcactgaagcaaatttggaacagttccactatttctgtcaaggacctgaaacttactacagatgaggaaagggaaagcctggtattatccctctggacagaatgtttgattcaagtagtctagtgcctttgccgaatcaaatgctactattttatatgcacatattaaaagaaaagcaaagacctgagccgaggagaggatgaattcaagtttccttacctgcgtatctattaacatgagacctccctattataggtggtcatttggccaagtgtactaacaggggcacatgaaagaacagcaaattatcaagtgtctcagaaaatgaaaaaaccatattttgacaagtttatttaatccagtgtggtagaaaaggcacaattccaatgtatcatttagaattgaatgtcattaacctggctttgttctttggaagaaacaacttctttaaagagctgctttggctctagaaaaatttccaacaattaaaataaaaaattttaaattgtttttttacaatgaaaatatacatacctttgtgtatagacaagacgcatgcccactaaaagttatcctgtaacataaattttataaagtaatactcccccac

SEQ ID NO: 33844 - DNA, 397 bp, Macaca Mulatta
  misc_feature (1)...(397): n = A,T,C or G
caggaaatatggtgtttggctgtaagccccagcgtagactatgttgtatcatcgtcccatgacaaatctctgagactttgggagagaacaagggagcctcttattcttgaggaagaaagggagatggtaaganggaaagagaagcagaatatgaggagagtgtggccaaagaagaccaaccagcagtnnnnnnnnnnnnnnnnnnnnnnnnnnnnnnnnnnnnnnnnnnnnnnnnnnnnnnnnnnnnnnnngctgagaggattatggaggctattgagttgtaccgagaagaaactgcaaaaatgaaggaacacacagccatttgtaaagctgcagggaaagaggnnnaggttccacttcccaccaaccccatcctaatggcttatggcagtatctc

SEQ ID NO: 33845 - DNA, 3352 bp, Macaca Mulatta
  misc_feature (1)...(3352): n = A,T,C or G
caggatcaccttcagcagtgcttatttcaagctgtgcagtgttctaatgagaactgccaggaaccagtcctacggaaagacctgaaagagcatttgagtgcatactgtcagtttcgagaggaaaaatgcctttattgcaaaaaggagtgtggtagtcatcaatctacagncagaatcatgaggaaaacttgtgtcctgaatacccagtattttgtcccaacaattgtgcgaagattattctaaaaactgaggtannnnnnnnnnnnnnnnnnnnnnnnnnnnnnnnnnnnnnnnnnnnnnnnnnnnnnnnnnnnnnnnnnnnnnnnnnnnnnnnnnnnnnnnnnnnnnnnnnnnnnnnnnnnnnnnnnnnnnnnnnnnnnnnnnnnnnnnnnnnnnnnnnnnnnnnnnnnnnnnnnnnnnnnnnnnnnnnnnnnnnnnnnnnnnnnnnnnnnnnnnnnnnnnnnnnnnnnnnnnnnnnnnnnnnnnnnnnnnnnnnnnnnnnnnnnnnnnnnnnnnnnnnnnnnnnnnnnnnnnnnnnnnnnnnnnnnnnnnnnnnnnnnnnnnnnnnnnnnnnnnnnnnnnnnnnnnnnnnnnnnnnnnnnnnnnnnnnnnnnnnnnnnnnnnnnnnnnnnnnnnnnnnnnnnnnnnnnnnnnnnnnnnnnnnnnnnnnnnnnnnnnnnnnnnnnnnnnnnnnnnnnnnnnnnnnnnnnnnnnnnnnnnnnnnnnnnnnnnnnnnnnnnnnnnnnnnnnnnnnnnnnnnnnnnnnnnnnnnnnnnnnnnnnnnnnnnnnnnnnnnnnnnnnnnnnnnnnnnnnnnnnnnnnnnnnnnnnnnnnnnnnnnnnnnnnnnnnnnnnnnnnnnnnnnnnnnnnnnnnnnnnnnnnnnnnnnnnnnnnnnnnnnnnnnnnnnnnnnnnnnnnnnnnnnnnnnnnnnnnnnnnnnnnnnnnnnnnnnnnnnnnnnnnnnnnnnnnnnnnnnnnnnnnnnnnnnnnnnnnnnnnnnnnnnnnnnnnnnnnnnnnnnnnnnnnnnnnnnnnnnnnnnnnnnnnnnnnnnnnnnnnnnnnnnnnnnnnnnnnnnnnnnnnnnnnnnnnnnnnnnnnnnnnnnnnnnnnnnnnnnnnnnnnnnnnnnnnnnnnnnnnnnnnnnnnnnnnnnnnnnnnnnnnnnnnnnnnnnnnnnnnnnnnnnnnnnnnnnnnnnnnnnnnnnnnnnnnnnnnnnnnnnnnnnnnnnnnnnnnnnnnnnnnnnnnnnnnnnnnnnnnnnnnnnnnnnnnnnnnnnnnnnnnnnnnnnnnnnnnnnnnnnnnnnnnnnnnnnnnnnnnnnnnnnnnnnnnnnnnnnnnnnnnnnnnnnnnnnnnnnnnnnnnnnnnnnnnnnnnnnnnnnnnnnnnnnnnnnnnnnnnnnnnnnnnnnnnnnnnnnnnnnnnnnnnnnnnnnnnnnnnnnnnnnnnnnnnnnnnnnnnnnnnnnnnnnnnnnnnnnnnnnnnnnnnnnnnnnnnnnnnnnnnnnnnnnnnnnnnnnnnnnnnnnnnnnnnnnnnnnnnnnnnnnnnnnnnnnnnnnnnnnnnnnnnnnnnnnnnnnnnnnnnnnnnnnnnnnnnnnnnnnnnnnnnnnnnnnnnnnnnnnnnnnnnnnnnnnnnnnnnnnnnnnnnnnnnnnnnnnnnnnnnnnnnnnnnnnnnnnnnnnnnnnnnnnnnnnnnnnnnnnnnnnnnnnnnnnnnnnnnnnnnnnnnnnnnnnnnnnnnagttacaaagataatacgctcagtttggatcttttttttcagttaaatgctaaatatgtgaaaattactatacctctaagtattttcatgaaattcaccagcagtttgcaggtactgttttgcaaggctgcataagaactggtgaatggggtaagcattttcattcttcctgatgaagtaaagcagaaagtactgcatagtaatatgtaagatatagctagccagctaaaattcagatttcattaggttcaaccctatgaaaaaaactattttcataggtcaaaaatggtaaaaacttagcagtttcataagattcaaccaannnnnnnnnnnnnnnnnnnnnnnnnnnnnnnnnnnnnnnnnnnngtgtgtatacaaacagtttgagtgtattttggtaacagtagtaaatcaatgtgaggatggatagaatttagtatataatagagaaaatgtcataaatggataaaaggaatttacaacttgaggagaaaacctttataatttcctatgggtgtcagaagtactctcagcgaaaatggatggctaaaacagtatctactattctctgataacnnnnnnnnngagacagagtcttgttgtcacccaggctggatggagtgcagtgacgtgatctcagctcactgcaacctccgcctcctgggttcaagtgattctcctgcctcagcctcctgagtagctgggattacaggcaaccgtcaccacacctggctaatttttgtatttttagtagagacggagttttgccatgttggccaagctggtctccaactcctgacctcaagcgatctgccttccttggcctcccaaagtgctgaaattataggcatgacccactgcgccaagcctctgacaacgtttgaatttgtaagctgctatgcaagtgggcatttatataaacttgtaatgtttcttgtcagaattctgagtactttgtgaagaacagaaatgatcatgttcttatgcatctatctgtatgggtctgaaggtgtatatacaaattgagatgagtctttatgactcttgataagcctaagtttaacaacaacaacaaaaatgccaagttgtcctgagccctcctgcattgttatgccacttctctactgctcatatgcaggctggctcccctgggcacacaaagatgagtatgggccatgggcccctgtagagctgctcacctggtgatgaccatgcaccttacaatttctgagcagttaaccctatagaagcatgctttatatgagtgtcttctgggaagaggaaccttcttaatctcttctgtgggattttcaaatgctaaagactcacactgcagcaattatcccagatgattaaattcaaagaaatatgttcacaacaggaatatactaaagaactagagcgtcgctgctggtgaactgtggcatagctgatgctcaacacatcacctcggacaaattcaggaagcatttctctagcccacaaggccagacccaggtgctctgtgtgtttgtttttaatgttcttcatcatatccaagttcactctctcttcctgagcagtggacgatcgtattgctgtaacttcttttgagtagttgatgggaaaacattt

SEQ ID NO: 33846 - DNA, 2639 bp, Macaca Mulatta
  misc_feature (1)...(2639): n = A,T,C or G
aggagtatgctaccagtggttggaacctaaatgtgatgccggtgttggaacagtctgtacagtgnnnnnnnnnnnnnnnnnnnnnnnnnnnnnnnnnnnnnnnnnnnnnnnnnnnnnnnnnnnnnnnnnnnnnnnnnnnnnnnnnnnnnnnnnnnnnnnnnnnnnnnnnnnnnnnnnnnnnnnnnnnnnnnnnnnnnnnnnnnnnnnnnnnnnnnnnnnnnnnnnnnnnnnnnnnnnnnnnnnnnnnnnnnnnnnnnnnnnnnnnnnnnnnnnnnnnnnnnnnnnnnnnnnnnnnnnnnnnnnnnnnnnnnnnnnnnnnnnnnnnnnnnnnnnnnnnnnnnnnnnnnnnnnnnnnnnnnnnnnnnnnnnnnnnnnnnnnnnnnnnnnnnnnnnnnnnnnnnnnnnnnnnnnnnnnnnnnnnnnnnnnnnnnnnnnnnnnnnnnnnnnnnnnnnnnnnnnnnnnnnnnnnnnnnnnnnnnnnnnnnnnnnnnnnnnnnnnnnnnnnnnnnnnnnnnnnnnnnnnnnnnnnnnnnnnnnnnnnnnnnnnnnnnnnnnnnnnnnnnnnnnnnnnnnnnnnnnnnnnnnnnnnnnnnnnnnnnnnnnnnnnnnnnnnnnnnnnnnnnnnnnnnnnnnnnnnnnnnnnnnnnnnnnnnnnnnnnnnnnnnnnnnnnnnnnnnnnnnnnnnnnnnnnnnnnnnnnnnnnnnnnnnnnnnnnnnnnnnnnnnnnnnnnnnnnnnnnnnnnnnnnnnnnnnnnnnnnnnnnnnnnnnnnnnnnnnnnnnnnnnnnnnnnnnnnnnnnnnnnnnnnnnnnnnnnnnnnnnnnnnnnnnnnnnnnnnnnnnnnnnnnnnnnnnnnnnnnnnnnnnnnnnnnnnnnnnnnnnnnnnnnnnnnnnnnnnnnnnnnnnnnnnnnnnnnnnnnnnnnnnnnnnnnnnnnnnnnnnnnnnnnnnnnnnnnnnnnnnnnnnnnnnnnnnnnnnnnnnnnnnnnnnnnnnnnnnnnnnnnnnnnnnnnnnnnnnnnnnnnnnnnnnnnnnnnnnnnnnnnnnnnnnnnnnnnnnnnnnnnnnnnnnnnnnnnnnnnnnnnnnnnnnnnnnnnnnnnnnnnnnnnnnnnnnnnnnnnnnnnnnnnnnnnnnnnnnnnnnnnnnnnnnnnnnnnnnnnnnnnnnnnnnnnnnnnnnnnnnnnnnnnnnnnnnnnnnnnnnnnnnnnnnnnnnnnnnnnnnnnnnnnnnnnnnnnnnnnnnnnnnnnnnnnnnnnnnnnnnnnnnnnnnnnnnnnnnnnnnnnnnnnnnnnnnnnnnnnnnnnnnnnnnnnnnnnnnnnnnnnnnnnnnnnnnnnnnnnnnnnnnnnnnnnnnnnnnnnnnnnnnnnnnnnnnnnnnnnnnnnnnnnnnnnnnnnnnnnnnnnnnnnnnnnnnnnnnnnnnnnnnnnnnnnnnnnnnnnnnnnnnnnnnnnnnnnnnnnnnnnnnnnnnnnnnnnnnnnnnnnnnnnnnnnnnnnnnnnnnnnnnnnnnnnnnnnnnnnnnnnnnnnnnnnnnnnnnnnnnnnnnnnnnnnnnnnnnnnnnnnnnnnnnnnnnnnnnnnnnnnnnnnnnnnnnnnnnnnnnnnnnnnnnnnnnnnnnnnnnnnnnnnnnnnnnnnnnnnnnnnnnnnnnnnnnnnnnnnnnnnnnnnnnnnnnnnnnnnnnnnnnnnnnnnnnnnnnnnnnnnnnnnnnnnnnnnnnnnnnnnnnnnnnnnnnnnnnnnnnnnnnnnnnnnnnnnnnnnnnnnnnnnnnnnnnnnnnnnnnnnnnnnnnnnnnnnnnnnnnnnnnnnnnnnnnnnnnnnnnnnnnnnnnnnnnnnnnnnnnnnnnnnnnnnnnnnnnnnnnnnnnnnnnnnnnnnnnnnnnnnnnnnnnnnnnnnnnnnnnnnnnnnnnnnnnnnnnnnnnnnnnnnnnnnnnnnnnnnnnnnnnnnnnnnnnnnnnnnnnnnnnnnnnnnnnnnnnnnnnnnnnnnnnnnnnnnnnnnnnnnnnnnnnnnnnnnnnnnnnnnnnnnnnnnnnnnnnnnnnnnnnnnnnnnnnnnnnnnnnnnnnnnnnnnnnnnnnnnnnnnnnnnnnnnnnnnnnnnnnnnnnnnnnnnnnnnnnnnnnnnnnnnnnnnnnnnnnnnnnnnnnnnnnnnnnnnnnnnnnnnnnnnnnnnnnnnnnnnnnnnnnnnnnnnnnnnnnnnnnnnnnnnnnnnnnnnnnnnnnnnnnnnnnnnnnnnnnnnnnnnnnnnnnnnnnnnnnnnnnnnnnnnnnnnnnnnnnnnnnnnnnnnnnnnnnnnnnnnnnnnnnnnnnnnnnnnnnnnnnnnnnnnnnnnnnnnnnntgtatgcgctcaaggcgcccacgcctggagaccatcctggcactgctggtagccctgcagagactgcctgtgcggcttcccgagggcgaggccctgcagtgcctcacagagagggccatcagctggcaaggccgcgccaggcaggctctggcttctgaagatgtgactgctctgttgggacggctgacggagctccgccaacagctacaggctgaacccagacctgaggagcctcctaactaccctgcagcccctgcttctgaccccctcagagagggcagtggcaaggatatgcctaagg

SEQ ID NO: 33847 - DNA, 244 bp, Macaca Mulatta
  misc_feature (1)...(244): n = A,T,C or G
agctctctcgaagacttttgaagaaataatctcacacaacttctctttcaaccattgtaggtgtggggcaccttttcccacacagaattggtccaaagaggccttgaaatgtcactgaagaaacttcagctgagctacatgcatctttaccttattcatttcccagnacctttgcggnntagcacaagttgttttaatttggtgatcaacataaatattagtaactgaatgcaagaggggaatt

SEQ ID NO: 33848 - DNA, 176 bp, Macaca Mulatta
agatcaccttggctgtaaagaggactatgcttgtcctcaatgtgaatcgagttttaccagtgaggatattcttgctgagcatcttcagacattgcatcagaaacccacagaggagaaagaatttaagtgcaagaactgtgggaagaaattcccagttacgcaggctttgcaaagac

SEQ ID NO: 33849 - DNA, 183 bp, Macaca Mulatta
  misc_feature (1)...(183): n = A,T,C or G
actgaccagccctcatcattccccataaaaccacggannnnnnnnnnnnnnnnnnnnnagtcttcacacctgtcgactcacatggcttttgctgatgacacggggctccagtacacagtctgatttggacttacttcaaaacctcnantgnattaaatagcattggggaatagctaaaccttt

SEQ ID NO: 33850 - DNA, 93 bp, Macaca Mulatta
  misc_feature (1)...(93): n = A,T,C or G
cctgctgaattagccaccaagtacgcaaacttttcagagggagcttgcaagcctggctatgcctcagccttgatgacggccatcttcccccgn

SEQ ID NO: 33851 - DNA, 147 bp, Macaca Mulatta
cggcctaacttgtcttaatgaccttcccgttcccactcttctccccattcgtgagtattcccagtcctggtctcatcctagttgactagagactccccttgccccactctacctagggtttccctgggcacagagcatcagggagcg

SEQ ID NO: 33852 - DNA, 236 bp, Macaca Mulatta
tggccaactctgcgaagtcagctgagatgcccaccatctccaaaacccttaaccctactcctgatcctcatcaagaatctctggaccctaggattaccattgccttattcgaaattggatcactttccccttcctcctggggctctctcccttccctaaagaatagcagccatcaagttacagaacaacagactgcagagaagtttaacagtctcttgaaagaaattaaagatatt

SEQ ID NO: 33853 - DNA, 539 bp, Macaca Mulatta
accatcaagagtctctggatagagagaaccctcaggacttcatagacatgtaccttctccacatggaagaggagaggaaaaataatagtaacagcagttttgatgaagaatacttattttatatcattggggatctgttcattgctgggactgataccacaactaactctttgctttggtgcctgctgtatatgtcactgaaccccgatgtacaaggttcatgaagaaattgaaagggtcattggtgccaaccgagctccttccctcacggacaaggcccagatgccctacacagaagccaccatcatggaagtgcagaggctaactgtggtggttccgcttgccattcctcatatgacctcagggaacacagtgctccaagggtataccattcctaaaggcacattgatcttacccaacctgtggtccgtacattgagacccagccatttggggagaaaccggaggatttctaccttatcgatttctggatgaacaaggacaactaattacacaagaacctttattccttttgggata

SEQ ID NO: 33854 - DNA, 423 bp, Macaca Mulatta
  misc_feature (1)...(423): n = A,T,C or G
gtgcgctctcgtcgggagtcccagccatgtcagccgagagagaggtaaccgaggcngccgaggcaggggccggggaagacgcctcttcgccgcctgcgaaaaccgagagaatgagcgacccccagcagcccgcggcctcagaagggnnnnnnnnnnnnnnnnnnnnnnnnnnnnngctgcgctgcctggtgctcactggctttggaggctacgacaaggtgaagctgcagagccggccggccgcgcctccggcccctgggcccggccagctgacgctgcgcgtgcgggcctgcgggctcaacttcgcagacctcatggccaggcaggggctgtacgacaggctcccgccgctgcctgtcactccaggcatggagggcgcgggcgtcgtgatcgcagtgggcgagggtgtcagcgaccgcaagg

SEQ ID NO: 33855 - DNA, 1165 bp, Macaca Mulatta
  misc_feature (1)...(1165): n = A,T,C or G
ggttacctaaccaaactcctgcaaaaccacaccacctatgcctgtgatggggactatttgaatctacagtgccctcggcattctacgataagtgtccaatcggcattttatgggcaagattaccaaatgtgtagttcccagaagcccgcctcccagagggaagacagcttaacctgtgtggcacccaccaccttccannnnnnnnnnnnnnnnnnnnnnnnnnnnnnnnnnnnnnnnnnnnnnnnnnnnnnnnnnnnnnnnnnnnnnnnnnnnnnnnnnnnnnnnnnnnnnnnnnnnnnnnnnnnnnnnnnnnnnnnnnnnnnnnnnnnnnnnnnnnnnnnnnnnnnnnnnnnnnnnnnnnnnnnnnnnnnnnnnnnnnnnnnnnnnnnnnnnnnnnnnnnnnnnnnnnnnnnnnnnnnnnnnnnnnnnnnnnnnnnnnnnnnnnnnnnnnnnnnnnnnnnnnnnnnnnnnnnnnnnnnnnnnnnnnnnnnnnnnnnnnnnnnnnnnnnnnnnnnnnnnnnnnnnnnnnnnnnnnnnnnnnnnnnnnnnnnnnnnnnnnnnnnnnnnnnnnnnnnnnnnnnnnnnnnnnnnnnnnnnnnnnnnnnnnnnnnnnnnnnnnnnnnnnnnnnnnnnnnnnnnnnnnnnnnnnnnnnnnnnnnnnnnnnnnnnnnnnnnnnnnnnnnnnnnnnnnnnnnnnnnnnnnnnnnnnnnnnnnnnnnnnnnnnnnnnnnnnnnnnnnnnnnnnnnnnnnnnnnnnnnnnnnnnnnnnnnnnnnnnnnnnnnnnnnagcccacccggagagagctgccctgctgttcgtgtccagtgtcggcatcggcctggccctcacattgtgcgccctggtcatcagagagtcctgtgccaaggacttccgcaagttgcagctggggagggagcagctggtgccaggaagtgacaaggccgaggaggacagcgaggatgaagaagaggaggaggactcctccgagtctgatttcccaggggaactgtcggggttctgtaggacttcatatcctgtctacagttccatagaagctgcagagctcgcagaaaggattgaacgcagggagcaaatcattcaggaaatatggatgaacagtggtttggacacctcactcccgagaaacatgggccagttctactg

SEQ ID NO: 33856 - DNA, 841 bp, Macaca Mulatta
tttgactcttccttgaatttgagttttctttttcctcttatctgcagttttgcagaattaactctgaggactggtaattaaggaagaagtcactggtatacggagcaccctgggaaagtttgggattcttccctgtataggctgcaaatgttctgagctgagcactgtggaacagaaatgtaaccatgagaaaaaagatggtctaagggagaggcagggttagtggttcacccagatcaggaggggcccctagtcatctcatctttaaggcatgtagcaagttctaggggactgctgtacaaccagggagctggaagcatcgttactgcctacgacacaggaatgtgcctgaaagaagccttcctgctttccctcggggtttaacagcaatgcgctgatttctcaaagggggccagtgcttgtatgtatgacagagctgtggagactggagatgtgagaacgccttcattttcctttctcaggcaggacatctctaaccgaatccaatgttttagagctgtgttcttctggacacttcttgcactatagttctaaacagttttgcccatctgctcctatggggtgcctcagtgccaagtcaggagctgcttgttcccattttaaagagtagtagtaacacccagcctagagctggactggagggcaggtaagaccggagtagttttcttgaacccacatgtttcttctctccagggtctcctctttctccactgtctcccaacttagcctctgcctctaccttccttcttaggtctctccatttcttgttcctttctatgccttttcatgttcttcgacttcaaacagccttaatatgggc

SEQ ID NO: 33857 - DNA, 1371 bp, Macaca Mulatta
tctccccatcactccattgtgagtggctgactttgctctggtccggcactgtatacgtcgggaagtcggcctggagttcgggttgcagggaagccagggctgggggcgagggcagcaggagtgcttggggagctcgcgggcagcgggaagctgagcgcaaaggcagaggagcgaagcagcctctgaagcttccccgcctgggagaagagtttttggaaggaggcgagacggggaaagagttctgagccccagcccgaagagcctcctttccgtccctttccgggtgcaatctccgggccagcgggctggtgtctcgccgcagatccgctggctcagagatgaggcgcagggcaggttctgggttacatccgcacaccgcggggaacccaggtgcgagcggggcacagctgtcctgccaacatcctttcttagctttgcatccttcgctccaaatgctggctctgcccttggaaactcgctggttgccaacagcattcttcagagtccgccgggtttcctccaggcgtctgagaggaacacgcctttgatcttcgggtctgggcaggctgcgcgggcccaccctccttccagttcaccgaaagattaaccacctccaagggctatttaagagcccctcccagggccgaacggggagaaagggtgggaaagggaggagagagtatccgtttagaacgccccagagtgatgagaacagacttctcaaaaacaaagtcaggcggtcttttgtacccagcactcagtgtagtgcctgacacctcaataaatgttgaatcgtgaatgaatcattaactctttgaggctctaagatagaaaagatagagagtagtggggcaaaatggcaatggggctgttgtggttaaattgaacttgaacttgaacctcttaccttgaagtctgggtgcacatttgagaaaagaataaagcaagtaggtatgatgggactgggcgaaatcaggtggcggtggattgttggcagcactcaagaaatacgctctcccgttttccagtaaaatatattactaaatgttaatttacatggcctgtagactagaatctttagtttaaaaggttgttttataatgaaaatgatttgaggcattaagtagttcacacgatcttattttaaaattaatccagttggtgatgaggaaatagcgtattgcttttcacagatataggtgagaccctggtatagtggaaagagcttttgactaagtccttggacaagatactagacctttcaggaccttggttcttccatctctaaaattggtataataatgactacttttttgagataatgtgtaattggacaatgcctggagcataatagacactaattaatattgg

SEQ ID NO: 33858 - DNA, 140 bp, Macaca Mulatta
gtacatggaaaaagaggatgcagtgaatatcttacaattctggttggcagcagataacttccagtctcagcttgctgccaaaaagggccaatacgatggacaggaggcacagaatgatgccatgattttatatgacaagt

SEQ ID NO: 33859 - DNA, 7048 bp, Macaca Mulatta
  misc_feature (1)...(7048): n = A,T,C or G
gatcagagaacaggcatgtgtttctcgggcctggtgaatggtcgctgtgcacaagagctcccagggagaatgacgaaaatgcagtgctgctgtgagcctggccgctgctggggcattggaaccattcctgaagcctgtcctgtcagaggttctgngaggaatatcgcagactttgcatggatggccttccaatgggagggattccagggagtgctggttccagacctggaggcactgggggaaatggctttgccccaagtggcaatggcaatggctatggcccaggagggacaggcttcatccccatccctggaggcaatggcttttctcctggcgttgggggagccggcgtgggggccgggggacagggacctatcatcactggactaancaattctgaaccagacaatagatatctgtaagcatcatgctaacctttgttttaaatggacgctgtatacctactgtctcaagctaccgatgtgaatgcaacatggggtataagcaggatgcaaatggagattgtatagnnnnnnnnnnnnnnnnnnnnnnnnnnnnnnnnnnnnnnnnnnnnnnnnnnnnnnnnnnnnnnnnnnnnnnnnnnnnnnnnnnnnnnnnnnnnnnnnnnnnnnnnnnnnnnnnnnnnnnnnnnnnnnnnnnnnnnnnnnnnnnnnnnnnnnnnnnnnnnnnnnnnnnnnnnnnnnnnnnnnnnnnnnnnnnnnnnnnnnnnnnnnnnnnnnnnnnnnnnnnnnnnnnnnnnnnnnnnnnnnnnnnnnnnnnnnnnnnnnnnnnnnnnnnnnnnnnnnnnnnnnnnnnnnnnnnnnnnnnnnnnnnnnnnnnnnnnnnnnnnnnnnnnnnnnnnnnnnnnnnnnnnnnnnnnnnnnnnnnnnnnnnnnnnnnnnnnnnnnnnnnnnnnnnnnnnnnnnnnnnnnnnnnnnnnnnnnnnnnnnnnnnnnnnnnnnnnnnnnnnnnnnnnnnnnnnnnnnnnnnnnnnnnnnnnnnnnnnnnnnnnnnnnnnnnnnnnnnnnnnnnnnnnnnnnnnnnnnnnnnnnnnnnnnnnnnnnnnnnnnnnnnnnnnnnnnnnnnnnnnnnnnnnnnnnnnnnnnnnnnnnnnnnnnnnnnnnnnnnnnnnnnnnnnnnnnnnnnnnnnnnnnnnnnnnnnnnnnnnnnnnnnnnnnnnnnnnnnnnnnnnnnnnnnnnnnnnnnnnnnnnnnnnnnnnnnnnnnnnnnnnnnnnnnnnnnnnnnnnnnnnnnnnnnnnnnnnnnnnnnnnnnnnnnnnnnnnnnnnnnnnnnnnnnnnnnnnnnnnnnnnnnnnnnnnnnnnnnnnnnnnnnnnnnnnnnnnnnnnnnnnnnnnnnnnnnnnnnnnnnnnnnnnnnnnnnnnnnnnnnnnnnnnnnnnnnnnnnnnnnnnnnnnnnnnnnnnnnnnnnnnnnnnnnnnnnnnnnnnnnnnnnnnnnnnnnnnnnnnnnnnnnnnnnnnnnnnnnnnnnnnnnnnnnnnnnnnnnnnnnnnnnnnnnnnnnnnnnnnnnnnnnnnnnnnnnnnnnnnnnnnnnnnnnnnnnnnnnnnnnnnnnnnnnnnnnnnnnnnnnnnnnnnnnnnnnnnnnnnnnnnnnnnnnnnnnnnnnnnnnnnnnnnnnnnnnnnnnnnnnnnnnnnnnnnnnnnnnnnnnnnnnnnnnnnnnnnnnnnnnnnnnnnnnnnnnnnnnnnnnnnnnnnnnnnnnnnnnnnnnnnnnnnnnnnnnnnnnnnnnnnnnnnnnnnnnnnnnnnnnnnnnnnnnnnnnnnnnnnnnnnnnnnnnnnnnnnnnnnnnnnnnnnnnnnnnnnnnnnnnnnnnnnnnnnnnnnnnnnnnnnnnnnnnnnnnnnnnnnnnnnnnnnnnnnnnnnnnnnnnnnnnnnnnnnnnnnnnnnnnnnnnnnnnnnnnnnnnnnnnnnnnnnnnnnnnnnnnnnnnnnnnnnnnnnnnnnnnnnnnnnnnnnnnnnnnnnnnnnnnnnnnnnnnnnnnnnnnnnnnnnnnnnnnnnnnnnnnnnnnnnnnnnnnnnnnnnnnnnnnnnnnnnnnnnnnnnnnnnnnnnnnnnnnnnnnnnnnnnnnnnnnnnnnnnnnnnnnnnnnnnnnnnnnnnnnnnnnnnnnnnnnnnnnnnnnnnnnnnnnnnnnnnnnnnnnnnnnnnnnnnnnnnnnnnnnnnnnnnnnnnnnnnnnnnnnnnnnnnnnnnnnnnnnnnnnnnnnnnnnnnnnnnnnnnnnnnnnnnnnnnnnnnnnnnnnnnnnnnnnnnnnnnnnnnnnnnnnnnnnnnnnnnnnnnnnnnnnnnnnnnnnnnnnnnnnnnnnnnnnnnnnnnnnnnnnnnnnnnnnnnnnnnnnnnnnnnnnnnnnnnnnnnnnnnnnnnnnnnnnnnnnnnnnnnnnnnnnnnnnnnnnnnnnnnnnnnnnnnnnnnnnnnnnnnnnnnnnnnnnnnnnnnnnnnnnnnnnnnnnnnnnnnnnnnnnnnnnnnnnnnnnnnnnnnnnnnnnnnnnnnnnnnnnnnnnnnnnnnnnnnnnnnnnnnnnnnnnnnnnnnnnnnnnnnnnnnnnnnnnnnnnnnnnnnnnnnnnnnnnnnnnnnnnnnnnnnnnnnnnnnnnnnnnnnnnnnnnnnnnnnnnnnnnnnnnnnnnnnnnnnnnnnnnnnnnnnnnnnnnnnnnnnnnnnnnnnnnnnnnnnnnnnnnnnnnnnnnnnnnnnnnnnnnnnnnnnnnnnnnnnnnnnnnnnnnnnnnnnnnnnnnnnnnnnnnnnnnnnnnnnnnnnnnnnnnnnnnnnnnnnnnnnnnnnnnnnnnnnnnnnnnnnnnnnnnnnnnnnnnnnnnnnnnnnnnnnnnnnnnnnnnnnnnnnnnnnnnnnnnnnnnnnnnnnnnnnnnnnnnnnnnnnnnnnnnnnnnnnnnnnnnnnnnnnnnnnnnnnnnnnnnnnnnnnnnnnnnnnnnnnnnnnnnnnnnnnnnnnnnnnnnnnnnnnnnnnnnnnnnnnnnnnnnnnnnnnnnnnnnnnnnnnnnnnnnnnnnnnnnnnnnnnnnnnnnnnnnnnnnnnnnnnnnnnnnnnnnnnnnnnnnnnnnnnnnnnnnnnnnnnnnnnnnnnnnnnnnnnnnnnnnnnnnnnnnnnnnnnnnnnnnnnnnnnnnnnnnnnnnnnnnnnnnnnnnnnnnnnnnnnnnnnnnnnnnnnnnnnnnnnnnnnnnnnnnnnnnnnnnnnnnnnnnnnnnnnnnnnnnnnnnnnnnnnnnnnnnnnnnnnnnnnnnnnnnnnnnnnnnnnnnnnnnnnnnnnnnnnnnnnnnnnnnnnnnnnnnnnnnnnnnnnnnnnnnnnnnnnnnnnnnnnnnnnnnnnnnnnnnnnnnnnnnnnnnnnnnnnnnnnnnnnnnnnnnnnnnnnnnnnnnnnnnnnnnnnnnnnnnnnnnnnnnnnnnnnnnnnnnnnnnnnnnnnnnnnnnnnnnnnnnnnnnnnnnnnnnnnnnnnnnnnnnnnnnnnnnnnnnnnnnnnnnnnnnnnnnnnnnnnnnnnnnnnnnnnnnnnnnnnnnnnnnnnnnnnnnnnnnnnnnnnnnnnnnnnnnnnnnnnnnnnnnnnnnnnnnnnnnnnnnnnnnnnnnnnnnnnnnnnnnnnnnnnnnnnnnnnnnnnnnnnnnnnnnnnnnnnnnnnnnnnnnnnnnnnnnnnnnnnnnnnnnnnnnnnnnnnnnnnnnnnnnnnnnnnnnnnnnnnnnnnnnnnnnnnnnnnnnnnnnnnnnnnnnnnnnnnnnnnnnnnnnnnnnnnnnnnnnnnnnnnnnnnnnnnnnnnnnnnnnnnnnnnnnnnnnnnnnnnnnnnnnnnnnnnnnnnnnnnnnnnnnnnnnnnnnnnnnnnnnnnnnnnnnnnnnnnnnnnnnnnnnnnnnnnnnnnnnnnnnnnnnnnnnnnnnnnnnnnnnnnnnnnnnnnnnnnnnnnnnnnnnnnnnnnnnnnnnnnnnnnnnnnnnnnnnnnnnnnnnnnnnnnnnnnnnnnnnnnnnnnnnnnnnnnnnnnnnnnnnnnnnnnnnnnnnnnnnnnnnnnnnnnnnnnnnnnnnnnnnnnnnnnnnnnnnnnnnnnnnnnnnnnnnnnnnnnnnnnnnnnnnnnnnnnnnnnnnnnnnnnnnnnnnnnnnnnnntgagaaaaagcttttgctaccgaagctataatggaaccacttgtgagaatgagttgcctttcaatgtgacaaaaaggatgtgctgctgcacatataatgtgggcaaagcctggaacaaaccttgtgaaccatgcccaactccaggaacagnnnnnnnnnnnnnnnnnnnnnnnnnnnnnnnnnnnnnnnnnnnnnnnnnnnnnnnnnnnnnnnnnnnnnnnnnnnnnnnnnnnnnnnnnnnnnnnnnnnnnnnnnnnnnnnnnnnnnnnnnnnnnnnnnnnnnnnnnnnnnnnnnnnnnnnnnnnnnnnnnnnnnnnnnnnnnnnnnnnnnnnnnnnnnnnnnnnnnnnnnnnnnnnnnnnnnnnnnnnnnnnnnnnnnnnnnnnnnnnnnnnnnnnnnnnnnnnnnnnnnnnnnnnnnnnnnnnnnnnnnnnnnnnnnnnnnnnnnnnnnnnnnnnnnnnnnnnnnnnnnnnnnnnnnnnnnnnnnnnnnnnnnnnnnnnnnnnnnnnnnnnnnnnnnnnnnnnnnnnnnnnnnnnnnnnnnnnnnnnnnnnnnnnnnnnnnnnnnnnnnnnnnnnnnnnnnnnnnnnnnnnnnnnnnnnnnnnnnnnnnnnnnnnnnnnnnnnnnnnnnnnnnnnnnnnnnnnnnnnnnnnnnnnnnnnnnnnnnnnnnnnnnnnnnnnnnnnnnnnnnnnnnnnnnnnnnnnnnnnnnnnnnnnnnnnnnnnnnnnnnnnnnnnnnnnnnnnnnnnnnnnnnnnnnnnnnnnnnnnnnnnnnnnnnnnnnnnnnnnnnnnnnnnnnnnnnnnnnnnnnnnnnnnnnnnnnnnnnnnnnnnnnnnnnnnnnnnnnnnnnnnnnnnnnnnnnnnnnnnnnnnnnnnnnnnnnnnnnnnnnnnnnnnnnnnnnnnnnnnnnnnnnnnnnnnnnnnnnnnnnnnnnnnnnnnnnnnnnnnnnnnnnnnnnnnnnnnnnnnnnnnnnnnnnnnnnnnnnnnnnnnnnnnnnnnnnnnnnnnnnnnnnnnnnnnnnnnnnnnnnnnnnnnnnnnnnnnnnnnnnnnnnnnnnnnnnnnnnnnnnnnnnnnnnnnnnnnnnnnnnnnnnnnnnnnnnnnnnnnnnnnnnnnnnnnnnnnnnnnnnnnnnnnnnnnnnnnnnnnnnnnnnnnnnnnnnnnnnnnnnnagttgcatttcaggatttgtgtccatatggccatggaactgtccctagtcttcatgatacacgtgaagnagatgtcaatgaatgtcttgagagcccaggcatttgttcaaatggtcagtgtgtcaacactgacggatcttttcgctgtgagtgtccaatgggctacaaccttgactacactggagtacgctgtgtggnnnnnnnnnnnnnnnnnnnnnnnnnnnnnnnnnnnnnnnnnnnnnnnnnnnnnnnnnnnnnnnnnnnnnnnnnnnnnnnnnnnnnnnnnnnnnnnnnnnnnnnnnnnnnnnnnnnnnnnnnnnnnnnnnnnnnnnnnnnnnnnnnnnnnnnnnnnnnnnnnnnnnnnnnnnnnnnnnnnnnnnnnnnnnnnnnnnnnnnnnnnnnnnnnnnnnnnnnnnnnnnnnnnnnnnnnnnnnnnnnnnnnnnnnnnnnnnnnnnnnnnnnnnnnnnnnnnnnnnnnnnnnnnnnnnnnnnnnnnnnnnnnnnnnnnnnnnnnnnnnnnnnnnnnnnnnnnnnnnnnnnnnnnnnnnnnnnnnnnnnnnnnnnnnnnnnnnnnnnnnnnnnnnnnnnnnnnnnnnnnnnnnnnnnnnnnnnnnnnnnnnnnnnnnnnnnnnnnnnnnnnnnnnnnnnnnnnnnnnnnnnnnnnnnnnnnnnnnnnnnnnnnnnnnnnnnnnnnnnnnnnnnnnnnnnnnnnnnnnnnnnnnnnnnnnnnnnnnnnnnnnnnnnnnnnnnnnnnnnnnnnnnnnnnnnnnnnnnnnnnnnnnnnnnnnnnnnnnnnnnnnnnnnnnnnnnnnnnnnnnnnnnnnnnnnnnnnnnnnnnnnnnnnnnnnnnnnnnnnnnnnnnnnnnnnnnnnnnnnnnnnnnnnnnnnnnnnnnnnnagatattgatgaatgtaaggtaatgccaaacctcnnnnnnnnnnnnnnnnnnnnnnnnnnnnnnnnnnnnnnnnnnnnnnnnnnnnnnnnnnnnnnnnnnnnnnnnnnnnnnnnnnnnnnnnnnnnnnnnnnnnnnnnnnnnnnnnnnnnnnnnnnnnnnnnnnnnnnnnnnnnnnnnnnnnnnnnnnnnnnnnnnnnnnnnnnnnnnnnnnnnnnnnnnnnnnnnnnnnnnnnnnnnnnnnnnnnnnnnnnnnnnnnnnnnnnnnnnnnnnnnnnnnnnnnnnnnnnnnnnnnnnnnnnnnnnnnnnnnnnnnnnnnnnnnnnnnnnnnnnnnnnnnnnnnnnnnnnnnnnnnnnnnnnnnnnnnnnnnnnnnnnnnnnnnnnnnnnnnnnnnnnnnnnnnnnnnnnnnnnnnnnnnnnnnnnnnnnnnnnnnnnnnnnnnnnnnnnnnnnnnnnnnnnnnnnnnnnnnnnnnnnnnnnnnnnnnnnnnnnnnnnnnnnnnnnnnnnnnnnnnnnnnnnnnnnnnnnnnnnnnnnnnnnnnnnnnnnnnnnnnnnnnnnnnnnnnnnnnnnnnnnnnnnnnnnnnnnnnnnnnnnnnnnnnnnnnnnnnnnnnnngatgagaatgaatgctccaatcccaatgcctgtggctctgcttcctgctacaataccctggggagttacaagtgcgcctgcccctcaggtttctccttcgaccagttctccagtgcctgccacgacgtgaatgagtgctcatcctccaagaacccctgcaattacggctgctccaacacggagggaggctacctctgtggctgcccccctggatactaccgagtgggacaagg

SEQ ID NO: 33860 - DNA, 215 bp, Macaca Mulatta
agctgtgccaggtgaccgcacggcaggtggtggcccggacgccgagctgcagccgcaagacaaggtctctgaacacatgctgcggctctatgacaggtacagcacggtccaggcggcgcggacacctggctccctggagggaggctcgaagccctggcgccctcagtccctgcgtgaaggcaacacggttcgcagctttcgggcggcggcagcag

SEQ ID NO: 33861 - DNA, 839 bp, Macaca Mulatta
  misc_feature (1)...(839): n = A,T,C or G
aggtccactggaaaggagtttgccctaaagattatagacaaagccaaatgttgtggaaaggnaggaacacctgattgagaatgaagtgtcaatactgcgccgagtgaaacatcccaatatcattatgctggtcgaggagatggaaacggcaactgagctctttctggtgatggaattggtcaaagnnnnnnnnnnnnnnnnnnnnnnnnnnnnnnnnnnnnnnnnnnnnnnnnnnnnnnnnnnnnnnnnnnnnnnnnnnnnnnnnnnnnnnnnnnnnnnnnnnnnnnnnnnnnnnnnnnnnnnnnnnnnnnnnnnnnnnnnnnnnnnnnnnnnnnnnnnnnnnnnnnnnnnnnnnnnnnnnnnnnnnnnnnnnnnnnnnnnnnnnnnnnnnnnnnnnnnnnnnnnnnnnnnnnnnnnnnnnnnnnnnnnnnnnnnnnnnnnnnnnnnnnnnnnnnnnnnnnnnnnnnnnnnnnnnnnnnnnnnnnnnnnnnnnnnnnnnnnnnnnnnnnnnnnnnnnnnnnnnnnnnnnnnnnnnnnnnnnnnnnnnnnnnnnnnnnnnnnnnnnnnnnnnnnnnnnnnnnnnnnnnnnnnnnnnnnnnnnnnnnnnnnnnnnnnnnnnnnnnnnnnnnnnnnnnnnnnnnnnnnnnnnnnnnnnnnnnnnnnnnnnnnnnnnnnnnnnnnnnnnnnnnnnnnnnnnnnnnnnnnnnnnnnnnnnnnnnnngatgatgcctcccaggagaataacatgcaagctgaggtaacaggtaaactaaaacagcactttaataatgcgctccccaaacagagcaccactaccaccgggggtctccgtcatcatg

SEQ ID NO: 33862 - DNA, 507 bp, Macaca Mulatta
  misc_feature (1)...(507): n = A,T,C or G
aagaactacaggtgtactttgtgtgacaagtctttncacccagaaggctcacctggtagtcccacatggttatccacactggggagaagaatcttaagtgtgattactgtgacaagttgtttatgcggaggcaggacctcaagcagcatgtgctcatccacactcagtaagttatcctgcagccaagatgttgttcctcaggtggggagcctttgtgtggctgcagcctgcctgctgattgaagggctggggagtcctggctcatcatctgtttactgccttggtaccatggtagaagccttctgtgttccatgtagccaagctaaggttggaacattgttttcggtgttatcctggaagatttcagttctatggcttcttttacttatatttcacatgtaccctacaacttaacgtatactaataataaatnnnnnnnnnnnnnnnnnnnnnnnnnnngttaatgggaaactggatgaggagtatatgggaactttctgtaccatc

SEQ ID NO: 33863 - DNA, 642 bp, Macaca Mulatta
  misc_feature (1)...(642): n = A,T,C or G
tttttttttcctgtgggaaactggggcagttttattgacaatggcaatgtacaagactccacacctaggtatgtgggcgaggtaaggcctgagttcaggccttatgatcctcctccggacccttggaggaaaacttctcctgcagtttcttccacatgcttttatccatttccttaagctcttccaaggtgtctgtggacaggatcaccttgtactcttccaacgacaggccactgaagctggtgtctctggggcgacggtacttgtgtttgtagtagtttgtatggagtcgcgctaagctctggtacatctgatcacaggcctcaggctctgcaacctgggtattctctccctcccgaaaggcctgtgctacccgctgtcacaggtaagcgcccaagtcccggccccgtttggtctcgtccactggccattcctcacagagcttaagaaaaggccggtaccagctggccaccattttgggcccccaatagtatcnnnnnnnnnnnnnnnnnnnnnnnnnnnngtttagnnnnnnnnnnnnnnnnnnnnnnnnnnnnnnnnnnnnnnnnnntagtggtgcgatcccagttcactgcaacctccaccnnnnnnnnnnnnnnnnnnnnnnntctccgagtagct

SEQ ID NO: 33864 - DNA, 352 bp, Macaca Mulatta
agataacttgaaaaagtcttatgttccactgaccagggaactttatgatcaaataatgttaggggagataaaactttaagatttttatatctagaactttcatatgctttcttaggaagagtgagaggagactgtatgattctttactatgaaatggggaaaaggagctaacattatttaggcatgtgctatgtttccttaatatgagagagaatttttttagttgcataatgattttttcttttaattgatacaaactttagttgattattctttttgcctgtttggagattcaatgcataactaaatatttgctgtaatattaaagggtttaaatagtaaatggtggcta

SEQ ID NO: 33865 - DNA, 331 bp, Macaca Mulatta
gcagtggcatgcgtataatccagtgctgcagcttccttactatgagatgacagctccacttcctaatagtgcatccgtgtcttcctcactgaatcatgttccagatcttgaggctggacccagctcatataaatggactcaccaacaaccaggtgactctgacctttatcagatgacagctccacttcctagtagtgcatccgtgtcttcctcactgaatcatgttcccgatcttgaggctggacccacctcatataaatggacacaccaacaacccaagtgactctgacttttatcagatgaataaacgaaagaggcaaaagcaaacaag

SEQ ID NO: 33866 - DNA, 649 bp, Macaca Mulatta
  misc_feature (1)...(649): n = A,T,C or G
cagcaacctaacatcaaacagaagtttgtggccctcctgaagcggtttaaagtttcagatgaggnnnnnnnnnnnnnnnnnnnnnnnnnnnnnnnnnnnnnnnnnnnnnnnnnnnnnnnnnnnnnnnnnnnnnnnnnnnnnnnnnnnnnnnnnnnnnnnnnnnnnnnnnnnnnnnnnnnnnnnnnnnnnnnnnnnnnnnnnnnnnnnnnnnnnnnnnnnnnnnnnnnnnnnnnnnnnnnnnnnnnnnnnnnnnnnnnnnnnnnnnnnnnnnnnnnnnnnnnnnnnnnnnnnnnnnnnnnnnnnnnnnnnnnnnnnnnnnnnnnnnnnnnnnnnnnnnnnnnnnnnnnnnnnnnnnnnnnnnnnnnnnnnnnnnnnnnnnnnnnnnnnnnnnnnnnnnnnnnnnnnnnnnnnnnnnnnnnnnnnnnnnnnnnnnnnnnnnnnnnnnnnnnnnnnnnnnnnnnnnnnnnnnnnnnnnnnnnnnnnnnnnnnnnnnnnnnnnnnnnnnnnnnnncagcaaagtggaaggggtgcacacaccccggcagaagaggagcacgcccctgaaggagcggcagctctccaagcccctgagtgagaggaccaacagttcggacagcgagcgctccccagatttgggccacagcacgca

SEQ ID NO: 33867 - DNA, 2492 bp, Macaca Mulatta
  misc_feature (1)...(2492): n = A,T,C or G
agtaaatgctgctactcttcttttgggggtagagaatcaacataaaataagtgttcctagagcaccgacaaaagaggaaatgtctctcagagcttatactgctcggtgtaggttaaacagactacgtcgtgcagcatgtcgtttgtttacttctgaaaaaatggttaaagctattaaaaagcttgaaattgaaattgaagctaggcggttaattgttcgaaaagatagacacctatggaaagatgtggnnnnnnnnnnnnnnnnnnnnnnnnnnnnnnnnnnnnnnnnnnnnnnnnnnnnnnnnnnnnnnnnnnnnnnnnnnnnnnnnnnnnnnnnnnnnnnnnnnnnnnnnnnnnnnnnnnnnnnnnnnnnnnnnnnnnnnnnnnnnnnnnnnnnnnnnnnnnnnnnnnnnnnnnnnnnnnnnnnnnnnnnnnnnnnnnnnnnnnnnnnnnnnnnggtcatgaaggagcttagaacaagtttacattgaaaaagttattgttgttgatctgttttcttgattatgataaaatttccaaactcattgatcatgatccttgtctcttctgtaaagatgccgaattcaagnnnnnnnnnnnnnnnnnnnnnnnnnnnnnnnnnnnnnnnnnnnnnnnnnnnnnnnnnnnnnnnnnnnnnnnnnnnnnnnnnnnnnnnnnnnnnnnnnnnnnnnnnnnnnnnnnnnnnnnnnnnnnnnnnnnnnnnnnnnnnnnnnnnnnnnnnnnnnnnnnnnnnnnnnnnnnnnnnnnnnnnnnnnnnnnnnnnnnnnnnnnnnnnnnnnnnnnnnnnnnnnnnnnnnnnnnnnnnnnnnnnnnnnnnnnnnnnnnnnnnnnnnnnnnnnnnnnnnnnnnnnnnnnnnnnnnnnnnnnnnnnnnnnnnnnnnnnnnnnnnnnnnnnnnnnnnnnnnnnnnnnnnnnnnnnnnnnnnnnnnnnnnnnnnnnnnnnnnnnnnnnnnnnnnnnnnnnnnnnnnnnnnaggtggatatttcccttaacttagatcaattaaaggaagaaattgcctttctaaaacacacaaagagtataaagaaaacaatatctctactatcatgccattctgatgctcttattaataagaaaaaaggcaaaagagatagtggttcttttgaacaatatagtgaaaacataaagttattgatggattgggtaaatgcagtttgtgccttctataataaaaaggnnnnnnnnnnnnnnnnnnnnnnnnnnnnnnnnnnnnnnnnnnnnnnnnnnnnnnnnnnnnnnnnnnnnnnnnnnnnnnnnnnnnnnnnnnnnnnnnnnnnnnnnnnnnnnnnnnnnnnnnnnnnnnnnnnnnnnnnnnnnnnnnnnnnnnnnnnnnnnnnnnnnnnnnnnnnnnnnnnnnnnnnnnnnnnnnnnnnnnnnnnnnnnnnnnnnnnnnnnnnnnnnnnnnnnnnnnnnnnnnnnnnnnnnnnnnnnnnnnnnnnnnnnnnnnnnnnnnnnnnnnnnnnnnnnnnnnnnnnnnnnnnnnnnnnnnnnnnnnnnnnnnnnnnnnnnnnnnnnnnnnnnnnnnnnnnnnnnnnnnnnnnnnnnnnnnnnnnnnnnnnnnnnnnnnnnnnnnnnnnnnnnnnnnnnnnnnnnnnnnnnnnnnnnnnnnnnnnnnnnnnnnnnnnnnnnnnnnnnnnnnnnnnnnnnnnnnnnggagagagataaagctgcaagaattattcaatcagctgtaatcaattttctagcaaaacaaagattgagaaaaagagttaatgcggcgctcatcattcagaaatactggcgaagagtcttagcacagagaanattattaatattanaaaagganaagctggaaaaagttcaaaataaagcagcatcacttattcaggnnnnnnnnnnnnnnnnnnnnnnnnnnnnnnnnnnnnnnnnnnnnnnnnnnnnnnnnnnnnnnnnnnnnnnnnnnnnnnnnnnnnnnnnnnnnnnnnnnnnnnnnnnnnnnnnnnnnnnnnnnnnnnnnnnnnnnnnnnnnnnnnnnnnnnnnnnnnnnnnnnnnngaaattaaataacttctagtgggttagaaatccttttatttctacctattaatgttacttgtaaatttttccttatagagacatcgagctgcttgtttgatccaagcacattatagaggatataaagaaaggcaggtctttcttcggcagaaatctgctgctttgatcatacaaaaatatatacgagccagggaggctggaaagcgtgaaaggataaaatacattgaatttaaaaagtctacagttatcctacaagcactggtgcgtggttggctagtacgaaaaagnnnnnnnnnnnnnnnnnnnnnnnnnnacttcttcacttcactgcagctgcatattatcacctgaatgctctcagaattcaaagagcctataaactttacctggctgtgaagaatgctaacaagcaggttaattcagtcatctgtattca

SEQ ID NO: 33868 - DNA, 188 bp, Macaca Mulatta
acaagagaatctggatttgagaaaaaaatattttgactggctaatttaggggaaattgacaactttgtcgcgttcatactgcactggtaactttttagagatcaagatgtgtgttttaaactggattcgtagactgttttttgaaggatgggctataaacagatgatcttcatatcttttcatagcat

SEQ ID NO: 33869 - DNA, 728 bp, Macaca Mulatta
  misc_feature (1)...(728): n = A,T,C or G
ggggtatgtgactatatctttttctaaggcctgcggcattaagatgagttaaagaatggaatgcttgtgcatcagcaaagactgcagacaccagtgcatctgccctttgattgtttaaaggacgaaaagaggcaggttaaccatgaaactgaagcttcaagatgactttacttgccctatgcaacgcggccggtgatttattttctctggggactactgtcaaccaggaactcactctgtcacccagcctgcagtgcagtggcacaatcacagctcactgcagcctcaaccttccaggctcaagtgatcctcctgcttcagcctcccaaggagctgggacaacagagtgtctgtctgtcacctaggctggagtacagtggcatgatcacagctcgctgcagtctcgactccctcaggctcaagtgatcctcccacctcagtactgcaaatagctgtgactacagaaatggaccaccatgctcagttcatttttatccttaatgattaatgttattttttttagatggagtctcgctgtgttacccaggctgggaatgcattggcgtgatctcggcttactggaaacctcaacctcctgggtttcagtgactccccttgcctccatcttccccaatagcttggggactacgggaagcggcaacaccaaaacccaggnnnnnnnnnnnnnnnnnnnnnnnnattccagtaaaaaaaccgggggttttccc

SEQ ID NO: 33870 - DNA, 174 bp, Macaca Mulatta
  misc_feature (1)...(174): n = A,T,C or G
gccggggctgtcagacccaagaggactctggacgttgtcccatctgccttcgccctccccgccctggtctcaggcgccagtggaaatgtgtccagcgacgttgcctacgggngggtaaacatgcccgccgcaagggaggctgtgactccaagatggctgccaggaggcgccccg

SEQ ID NO: 33871 - DNA, 967 bp, Macaca Mulatta
  misc_feature (1)...(967): n = A,T,C or G
caccaggtgtaattgtgggcgagcggccgcttcggagctgacactaagcatgtgcagatcaagtccagaagcgccggggtccctcgaagcagttttcaggacttaaggctctgggnnnnnnnnnnnnnnnnnnnnnnnnnnnnnnnnnnnnnnnnnnnnnnnnnnnnnnnnnnnnnnnnnnnnnnnnnnnnnnnnnnnnnnnnnnnnnnnnnnnnnnnnnnnnnnnnnnnnnnnnnnnnnnnnnnnnnnnnnnnnnnnnnnnnnnnnnnnnnnnnnnnnnnnnnnnnnnnnnnnnnnnnnnnnnnnnnnnnnnnnnnnnnnnnnnnnnnnnnnnnnnnnnnnnnnnnnnnnnnnnnnnnnnnnnnnnnnnnnnnnnnnnnnnnnnnnnnnnnnnnnnnnnnnnnnnnnnnnnnnnnnnnnnnnnnnnnnnnnnnnnnnnnnnnnnnnnnnnnnnnnnnnnnnnnnnnnntcagtgtcatttgaggatatgactgtggacttcagcagggaggagtggcagcacttggaccctgctcagagatgcctgtactgggatgtgacactagagaactacagccacctgctctcagtggnnnnnnnnnnnnnnnnnnnnnnnnnnnnnnnnnnnnnnnnnnnnnnnnnnnnnnnnnnnnnnnnnnnnnnnnnnnnnnnnnnnnnnnnnnnnnggtgaggctattgagaaaatgcagcaacagggaattcctggagaaattttcttccactgtgagagatttgatcaacccataggagaagattcattgtgttctattttagaagcactgtggcaagataatgaccagttagagcgatgtcaggaaaaccagaataaccttttaagtcatgtgaaagtattgattaaggagaggggctatgaacgtaaaaacattgaaaaaataattcatgtgactaccaagtttgttccttcaattaaaagactccgtaactg

SEQ ID NO: 33872 - DNA, 3361 bp, Macaca Mulatta
  misc_feature (1)...(3361): n = A,T,C or G
aggaaaagaagcccatctgtgtccagagatcagaatagaagatacgaccaaagggaagaaagagaggaatattcacagtatgctacttcggatagcgcaatgcctagatctccatcagattatgctgataggcgatctcaacatgaacctcagttttatgaagactctgatcatttaagttatagggactccaacaggagaagtcataggcattccaaagaatatattgtagatgatgaggatgtggaaagcagagatgaatacgaaagacaaaggagagaggaagagtaccagtcacgctaccgaagtgttccgaaattggcccgttatccagtaaagcccaaccctatgaagaacaaatgcggattcatgctgaagtgtcccgggcacgggctgagagaaggcatagtgatgtttctttggnnnnnnnnnnnnnnnnnnnnnnnnnnnnnnnnnnnnnnnnnnnnnnnnnnnnnnnnnnnnnnnnnnnnnnnnnnnnnnnnnnnnnnnnnnnnnnnnnnnnnnnnnnnnnnnnnnnnnnnnnnnnnnnnnnnnnnnnnnnnnnnnnnnnnnnnnnnnnnnnnnnnnnnnnnnnnnnnnnnnnnnnnnnnnnnnnnnnnnnnnnnnnnnnnnnnnnnnnnnnnnnnnnnnnnnnnnnnnnnnnnnnnnnnnnnnnnnnnnnnnnnnnnnnnnnnnnnnnnnnnnnnnnnnnnnnnnnnnnnnnnnnnnnnnnnnnnnnnnnnnnnnnnnnnnnnnnnnnnnnnnnnnnnnnnnnnnnnnnnnnnnnnnnnnnnnnnnnnnnnnnnnnnnnnnnnnnnnnnnnnnnnnnnnnnnnnnnnnnnnnnnnnnnnnnnnnnnnnnnnnnnnnnnnnnnnnnnnnnnnnnnnnnnnnnnnnnnnnnnnnnnnnnnnnnnnnnnnnnnnnnnnnnnnnnnnnnnnnnnnnnnnnnnnnnnnnnnnnnnnnnnnnnnnnnnnnnnnnnnnnnnnnnnnnnnnnnnnnnnnnnnnnnnnnnnnnnnnnnnnnnnnnnnnnnnnnnnnnnnnnnnnnnnnnnnnnnnnnnnnnnnnnnnnnnnnnnnnnnnnnnnnnnnnnnnnnnnnnnnnnnnnnnnnnnnnnnnnnnnnnnnnnnnnnnnnnnnnnnnnnnnnnnnnnnnnnnnnnnnnnnnnnnnnnnnnnnnnnnnnnnnnnnnnnnnnnnnnnnnnnnnnnnnnnnnnnnnnnnnnnnnnnnnnnnnnnnnnnnnnnnnnnnnnnnnnnnnnnnnnnnnnnnnnnnnnnnnnnnnnnnnnnnnnnnnnnnnnnnnnnnnnnnnnnnnnnnnnnnnnnnnnnnnnnnnnnnnnnnnnnnnnnnnnnnnnnnnnnnnnnnnnnnnnnnnnnnnnnnnnnnnnnnnnnnnnnnnnnnnnnnnnnnnnnnnnnnnnnnnnnnnnnnnnnnnnnnnnnnnnnnnnnnnnnnnnnnnnnnnnnnnnnnnnnnnnnnnnnnnnnnnnnnnnnnnnnnnnnnnnnnnnnnnnnnnnnnnnnnnnnnnnnnnnnnnnnnnnnnnnnnnnnnnnnnnnnnnnnnnnnnnnnnnnnnnnnnnnnnnnnnnnnnnnnnnnnnnnnnnnnnnnnnnnnnnnnnnnnnnnnnnnnagtgataaaaacaagagaagaactaaaacagtaaagaaaacattggaacccaaatggaaccaaacattcatttattctccagtccaccgaagagaatttcgggaacgaatgctagagattaccctttgggatcaagctcgagttcgagaggaagaaagtgaattcctaggcgagnnnnnnnnnnnnnnnnnnnnnnnnnnnnnnnnnnnnnnnnnnnnnnnnnnnnnnnnnnnnnnnnnnnnnnnnnnnnnnnnnnnnnnnnnnnnnnnnnnnnnnnnnnnnnnnnnnnnnnnnnnnnnnnnnnnnnnnnnnnnnnnnnnnnnnnnnnggtcaaagagaataagtgatagtgaagtctctgactatgactgtgatgatggaattggtgtagtatcagnnnnnnnnnnnnnnnnnnnnnnnnnnnnnnnnnnnnnnnnnnnnnnnnnnnnnnnnnnnnnnnnnnnnnnnnnnnnnnnnnnnnnnnnnnnnnnnnnnnnnnnnnnnnnnnnnnnnnnnnnnnnnnnnnnnnnnnnnnnnnnnnnnnnnnnnnnnnnnnnnnnnnnnnnnnnnnnnnnnnnnnnnnnnnnnnnnnnnnnnnnnnnnnnnnnnnnnnnnnnnnnnnnnnnnnnnnnnnnnnnnnnnnnnnnnnnnnnnnnnnnnnnnnnnnnnnnnnnnnnnnnnnnnnnnnnnnnnnnnnnnnnnnnnnnnnnnnnnnnnnnnnnnnnnnnnnnnaggtctcatcctcgtactgggtctgtccagacaagcccatcaagtactccagtggcaggacgaaggggccgacagcttccacagcttccaccaaagggaacattggatagaagtangtactatggatatagaggagagaaatcgccaaatgaaaattaacaaatacaaacaggtagccggatcagatcccagactggaacaagattaccattcgaaggcaagacatnnnnnnnnnnnnnnnnnnnnnnnnnnnnnnnnnnnnnnnnnnnnnnnnnnnnnnnnnnnnnnnnnnnnnnnnnnnnnnnnnnnnnnnnnnnnnnnnnnnnnnnnnnnnnnnnnnnnnnnnnnnnnnnnnnnnnnnnnnnnnnnnnnnnnnnnnnnnnnnnnnnnnnnnnncagtgtctttacatccaaaatgcaaagcagacaaatgggcatatcagggaagaacatgacaaaaagcaccagcatcagcggagacatgtgctcactggagaagaatgatggcagccagtctgacactgcagtgggcgccttgggcaccagtggcaaaaaagcggcgctctggcattggtgccaaaatggtagctattgttggtctgtcacggaaaagtcgcagtgcttctcagctcagccaaacggngaagcaggaggtaaaaaactaaggagcactgtccaaagaagtacagaaacaggcctggccgtggagatgaggaactggatgactcgacaagcaagccgagagtctacagacggcagcatgaacagctacagctcagaaggaaannnnnnnnnnnnnnnnnnnnnnnnnnnnnnnnnnnnnnnnnnnnnnnnnnnnnnnnnnnnnnnnnnnnnnnnnnnnnnnnnnnnnnnnnnnnnnnnnnnnnnnnnnnnnnnnggtgacattcaggtaggaatgatggacaaaaagggacagttggaggtagaaatcatccgggcccgtggccttgttgtaaaaccaggttccaagacactgccag

SEQ ID NO: 33873 - DNA, 416 bp, Macaca Mulatta
gctccccacccacacccagcctcctctccaggtggacatggaaggcaacgaacaggatcaggaccagtggatgatctaggtagacaaggcagggtgacctcagagagattccaggccaaactaccctgcatcccaacccccaacccctgcccacagaaccagatgatggccccagtgcctgaaagtacccttgggcacctcctcagctgctgccaggatctggtctccttggcccctcccaggccatcgatctgcacttgaaatccccagggcctgagccccactccaccttcctggccagtacctcaccccttgattggcaggtctggtctctttctaagtttctttaataaagacaaaggagtgatattccccccatgtctattccctctttgttggtggggcccagaggagtc

SEQ ID NO: 33874 - DNA, 1393 bp, Macaca Mulatta
atgttaggacgctaccgctctgacatcaccggttgccatggtagcaccgcggcgagtaaaagaggggtggcgctagacgtttcgggcagagtgcggccgctgcggagacaaggaactctccctctaccgccagtctgacttctaccaaaatgagcggcctggatgggggcaacaagctccctctcgcccaaaccggcgacctggctgctcccgaccatgcctcaggagatccggtcctagaccagtgccaagtgctccatgaagaaaccgaggcgacacaggtgatggcgaacacaggtgggggcagcctggagaccgctgcggagggaggtgcatcccgggatcctgttgactgcggccccgcgctccgcgtcccagttgccgggagtcgcggctgtgtggcgaccaaagccgggcaggaggatgctccaccttctacgaaaggtctggaagcagcctctgcctccgaggctgctgataacagccagaaaaatggctgtcagcttggagagccccgtggccctgctgggcagaaggctctagaagcctgtggcgcaggggggttggggtctcagatgatagccaggaagaaggccaaggaagtgacgactaaaaagtgcgccatgtcagcagcggtggaaaaggagggagaagcaggggcggtgatggaggaaaagaaggtagtgcagaaggaaaaaaaggtggcaggaggggtgaaagaggagacacggcccagggccccgaagatcaataactgcatggactcgctggaggccatcgatcaagagttgtcaaacgtaaatgcccaggctgacagggccttccttcagcttgagcgcaagtttggccgcatgcgaagactccacatgcagcgcagaagtttcattatccaaaatatcccaggtttctgggtcactgcctttcgaaaccacccccagctgtcacctatgatcagtggccaagatgaagacatgctgaggtacatgatcaatttggaggtggaggagcttaaacaccccagagcaggctgcaaattcaagttcatctttcagggcaacccctacttccgaaatgaggggctcgtcaaggaatatgagcgcagatcctccgggcgagtggtgtctctttccactccaatccgctggcaccgaggccaagatccccaggctcatatccacagaaaccgggaagggaacactatccctagtttcttcaactggttttcagaccacagccttctagaattcgacagaattgcagagattatcaaaggagaactgtggcccaatcccctacaatactacctgatgggtgaagggccccgtagaggaattcgaggcccaccaaggcagccagtggagagcgccagatccttcaggttccagtctggcta

SEQ ID NO: 33875 - DNA, 629 bp, Macaca Mulatta
  misc_feature (1)...(629): n = A,T,C or G
ccaatgactacagtcagaggtctgcattgcatgtgtacggttggagataagctctatgtcattggcggcaatcacttcagaggaacaagtgattatgatgatgttntaagctgtgaatactattcaccaacccttgaccagtggaccccaattgccgccatgttaagaggccaaagtgatgttggagttgcggtctttgaaaataaaatctacgttgttggtggatattcttggaataatcgttgtatggtagaaattgtccagaaatatgacccagaaaaagatgagtggcataaagtttttgatcttccagagtcacttggtggcattcgagcttgtacactcacagtttttccacctgaagaaaaccctgggtcaccttctagagaatcacctctttcagcaccttcagatcattcttaggtctaaggtgtaacacctttgcagtacatcatgggtgatctaatacttcttcagttgtatcttcttacagtgattggtacagttattagatataaaggtaactgatgttattcgtcttgtttggcttttagtatgtttatcaagtgactaacaaatgcattctgaagatgtatttaacatagctagctgttttaacaaatgagaaa

SEQ ID NO: 33876 - DNA, 718 bp, Macaca Mulatta
cgagaaagcagggatctgtctggagccagaagggacagtagaaatcaaattccgcagaaaggatctggtgaaaaccatgcgtcgggtggacccagtctacatccacttggctgagcgattggggaccccggagctaagcacagctgaacggaaggagttggagaacaagttgaaggagcgggaggaattcctaattcccatttaccatcaggtagccgtgcagtttgctgacttgcacgacacaccaggccggatgcaggagaagggtgttattagcgatatcctggattggaagacatcgcgtaccttcttctactggcggctgaggcgtctcctgctggaggacctggtcaagaagaaaatccacaatgccaaccctgagctgactgacggccagattcaagccatgttaaggcgctggtttgtggaagtggaaggtacagtgaaggcctatgtttgggacaataataaggatctggcggagtggctagaaaaacagctgacagaggaggatggcgttcactcggtaatagaggaaaacatcaaatgcaccttcagcagaagggcataaagtggtgggggacaattctcagtccaggaaaatgcattgaccattgctggctatttgcttgcctagtaagaattggattcatttttgaccagattattcttctatgcttttttgcaataaatcaattccacatttctccagtggtat

SEQ ID NO: 33877 - DNA, 310 bp, Macaca Mulatta
  misc_feature (1)...(310): n = A,T,C or G
agtaaagctaaaacattttgagaaatttcaggatacagcagaagcattagcannnnnnnnnnnnnnnnnnnnnnnnnnnnnnnnnnnnnnnnnnnnnnnnnnnnnnnnnnnnnnnnnnnnnnnnnnnnnnnnnnnnnnnnnnnnnnnnnnnnnnnnnnnnnnnnnnnnnnnnaggaaaagctgaatctcagttgtatccatagtcctgttgttaatgaacttatgagaggaattcgttcacaaatggatggattaatccctggggtagaaccacgtgaaatggcagctatgtgtcttggattggctcaca

SEQ ID NO: 33878 - DNA, 1432 bp, Macaca Mulatta
  misc_feature (1)...(1432): n = A,T,C or G
nggtccgttccatataattccgtaactggtcccagtaagcactctgtcctctggaatgccatgatccatccactgcgcaatatgactctgaaaggggtggtgtggtaccaggnnnnnnnnnnnnnnnnnnnnnnnnnnnnnnnnnnnnnnnnnnnnnnnnnnnnnnnnnnnnnnnnnnnnnnnnnnnnnnnnnnnnnnnnnnnnnnnnnnnnnnnnnnnnnnnnnnnnnnnnnnnnnnnnnnnnnnnnnnnnnnnnnnnnnnnnnnnnnnnnnnnnnnnnnnnnnnnnnnnnnnnnnnnnnnnnnnnnnnnnnnnnnnnnnnnnnnnnnnnnnnnnnnnnnnnnnnnnnnnnnnnnnnnnnnnnnnnnnnnnnnnnnnnnnnnnnnnnnnnnnnnnnnnnnnnnnnnnnnnnnnnnnnnnnnnnnnnnnnnnnnnnnnnnnnnnnnnnnnnnnnnnnnnnnnnnnnnnnnnnnnnnnnnnnnnnnnnnnnnnnnnnnnnnnnnnnnnnnnnnnnnnnnnnnnnnnnnnnnnnnnnnnnnnnnnnnnnnnnnnnnnnnnnnnnnnnnnnnnnnnnnnnnnnnnnnnnnnnnnnnnnnnnnnnnnnnnnnnnnnnnnnnnnnnnnnnnnnnnnnnnnnnnnnnnnnnnnnnnnnnnnnnnnnnnnnnnnnnnnnnnnnnnnnnnnnnnnnnnnnnnnnnnnnnnnnnnnnnnnnnnnnnnnnnnnnnnnnnnnnnnnnnnnnnnnnnnnnnnnnnnnnnnnnnnnnnnnnnnnnnnnnnnnnnnnnnnnnnnnnnnnnnnnnnnnnnnnnnnnnnnnnnnnnnnnnnnnnnnnnnnnnnnnnnnnnnnnnnnnnnnnnnnnnnnnnnnnnnnnnnnnnnnnnnnnnnnnnnnnnnnnnnnnnnnnnnnnnnnnnnnnnnnnnnnnnnnnnnnnnnnnnnnnnnnnnnnnnnnnnnnnnnnnnnnnnnnnnnnnnnnnnnnnnnnnnnnnnnnnnnnnnnnnnnnnnnnnnnnnnnnnnnnnnnnnnnnnnnnnnnnnnnnnnnnnnnnnnctagttagtcgaagggtctgtcctggactaattctgaactacagacaaattggacctcaatgtcattcactttcctcatattaatgggagtgaaatatctaatacttttgctccttgttatccagagttgtgggatctcaggattggaagattgtaaaggccgcatagcccagctagtgttcttgtgttcnnnnnnnnnnnnnnnnnnnnnnnnnnnnnnnnnnnnnnnnnnnnnnnnnnnnnnnnnnnnnnnnnnnnnnnnnnnnnnnnnnnnnnnnnnnnnnnnnnnnnnctttacaaaatttctgacaggtggttactgaatctctgcatgaactttcccttaaaactttccaagtttttccttatgtggaactgaaatct

SEQ ID NO: 33879 - DNA, 355 bp, Macaca Mulatta
  misc_feature (1)...(355): n = A,T,C or G
gaacttgactgatgccatcgcccgagcagctgcagacacattacaggggccgatgcaggcagcctaccgggaagccttccagagtgtggtgctgccggcctttgagaagagctgccaggccatgttccagcaaatcaatgatagcttccgactggggacacaggaatnacttgcagcagctagaaagccacatgaagagccggaaggcacgggaacaggaggccagggagcctgtgctggcccagctgcggggcctggtcagcacactgcagagtgccactgagcagatggcagccaccgtggccagcagtgttcgggctgaggtgcagcaccagctgcatgtggctgtaggcag

SEQ ID NO: 33880 - DNA, 3747 bp, Macaca Mulatta
  misc_feature (1)...(3747): n = A,T,C or G
gtgggcggagtcctctcgcagcatccgccaggtagcttcttagtcgctgcccctagctcaaggagcgtctgagtgcacacaccgtacccgtcccttgtcgggagtcctgtcgcaggnnnnnnnnnnnnnnnnnnnnnnnnnnnnnnnnnnnnnnnnnnnnnnnnnnnnnnnnnnnnnnnnnnnnnnnnnnnnnnnnnnnnnnnnnnnnnnnnnnnnnnnnnnnnnnnnnnnnnnnnnnnnnnnnnnnnnnnnnnnnnnnnnnnnnnnnnnnnnnnnnnnnnnnnnnnnnnnnnnnnnnnnnnnnnnnnnnnnnnnnnnnnnnnnnnnnnnnnnnnnnnnnnnnnnnnnnnnnnnnnnnnnnnnnnnnnnnnnnnnnnnnnnnnnnnnnnnnnnnnnnnnnnnnnnnctgtagtgtggatgaagagcaaaactgaggacatgattgagaaaagaatattctccatgactgaacgattgccacccatccagtccatgtttttcacaggttcctttcatatcctcgtggtctactgtggtgacctgatcctgcgactctttggggaccactttcgggcattcaaacccctgggtaaagtgcactgccgcttcaacatcagctgcctctgctatgacccggaaatgaagatgcttctatctggcgtcctgggagcagtggtgacctgggtcattgagcgaagtggcacgggcctccatatagcccacatgatctccatgccaggtgatgagctggtccaggacatcgtgctgaatggtcccaatggctccctcctggccctgtgtgnnnnnnnnnnnnnnnnnnnnnnnnnnnnnnnnnnnnnnnnnnnnnnnnnnnnnnnnnnnnnnnnnnnnnnnnnnnnnnnnnnnnnnnnnnnnnnnnnnnnnnnnnnnnnnnnnnnnnnnnnnnnnnnnnnnnnnnnnnnnnnnnnnnnnnnnnnnnnnnnnnnnnnnnnnnnnnnnnnnnnnnnnnnnnnnnnnnnnnnnnnnnnnnnnnnnnnnnnnnnnnnnnnnnnnnnnnnnnnnnnnnnnnnnnnnnnnnnnnnnnnnnnnnnnnnnnnnnnnnnnnnnnnnnnnnnnnnnnnnnnnnnnnnnnnnnnnnnnnnnnnnnnnnnnnnnnnnnnnnnnnnnnnnnnnnnnnnnnnnnnnnnnnnnnnnnnnnnnnnnnnnnnnnnnnnnnnnnnnnnnnnnnnnnnnnnnnnnnnnnnnnnnnnnnnnnnnnnnnnnnnnnnnnnnnnnnnnnnnnnnnnnnnnnnnnnnnnnnnnnnnnnnnnnnnnnnnnnnnnnnnnnnnnnnnnnnnnnnnnnnnnnnnnnnnnnnnnnnnnnnnnnnnnnnnnnnnnnnnnnnnnnnnnnnnnnnnnnnnnnnnnnnnnnnnnnnnnnnnnnnnnnnnnnnnnnnnnnnnnnnnnnnnnnnnnnnnnnnnnnnnnnnnnnnnnnnnnnnnnnnnnnnnnnnnnnnnnnnnnnnnnnnnnnnnnnnnnnnnnnnnnnnnnnnnnnnnnnnnnnnnnnnnnnnnnnnnnnnnnnnnnnnnnnnnnnnnnnnnnnnnnnnnnnnnnnnnnnnnnnnnnnnnnnnnnnnnnnnnnnnnnnnnnnnnnnnnnnnnnnnnnnnnnnnnnnnnnnnnnnnnnnnnnnnnnnnnnnnnnnnnnnnnnnnnnnnnnnnnnnnnnnnnnnnnnnnnnnnnnnnnnnnnnnnnnnnnnnnnnnnnnnnnnnnnnnnnnnnnnnnnnnnnnnnnnnnnnnnnnnnnnnnnnnnnnnnnnnnnnnnnnnnnnnnnnnnnnnnnnnnnnnnnnnnnnnnnnnnnnnnnnnnnnnnnnnnnnnnnnnnnnnnnnnnnnnnnnnnnnnnnnnnnnnnnnnnnnnnnnnnnnnnnnnnnnnnnnnnnnnnnnnnnnnnnnnnnnnnnnnnnnnnnnnnnnnnnnnnnnnnnnnnnnnnnnnnnnnnnnnnnnnnnnnnnnnnnnnnnnnnnnnnnnnnnnnnnnnnnnnnnnnnnnnnnnnnnnnnnnnnnnnnnnnnnnnnnnnnnnnnnnnnnnnnnnnnnnnnnnnnnnnnnnnnnnnnnnnnnnnnnnnnnnnnnnnnnnnnnnnnnnnnnnnnnnnnnnnnnnnnnnnnnnnnnnnnnnnnnnnnnnnnnnnnnnnnnnnnnnnnnnnnnnnnnnnnnnnnnnnnnnnnnnnnnnnnnnnnnnnnnnnnnnnnnnnnnnnnnnnnnnnnnnnnnnnnnnnnnnnnnnnnnnnnnnnnnnnnnnnnnnnnnnnnnnnnnnnnnnnnnnnnnnnnnnnnnnnnnnnnnnnnnnnnnnnnnnnnnnnnnnnnnnnnnnnnnnnnnnnnnnnnnnnnnnnnnnnnnnnnnnnnnnnnnnnnnnnnnnnnnnnnnnnnnnnnnnnnnnnnnnnnnnnnnnnnnnnnnnnnnnnnnnnnnnnnnnnnnnnnnnnnnnnnnnnnnnnnnnnnnnnnnnnnnnnnnnnnnnnnnnnnnnnnnnnnnnnnnnnnnnnnnnnnnnnnnnnnnnnnnnnnnnnnnnnnnnnnnnnnnnnnnnnnnnnnnnnnnnnnnnnnnnnnnnnnnnnnnnnnnnnnnnnnnnnnnnnnnnnnnnnnnnnnnnnnnnnnnnnnnnnnnnnnnnnnnnnnnnnnnnnnnnnnnnnnnnnnnnnnnnnnnnnnnnnnnnnnnnnnnnnnnnnnnnnnnnnnnnnnnnnnnnnnnnnnnnnnnnnnnnnnnnnnnnnnnnnnnnnnnnnnnnnnnnnnnnnnnnnnnnnnnnnnnnnnnnnnnnnnnnnnnnnnnnnnnnnnnnnnnnnnnnnnnnnnnnnnnnnnnnnnnnnnnnnnnnnnnnnnnnnnnnnnnnnnnnnnnnnnnnnnnnnnnnnnnnnnnnnnnnnnnnnnnnnnnnnnnnnnnnnnnnnnnnnnnnnnnnnnnnnnnnnnnnnnnnnnnnnnnnnnnnnnnnnnnnnnnnnnnnnnnnnnnnnnnnnnnnnnnnnnnnnnnnnnnnnnnnnnnnnnnnnnnnnnnnnnnnnnnnnnnnnnnnnnnnnnnnnnnnnnnnnnnnnnnnnnnnnnnnnnnnnnnnnnnnnnnnnnnnnnnnnnnnnnnnnnnnnnnnnnnnnnnnnnnnnnnnnnnnnnnnnnnnnnnnnnnnnnnnnnnnnnnnnnnnnnnnnnnnnnnnnnnnnnnnnnnnnnnnnnnnnnnnnnnnnnnnnnnnnnnnnnnnnnnnnnnnnnnnnnnnnnnnnnnnnnnnnnnnnnnnnnnnnnnnnnnnnnnnnnnnnnnnnnnnnnnnnnnnnnnnnnnnnnnnnnnnnnnnnnnnnnnnnnnnnnnnnnnnnnnnnnnnnnnnnnnnnnnnnnnnnnnnnnnnnnnnnnnnnnnnnnnnnnnnnnnnnnnnnnnnnnnnnnnnnnnnnnnnnnnnnnnnnnnnnnnnnnnnnnnnnnnnnnnnnnnnnnnnnnnnnnnnnnnnnnnnnnnnnnnnnnnnnnnnnnnnnnnnnnnnnnnnnnnnnnnnnnnnnnnnnnnnnnnnnnnnnnnnnnnnnnnnnnnnnnnnnnnnnnnnnnnnnnnnaaatggttgcggggtctcaagaagacgaaagagagagactctaaacatatgatcactgagccaggcctcttagaggatgaaagtgggactgaggccgcaccagttgagatggaggaagcatccgtccattccaaatggtcttcaagcaccagtgtaacaaagctcttaaaagatgttgactctcaagaga

SEQ ID NO: 33881 - DNA, 645 bp, Macaca Mulatta
  misc_feature (1)...(645): n = A,T,C or G
gaggactacaagaagccgctgccgccctgccgctcggtgtgcgagcgcgccaaggccggctgcgcgccgctcatgcgtcagtacggcttcgcctggcccgaccgcatgcgctgcgaccggctgcccgaacagggcaaccctgacacgctgtgcatggactacaaccgcaccgacctcaccnnnnnnnnnnnnnnnnnnnnnnnnnnnnnnnnnnnnnnnnnnnnnnnnnnnnnnnnnnnnnnnnnnnnnnnnnnnnnnnnnnnnnnnnnnnnnnnnnnnnnnnnnnnnnnnnnnnnnnnnnnnnnnnnnnnnnnnnnnnnnnnnnnnnnnnnnnnnnnnnnnnnnnnnnnnnnnnnnnnnnnnnnnnnnnnnnnnnnnnnnnnnnnccctgcgagcccgggtgccaatgccgcgcgcccatggtgagcgtgtccagcgagcgccacccgctctacaaccgcgtcaagacaggccagatcgccaactgcgcgctgccctgccacaaccccttcttcagccaggacgagcgcgccttcacggtcttctggatcggcctgtggtcggtgctctgcatcgtgtccaccttcgccaccgtctccaccttcctcattgacatggagcgcttcaagtacccagagcggccca

SEQ ID NO: 33882 - DNA, 796 bp, Macaca Mulatta
  misc_feature (1)...(796): n = A,T,C or G
gggtatttttgnnnnnnnnnnnnnnnnnnnnnnnnagccaggatggtcttgatctcctgacctcatgatccacccgcctcggccttccaaagtgctgggaatacatgtgtgagccaccgcacctgtccttggttttagatcttgacacagcacatcctcaacttactgtctccgaggatagaaaaagctgtgtaatggaagaacaaaaccaaacgtttattacaacccaaggagattttatttctgccctgctgtcctgggctctcagaagtgtagttctggcagacattactggaaggagaagtgggaaacgatcctaagtgaaaattgggtgtgtgtcaagacggtcttcttaggacctggcaagatcaaccttcagttctgggttgatttgggggcaattggatgatatatagagtggttatgctgcatcaagtcctaaaaaaaacccacttctgtcagtaataaaaatccaataggattggtattcttttggactaagaatttggtgatttttttaaataatataaagtgaaaaagtttgttccgataattttaattgaattctttaccaaaaaccggttttggcccttatttcccatacttgaaacccgaatcctgaaacctcctaaaaaatcttgttcctcttaccaggaaaacgggaaacgattaaagtaactatcgtgaaaatgacaatcgtgtttttcacaatattttttgtgggcggagattttacaaacccacgtaatacatttaagagccagataactcaacaccatagacaaaccgatcgcaa

SEQ ID NO: 33883 - DNA, 608 bp, Macaca Mulatta
  misc_feature (1)...(608): n = A,T,C or G
agggggacagcggcgggcctctcatgtgcaaagacagcaagaaaggcgcctacgtggtcgtgggaatcacaagctggggggtaggctgtgcccgtgccaagcgccccggaatctacacggccacctggccctatctgaactggattgcctccaagattggttctaatgctctgcatatgattcaaccggccacccctccatcccccaccactagaccgcccccaattcaactcccctcctcccaccctatctctgctcaccttccttggtatttccaaccgccccctcgaccacttccatcccgaccaccttcagctcggcctcgacccccacctccacccccgccnnnnnnnnnnnnnnnnnnnnnnnnnnnnnnnnnnnnnnnnnnnnncccccacctccacccccgcctacaacaaaacctccccaaggactttcttttgccaagcgcctacagcagctcatagaggccttgaaggggaagacctattccgacggaaagaactattatgacatggagaccacagagctcccagagctgacctctacctcctgatctgacccggttctcaacagacccagtgagcccttcagtgctgagaaaaagg

SEQ ID NO: 33884 - DNA, 281 bp, Macaca Mulatta
ggctgcagatgttggaagccctgtgcaggcactggcctggccccatgagcctggccttgtacctgacagatgcagaagctcagcagttcctgcgtttcatcgaggcctcaccagtgcttgctgcccggcaggacgtggcctaccacgtggtgtaccgtgaggggcccctgtaccctgtcaaccagctccgcaacgtggccttggcaacaggccctcacaccttacgtcttcctcagtgacattgacttcctgcctgcctattctctctacgactacctcag

SEQ ID NO: 33885 - DNA, 444 bp, Macaca Mulatta
  misc_feature (1)...(444): n = A,T,C or G
aagttacagtccctgtttcaggcannnnnnnnnnnnnnnnnnnnnnnnnnnnnnnnnnnnnnnnnnnnnnnnnnnnnnnnnnnnnnnnnnnnnnnnnnnnnnnnnnnnnnnnnnnnnnnnnnnnnnnnnnnnnnnnnnnnnnnnnnnnnnnnnnnnnnnnnnnnnnnnnnnnnntcctggggctggctctgtgcctgctnnnnnnnnnnnnnnnnnnnnnnnnnnnnnnnnnnnnnnnnnnnnnnnnnnnnnnnnnnnnnnnnnnnnnnnnnnnnnnnnnnnnnnnnnnnnnnnnnnnnnnnnnnnnnnnnnnnnnnnnnnnnnnnnnnnnnnnnnnnnnnaaatacctgcatgagtctcggcaccgtcatgccatggcacggaagcgtggtgaaggtggacgatttttctctccaaaggaaaaggatagtccccatatgcagg

SEQ ID NO: 33886 - DNA, 1717 bp, Macaca Mulatta
  misc_feature (1)...(1717): n = A,T,C or G
aggagaaaagggcgctggggcgccgcgggaggaagtgctccagtgctcgactctccgctgcgcggccgctggcggaggggagctgccaggtgagcctaagannnnnnnnnnnnnnnnnnnnnnnnnnnnnnnnnnnnnnnnnnnnnnnnnnntggggccgctggctcccctctccccgggcgtcctggccggacctgcgcaagcacaggacgtcgtggacctggacttcttcacccagcagccgctgcacctggtgagcccctcgttcctgtcggtcaccatcgacgccaacctggccacggacccgcggttcctcatcttcctgggnnnnnnnnnnnnnnnnnnnnnnnnnnnnnnnnnnnnnnnnnnnnnnnnnnnnnnnnnnnnnnnnnnnnnnnnnnnnnnnnnnnnnnnnnnnnnnnnnnnnnnnnnnnnnnnnnnnnnnnnnnnnnnnnnnnnnnnnnnnnnnnnnnnnnnnnnnnnnnnnnnnnnnnnnnnnnnnnnnnnnnnnnnnnnnnnnnnnnnnnnnnnnnnnnnnnnnnnnnnnnnnnnnnnnnnnnnnnnnnnnnnnnnnnnnnnnnnnnnnnnnnnnnnnnnnnnnnnnnnnnnnnnnnnnnnnnnnnnnnnnnnnnnnnnnnnnnnnnnnnnnnnnnnnnnnnnnnnnnnnnnnnnnnnnnnnnnnnnnnnnnnnnnnnnnnnnnnnnnnnnnnnnnnnnnnnnnnnnnnnnnnnnnnnnnnnnnnnnnnnnnnnnnnnnnnnnnnnnnnnnnnnngaacctaccagtttccttaagaaggctgatattttcatcaaaggggtcacagttaggagaagattttattcaattgcataaacttttaagaaagtcaaccttcaaaaatgcacaactctatggtcctgacgttggtcagcctcgaagaaagactgctgagatgctgaagagnnctactatttgaatggacgaactgctactgaagaagattttctaaatcctgatgtattggacatttttatttcatctgtgcaaaaagttttccaggtnnnnnnnnnnnnnnnnnnnnnnnnnnnnnnnnnnnnnnnnnnnnnnnnnnnnnnnnnnnnnnnnnnnnnnnnnnnnnnnnnnnnnnnnnnnnnnnnnnnnnnnnngtggctggataaattgggcctgtcagcccgaatgggaatagaagtggtgatgaggcaagtattctttggagccggaaactaccatttagtggatgaaaacttcgatcctttacctgngattattggctatctcttctgttcaagaaattggtgggcaccaaagtgttaatggcaagtgtgaaaggcccaaagagaaggaaccttcgagtataccttcattgcacaaacactgacaannnnnnnnnnnnnnnnnnnnnnnnnnnnnnnnnnnnnnnnnnnnnnnnnnnnnnnnnnnnnnnnnnnnnnnnnnnnnnnnnnnnnnnnnnnnnnnnnnnnnnnnnnnnnnnnnnnnnnnnnnnnnnnnnnnnnnnnnnnnnnnnnnnnnctgtccaactcaatggtcaaactctaaagatggtggatgatcaaaccttaccacctttaatggaaaaacctctccggccaggaagttcactgggcttggccagctttctcatatagtttttttgtgataagaaatgccaaagttgctgcttgcgtctgaaaataaaatatactagtcctgacactg

SEQ ID NO: 33887 - DNA, 784 bp, Macaca Mulatta
  misc_feature (1)...(784): n = A,T,C or G
gtgacccacacagatgcagtaaaaatttctgattttggtacgtctaaggaactcagtgacaaaagtaccaagatgtcatttgccggcacagttgcatggatggcgccagaggtgatacggaatgaacctgtatctgagaaagttgatatatggnnnnnnnnnnnnnnnnnnnnnnnnnnnnnnnnnnnnnnnnnnnnnnnnnnnnnnnnnnnnnnnnnnnnnnnnnnnnnnnnnnnnnnnnnnnnnnnnnnnnnnnnnnnnnnnnnnnnnnnnnnnnnnnnnnnnnnnnnnnnnnnnnnnnnnnnnnnnnnnnnnnnnnnnnnnnnnnnnnnnnnnnnnnnnnnnnnnnnnnnnnnnnnnnnnnnnnnnnnnnnnnnnnnnnnnnnnnnnnnnnnnnnnnnnnnnnnnnnnnnnnnnnnnnnnnnnnnnnnnnnnnnnnnnnnnnnnnnnnnnnnnnnnnnnnnnnnnnnnnnnnnnnnnnnnnnnnnnnnnnnnnnnnnnnnnnnnnnnnnnnnnnnnnnnnnnnnnnnnnnnnnnnnnnnnnnnnnnnnnnnnnnnnnnnnnnnnnnnnnnnnnnnnnnnnnnnnnnnnnnnnnnnnnnnnnnnnnnnnnnnnnnnnnnnnnnnnnnnnnnnnnnnnnnnnnnngcgtgagcaagcagtggaaaagaagtatcctggcacctacaaacgacaccctgttcgtccaatcatccactccaacgccatggagaaactcatgaaaaggaaaggagtgcctcacaaatctgggatgcagaccaaacg

SEQ ID NO: 33888 - DNA, 388 bp, Macaca Mulatta
tgtgtcctctccacagctgcccactcccaggtgcagctggtgcagtctggggctgaggtgaggaagcctgggcctcagtgaaggtctcctgtaatttttctgggttcatcatcacaagctacagtatacactgggcgcgacaggcccctggacaagggcttaagtggatgggatggaacaaccctagcaatggtaacagagtctacacgcagaaatttaagggcacactcaatatgaccagggacacgtccaagagcacagcctacgcggagttgagcagcctgagatctgaggacacggccgtgtattactgtgcacgacacacagtgtggaaacccacagcctgagagagtctgagagcctgagggaggaggcagctgcgctgggc

SEQ ID NO: 33889 - DNA, 202 bp, Macaca Mulatta
cacgatggtcgacagcctccttcactttatcacacccccactggtctttgacatctttatctggtttgcttacttcaactcagcctgcaaccccatcatctatgtcttttcctaccggtggtttcggaaggcactgaaactcacactgagtcagaagctcttctcaccgcagacacgcactgttgatttgtaccaagaatga

SEQ ID NO: 33890 - DNA, 898 bp, Macaca Mulatta
  misc_feature (1)...(898): n = A,T,C or G
atcccatcagaatccaaacaaaaggaagaggaagaaaattcttgggatnnnnnnnnnnnngtgagactgtttcacagaaggatgtgtgtttacccaaggctacacctcaaaaagannnnnnnnnnnnnnnnnnnnnnnnnnnnnnnnnnnnnnnnnnnnnnnnnnnnnnnnnnnnnnnnnnnnnnnnnnnnnnnnnnnnnnnnnnnnnnnnnnnnnnnnnnnnnnnnnnnnnnnnnnnnnnnnnnnnnnnnnnnnnnnnnnnnnnnnnnnnnnnnnnnnnnnnnnnnnnnnnnnnnnnnnnnnnnnnnnnnnnnnnnnnnnnnnnnnnnnnnnnnnnnnnnnnnnnnnnnnnnnnnnnnnnnnnnnnnnnnnnnnnnnnnnnnnnnnnnnnnnnnnnnnnnnnnnnnnnnnnnnnnnnnnnnnnnnnnnnnnnnnnnnnnnnnnnnnnnnnnnnnnnnnnnnnnnnnnnnnnnnnnnnnnnnnnnnnnnnnnnnnnnngattcaactagcctatcaaaaagcttggatgcagttccttcttgtaaaagagcaagggaacttaaaaaacatcactgtgaaaaacttacagcaaaacttgaacgaatgaaaaataagttttgtgtaccaaaaaaggaactatcagaaacaaaagaaataaaatcacagttagagaatcaaaaagttaaatgggaacaagagccctgcagtgtgagnnnnnnnnnnnnnnnnnnnnnnnnnnnnnnnnnnnnnnnnnatatattaaatgaaaaacttaggaaagaattaggaagaatagaagagcaacataggaaagagttagaagtgaaacaagaacttgaacaggctctcagaatacaagatatggaagtgaagagtgtaagaagtaatttgagtcagg

SEQ ID NO: 33891 - DNA, 3712 bp, Macaca Mulatta
  misc_feature (1)...(3712): n = A,T,C or G
agctattttcgtgaaagaagaaatgttgctacctcaactgaaaaatctgtggcatggcaaannnnnnnnnnnnnnnnnnnnnnnnnnnnnnnnnnnnnnnnnnnnnnnnnnnnnnnnnnnnnnnnnnnnnnnnnnnagaagcgatctataaagaatgaatttttgacccaggaagaagcactcaaaggggaagcaactactgcgacgaactcttttatcatcaaatcaagnagcatatatgataacagaaaggagaaaataagtgaggacaaggtggaagatatttggatacctcgagaggacaaaaacaattttttgatagacactgcttctgaatcagaatactcaacagtagaagaatgctttcagagtttaagaagaaaaaattcaaaggcatctaaatctaggactcaaaaagcattgactttggactccgttaataggcacagttatccattaagctcaacaagtggaaatgctgattcatcagctgtttcttcacaggcaatatctccctatgcctgcttttatggagcatctgtaaagaaggttaaatcgggatggctggataagctctctcctcaaggnnnnnnnnnnnnnnnnnnnnnnnnnnnnnnnnnnnnnnnnnnnnnnnnnnnnnnnnnnnnnnnnnnnnaggagatgtattcaaaaggaataattcccctttctgctatatcaacagtacgagttcaaggagacaacaaatttgaagttgttacaacacaaagaacttttgtttttagagtagaaaaagaagnnnnnnnnnnnnnnnnnnnnnnnnnnnnnnnnnnnnnnnnnnnnnnnnnnnnnnnnnnnnnnnnnnnnnnnnnnnnnnnnnnnnnnnnnnnnnnnnnnnnnnnnnnnnnnnnnnnnnnnnnnnnnnnnnnnnnnnnnnnnnnnnnnnnnnnnnnnnnnnnnnnnnnnnnnnnnnnnnnnnnnnnnnnnnnnnnnnnnnnnnnnnnnnnnnnnnnnnnnnnnnnnnnnnnnnnnnnnnnnnnnnnnnnnnnnnnnnnnnnnnnnnnnnnnnnnnnnnnnnnnnnnnnnnnnnnnnnnnnnnnnnnnnnnnnnnnnnnnnnnnnnnnnnnnnnnnnnnnnnnnnnnnnnnnnnnnnnnnnnnnnnnnnnnnnnnnnnnnnnnnnnnnnnnnnnnnnnnnnnnnnnnnnnnnnnnnnnnnnnnnnnnnnnnnnnnnnnnnnnnnnnnnnnnnnnnnnnnnnnnnnnnnnnnnnnnnnnnnnnnnnnnnnnnnnnnnnnnncagcatagatctttgggcccaaaaagattccaaggttagaagtctaaaaatggatgctagcatttggagcaatgaactcatcgagnnnnnnnnnnnnnnnnnnnnnnnnnnnnnnnnnnnnnnnnnnnnnnnnnnnnnnnnnnnnnnnnnnnnnnnnnnnnnnnnnnnnnnnnnnnnnnnnnnnnnnnnnnnnnnnnnnnnnnnnnnnnnnnnnnnnnnnnnnnnnnnnnnnnnnnnnnnnnnnnnnnnnnnnnnnnnnnnnnnnnnnnnnnnnnnnnnnnnnnnnnnnnnnnnnnnnnnnnnnnnnnnnnnnnnnnnnnnnnnnnnnnnnnnnnnnnnnnnnnnnnnnnnnnnnnnnnnnnnnnnnnnnnnnnnnnnnnnnnnnnnnnnnnnnnnnnnnnnnnnnnnnnnnnnnnnnnnnnnnnnnnnnnnnnnnnnnnnnnnnnnnnnnnnnnnnnnnnnnnnnnnnnnnnnnnnnnnnnnnnnnnnnnnnnnnnnnnnnnnnnnnnnnnnnnnnnnnnnnnnnnnnnnnnnnnnnnnnnnnnnnnnnnnnnnnnnnnnnnnnnnnnnnnnnnnnnnnnnnnnnnnnnnnnnnnnnnnnnnnnnnnnnnnnnnnnnnnnnnnnnnnnnnnnnnnnnnnnnnnnnnnnnnnnnnnnnnnnnnnnnnnnnnnnnnnnnnnnnnnnnnnnnnnnnnnnnnnnnnnnnnnnnnnnnnnnnnnnnggcccatctttatctttgagatctacctaccctcagaacgtgtgtttttatttggagctgaaacatctccagctcaaagaaaatggacagaggcaatagccaagnagcattttgttcccttatttgctgaaaacttaacagaagctgactatgatttgattggtcaactcttctacaaagactgccatgccctggatcagtggagaaaaggctggtttgctatggacaaatccagtttgcatttttgccttcaaatgcaagaagttcagggagatagaatgcacttaagaagactgcaggagctaancaatcagcacaatggttcaaaatggggaaaaactggatgtcttactcttggtagaaaaagggagnnnnnnnnnnnnnnnnnnnnnnnnnnnnnnnnnnnnnnnnnnnnnnnnnnnnnnnnnnnnnnnnnnnnnnnnnnnnnnnnnnnnnnnnnnnnnnnnnnnnnnnnnnnnnnnnnnnnnnnnnnnnnnnnnnnnnnnnnnnnnnnnnnnnnnnnnnnnnnnnnnnnnnnnnnnnnnnnnnnnnnnnnnnnnnnnnnnnnnnnnnnnnnnnnnnnnnnnnnnnnnnnnnnnnnnnnnnnnnnnnnnnnnnnnnnnnnnnnnnnnnnnnnnnnnnnnnnnnnnnnnnnnnnnnnnnnnnnnnnnnnnnnnnnnnnnnnnnnnnnnnnnnnnnnnnnnnnnnnnnnnnnnnnnnnnnnnnnnnnnnnnnnnnnnnnnnnnnnnnnnnnnnnnnnnnnnnnnnnnnnnnnnnnnnnnnnnnnnnnnnnnnnnnnnnnnnnnnnnnnnnnnnnnnnnnnnnnnnnnnnnnnnnnnnnnnnnnnnnnnnnnnnnnnnnnnnnnnnnnnnnnnnnnnnnnnnnnnnnnnnnnnnnnnnnnnnnnnnnnnnnnnnnnnnnnnnnnnnnnnnnnnnnnnnnnnnnnnnnnnnnnnnnnnnnnnnnnnnnnnnnnnnnnnnnnnnnnnnnnnnnnnnnnnnnnnnnnnnnnnnnnnnnnnnnnnnnnnnnnnnnnnnnnnnnnnnnnnnnnnnnnnnnnnnnnnnnnnnnnnnnnnnnnnnnnnnnnnnnnnnnnnnnnnnnnnnnnnnnnnnnnnnnnnnnnnnnnnnnnnnnnnnnnnnnnnnngatatctcctgtgatggaagcagaagaattaactaatgatatattagcaataaaaaatattattcctacaaaaggtgatatttgggccacattgaagtcatnnnnnnnnnnnnnnnnnnnnnnnnnnnnnnnnnnnnnnnnnnnnnnnnnnnnnnnnnnnnnnnnnnnnnnnnnnnnnnnnnnnnnnnnnnnnnnnnnnnnnnnnnnnnnnnnnnnnnnnnnnnnnnnnnnnnnnnnnnnnnnnnngaccggagtacattgggaagcatcaaagaaggaatcttgaaaatcaaagaagaaccatccaaaatactatctggaaataagtttcaagaccggtattttgttttacgagatgggtttctctttctttacaaggatgtgaagnnnnnnnnnnnnnnnnnnnnnnnnnnnnnnnnnnnnnnnnnnnnnnnnnnnnnnnnnnnnnnnnnnnnnnnnnnnnnnnnnnnnnnnnnnnnnnnnnnnnnnnnnnnnnnnnnnnnnnggcacctgtgttgtgatagttcacgagctcagatggagtggatgaccagtatctttattgcccag

SEQ ID NO: 33892 - DNA, 168 bp, Macaca Mulatta
caggaggactacaaccagctgaggccactctcctaccccaacacggatgtgtttttgatctgcttctctgtcgtaaaccctgcctcttaccacaacgtccaggaggaatgggtccccgagctcaaggactgcatgcctcacgtgccttatgtcctcatagggacccag

SEQ ID NO: 33893 - DNA, 2122 bp, Macaca Mulatta
  misc_feature (1)...(2122): n = A,T,C or G
gcctcacttctaaccttctggaacccactctaccactgcccagctcactattgaatccaggccgttcaatgtcgcagaggggaaggaggttcttctactcgcccacaatctgtcccagaatcttattggctacaactggcacaaaggggaaagagtggatgccaaacgtctaattgtagcatatgtaataagaactaaacaaactaccccagggcctgcacacagnnnnnnnnnnnnnnnnnnnnnnnnnnnnnnnnnnnnnnnnnnnnnnnnnnnnnnnnnnnnnnnnnnnnnnnnnnnnnnnnnnnnnnnnnnnnnnnnnnnnnnnnnnnnnnnnnnnnnnnnnnnnnnnnnnnnnnnnnnnnnnnnnnnnnnnnnnnnnnnnnnnnnnnnnnnnnnnnnnnnnnnnnnnnnnnnnnnnnnnnnnnnnnnnnnnnnnnnnnnnnnnnnnnnnnnnnnnnnnnnnnnnnnnnnnnnnnnnnnnnnnnnnnnnnnnnnnnnnnnnnnnnnnnnnnnnnnnnnnnnnnnnnnnnnnnnnnnnnnnnnnnnnnnnnnnnnnnnnnnnnnnnnnnnnnnnnnnnnnnnnnnnnnnnnnnnnnnnnnnnnnnnnnnnnnnnnnnnnnnnnnnnnnnnnnnnnnnnnnnnnnnnnnnnnnnnnnnnnnnnnnnnnnnnnnnnnnnnnnnnnnnnnnnnnnnnnnnnnnnnnnnnnnnnnnnnnnnnnnnnnnnnnnnnnnnnnnnnnnnnnnnnnnnnnnnnnnnnnnnnnnnnnnnnnnnnnnnnnnnnnnnnnnnnnnnnnnnnnnnnnnnnnnnnnnnnnnnnnnnnnnnnnnnnnnnnnnnnnnnnnnnnnnnnnnnnnnnnnnnnnnnnnnnnnnnnnnnnnnnnnnnnnnnnnnnnnnnnnnnnnnnnnnnnnnnnnnnnnnnnnnnnnnnnnnnnnnnnnnnnnnnnnnnnnnnnnnnnnnnnnnnnnnnnnnnnnnnnnnnnnnnnnnnnnnnnnnnnnnnnnnnnnnnnnnnnnnnnnnnnnnnnnnnnnnnnnnnnnnnnnnnnnnnnnnnnnnnnnnnnnnnnnnnnnnnnnnnnnnnnnnnnnnnnnnnnnnnnnnnnnnnnnnnnnnnnnnnnnnnnnnnnnnnnnnnnnnnnnnnnnnnnnnnnnnnnnnnnnnnnnnnnnnnnnnnnnnnnnnnnnnnnnnnnnnnnnnnnnnnnnnnnnnnnnnnnnnnnnnnnnnnnnnnnnnnnnnnnnnnnnnnnnnnnnnnnnnnnnnnnnnnnnnnnnnnnnnnnnnnnnnnnnnnnnnnnnnnnnnnnnnnnnnnnnnnnnnnnnnnnnnnnnnnnnnnnnnnnnnnnnnnnnnnnnnnnnnnnnnnnnnnnnnnnnnnnnnnnnnnnnnnnnnnnnnnnnnnnnnnnnnnnnnnnnnnnnnnnnnnnnnnnnnnnnnnnnnnnnnnnnnnnnnnnnnnnnnnnnnnnnnnnnnnnnnnnnnnnnnnnnnnnnnnnnnnnnnnnnnnnnnnnnnnnnnnnnnnnnnnnnnnnnnnnnnnnnnnnnnnnnnnnnnnnnnnnnnnnnnnnnnnnnnnnnnnnnnnnnnnnnnnnnnnnnnnnnnnnnnnnnnnnnnnnnnnnnnnnnnnnnnnnnnnnnnnnnnnnnnnnnnnnnnnnnnnnnnnnnnnnnnnnnnnnnnnnnnnnnnnnnnnnnnnnnnnnnnnnnnnnnnnnnnnnnnnnnnnnnnnnnnnnnnnnnnnnnnnnnnnnnnnnnnnnnnnnnnnnnnnnnnnnnnnnnnnnnnnnnnnnnnnnnnnnnnnnnnnnnnnnnnnnnnnnnnnnnnnnnnnnnnnnnnnnnnnnnnnnnnnnnnnnnnnnnnnnnnnnnnnnnnnnnnnnnnnnnnnnnnnnnnnnnnnnnnnnnnnnnnnnnnnnnnnnnnnnnnnnnnnnnnnnnnnnnnnnnnnnnnnnnnnnnnnnnnnnnnnnnnnnnnnnnnnnnnnnnnnnatgaaggataaaagccccaaatggtggtaacttataatagcactaatgctttaaggtttggtcccactgtcacctaggtgagcgcatagagccagtcatgctaaatgctacatactccaactgaaattttgaggaagcaga

SEQ ID NO: 33894 - DNA, 551 bp, Macaca Mulatta
tttctgttaattgggtgaaatcaagcaccagcaggcaagcagaaaaacaactggggaatttattgactcatttagttattctttctacttttatttccttctctaactgttgatcttactaaaatggtaatatttgcttcttgcctttatgttactggaaaattaagacatgtaaatggacaagtgcaataaagtttcctaaatgctggaatcatgtctgctttgggtacagcagggaaattaaagaagggaatgtccagtgctaaagagggaatcttaagaaactttagagaagagatgatgctgaaaccaacaaatgcagagttacgtgttttccaggctagccattaagtaagggaattccagttagaagaagctacagtgaagaaggcaaggacatgctgctgtgagttagtatggctggcagggaactggagggaggtacataagtaatgagactatggtaaggaaagctcttccaatatcccccaaaaatgttttatattttgttcgctaaacaatcctagaagcaacaggtccaaaacaacatt

SEQ ID NO: 33895 - DNA, 1153 bp, Macaca Mulatta
  misc_feature (1)...(1153): n = A,T,C or G
attccagaggagagtcagccacccagcaagcaggtgaagccactcttccgccacttccgccggatagactcctgtctgcagacccgcgtggccttccggggctctgatgagannnnnnnnnnnnnnnnnnnnnnnnnnnnnnnnnnnnnnnnnnnnnnnnnnnnnnnnnnnnnnnnnnnnnnnnnnnnnnnnnnnnnnnnnnnnnnnnnnnnnnnnnnnnnnnnnnnnnnnnnnnnnnnnnnnnnnnnnnnnnnnnnnnnnnnnnnnnnnnnnnnnnnagagaaggtccttctccagcccactgaggactgtgttttcaccacactgggcatcaacagccacctgtttgcctgtactcgggacagctatgaggctctggnnnnnnnnnnnnnnnnnnnnnnnnnnnnnnnnnnnnnnnnnnnnnnnnnnnnnnnnnnnnnnnnnnnnnnnnnnnnnnnnnnnnnnnnnnnnnnnnnnnnnnnnnnnnnnnnnnnnnnnnnnnnnnnnnnnnnnnnnnnnnnnnnnnnnnnnnnnnnnnnnnnnnnnnnnnnnnnnnnnnnnnnnnnnnnnnnnnnnnnnnnnnnnnnnnnnnnnnnnnnnnnnnnnnnnnnnnnnnnnnnnnnnnnnnnnnnnnnnnnnnnnnnnnnnnnnnnnnnnnnnnnnnnnnnnnnnnnnnnnnnnnnnnnnnnnnnnnnnnnnnnnnnnnnnnnnnnnnnnnnnnnnnnnnnnnnnnnnnnnnnnnnnnnnnnnnnnnnnnnnnnnnnnnnnnnnnnnnnnnnnnnnnnnnnnnnnnnnnnnnnnnnnnnnnnnnnnnnnnnnnnnnnnnnnnnnnnnnnnnnnnnnnnnnnnnnnnnnnnnnnnnnnnnnnnnnnnnnnnnnnnnnnnnnnnnnnnnnnnnnnnnnnnnnnnnnctgacttttctgcacgaagggagtaagacccttgtagatggtttggtgaacattgagaagctcattcagtggccgaaaaagtgagaacaatccgcaaataccggagccggcccctttgnntggacatggaggcatccccccatcacctgcagaccaaggcctacgtgcgccagtttcaggtcatcgacaaccagaacctcctcttcgagctctcctacaagctggaggcgaatagtcagtga

SEQ ID NO: 33896 - DNA, 576 bp, Macaca Mulatta
  misc_feature (1)...(576): n = A,T,C or G
agttcaacatctaatatataaagattgctctgactactatgcaataggcaaaagaagcagtgagacctacagagttacacctgatcccaaaaatcgtagctttgaagtttactgtgatatggagaccatggggggaggctggacagtgctgcaggcacgtctcgatgggagcaccaacttcaccagaacatggcaagactacaaagcaggctttggaaacctcagaagggaattttggctggggaacgataaaattcatcttctgaccaagagtaaggaaatgattctgagaatagatcttgaagactttaatggtgtcaaactatatgccttgtatgatcagttttacgtggccaatgagtttctcanataccgtttacacgttggtaactataatggcacagctggagatgcgttacgtttcaacaaacattacaaccatgatctgaagttttttcacaccccggaataaagacatgatcgatatccttctgggaactgtgggctgtactacagttcaggctggtggttgacgcatgtctttctgcaaactaaatggcaaatatatcaccaaat

SEQ ID NO: 33897 - DNA, 145 bp, Macaca Mulatta
  misc_feature (1)...(145): n = A,T,C or G
cacttacaaagagaacggtcctttactgagcacagagctaggttttatgctgctgaaattgctagtgcattgggttacttacactccatcaaaatagtatacagnagagacttgaaaccagaaaatattcttttggattcagtag

SEQ ID NO: 33898 - DNA, 1881 bp, Macaca Mulatta
  misc_feature (1)...(1881): n = A,T,C or G
gggttagagccttgcttacaacttaaagaactttggattgctgagtgctgcatagagnagaaaattgaaggtcttcaggaatgtagaaatttggaaaaactatatttatattntaataaaatntccaaaatagaaaatttagagaaattaatcaaattgaaggttctttggctgaaccacaatacaattaaaaatattgagnnnnnnnnnnnnnnnnnnnnnnnnnnnnnnnnnnnnnnnnnnnnnnnnnnnnnnnnnnnnnnnnnnnnnnnnnnnnnnnnnnnnnnnnnnnnnnnnnnnnnnnnnnnnnnnnnnnnnnnnnnnnnnnnnnnnnnnnnnnnnnnnnnnnnnnnnnnnnnnnnnnnnnnnnnnnnnnnnnnnnnnnnnnnnnnnnnnnnnnnnnnnnnnnnnnnnnnnnnnnnnnnnnnnnnnnnnnnnnnnnnnnnnnnnnnnnnnnnnnnnnnnnnnnnnnnnnnnnnnnnnnnnnnnnnnnnnnnnnnnnnnnnnnnnnnnnnnnnnnnnnnnnnnnnnnnnnnnnnnnnnnnnnnnnnnnnnnnnnnnnnnnnnnnnnnnnnnnnnnnnnnnnnnnnnnnnnnnnnnnnnnnnnnnnnnnnnnnnnnnnnnnnnnnnnnnnnnnnnnnnnnnnnnnnnnnnnnnnnnnnnnnnnnnnnnnnnnnnnnnnnnnnnnnnnnnnnnnnnnnnnnnnnnnnnnnnnnnnnnnnnnnnnnnnnnnnnnnnnnnnnnnnnnnnnnnnnnnnnnnnnnnnnnnnnnnnnnnnnnnnnnnnnnnnnnnnnnnnnnnnnnnnnnnnnnnnnnnnnnnnnnnnnnnnnnnnnnnnnnnnnnnnnnnnnnnnnnnnnnnnnnnnnnnnnnnnnnnnnnnnnnnnnnnnnnnnnnnnnnnnnnnnnnnnnnnnnnnnnnnnnnnnnnnnnnnnnnnnnnnnnnnnnnnnnnnnnnnnnnnnnnnnnnnnnnnnnnnnnnnnnnnnnnnnnnnnnnnnnnnnnnnnnnnnnnnnnnnnnnnnnnnnnnnnnnnnnnnnnnnnnnnnnnnnnnnnnnnnnnnnnnnnnnnnnnnnnnnnnnnnnnnnnnnnnnnnnnnnnnnnnnnnnnnnnnnnnnnnnnnnnnnnnnnnnnnnnnnnnnnnnnnnnnnnnnnnnnnnnnnnnnnnnnnnnnnnnnnnnngagctaccgaaggatgctggaatgccttttttatgtttttgatcctgaagttacagtgaagaaaaaacatcttctacaaatacttgaaaaaggattcaaagagagtgaaacaagcaannnnnnnnnnnnnnnnnnnnnnnnnnnnnnnnnnnnnnnnnnnnnnnnnnnnnnnnnnnnnnnnnnnnnnnnnnnnnnnnnnnnnnnnnnnnnnnnnnnnnnnnnnnnnnnnnnnnnnnnnnnnnnnnnnnnnnnnnnnnnnnnnnnnnnnnnnnnnnnnnnnnnnnnnnnnnnnnnnnnnnnnnnnnnnnnnnnnnnnnnnnnnnnnnnnnnnnnnnnnnnnnnnnnnnnnnnnnnnnnnnnnnnnnnnnnnnnnnnnnnnnnnnnnnnnnnnnnnnnnnnnnnnnnnnnnnnnnnnnnnnnnnnnnnnnnnnnnnnnnnnnnnnnnnnnnnnnnnnnnnnnnnnnnnnnnnnnnnnnnnnnnnnnnnnngtcaagtcaccctctttattttctgtattcaacaatgttattctagaagaaagcaaaaaaaacccagaaggatcagtattttccaaggatttgaaatttgatgatgaagttataanaatggagcccagaatcaaggcccgaccaaaactgattagtttggatgataaaacaatactttcccttggcaaaactagcgtttacagtcatattgtg

SEQ ID NO: 33899 - DNA, 446 bp, Macaca Mulatta
ttctttaggccttagcttctgttcctccagtagtaaaacagttaaaatatgcttcactagtcacacattccccataccatttcatgttattcacattccctgtaccatttcttgttattcacatgtacagtaaaatcattgttttttaaagtatttttattttggttctctcattctcttccctatttatcctgtacactgtctgttatgattgcctacctctttcgctatcctatagcatcagagacttagggttctgggtaagcccaagtctgctactgccaccgagcagtgccaggcatattaaagggcatgactccctacatgtaaaatgaggaagctaaactggaatgaagttaacaataaaattatctttttttatggttcttaggtagataactataggcatagcaaaatttcaaagggtttagtaattgaaactggtt

SEQ ID NO: 33900 - DNA, 667 bp, Macaca Mulatta
  misc_feature (1)...(667): n = A,T,C or G
gccccaatgtgcctggcagtccctgaatattcctttgcccagatctgatgctgggactaagagggacataggcacacagactgttggcctgttctacccatccggcaagctgctagcaaaaaaggaactggaaatagcctctcaaaagcagaggcaggagaaaatgagtgaccataaaccgctcctcacagccatcagccnnnnnnnnnnnnnnnnnnnnnnnnnnnnnnnnnnnnnnnnnnnnnnnnnnnnnnnnnnnnnnnnnnnnnnnnnnnnnnnnnnnnnnnnnnnnnnnnnnnnnnnnnnnnnnnnnnnnnnnnnnnnnnnnnnnnnnnnnnnnnnnnnnnnnnnnnnnnnnnnnnnnnnnnnnnnnnnnnnnnnnnnnnnnnnnnnnnnnnnnnnnnnnnnnnnnnnnnnnnnnnnnnnnnnnnnnnnnnnnnnnnnnnnnnnnnnnnnnnnnnnnnnnnnnnnnnnnnnnnnnnnnnnnnnnnnnnnnnnnnnnnnnnnnnnnnnnnnnnnnnnnnnnnnnnnnnnnnnnnnnnnnnnnnnnnnnnnnnnnnnnnnnnnnnnnnnnnnnnnnnnnnnncctgaaaacagactcctgctgaaggaagtcggacccacgggggaaggaagagtctctgtgattgaacagctgctggatgag

SEQ ID NO: 33901 - DNA, 175 bp, Macaca Mulatta
cgtgagggagggaagggtctgctgaaggcattcccgcccacactgcgcccgtggagcccacgtgcccagctgggcacccatccaactgctgcggggcactgacaccaggccaaagagagcccagacagctgggtcaggacaggtggccccaaaattgtccaaaataggtctatgg

SEQ ID NO: 33902 - DNA, 142 bp, Macaca Mulatta
gattcaggggtcagtttacttcataaaaaatcattagaaaagcaagaattatgccaaagacttaaagaacaattagatgctcttgaaaaagaaactgcatctaagctatcagaaatggattcttataacaatcaactaaagg

SEQ ID NO: 33903 - DNA, 337 bp, Macaca Mulatta
ggtcttccacatgcgggcgcagcacttcatcttcatgtgccctcgctgtggccagcagttcaaccacagcagcaacctcaaccgccacatgaacgtgcatcgtggtgtcaagtcacactcgtgcggcatctgcggcaagtgcttcacacagaagtccaccctgcacgaccacctcaacctgcactcgggagcgcggccctaccgctgctcctactgcgacgtgcgcttcgcccacaagcctgccattaggcggcacctcaaggagcaacacggcaagaccacggccgagaacgtgctggaggccagtgtggccgagatcaacgtcctcatccgctag

SEQ ID NO: 33904 - DNA, 1427 bp, Macaca Mulatta
  misc_feature (1)...(1427): n = A,T,C or G
gacccaccgctgccctcagctccgagtccagcgcgagnnnnnnnnnnnnnnnnnnnnnnnnnnnnnnnnnnnnnnnnnnnnnnnnnnnnnnnnnnnnnnnnnnnnnnnnnnnnnnnnnnnnnnnnnnnnnnnnnnnnnnnnnnnnnnnnnnnnnnnnnnnnnnnnnnnnnnnnnnnnnnnnnnnnnnnnnnnnnnnnnnnnnnnnnnnnnnnnnnnnnnnnnnnnnnnnnnnnnnnnnnnnnnnnnnnnnnnnnnnnnnnnnnnnnnnnnnnnnnnnnnnnnnnnnnnnnnnnnnnnnnnnnnnnnnnnnnnnnnnnnnnnnnnnnnnnnnnnnnnnnnnnnnnnnnnnnnnnnnnnnnnnnnnnnnnnnnnnnnnnnnnnnnnnnnnnnnnnnnnnnnnnnnnnnnnnnnnnnnnnnnnnnnnnnnnnnnnnnnnnnnnnnnnnnnnnnnnnnnnnnnnnnnnnnnnnnnnnnnnnnnnnnnnnnnnnnnnnnnnnnnnnnnnnnnnnnnnnnnnnnnnnnnnnnnnnnnnnnnnnnnnnnnnnnnnnnnnnnnnnnnnnnnnnnnnnnnnnnnnnnnnnnnnnnnnnnnnnnnnnnnnnnnnnnnnnnnnnnnnnnnnnnnnnnnnnnnnnnnnnnnnnnnnnnnnnnnnnnnnnnnnnnnnnnnnnnnnnnnnnnnnnnnnnnnnnnnnnnnnnnnnnnnnnnnnnnnnnnnnnnnnnnnnnnnnnnnnnnnnnnnnnnnnnnnnnnnnnnnnnnnnnnnnnnnnnnnnnnnnnnnnnnnnnnnnnnnnnnnnnnnnnnnnnnnnnnnnnnnnnnnnnnnnnnnnnnnnnncagactgccggctgcacatctgcctgtactaccgggaaatcctcgtgaaggagctgaccacgtccagccccgagggctgccggatctcccatggacatacttacgacgccagcaacctggaccaggtcctgttcccctacccagaggacaatggccagaggaagaacattgagaagctgctgggccacctggagaggggcgtggtcctctggatggcccccgacgggctctacgcgaaaagactctgccagagccggatctactgggacgggcccctggcgctgtgcagcgaccggcccaacaagctggagagagaccagacctgcaagctctttgacacgcagcagtttttgtcagncagagttgcaagcgtttgctcaccacggccgctccctgccacgattccaggtgactctgtgcttcggagaggagtttccagaccctcagaggcaaaggaagctcatcacagctcacgtngtagaacctctgctcgccagacaattatattattttgctcaacaaaaccagtggacatttcatgagggggtacgatttaccggaacccatcagcaatccagaagataccacagatc

SEQ ID NO: 33905 - DNA, 1024 bp, Macaca Mulatta
  misc_feature (1)...(1024): n = A,T,C or G
tcgcatcagtattaatgtttttgcatactttgcatctttattcaaaaatgtaaactttctttgtcaatctatggacatgcccatatatgaaggagatgggtgggtcaaaaagggatatcaaatgaagtgataggggtcacaatggggaaattgaagtggtgcataacattgccaaaataatgtgccactagaaatggtgtaaagnnnnnnnnnnnnnnnnnnnnnnnnnnnnnnngttattaccatgtattttgtgaggcaggtttacaacactacaagtcttgactaagaaggnnnnnnnnnnnnnnnnnnnnntccaatacccagnnnnnnnnnnnnnnnnnnnnatcttagtcttaggagttcatttaaaccataggaacttttcacttatctcgtgttagctgtaccagtcagtgattaagtagaactacaagttgtataggctttattgtttattgctggtttatgaccttgatagagtgtatttttgtattaccagcaggggtgtttttaactgtgactattgtgttgagacagttcttgttatttataagcactttaagttttgcgcttttccagccgtgccctttttttttagaactgccgtttggctttgggagcttttttgtatgcaatttttttgggctccgtgtaagttttttgggaacgttgaagtggaggttcctgttttaatcggcggggggtgttgttttttctgatttgcatgacgataatggtgttggcttttttacgggtcagccgttttttctgagtttggtggtaatgtgatatgttttctggatggaatagtgagttgtgtgttggtggtggttgcggtgagtcagtgagttgtggtcagtacagaaggatgaaaactattgaggtgagttagatttttccaagagttcttgctggatttttggttagacggcattcatgtgcggtcgagggtctaatgtcaggggggatgtggtgtgtttaatatgaacaaaaaattaaatgactaatgtgtgttgtttga

SEQ ID NO: 33906 - DNA, 1022 bp, Macaca Mulatta
ggggggtcctggtttcttttgagatgaatggaaatatttactaagggattaattccctttatttcaaattggctattttcagatttctaatataaagttatatgaagcaatttttttcttttgtcttgattagccggaaacccttgctgcatttacagggtattcattaagtgaaattgtgccttgcctgagtgagcttcataaagcgtaccttgatataccccatcgacctcagcaagcaattagggagaagtacaaggcttcaaagtaagtcactgacattttcatatcttagctctctatttaaagcttaatgggttatagtaatggttactagattaaaaatagattaaattgtatatctggtgccaggttggaaaagtaaggttacgtgtacaaatttacaaataaatttgaagagatctagatttataatttgtcagcttttaatacttgtagtcagccagcttccttccattctgttaaaattactggaaagttttctgtggcctgagattttattaaactaagtccttggcttgtgctgaccttgcttttggtcttgtttcaggtacctgcgtgtgtccctcatggagccaccttcagttcttcttctacagtaaggttctgaatggaagcacttccagaacttcacctccacgtcagaagtgccattaattgtcagaggcttctgcagtttggatcaactaatgttgtttacaatatagatgacatttgaaaaatgtaaatgaatttaggttcccttagactttagtagattgtaatatagtccaacattttttaaacaataaactgcttgtcttatgaccatgtgttagacttatttactaattgtcatggctgacatattcgtctggaatgtttgttgagagtattaaaagtgttatctctatttcaagcatcttcaaaactggttttgtaaacaaggcatgctattaggattaagtgttccaaggcatccaggaagattcatggttgataaatggccactctgaggcttt

SEQ ID NO: 33907 - DNA, 413 bp, Macaca Mulatta
acaagaacttctgttccctgcaaaatggttagaaagaaacagctggattacgttcctctaaaaaccacctgaatgtaaccttcgcagggcgtcaagtcgttttttcttgccttcggttgtggcttctacggctttcccgatttgcacatttcctgggggactatgaaagtgagtggggtattttgttctggcattgaaagaaaagcaagcaaacaaaaacacagcttccgatgccaaacatgttcccttctttaattccttggaactggaagtattattcctaagtcaagtgcaaaatgcttccgctctctgtcttcctgatagggatgtttaatgtaagtagcatattaatttcagaacatcgatttcttatctacgtgtctgacgtgccatctttaatgttaaaattaagc

SEQ ID NO: 33908 - DNA, 146 bp, Macaca Mulatta
cttattcttttaagcaaaaaaggcaactcaaagaaaagctactttactatgatattgttgtgattattgtaaaaaacattattaattctcatttctaccacctagaatacacaagatttgccagatttccttctgtgcctttgaaa

SEQ ID NO: 33909 - DNA, 545 bp, Macaca Mulatta
  misc_feature (1)...(545): n = A,T,C or G
atggcagaactctttatggaatgtgaagaagaagagctagagccatggcagaagaaagtagaagaaactcaggacgaggatgacgatgaactgatctttgttggagagatatcaagttcaaaaccagccatatcaannnnnnnnnnnnnnnnnnnnnnnnnnnnnnnnnnnnnnnnnnnnnnnnnnnnnnnnnnnnnnnnnnnnnnnnnnnnnnnnnnnnnnnnnnnnnnnnnnnnnnnnnnnnnnnnnnnnnnnnnnnnnnnnnnnnnnnnnnnnnnnnnnnnnnnnnnnnnnnnnnnnnnnnnnnnnnnnnnnnnnnnnnnnnnnnnnnnnnnnnnnnnnnnnnnnnnnnnnnnnnnnnnnnnnnnnnnnnnnnnnnnnnnnnnnnnnnnnnnnnnnnnnnnnnnnnnnnnnnnnnnnnnnnnnnnnnnnnnnnnnnnnnctatttgcaaaatctgtgaattatcatttgaaacagagcatattcttttacaacatatgaaggacacccataaacctggtgaaatgccatatgtttgccaggt

SEQ ID NO: 33910 - DNA, 1046 bp, Macaca Mulatta
  misc_feature (1)...(1046): n = A,T,C or G
ctcnttctgtgttatcttctgtctgcctgttgctgtcgtcttatcttcactatcgtntgctcgtcgtccgtcgttattcggcgtttcgttntcctttgtcccgtngttttctccctcgttcccgngggtgtttcntttgttgtcgtcccgtttcatgctgtcgttggttgccggtcgggctnggttgtcgttgtctctccctgttttgccgtttcgtcactcgtcttcttcggtttttcggtgcttgctctttcttctttgtcntcttgtgtcttcgttcttcgtgtttgcttcttgcattccttccatgtttcttcttgtatctcgtctggtctttctctctttgtttgtccgtctcttgctttttgtccctgctctgttccgcttttgttctttcgtggtgtcgccncgcncgctgctctgtgcgtgttgtgtcggcggttgccgtggggtctgctccttcgtggtgtctttcggctcctgcttcgtccgctgtttttgtcgcttctcggctgtccgtcgtccgggcttctctctgtctcttctctctcttctcgcgctgttttttcctgttgttctgtcttctgcgtttttccgcgttgttttttgcgcgtcgtgctggggcgttgtccgtcgtgtcccttttctgttctctgtctnggcgtcgtgcnttgcgttttcttttctgctttctgttttttctcggttttgctttgtattctgcccgtcttggatcgcttttgtgtcttttcttttgtttcgcgttggcccctttcgctgggccggcgatcttcgtgcccttctgccttcctgctttcttccacccctttcgtcacccttgggcnnnnnnnnnnnnnnnnnnnnnnnnnnnnnnnnnnnnnnngtggtggcacatgcctataatcacagctgagatttcaggaggctgtggcacaagaatcacttcaacttgggggtcagaggttgcagtgagcagagattgagccactgtactacagcctgggcaccagagcagcgatactccatctcaaaaataataatagtcc

SEQ ID NO: 33911 - DNA, 892 bp, Macaca Mulatta
ggggaatctatagaaagcagacacctagggagtccagcaaacctcaggtgcaagataaacacatcaaacctgtttctacctcctggaaatgaacatatagacacaaaagttaaaaatatgtactgttaacaattgcttaaaaagtgaaatacttaggtttaaatctaacaaaataggcaaggacttgtatgctgaaaattacaaaacatgatgaaatcaaagatttaaatagacatgccatgttcacggattgttagacacaatagagtgaagatatcaattctcctcagatttacaggttgaatgcagttcctatcaaaatcctcaaagatgttttgtagatgtagacaaggttattctaaaatccgtataaaaatttatagcaaaaatattttgaaaaagaataaagtgagaagaggcatctgtccacctgatttcaaagatctactatatagccgatggtgaaaccaagaagtgcaattgctggggcaggaggggaacagaactcctccacatttggaccagaagtcccaatgaaactatccatgggggaaaaccaggggaacccaccacctaaaattaatttggcccccaaggccttgaaacatatttaaaagggtggcgaaaagaaagtgaaatttcaaaattggggagggaaaaggggaccaaaccctatttcccaagcccataaccgggaggcccggggaaaaccagccttgggggaaaaaatagagaatagggcctgcgatgatgaaaaagaataaaaatcttctcgtaaaatcagatttttttcccttgggaggcttttaaaggaccaacgagaggagaaaagggggggactttcaacagccccccgggtaaaatcctccaccacacaccatatgattaggtg

SEQ ID NO: 33912 - DNA, 739 bp, Macaca Mulatta
gggcggagcccttggggattcacggcaccctcgccacagggccccggagacagcggctgatttatctgtgcatcgacatctgcttcccaagcaacatctgtgtgtcagtctgcttttattacctcccagactgagccccgacctggcccagcccggtccctgtccccaatccagcgggctggccaggtcacccgcaccagggaggatagctgccggcagggactaataaacccttccacctggccacagtggtgttctctgtggactaaggccctgaaacgcggcagggaggggacaggaaacacactagcttaggggtgggcaccagcctcacacccctcagcagctttgggcccttggctgactcccaggcagtgcaggctagcccagtccaggagtgtgcagcctggcttgggtcgagctgtcacatctggataagcaactgggggctgagagtcccagggcggcctggcccagcaggtcaaggtgccacagggggccatcaggtccagctggtgtaggccggcagtagggcctgttctgacctgggtgctgcatgggaccctccagctgccaccacctgcaccaggcagtcctgaggggtcacaggctagcccagcacactgtcgttgaacgccaggcagacgacagccttctggtggccgccatactctctcttgatctctccagtctccacacaccagagccgggccaggttgtccgaggaagctggaggggg

SEQ ID NO: 33913 - DNA, 198 bp, Macaca Mulatta
aggctgtggacaaagaaaatttagatgctaaaatttctagcttgaccagtgagattatgaaacttgaagaacagatcactcaaataaaagacagaagtttacctgctgtggtaagagagaatgcccaattgttgaatatgccagtggtaaagggagattttgatctgaagagtgctaaacaagattattacacagcaa

SEQ ID NO: 33914 - DNA, 651 bp, Macaca Mulatta
aacagagtgttagatcttatacaacatactgaaaatgaagaaagctgtttcccatattctaaccaagtctttgagttctctacaatgtcatacgaaagacaccaactctgctacttgtttggatagtcctcttcctttacgccagacattataactaatattccaaagcaatagataggaactttagaacacttaagtataacttattattttagttcttcagcaatagcacatacagacggaagggatctatttcatgagtggtaaaaattttaatgttctctatgtcatgaaacaccgttttaatcagaattgtgattttaaaaatgtcacctataactcgggttttacaagatcctctgaattgaaaacttctgataaggcatgtcattattatgtacttattattccttaattgtggatttaaaagattggaatagtacttgacagagtaaatgcttcatctctttgttcatatttactttttcttccacaagcctctaaaggatttatattccagcttggtcccaagaggataactctttatacttctctgcattcttttaaggacttgcaaggtcttccggaatgactctctttcctaagagctattttctccgtaagtgtgaagatacctctagtgtgctcttt

SEQ ID NO: 33915 - DNA, 867 bp, Macaca Mulatta
  misc_feature (1)...(867): n = A,T,C or G
acgaggcagaacatcccagcatagatcaaacttcagttttactgtactttcttgtctgcacagaaaatcccggtacaacttccaatgctgagaaaatcctcagaggacgttcccactttgctcctgtgatggatgacagaagagcaattcatcaacaattggtcaaccacaatcctcggaccttgggaattaaaaaaacggtacacagaactaagacagtgaaaaaaatcagtaccacatttggacagtatcggtgagaaaacgtaattataaaaatgatgccatgacaaattccacagatcagtttagttgtatagttgttaaagttatatgtgatatcaatgaagaaatatttgtagcatgtaaacggttatttctgtttcttaagaagtattgttagtgggctattaaacttgaatttttctttttattaatgcagtatgttttttttattcaagtatgaacttgttgagaaactatagtaatatgatttttgagagatttatgttctactttaaatgtgaattgtacttctgagctgccttaatgccagatcatttatatttgttacgaggaaataatcaagatcactcatatcccaactgaatctgaggttttataaatctctcaaactattgctgagagcctgattgtggaaggaagcgagatgcaccttatttccagaaatctgtgaaaagactcctagcatgtccctccagaggagaaggagcctgagaggttcccctgtctcccggagcgtgcatgcctgtgtgagtcccctgtgaacccccagggggcgcccccacaagaggatactctcatagtgggagagnggcaggagtncacaacgcgtactgctcttgagac

SEQ ID NO: 33916 - DNA, 198 bp, Macaca Mulatta
tgcgggtggctgtggccggctgctgccacggcgagctggataaaatctatgagacgctggcgctggcggagcggcgcggcccggggcctgtcgacctcttgctgtgctgcggcgacttccaggcggtgcgcaacgaggcggacctacgctgcatggccgtgccgcccaagtaccgccacatgcaaaccttctacaggt

SEQ ID NO: 33917 - DNA, 636 bp, Macaca Mulatta
  misc_feature (1)...(636): n = A,T,C or G
tctgaagttttgtctttataatcaataatcatacacaaacctagttaagaaactcattttatagtccttggggactgaacactgtgaaataaacttntactcttcagatgtgcttggattttgttttaaattaagaactacagaaatacataccatttctagtggtagaggaaaatattgccacccagaactttctgaatgtctctttctgccctaggtccatttgtgatgaacaccaatgaagagatttctcaagccattcttgatttcagaaacgcgaaaaatgggtttgaaagggccaaaacctggaaatcaaagattgggaactagtggaaagcagaagagcaggtctcgatgtgtcctagaattttgccatttatgagactgagccgttgaaggcattccatttctaaagcttatttagctggtgcttctaaagaattccacactaaagcgataacatggtttttgtaacaagaaatgtagtatatttcctggcacatgcaaataaacctaatcattgtttctttaaaaatcagtgtttttcatttgaaatacctaagttactaagcttctgcttaaaaagtcattttgtgtatgtttgcctttttttgcatgtatggatggatgttttta

SEQ ID NO: 33918 - DNA, 5262 bp, Macaca Mulatta
  misc_feature (1)...(5262): n = A,T,C or G
agacctggagcgtttggtgccttcagggcagccaggcatttgcttggtctcccctaatcctgggaacctgctgtgttgcagacgaggcttctcccacccgtgtggctgggcctgccgctgggacccctccctggcagatgggggcttatcccacangacctgaccctgcagctgctggctgtgcggaggaagaacgggctacaggaccccggtctacagcannnnnnnnnnnnnnnnnnnnnnnnnnnnnnnnnnnnnnnnnnnnnnnnnnnnnnnnnnnnnnnggaattatcagccaggctgctgtcgatccacagtgaccaggaccggatcgtggtgacgtttaagacttttgaagaaatctggaagttttccacctaccacgctcngcttcactcatcactgcctggcaaacctgcttatggaccaggccttctggctgctctcgcccagtgaggaggaggagacggccatccaagtccatgtggatgagaacgccttgaggctgacccacgagagcctcctcgtccaagaagnagcaaagacctccctcttctggttccaggtgggctcttagggtcccccaggaccccatcgatgacgccatgggtggccctgtgacgtccgacaacctgctgatggngctgtgggcctggcctgggccttggcagacttccagggctcggggcccgaagagatgaccttccaaggtggcgacctcatcgagatccttggggcgcaggtgcccggcctgccctggtgcgtgggccgacacgcagcctcnnnnnnnnnnnnnnnnnnnnnnnnnnnnnnnnnnnnnnnnnnnnnnnnnnnnnnnnnnnnnnnnnnnnnnnnnnnnnnnnnnnnnnnnnnnnnnnnnnnnnnnnnnnnnnnnnnnnnnnnnnnnnnnnnnnnnnnnnnnnnnnnnnnnnnnnnnnnnnnnnnnnnnnnnnnnnnnnnnnnnnnnnntggcgctgccatggctgagcagcgtgttctgcagctttagcgatgaggagctgactgggtgtctggcacaggcccgaggggcggccaagaaagctggcctcgtcacggccctggccagactctgcttcctcctggggcggctgtgcagcaggaggctcaagctgtcccaggcctgggtgtactttgaggaagcaccgggggccctggagggcagctttggggacctgttcctggtggtggctgtgtacgccaacctggccagtatttactggaagcagaagaaccgagagaagtgtacacaggtggttcccaaagctgtggccctgctcctggggacacctggccacatctgcagcactgaggtggagggggagctcctgcagctggtgctacggtgggcggtgggtggccagagcctgcaggccgaggcccgggcctgcttcctgctggccaggcaccacgtgcacctcaagcagcccgaggaggtccctgcccttcccagagcggctactgcttttgcacagggtctcggtagccccgagggctgcgtgtctctcagactgctccgtactcctggctgacatctacagacacaagtgcctgccccacctggtgctgagctgtgtcaagatggcctcattgaggacacagcactcgctggccagctcgctgaggagcgtgatcctggtgctccagaacgccctccagccccacagcctccccacccagacttcccgctacctcaggcgagcgctggcctccctaaccccgggcgcaggccaggcgctgcgcggccttctccacgccagcctggcccagctgtacagccaccatggctaccatggcccagccatcaccttcatgacgcaggcggtggaagccagtgctgttgccggagtccgtgccatcgtggaaaaactgttggccctggcctggctgcacgtgcttcatggacagagcctcttgtagccatggacatcctgcagtctgtccaggatgcagtggtggtcagcgaggaccaggagggtgtgattgccaacattggtggccgtggctctgaagaggacgggccagacgaggcaggcagcctagggctactaccgtaccctgcgggtggctcaggacctgggccagcggaggaaccaggcagtggtgctggccaacttcgggaccctatgtctgcacgcgggtgccagcaggctggcccagcaccacctcctggaggccgtgcggctgttctcgaggctgccctgcagggagtgtggccgggacttcacccacgtgctcctgcagctgggccacctctgcacccaccagggtccggcccagcagggcaagggctgctatgagtgggcccttctggtcgctgtggagatgggccttgtggagannnnnnnnnnnnnnnnnnnnnnnnnnnnnnnnnnnnnnnnnnnnnnnnnnnnnnnnnnnnnnnnnnnnnnnnnnnnnnnnnnnnnnnnnnnnnnnnnnnnnnnnnnnnnnnnnnnnnnnnnnnnnnnnnnnnnnnnnnnnnnnnnnnnnnnnnnnnnnnnnnnnnnnnnnnnnnnnnnnnggtcatctcaaccccagcagaggcagtacgtgcacgtgcactctgggctgttcttcctactatggtggcctttgtcatctgacctctgcctgccccgagtcttcactcctggccttcatctgtccccttaaatgtgaccacagcagccacctatggcttctctcccacagaagacagagccaattgtgtcacctgcttccccggggcagggtttcaaggtctcacgtcccatatgtggcccactcggcttcccccgaacaggctgacctggtggggtaaccatggccctggccaccccaaccgcagggcctggtgacattgctgcagtcacaccccctcgagtgtcggacttactgagagagcagggaaggagccagattccatggggacctgggagactggctccagtcttggtctcaggttcacagaaggaaaatgggccagtgtgctagagccatgcttctcaaagtgtagtccctggaccagcagagcagcatctatgtcacctaggagcctgtggcaagtgggagttctagggcctgccccaggcctgtggagccggaagctctgggggcagggccagcaagctatagggacaggcctccgggtgactgtgatgcctgcacaccttgagaaccatcggcctagatagcctctgaacactaacggctcctggtgcatctggagaagacacaggccatgtctgggaggcaggggagatggactagcacactcctcctgccacagggcagcatgatgctcgattccctcagaaggatgtccttcatcttttccatgccgtgtgtgtgttcaccctggccctcccagcagcctgggaagggcagaacactgcacacacaagagggccgttcccagtccccacattccagattcatgtgtcaccagacctatgggaggaggcagactggttccaggaggatgagagcccttattctgacacctgtgtctgattccagggcctacaaatccgctctggactacaccaaatgaagtctggggattttcattgacctccagaagaaagaggtggcggcacatgcctggctgcaagcagggaagatctattacatcctgcagcagagcgagttggtggacctgtacatccaggtgncaggtggcacagaatgtggtcctgtacacaggcgaccccaacctggggctggagctgtttgaggcagctggagacatcttcttcaatggggcctgggagcgggagaaagccgtgtccttctaccgggnggaccgggtcctggccctggcaatgactacgggcaaccgcaaggcggagctgcagctacagctgtgcaacaagctggtggcactcctggccacactggagaagccccaggagggcttggagtttgcctacatggccctagcactcagcatcactctgggtaagtcccctgagcccccaccctgccaggacccacattttgccagagcccagcctccaggtctgcaggccaggagctgaaacagctgctggattttcctggtctcctgtccaggcaggcagatcgacccaacgggcttccccgtccggctgtggggcacagcccgaggtctctcacgcagtacagagctccctgcctgactgagctctgcttcctctgcctgtttctgctgctgaccacaagggccgcccagtgtgccctctgccttccagacatgccaggcatctcgttggttcctgtatgtgtcaggctgagtggcacattccctttctcttgtgcccttcccaccatcatcaaccacacggttctctgcctgataaaatcccagtttcccttccagcagtctgccccttaaggccgtgcatcccctggtgctgtgccagggttgtctgtccccctccagagacagggaaccctaggcaggccacatgccccagcgccttgtnnnnnnnnnnnnnnnnnnnnnnnnnnnnnnnnnnnnnnnnnnnnnnnnnnnnnnctccacggcactcgccctgaaaagggaaagatatcggagacagccaaggtgggtttgcacatctgtggggggacctggagctcaggcacgcagtgactccccaaagtaggggggctctgattgtgacacacgcaggaggagtcggatgtcacgtctgtgggttgcctggagccggggtgcccgggagcacctggactgcatggcttttgggctcccctggttaaaaccagtgagccaaggcaggtggctatgtgtaggcacagagctgggccatccaagtccgactttgccaaagcctcacagtagacaggggcaggccttattagttctgctttgcagatgggaaagtgagtctgggaacctggaagggactggccagagctgcccaggtgaccgcaggtgcctggaggcaagccaggtgctgcccggggtctgcatacctgcncctgccccagggagccacatcctcacacctgcccctttggcctccaccccaggggaccagctgaatgagcgcatggcctaccaccggctggccgccctgcaccatcagctgggtcatggcaagctggcagagcacttctacctcaaggccctatagctctgcaactcgccgctggagttcgacgaggagaccctccactacgtgaatgtgtaccaggtgctcggtgacatcatcttctacgacctgaaggnaggacccgtttgatgcagccgggtattaccaagctggcactggcagccgc

SEQ ID NO: 33919 - DNA, 372 bp, Macaca Mulatta
aggaattgtaatggaaattaaaaacctaaaactgagagaataatggggaaaatgtctgtcaaaacttcaggactgcagctaagcctgcgcttagagctttagtcctcatcttagagacccttccagtcattacaagaagaaatgcctcccagctttttacgaagtcactacacaacaaggagcgaaagaagaaaactgattgtagagactgatttcatacatgagtgtggattctctaaacttctaagttaaaagcttgcaaaccatatatagcaatgtattttaaagtcatgaccaaggatatgtgctccagtgtgacaatgtaaacaccaatgtgtacatggtaaaaattattcagagtgattcacagac

SEQ ID NO: 33920 - DNA, 894 bp, Macaca Mulatta
ggggggtgtggatctccgctggaattggggccgtaccatggcggagaagactcaaaagagtgtgaagattgctcctggagcagttgtatgtgtagaaagtgaaatcagaggagatgtgactatcggacctcggacagtgatccaccctaaagcacgaattattgcagaagccgggccaatagtgattggcgaagggaacctaatagaagaacaggccctcatcataaatgcttacccagataatatcactcctgacaccgaagatccagaaccaaaacctatgatcattggcaccaataatgtgtttgaagttggctgttatttcccaaggctatgaagatgggagataataatgtcattgaatcaaaaagcatatgtaggcagaaatgtaattctggaaagtggcctgcatcattgggggcttgttgcaacactaaatacattttgaagtcatccccctgagaatacaagtgatctatggtgccagactgcctttcttcgggtgctagactgagtcgaccacatgctccagaacactaaacgctgggattttttttggatgagaatccttgccaaaattaccacccaccctaaagaaggactcattgaaagggaagcttaaaccttccctttaaaggacctacagaaccagtgatttcgtcatggatagatcaaccattttttgttttttcgaccaactgtgtctttttggaaaagtgggccccaatagtagcgtttataagccactactataatcaacttgtcaaaggaaaatagctattggtggtatcacctggattcttttggccgtaacaaatttgggtttttctagcgagggaaatatctacgatgggacggtttttcattttgtgggcactggtgcactttttttgt

SEQ ID NO: 33921 - DNA, 974 bp, Macaca Mulatta
tttgtatatcaacatatcaaattattagtcaactaaagtttgaaaatctatgtagcagagatttagttcagaaactgcttctatactatacatttaaaaatcagcaattgatgacatttttatattaagaaatgataggaacattgacactaatgtggaggaatttgccaaatattttatttcaaaatttagcctctgatatcataaccacaagatattttaaaaaatcaacagtttctaagcatactaccacagtttttatcacgtctccatcatcctgtggtttctagagattgacagatactatgtttgttttatagatatggtaattaatgaaacaaatttaaattgtcttccattctttctttctcagttcatttctttttgtcttcccactgatagtctttggcagctcttgaataaattctacctgttggcatcaagaggaagaaaattagcctggaaatttttatctttacataaagccaattatatagcagtttgattatgaattctaggtggaagaattagaatagtctttggaatgggttttgggtaaaaccaaaatagggaaaagggtattgttaggaaacttgtcttgatattaagtatctactgcaagtccagtaagccaaaggatcaaacaaaataggttcagggtttcattttaatctcaaagattctgatttttacccatatgtcatcagttcagtttgcgacatgtggtgtagcctgtgttgaacaaatattctttacatgtacactaacggtgaatttcctaaatgagcaattggttaatagagccacttcggaattgagggggagatacagccgatatcaaaagcgtactaggatgaaaaatactccttaagacgaaaacaggcgctctgtatattcctccccctcctgtccctctccctcccgctcaaacacaaacacctcacgagacaaaaacaacaaaaacatcaacaaaa

SEQ ID NO: 33922 - DNA, 674 bp, Macaca Mulatta
atccagtgaacaatctaatacgtaaagactatatagaggagcctgaaaaaactcagtggaacaatgtagaaaatctcaataggtttgaaagaccaatggattattatgaagatctaaaaatgggaatgaagttcgtcagtgatgaacattatgatgaaaatgaagatgacttagtttcacatgtagatggttccgtaatttccaggagggagtggtatgtttagcaaccactgaatgtgacttaactatgtacaatgttcattcatactagttgatcattttcagattgttcatactttttcttgaggaagaataagctttttcaagttgattttcaagctttttatattctaatctgacaaatgaaaatgtaaaatctgagttcagtgtatctaagctgctttacaattttttttcaatgctgtactactgtctcaagatttaaattttaatgcagagtactttattggtgtgaggcacacaggtaagaagaaatgtcaacattaaatgtatgacttatttggtacaaaaatttttaaaaaagggaactaccttgacattgtgtattaaatgtttacctaagacaataatctcaagtatgtttgtttaaaagatacctctcaaaatttatcaccactcaatgacactgcatcaaaattgactataaaactaat

SEQ ID NO: 33923 - DNA, 557 bp, Macaca Mulatta
  misc_feature (1)...(557): n = A,T,C or G
ttctgccataaacaaaacagaagcagtgaggcgtgagtatgaggacatacacaaagcctttgcaaaagcattttggagaatggataggcttttacgtcttggaagaaaagaagtgtctagggttcaatggagtggctgctctgcagttacttgtatattggaaggcaaacctaaaagtccttatgctcataagaattggaaaagaaaaaccaaccatgatggattggcagagagctccacttcccaggagatgccacaaatatttcctggaatattacatgttgcaaacactggtatgtacaatgaatagcaccaaataacacctttatgtttttggttccttgcagcaaaacccctcatgcttccagaatttttttatgatttattatttagcgacttattagtgcctagaaattgcactgataatataagaagcaacaaataaccacaatttaagtgcagattgtaggcacaaaaatattgtaattattttccaaacaggcacagatanntgatataatgtgacaaatatgttacattttcacaaaggggtagca

SEQ ID NO: 33924 - DNA, 318 bp, Macaca Mulatta
ccttccttcccgactgacttcctctcgtagacttgcagctgtgttcaccataacatttcttgtctgtagtgtgtgatgatgaaattgttacttgtgaatagaatcaggattataaacttcatttttaattgaaaaaaaaaagtatatccttaaaataatgtatttatggctcagatgtactgtgcctgggattattgtattgcttccttgattttttaactatgcactgtcatgaggtgtttgccactgagctgttctgctccccttgccagattgccctggaggtgctgggtgttcgctaggctggtctgcaggaaa

SEQ ID NO: 33925 - DNA, 867 bp, Macaca Mulatta
ggggccgctttgcagacgctgccgccgaggaaagtcctgtactactagccatggtcaaccctaccgtgttcttcgacattgccgtcgacggcgagcctttgggccgcgtctccttcgagctgtttgcagacaaggttccaaagacagcagaaaattttcgtgctctgagcactggagagaaaggatttggttataagggttcctgctttcacagaattattccagggtttatgtgtcagggtggtgacttcacacgccataatggcactggtggcaagtccatctatggggagaaatttgaagatgagaacttcatcctaaagcatacaggtccctggcatcttgtccatggcaaatgctggacccaacacaaatggttcccagtttttcatctgcactggccagactgagtggttgcatggcaagcctgtggtctctgggcacaggcgaaccaaggcttgcctatctgtcggaggccccggccccgcctttggggtctttgaaagggccgcccctggaaggaaagatctgcattggcctcgactgggggactccgcggggtcaggctttggacctggggtttttccttttgtagcctgcccaaacacccttcccttcttgccaccctttttgcaagcggagcgcgtccccctgcccaatttcccccctgcactgtttcccgatcacgccttgttgtgtgcgtgtcgcgccgctgagctaccccccgctcccgctatgttgctcccgccctcctcattgtgcgactccctcacccccgatgtctgcgtagcgttcttcgcctcccacgcgtctcctgcttttcgcccctctcttgtggtgcatccgccgccgcgccgaacgctaggt

SEQ ID NO: 33926 - DNA, 860 bp, Macaca Mulatta
  misc_feature (1)...(860): n = A,T,C or G
tttcagggcattttaaattcttccttaatcagaaaactgttattggctacagctttatggctcctgttgaccgtgggaagtgagcgtctcttttctgttgtggcttttaagtgcccctgcagcactgagaatatgacctatgggctggttttcctctttgctcctgcctgggtgttactgatcctgggattctttctgaacaataggtcatggagactcttcacaggctgctgtgtgaatcccaggaaaatcttccccagaggccacagctgccgtttcttctacgtccttggccagatcactctgagctcattggtggctccagtgatgtggctttctgtggctttgctcaatggaactttctatgaatgtgccatgagcgggacgagaagttcgggactcctggagctgatttgcaagggtaagcccaaagagtgctgggaagaacttcacaaagtttcttgtggcaaaactagcatgctacctaccatcaatgaagaactgaaactgtcccttcaggcccagtctcagngattataggatggtgcctgatttgttcagcatctttcttctctctgctcaccacatgttatgctcgctgccgatctaaagttagctacctccagctgagtttttggaagacatatgcacaaaaggagaaggagcagttggaaaacacatttctggactatgccaacaagctgagcgagaggaacctgaaatgcttttttgaaaacaagaggccagatccttttcccatgcctacgtttgctgcctgggaggctgcttcagagctgcattctttccaccaaagccggcaacactacagcaccctccacagagtggtggacgatggtctg

SEQ ID NO: 33927 - DNA, 1068 bp, Macaca Mulatta
  misc_feature (1)...(1068): n = A,T,C or G
agcagctgtttgcccaacagacctgccccagctgtggaagggtgagggtgcccccgggcagcctgccgaggacagcgtcaagcaggaggggctggacctcactggcacggccgccaccgctacctcgttcgccgctccccccaaggtctcaccccccctctcccaccataccctgcccaacggacagcccactgtgctcacatctcggagagacannnnnnnnnnnnnnnnnnnnnnnnnnnnnnnnnnnnnnnnnnnnnnnnnnnnnnnnnnnnnnnnnnnnnnnnnnnnnnnnnnnnnnnnnnnnnnnnnnnnnnnnnnnnnnnnnnnnnnnnnnnnnnnnnnnnnnnnnnnnnnnnnnnnnnnnnnnnnnnnnnnnnnnnnnnnnnnnnnnnnnnnnnnnnnnnnnnnnnnnnnnnnnnnnnnnnnnnnnnnnnnnnnnnnnnnnnnnnnnnnnnnnnnnnnnnnnnnnnnnnnnnnnnnnnnnnnnnnnnnnnnnnnnnnnnnnnnnnnnnnnnnnnnnnnnnnnnnnnnnnnnnnnnnnnnnnnnnnnnnnnnnnnnnnnnnnnnnnnnnnnnnnnnnnnnnnnnnnnnnnnnnnnnnnnnnnnnnnnnnnnnnnnnnnnnnnnnnnnnnnnnnnnnnnnnnnnnnnnnnnnnnnnnnnnnnnnnnnnnnnnnnnnnnnnnnnnnnnnnnnnnnnnnnnnnnnnnnnnnnnnnnnnnnnnnnnnnnnnnnnnnnnnnnnnnnnnnnnnnnnnnnnnnnnnnnnnnnnnnnnnnnnnnnnnnnnnnnnnnnnnnnnnnnnnnnnnnnnnnnnnnnnnnnnnnnnnnnnnnnnnnnnnnnnnnnnnnnnnnnnnnnnnnnnnnnnnnnnnnnnnnnnnnnnnnnnnnnnnnnnnnnnnnnnnnnnnnnnnnnnnnnnnnnnnnnnnnnnnnnnnnnnnnnnnnnnnnnnnnnnnnnnnnnnnnnnnnnnnnnnnnnnnnnnnnnnnnnnnnnnnnnngagccccaccctggtgaagaacatgatctcgggcctcagctatggagcacttaatgccagctaccagg

SEQ ID NO: 33928 - DNA, 1098 bp, Macaca Mulatta
  misc_feature (1)...(1098): n = A,T,C or G
gcggcgcttcatacggaggtggcagccatctcctcctcgatggcatcatggccgccctcagaccccttgtgaagcccaagatcgtcaaaaaaagaaccaagaagttcatccggcaccagtcagaccgatatgtcaaaattaagcgtaactggcggaaacccagaggcattgaacaacaggggttccggtagaagattcaagggccagatcttgatgcccaacattggttatgggagcaacaaaaaaacaaagcacatgctgcccagtggcttccggaagttcctggtccacaacgtcaaggagttggaagtgctgctgatgtgcaacaaatcttactgtgccgagattgctcacaatgtttcttccaagaaccgcaaagccatcgtggaaagagctgcccagctggccatcagagtcaccaaccccaacgccaggctgcgcagtgaagaaaatgagtagacagctcatgtgcacgttttctgtttaaataaatgtaaaaactgccatctggcatcttccttctctatnnnnnnnnnnnnnnnnnnnnnnnnnnnnnnnnnaaatattaaaagaaaaaccatgtcagggcgccttggcctaaaaaaaatttttctaagcgattcacttattgatgcccgggcccagttgggaatcccaacccggcctaaaagagtttttcaagaaaaatatttgataggaaccagggcgctcggaaatcnnnnnnnnnnnnnnnnnnnnnnccggggggggccaaccaaaaacatattggggacccaaaaccccggaagggggggttttttccacccttattaaaaagaaaccctcggggaggaaagaaactttcaaatgggtttataaaacaaaaatctcaaaatttggacctccccacaaccgggccaaantatgaggtgaggggaaataaccagggggggggtgttcacacccgaaaaccaccttcattagaacacaaatatttggagaacacgcccttctccccgttgaaacaggggaanatgggcggtggtaatacccgcgggaaattgagaggtcccttgggcggtgaaataaactaaaaatttcacaccccatgtgtgagaa

SEQ ID NO: 33929 - DNA, 406 bp, Macaca Mulatta
acttgctgttaactactgaaagattttttaaaattttcatttctaggtaagaccattgcaattggaaaagttctgaaactggttccagagaaagactaagcattttcttgatgaccctgcacaatactgtgaggaaaattgactgcaaaagcctacttcacaccgccttctcttattttctgcccataaacctctccccatattttgcaaagaggaaattcacagcaaaagtccacattatgtcagctttctcatattgagagctctgctatgccactgttgaatttttcccaagattcccatccctagcccccttttcaaactctgcttccttggacagatttggcaatagctttgtaagtgatgtggacataattgcctacaataatgaaaacctacaggaatt

SEQ ID NO: 33930 - DNA, 89 bp, Macaca Mulatta
cagacttgcagggaaatgacattaaagtcactgctgagagcactggtgagcatgcgttctcactaccgctacctttgcatcagccacct

SEQ ID NO: 33931 - DNA, 1419 bp, Macaca Mulatta
atgaagtcgatcctagatggccttgcagataccaccttccgcaccatcaccactgacctcctgtacgtgggctcaaatgacattcagtacgaagacatcaaaggtgacatggcatccaaattagggtacttcccacagaaattccctttaacttcctttaggggaagtcccttccaagagaagatgactgcgggagacaacccccagctagtcccagcagaccaggtgaacattacagaattttacaacaagtctctctcatccttcaaggagaatgaggagaacatccagtgtggggagaacttcatggacatagagtgcttcatggtcctgaaccccagccagcagctggccattgcagtcctgtccctcacgctgggcaccttcacggtcctggagaacctcctggtgctgtgtgtcatcctccactcccgcagcctccgctgcaggccttcctaccacttcatcggcagcctggcggtggcagacctcctggggagcgtcatttttgtctacagcttcattgacttccatgtgttccaccgcaaagatagccgcaatgtgtttctgttcaaactgggtggggtcacagcctccttcactgcctctgtgggcagcctgttcctcacggccatcgacaggtacatatccattcacaggcccctggcctataagaggatcgtcaccaggcccaaggctgtggtggcgttttgcctgatgtggaccatagccattgtgattgccgtgctgcctctcctgggctggaactgtgagaaactgcaatctgtttgctcagacattttcccacacattgatgaaacctacctgatgttctggatcggggtcaccagcgtgctgcttctgttcatcgtgtatgcgtacatgtacattctctggaaggctcacagccacgccgtccgcatgattcagcgtggcacccagaagagcatcatcatccacacgtctgaggatgggaaggtacaggtgacccggccggaccaagcccgcatggacattaggttagccaagaccctggtcctgatcctggtggtgttgatcatctgctggggccctctgcttgcaatcatggtgtatgatgtctttgggaagatgaacaagctcattaagacagtgtttgcattctgcagtatgctctgcctgctgaactccaccgtgaaccccatcatctatgctctgaggagtaaggacctgcgacacgctttccggagcatgtttccctcttgtgaaggcaccgcgcagcctctggataacagcatgggggactcggactgcctgcacaaacacgcaaacaacgcagccagtgttcacagggccgcagaaagctgcatcaagagcacggtcaagattgccaaggtaaccatgtctgtgtccacagacacgtctgccgaggctctgtga

SEQ ID NO: 33932 - DNA, 154 bp, Macaca Mulatta
ccacacacacaaagagtgttgaggacttgtagcttaaaaaaaaataagttttaaaaactgactttctgtatttatgatagatatgaccatttttggtgttgagtagattgttgcattggaaatgaactgaagcagtatggtagatttaaaagga

SEQ ID NO: 33933 - DNA, 770 bp, Macaca Mulatta
gggatccagcctctgcctgtgattccatcaatgcatgggttaaaaacgaaactagagatatgattgacaatctgctgtccccagatcttattgatggtgtgctcaccagactggtcctcgtcaacgcagtgtatttcaagggtctgtggaaatcacggttccaacctgagaacacaaagaaacgtactttcatggcagccgacgggagatcctatcaagtgccaatgctggcccagctctccgtgttccggtgtgggtcaacaagtgcccccagtgatttatggtacaacttcattgaactgccctaccacggggaaagcatcagcatgctgattgcactgccgaccgagagctccagtccgctgtctgccatcatcccacacatcagcgccaagaccatagacagctggatgagcatcgtggggcccaagagggtgcaggggatcctgcccaagttcacagctgtggcacagacagatttgaaaggaccgcggaaagccccttgggattaccgagatgtgttgattcatcgaggggcaagggttacgaggataacaaggggagaaagccctccgtgtgttcgcgtagggtggggaaaaaggagaaatgtgaggtcaggggaaagatggaaccgagggcttgcagcagggaggaggcgtgggagtcgtagggtgggagaatgagccgcccgccccgggggttgaagggagaaacggaggcgttggccgaagatgaggagccgcgagagtgaaggccgaggagagagcggc

SEQ ID NO: 33934 - DNA, 3901 bp, Macaca Mulatta
  misc_feature (1)...(3901): n = A,T,C or G
gatgaatcttcaagtcatgaatgtaaccagcgcacaatccttctctatggagtcggcaaagagcgtgatgaagcaaggcatcagctgaagaagattaccaaagatatcctgaaaattctaaacaagaagagcaccacagagacaggggngttggggatgaaggacaaaaagccaggaagaacaggcaagagacatttccaacactggaaactgtgttcactaaactccagcttctttcatattttgatcaacatcaagtgacatctcagnnnnnnnnnnnnnnnnnnnnnnnnnnnnnnnnnnnnnnnnnnnnnnnnnnnnnnnnnnnnnnnnnnnnnnnnnnnnnnnnnnnnnnnnnnnnnnnnnnnnnnnnnnnnnnnnnnnnnnnnnnnnnnnnnnnnnnnnnnnnnnnagttactaaatgaactgagtgttgtggaagctgaactgctcctaaaatcctccagcctggcaggaagttatacaacaggactgtgtgtctgcatcgtggctgttctcaggcgctatcacagttgtctgatcttgaatcctgatcagacagcccaggtgtttgaagggttnnnnnnnnnnnnnnnnnnnnnnnnnnnnnnnnnnnnnnnnnnnnnnnnnnnnnnnnnnnnnnnnnnnnnnnnnnnnnnnnnnnnnnnnnnnnnnnnnnnnnnnnnnnnnnnnnnnnnnnnnnnnnnnnnnnnnnnnnnnnnnnnnnnnnnnnnnnnnnnnnnnnnnnnnnnnnnnnnnnnnnnnnnnnnnnnnnnnnnnnnnnnnnnnnnnnnnnnnnnnnnnnnnnnnnnnnnnnnnnnnnnnnnnnnnnnnnnnnnnnnnnnnnnnnnnnnnnnnnnnnnnnnnnnnnnnnnnnnnnnnnnnnnnnnnnnnnnnnnnnnnnnnnnnnnnnnnnnnnnnnnnnnnnnnnnnnnnnnnnnnnnnnnnnnnnnnnnnnnnnnnnnnnnnnnnnnnnnnnnnnnnnnnnnnnnnnnnnnnnnnnnnnnnnnnnnnnnnnnnnnnnnnnnnnnnnnnnnnnnnnnnnnnnnnnnnnnnnnnnnnnnnnnnnnnnnnnnnnnnnnnnnnnnnnnnnnnnnnnnnnnnnnnnnnnnnnnnnnnnnnnnnnnnnnnnnnnnnnnnnnnnnnnnnnnnnnnnnnnnnnnnnnnnnnnnnnnnnnnnnnnnnnnnnnnnnnnnnnnnnnnnnnnnnnnnnnnnnnnnnnnnnnnnnnnnnnnnnnnnnnnnnnnnnnnnnnnnnnnnnnnnnnnnnnnnnnnnnnnnnnnnnnnnnnnnnnnnnnnnnnnnnnnnnnnnnnnnnnnnnnnnnnnnnnnnnnnnnnnnnnnnnnnnnnnnnnnnnnnnnnnnnnnnnnnnnnnnnnnnnnnnnnnnnnnnnnnnnnnnnnnnnnnnnnnnnnnnnnnnnnnnnnnnnnnnnnnnnnnnnnnnnnnnnnnnnnnnnnnnnnnnnnnnnnnnnnnnnnnnnnnnnnnnnnnnnnnnnnnnnnnnnnnnnnnnnnnnnnnnnnnnnnnnnnnnnnnnnnnnnnnnnnnnnnnnnnnnnnnnnnnnnnnnnnnnnnnnnnnnnnnnnnnnnnnnnnnnnnnnnnnnnnnnnnnnnnnnnnnnnnnnnnnnnnnnnnnnnnnnnnnnnnnnnnnnnnnnnnnnnnnnnnnnnnnnnnnnnnnnnnnnnnnnnnnnnnnnnnnnnnnnnnnnnnnnnnnnnnnnnnnnnnnnnnnnnnnnnnnnnnnnnnnnnnnnnnnnnnnnnnnnnnnnnnnnnnnnnnnnnnnnnnnnnnnnnnnnnnnnnnnnnnnnnnnnnnnnnnnnnnnnnnnnnnnnnnnnnnnnnnnnnnnnnnnnnnnnnnnnnnnnnnnnnnnnnnnnnnnnnnnnnnnnnnnnnnnnnnnnnnnnnnnnnnnnnnnnnnnnnnnnnnnnnnnnnnnnnnnnnnnnnnnnnnnnnnnnnnnnnnnnnnnnnnnnnnnnnnnnnnnnnnnnnnnnnnnnnnnnnnnnnnnnnnnnnnnnnnnnnnnnnnnnnnnnnnnnnnnnnnnnnnnnnnnnnnnnnnnnnnnnnnnnnnnnnnnnnnnnnnnnnnnnnnnnnnnnnnnnnnnnnnnnnnnnnnnnnnnnnnnnnnnnnnnnnnnnnnnnnnnnnnnnnnnnnnnnnnnnnnnnnnnnnnnnnnnnnnnnnnnnnnnnnnnnnnnnnnnnnnnnnnnnnnnnnnnnnnnnnnnnnnnnnnnnnnnnnnnnnnnnnnnnnnnnnnnnnnnnnnnnnnnnnnnnnnnnnnnnnnnnnnnnnnnnnnnnnnnnnnnnnnnnnnnnnnnnnnnnnnnnnnnnnnnnnnnnnnnnnnnnnnnnnnnnnnnnnnnnnnnnnnnnnnnnnnnnnnnnnnnnnnnnnnnnnnnnnnnnnnnnnnnnnnnnnnnnnnnnnnnnnnnnnnnnnnnnnnnnnnnnnnnnnnnnnnnnnnnnnnnnnnnnnnnnnnnnnnnnnnnnnnnnnnnnnnnnnnnnnnnnnnnnnnnnnnnnnnnnnnnnnnnnnnnnnnnnnnnnnnnnnnnnnnnnnnnnnnnnnnnnnnnnnnnnnnnnnnnnnnnnnnnnnnnnnnnnnnnnnnnnnnnnnnnnnnnnnnnnnnnnnnnnnnnnnnnnnnnnnnnnnnnnnnnnnnnnnnnnnnnnnnnnnnnnnnnnnnnnnnnnnnnnnnnnnnnnnnnnnnnnnnnnnnnnnnnnnnnnnnnnnnnnnnnnnnnnnnnnnnnnnnnnnnnnnnnnnnnnnnnnnnnnnnnnnnnnnnnnnnnnnnnnnnnnnnnnnnnnnnnnnnnnnnnnnnnnnnnnnnnnnnnnnnnnnnnnnnnnnnnnnnnnnnnnnnnnnnnnnnnnnnnnnnnnnnnnnnnnnnnnnnnnnnnnnnnnnnnnnnnnnnnnnnnnnnnnnnnnnnnnnnnnnnnnnnnnnnnnnnnnnnnnnnnnnnnnnnnnnnnnnnnnnnnnnnnnnnnnnnnnnnnnnnnnnnnnnnnnnnnnnnnnnnnnnnnnnnnnnnnnnnnnnnnnnnnnnnnnnnnnnnnnnnnnnnnnnnnnnnnnnnnnnnnnnnnnnnnnnnnnnnnnnnnnnnnnnnnnnnnnnnnnnnnnnnnnnnnnnnnnnnnnnnnnnnnnnnnnnnnnnnnnnnnnnnnnnnnnnnnnnnnnnnnnnnnnnnnnnnnnnnnnnnnnnnnnnnnnnnnnnnnnnnnnnnnnnnnnnnnnnnnnnnnnnnnnnnnnnnnnnnnnnnnnnnnnnnnnnnnnnnnnnnnnnnnnnnnnnnnnnnnnnnnnnnnnnnnnnnnnnnnnnnnnnnnnnnnnnnnnnnnnnnnnnnnnnnnnnnnnnnnnnnnnnnnnnnnnnnnnnnnnnnnnnnnnnnnnnnnnnnnnnnnnnnnnnnnnnnnnnnnnnnnnnnnnnnnnnnnnnnnnnnnnnnnnnnnnnnnnnnnnnnnnnnnnnnnnnnnnnnnnnnnnnnnnnnnnnnnnnnnnnnnnnnnnnnnnnnnnnnnnnnnnnnnnnnnnnnnnnnnnnnnnnnnnnnnnnnnnnnnnnnnnnnnnnnnnnnnnnnnnnnnnnnnnnnnnnnnnnnnnnnnnnnnnnnnnnnnnnnnnnnnnnnnnnnnnnnnnnnnnnnnnnnnnnnnnnnnnnnnnnnnnnnnnnnnnnnnnncagaccatgccccagggctatacaatgtacgggacacagatgcctttgcagcagacatcgcagcagcaggctggcagtgtggtcttgtctcccagctataactccagagcctatccggccgcacattccaaccctgtgctaatggaaagactcagacagattcagcagcagccgagtggctatgttcagcagcaggcctcgccgtacctgcagcccctgactggctctcagagnct

SEQ ID NO: 33935 - DNA, 1424 bp, Macaca Mulatta
  misc_feature (1)...(1424): n = A,T,C or G
tgacggttcacagcgggcagaccaacaagtcagctcttctctacgactcccttcaaactgagagtgtcccttttgagggcctgctgagcgagggcgacaccatccgtatcgagttcacgtccgaccaggcccgagcagcctccaccttcaacatccgatttgagcgtttgagaaaggccactgctacgagccctacatccagaatgggaacttcactacatccgacccgacctataacattgggactatagtggagttcacctgcgaccccggccactccctggagcagggcccggccatcatcgaatgcatcaatgtgcgggacccatactggaatgacacggagcccctctgcagagnnnnnnnnnnnnnnnnnnnnnnnnnnnnnnnnnnnnnnnnnnnnnnnnnnnnnnnnnnnnnnnnnnnnnnnnnnnnnnnnnnnnnnnnnnnnnnnnnnnnnnnnnnnnnnnnnnnnnnnnnnnnnnnnnnnnnnnnnnnnnnnnnnnnnnnnnnnnnnnnnnnnnnnnnnnnnnnnnnnnnnnnnnnnnnnnnnnnnnnnnnnnnnnnnnnnnnnnnnnnnnnnnnnnnnnnnnnnnnnnnnnnnnnnnnnnnnnnnnnnnnnnnnnnnnnnnnnnnnnnnnnnnnnnnnnnnnnnnnnnnnnnnnnnnnnnnnnnnnnnnnnnnnnnnnnnnnnnnnnnnnnnnnnnnnnnnnnnnnnnnnnnnnnnnnnnnnnnnnnnnnnnnnnnnnnnnnnnnnnnnnnnnnnnnnnnnnnnnnnnnnnnnnnnnnnnnnnnnnnnnnnnnnnnnnnnnnnnnnnnnnnnnnnnnnnnnnnnnnnnnnnnnnnnnnnnnnnnnnnnnnnnnnnnnnnnnnnnnnnnnnnnnnnnnnnnnnnnnnnnnnnnnnnnnnnnnnnnnnnnnnnnnnnnnnnnnnnnnnnnnnnnnnnnnnnnnnnnnnnnnnnnnnnnnnnnnnnnnnnnnnnnnnnnnnnnnnnnnnnnnnnnnnnnnnnnnnnnnnnnnnnnnnnnnnnnnnnnnnnnnnnnnnnnnnnnnnnnnnnnnnnnnnnnnnnnnnnnnnnnnnnnggaggagtccctggcatgtgacaacccagggctgcctgaaaatggataccaaatcctgtacaagcgactctacctgccaggagagtccctcactttcatgtgctacgaaggctttgagctcatgggcgaagtgaccatccgctgcatcctgggacaaccatcccactggaacgggcccctgcccgtgtgtaaagnnnnnnnnnnnnnnnnnnnnnnnnnnnnnnngtagcagaagcggcagcagagacgtcgctggaaggggggaacatggccctggctatcttcatcccggtcctcatcatctccttactgctgggaggagcctacatttacatcacaag

SEQ ID NO: 33936 - DNA, 1302 bp, Macaca Mulatta
  misc_feature (1)...(1302): n = A,T,C or G
ncactcatttagagaagatgtatacatattcttttgtgcggtcgaataatcgtaagcgtagagggagcnagaaaagggctaggcgctcacatacgaactacacaacggcgggtagatatctatgttatattttactgacttggtgtattttgttttcttgtatatgtgtgagataacgaacactctatactagcgtctagtgcattgaaatccgctcgtttttatgcgttggtngcctcacgttctttgttgaaaagtaaactagagcgctggcgtgtagacaantaattantgtttgtaatagaggttngtgtagtataaaaagtctctttccaattagggggggtgccctttcactatcagcatcctcttcacaggggtgtggtaaaaagcgtttttatgtttatcgcgtcccgttgtgggtttgttttatcatttttgccatctgcgtgggacggaagaatatagggccctccgatacatcgacantgggtggaggataaaaagtgaattctcatagtcgatcgagaatgttaaaaagctccattttggatattgccgcctttagtatatntataaggtccaacacgataaacgttcttctatanaatatantacagggctcgattcccaagacccctctcccttacacccgctctatgtgaggagatggagtttcacacagtatgtatcaggttacaacagaacatgtatttatatgagtgattggtgagttcgcgcgcccgagggaagggcatagtttgggcgtccacaaggccgcatagtaaaattatacaggcctacttgttgtgtaggggcacatagtggggggggcctaattttcttgagggtccacggatgatgtggagacccttcccttggcccaaccgcgggtgaaacccgtcttccacttaaataatactaaaattaggctgggacacggtggcgggcgcgtatagtcccagctacctataaggcggtggcaggagaatgacgtgaactcacgaaggcggagcctgaattgagccgagatcatgccactgcgcttcagcctgggctacagagcaagaccaacnnnnnnnnnnnnnnnnnnnnnnnnnnnnnnntatatgtcttaaccaacttggaagaaaaacaaaattctgtgtgtgcaaatatattttttcaagttactcttttttcaacctggatttagcctcaggctgctgctgacatcctcgcgggggtgaggctggagggcttgcattgcactggaagggcatgaggcacctactgccacagcagagaatcaaaggaccatcc

SEQ ID NO: 33937 - DNA, 161 bp, Macaca Mulatta
tctgtcgtagggcacgtggtccggaccaagagcccccacaccttccccaagggtactagtgtcattgctcgcaatcaagtgcgcctggcggaggtctggatggacagctacaagaagattttctataggagaaatctgcaggcagcaaagatggcccaaga

SEQ ID NO: 33938 - DNA, 2385 bp, Macaca Mulatta
  misc_feature (1)...(2385): n = A,T,C or G
cccacgactaaggtccaggtcccaggagtttcccttgcaccttcatccctggccctgcagaggcctgcttctcgcttccagggtcgccagagcgcccctcccgccacccgtcgatctcctggccggatcctgggagagaagcagaggaggtnaggtctggagtttccagagtccgcggttttgttaaggagctgcagtgatgttgatgcggctggtcctcagtgcacacctgagtagcacgacctttttgccctggacacacgctgccatcagctgggagctggacaacgtgctgatgcctagtcccagaatctggccccaggtgagtccaacaggcanaggcaggtctgcctctgccaggagtgagggtaatgcctcctcactctggaatttctctgctgggcaggatgtccatgtcatagtaaccagaacctgtgggtcttgtgctgagctctgccgcctacacccgcggctgtggctgtgtgaggtcntctgccacaaacattacctgccagtcctcaggacagtgaaggcaggaggcccggcaggaagaggaggactcaatctgcaaggcccatgatagcagagagggccacctgggctgccccctcagtgcccatcagcctggttcccatggtcctaactagctctgttgccttgccaacagccctgtgctccccagccccctccaccatgcagatggctgctatgacatccctgttccttaaagtgtggggttccttgctgccctctcctccctaactggcaccccgtgcaaacctgctgcagagaactgcgtcttgggcaatggcaatagtcctccagttcaccaacagtaaaaatggtctcaatggggagagatttctgactgcaagcgctctgagtccttccagaggagggctggagagacaggaggggggatcaggcagcctcctgagctggttcctggcgccgatgtaatggatgctgattatcagcggtgagggcatcccggaaaggatggaaaggactgcagagctgtgcgagatgagtgggatgaggccgcaggtgctgatttttatgcccaggatgctcctggctgtcatggactcccagggctccaggcgcattgcatagctctttcacctcttctccaagcagaatgccccagaaaggccgcctctattatccagagtggcttgagtctccagtggctgtgcgcggggactgagggccagaatcagggcaaggggctttcagtgaaacgcagagccaggcagggacagcgcggatctcggaacagtctgtgtcagatgggacacttcatccccgcggagctgtccgtgcacacgatgttctctgattgccaagctgttaagggctccgtggaagggagctgctgggaaggcggacgaggcatctcaggcgggtgaggggctctgctgcatcggccttgctcacaccgaccatccctggggagctgtcactggcacccaggtctccccttctcagcgcatcctgtgcctccattctgggctgcctctgtccctcgaaggggagctccccacatgggtgggattattgttgagaacaaagttaaggtgttgacgaggatgcaggactgaggttgatcccagagtcactcagttgtccctcattttgctctcgagacaccctgaccaggacaagctctttagggagcatctttcctgtctgtgccacattctccatggcctttgcactctttttgcttttgctttaaacacgtcgtcaattcattgcctgcgcagcttgtactgccttttggtttttctttgcagaacagctctggaattgaannnnnnnnnnnnnnnnnnnnnnnnnnnnctctggactaggagccttacatgtgttaacacacttgatcagctcagcaacactgtggaataagtgttttatgtccattattcagatcaggagactgagattcagagcagggagggaacttgtcagaggaacatggctcgcaagcagcagaacctgggtttgaactgacagcggcctgacttcagagcccacgctttcccacgctcctactgcacacccattggagtccagccatcttggttctgaatcataaccctgactctcctggccacatcctgtgctccacattacatgttactctagaggttaccaccctgggtctctttcccatataagacatagaaatactacttgtggaaatcctaacgctcctgacatctctgccattttatcatgaacaatcctatcctgccaaatactggtgtaatgtacttggcccccctggattggattggtataggttaagggcagatataaggtctcaaataatcccggtattcctgtatgtggagttattattatggaataataatggcagtt

SEQ ID NO: 33939 - DNA, 870 bp, Macaca Mulatta
gagggtgggcgggggcgcaacccaccagggctgcccagctgaccctttgccgtcccccaggccctgtctgacctccgcgctgacaaccagcgcctcaaggatgagaatgcagcgttgatccgcgttatcagcaaactctccaagtgacctggagggactttcccgcacccgtatttatacagctgcttctgccacacgcaccccttcccccgtgtgaacacgagtgacagggctccgggggaagtctcagagaagccatagcccccctgggacctccgaactgggaggggagcagagtccccaggagccaagggggccacccgaggccaggatggaggtgggaggccgagccaagtagggggacgttgccagaggggaccagggccagagccgggactaggaaggaactgaggaccaagaagtgcaaggaccagtagccaggaccagagtggccgcctggaggtccccctctcacgtgtgatgccaccccgtcaccccccctcctgagcagggatccaagactgtgccgagagtcctgccggcctcagccaggtgggcctgtatatagggtccatgtgcaatagggagggacgtcttctattttttgctgccccctccccgcccactgtctggggcagggggagaaggtattttcgagataaagcacaggcaccacaaataaaagtcgtgaagttgccactcaaggtctgtgttcccagccagagggagggcgccgtttcctgcttctgtgctggggggctgtgcatgtctgtgaccaaaccactgggccgctgggtggggtgccaaggggtgggctggtgcttgctcacctgtgtggcagaggagcttcaggatgagcccccagcggga

SEQ ID NO: 33940 - DNA, 3013 bp, Macaca Mulatta
  misc_feature (1)...(3013): n = A,T,C or G
ctcagctgccccaccccgggatgcactggctcaggacacgtccggggcaagtactccaggcaccgaagnagtttacagagctgccccctggccaagaagaggaagctggagggcgctgaggctgagcacctggtgtccaagaggaagtcgcaccccctgaagctggctctggacgagggctatggtgtggacagcgacggcagtgaggaccccgaggtgaaggacgcctctgtnnnnnnnnnnnnnnnnnnnnnnnnnnnnnnnnnnnnnnnnnnnnnnnnnnnnnnnnnnnnnnnnnnnnnnnnnnnnnnnnnnnnaggaaggagccccatcaagtcccattttggatccaacccnnnnnnnnnnnnnnnnnctcctccaagggcagctatagcagttaccagggaatcatcgccacttcgctcctgaacttgggtcaaattgctgaagagactctgnnnnnnnnnnnnnnnnnnnggcggccaagccaggccctggcgttgtgcacctgcttcaggaggccacagagggagccgccagcgaggagggtgaaaagggcctcttcatccagccnnnnnnnnnnnnnnnnnnnnnnnnnnnnnnnnnnnnnnnnnnnnnnnnnnnnnnnnnnnnnnnnnnnnnnnnnnnnnnnnnnnnnnnnnnnnnnnnnnnnnnnnnnnnnnnnnnnnnnnnnnnnnnnnnnnnnnnnnnnnnnnnnnnnnnnnnnnnnnnnnnnnnnnnnnnnnnnnnnnnnnnnnnnnnnnnnnnnnnnnnnnnnnnnnnnnnnnnnnnnnnnnnnnnnnnnnnnnnnnnnnnnnnnnnnnnnnnnnnnnnnnnnnnnnnnnnnnnnnnnnnnnnnnnnnnnnnnnnnnnnnnnnnnnnnnnnnnnnnnnnnnnnnnnnnnnnnnnnnnnnnnnnnnnnnnnnnnnnnnnnnnnnnnnnnnnnnnnnnnnnnnnnnnnnnnnnnnnnnnnnnnnnnnnnnnnnnnnnnnnnnnnnnnnnnnnnnnnnnnnnnnnnnnnnnnnnnnnnnnnnnnnnnnnnnnnnnnnnnnnnnnnnnnnnnnnnnnnnnnnnnnnnnnnnnnnnnnnnnnnnnnnnnnnnnnnnnnnnnnnnnnnnnnnnnnnnnnnnnnnnnnnnnnnnnnnnnnnnnnnnnnnnnnnnnnnnnnnnnnnnnnnnnnnnnnnnnnnnnnnnnnnnnnnnnnnnnnnnnnnnnnnnnnnnnnnnnnnnnnnnnnnnnnnnnnnnnnnnnnnnnnnnnnnnnnnnnnnnnnnnnnnnnnnnnnnnnnnnnnnnnnnnnnnnnnnnnnnnnnnnnnnnnnnnnnnnnnnnnnnnnnnnnnnnnnnnnnnnnnnnnnnnnnnnnnnnnnnnnnnnnnnnnnnnnnnnnnnnnnnnnnnnnnnnnnnnnnnnnnnnnnnnnnnnnnnnnnnnnnnnnnnnnnnnnnnnnnnnnnnnnnnnnnnnnnnnnnnnnnnnnnnnnnnnnnnnnnnnnnnnnnnnnnnnnnnnnnnnnnnnnnnnnnnnnnnnnnnnnnnnnnnnnnnnnnnnnnnnnnnnnnnnnnnnnnnnnnnnnnnnnnnnnnnnnnnnnnnnnnnnnnnnnnnnnnnnnnnnnnnnnnnnnnnnnnnnnnnnnnnnnnnnnnnnnnnnnnnnnnnnnnnnnnnnnnnnnnnnnnnnnnnnnnnnnnnnnnnnnnnnnnnnnnnnnnnnnnnnnnnnnnnnnnnnnnnnnnnnnnnnnnnnnnnnnnnnnnnnnnnnnnnnnnnnnnnnnnnnnnnnnnnnnnnnnnnnnnnnnnnnnnnnnnnnnnnnnnnnnnnnnnnnnnnnnnnnnnnnnnnnnnnnnnnnnnnnnnnnnnnnnnnnnnnnnnnnnnnnnnnnnnnnnnnnnnnnnnnnnnnnnnnnnnnnnnnnnnnnnnnnnnnnnnnnnnnnnnnnnnnnnnnnnnnnnnnnnnnnnnnnnnnnnnnnnnnnnnnnnnnnnnnnnnnnnnnnnnnnnnnnnnnnnnnnnnnnnnnnnnnnnnnnnnnnnnnnnnnnnnnnnnnnnnnnnnnnnnnnnnnnnnnnnnnnnnnnnnnnnnnnnnnnnnnnnnnnnnnnnnnnnnnnnnnnnnnnnnnnnnnnnnnnnnnnnnnnnnnnnnnnnnnnnnnnnnnnnnnnnnnnnnnnngtcagaccctgcagcccattcttttgcttcttctgaagcagatgaccaggaagtgtcggaagagaattttgaggagcggaattatccgggggaagtcaccctgaccaactttaagctgaagtttctctccaaggacataaagaaggagctgctcacannnnnnnnnnnnnnnnnnnnnnnnnnnnnnnnnnnnnnnnnnnnnnnnnnnnnnnnnnnnnnnnnnnnnnnnnnnnnnnnnnnnnnnnnnnnnnnnnnnnnnnnnnnnnnnnnnnnnnnnnnnnnnnnnnnnnnnnnnnnnnnnnnnnnnnnnnnnnnnnnnnnnnnnnnnnnnnnnnnnnnnnnnnnnnnnnnnnnnnnnnnnnnnnnnnnnnnnnnnnnnnnnnnnnnnnnnnnnnnnnnnnnnnnnnnnnnnnnnnnnnnnnnnnnnnnnnnnnnnntgcccagttccaggctgtgtggggcttggtcacatcagtggaaaatacgcctctcacaggagcgcgtccggctgcccactggccgcccgcaggcagaaggaaggttccctcaatggctcgtcattctcctggaagtccctgaagaatgaaggaccgacctgccccaccccgggctgtgacggctctggccacgccaatgggagtttcctcacccaccggagnnnnnnnnnnnnnnnnnnnnnnnnnnnnnnnnnnnnnnnnnnnnnnnnnnnnnnnnnnnnnnnnnnnnnnnnnnnnnnnnnnnnnnnnnnngtgttggagaatgatgaggagatcaagcagctgaaccaggagatccgagacctgaacgagtccaactcggagatggaggccgccatggtacagctgcagtcccag

SEQ ID NO: 33941 - DNA, 575 bp, Macaca Mulatta
gaatatttttaaatggacaaaggactgtacaataagttacttgaaatgagttacttgtttcagataaatttcaattcgatttaaaataaacattttgtccaccttttaagttaatgaaataaaatttgaaactgacttttgcagcttttgcttatgaatgaatgctaggagaggagaggtattaagaataaaatatgtagtgaaagtttccatagtgtgagtctaaaactagaagaaagtggtaggtcctcttgtgggtggggaacaggggagtctgtaaaaagccagtctgtagatcatattttaatctgttactgtaatcgaatcgttcaattcttgttttgacatggaaagtcctggattttaagctttaaatttgcttattttgtaggtttaagaacatgattttcatgggagttctaaaattaactgtacttcagcaccttgaggtacactttccttcaagaaactaaattggattggtgcttctgaatttatttcagagcagtttctgaaagtagtgattttgagctatcctgattgctgttctttctgaggcctggtttggctcttcc

SEQ ID NO: 33942 - DNA, 667 bp, Macaca Mulatta
  misc_feature (1)...(667): n = A,T,C or G
nnnnnnnnnnnnnnnnnnnnnnctaagcctttattgcatattaataaaacaaatctttgaatatacagcaatgnnnnnnnnnnnnnnnnnnnaaattcctataactagggacagttggtatgaagaagggatgatgagcactggtacaggacactctgcaccaacacatagaatttactgttctgcaaatgactgatagtaaaaattttaaagatggcacaatcctagcaggcaatctttcttttgtttacaagatacaacatttaacagttatttaaatgtaatcctgaagcagcctgcaaattttaccttttgcttttagttctgtcagtgtggtccctatctttgtggtacctatccctgtccttttctccttctctatgtttacttttttctcgttctttgtccttctcatagtcttcacttttaggtttatctggcttcttgtctacactcctactatctctgcttgcttttccatctgttcctcgatcaccatgtgataaccgtgccctctctttatctttatgcccttcctccctggtttttctgtctctgtccttgtcttggcttctgtctctgcgtctatgcctttcagattcttgctcccattccttttcatgtcgctctcttttcaagtggtgtgaatcactataaaatctctggc

SEQ ID NO: 33943 - DNA, 2182 bp, Macaca Mulatta
  misc_feature (1)...(2182): n = A,T,C or G
ccaaagtgctgggattacaggcgtgagccaccgcacccggccgttactcctcttgttacccacttgttatcttagaaaacttagcctactactgccaagagtatgggagggagagtacctgggaagagatgctcatcaggaatgcagaaggcaagagcacagagacctaacaggaacagcagcttgaggagccagaagctgcttaggaaggagaaagaaaaccagactcagaagaaaaggcaaaggacannnnnnnnnnnnnnnnnnnnnnnnnnnnnnnnnnnnnnnnnnnnnnnnnnnnnnnnnnnnnnnnnnnnnnnnnnnnnnnnnnnnnnnnnnnnnnnnnnnnnnnnnnnnnnnnnnnnnnnnnnnnnnnnnnnnnnnnnnnnnnnnnnnnnnnnnnnnnnnnnnnnnnnnnnnnnnnnnnnnnnnnnnnnnnnnnnnnnnnnnnnnnnnnnnnnnnnnnnnnnnnnnnnnnnnnnnnnnnnnnnnnnnnnnnnnnnnnnnnnnnnnnnnnnnnnnnnnnnnnnnnnnnnnnnnnnnnnnnnnnnnnnnnnnnnnnnnnnnnnnnnnnnnnnnnnnnnnnnnnnnnnnnnnnnnnnnnnnnnnnnnnnnnnnnnnnnnnnnnnnnnnnnnnnnnnnnnnnnnnnnnnnnnnnnnnnnnnnnnnnnnnnnnnnnnnnnnnnnnnnnnnnnnnnnnnnnnnnnnnnnnnnnnnnnnnnnnnnnnnnnnnnnnnnnnnnnnnnnnnnnnnnnnnnnnnnnnnnnnnnnnnnnnnnnnnnnnnnnnnnnnnnnnnnnnnnnggcacacaaccccgagggcatctggatctgggagtgtgtgtgtgagaaatggcaggacaagtcataatgcatggaaaggtacctccttatatgggtatgaccactcatttgtctcctgcccccaaccaaaatctcttctatcttagggtttntccttttatctctttccacttgacaacccgaccccctctcacttaccctgtgtgtcttgccccacaccctttccactactgtccttgacagcaggaggcagcagattgctgaggcccccacatggaggaggatgtagaacaggcggctgcaagtggatgcggtgagagagggccacctagagtggcagcagctggcacaaggagcaggcccacagcagcacacctgggggtagagcagatgcaaggcagcgaggtggatacttgctgaggaaaggcatatgttaaatgtatgtgtgaggttaacccaggaggctgaattccaaaatttccttcccctttcttccttttactcaggttctgtttcaagctgattccagccatttgggattgccttccactgacaacttagtaggggtttcattataagcaggcttgagatatctgacctttctctagacctaaacccctggggctgggaccatggcgggagacatttacagatacccgggggcaaagtaccagaatgacattagagaaaagaagcctgacgtttttactggcttctgcatgttttcctccccagcttctgccactctacctttcgcaccctctcacctgacagaaggggcttttcactaggacactgctgcctaaggtgcgctgctgtgccaggcccagggaggtgctgggnnnnnnnnnnnnnnnnnnnnnnnnnnnnnnnnnnnnnnnnnnnnnnnnnnnnnnnnnnnnnnnnnnnnnnnnnnnnnnnnnnnnnnnnnnnnnnnnnnnnnnnnnnnnnnnnnnnnnnnnnnnnnnnnnnnnnnnnnnnnnnnnnnnnnnnnnnnnnnnnnnnnnnnnnnnnnnnnnnnnnnnnnnnnnnnnnnnnnnnnnnnnnnnnnnnnnnnnnnnnnnnnnnnnnnnnnnnnnnnnnnnnnnnnnnnnnnnnnnnnnnnnnnnnnnnnnnnnnntgaggtggggcttatgcggcggcgtggtgagatagatatggcgactgagggggatgtggagctggagttagagactgagaccagtggaccagagcggcctcccgagaagccacggaagcatgacagcggtgccgcggacttggagcgggtcaccgactatgcggaggagaaggagatccagagttccaatctggagacggnggccatgtctgtgattggagacagaaggtcccgggagcagaaagccaaacaggagcgg

SEQ ID NO: 33944 - DNA, 776 bp, Macaca Mulatta
  misc_feature (1)...(776): n = A,T,C or G
acgaatactaattgctgcaaataatagaatattatcagaaaggatagccaaagaaattcaggttatacctttgcaacgagacgatgaagattaattacggcagcctcatagtcaatcccagttgcttttccccagacttggtgactcatcgatggatatgtgttttggatgtatgatatgcttggtttagattctctttgaccaggttaaaaatttggaacttgttccttattttactatgactaggtttgcaagaattgacataatgtttgtttcactgatttaaaacattttgcacgtaaggatgtactttagaaaacatacccaggaagtacagttgataaatataatatcaactgaaatagtcaattagcaattttgtgtttctaaatatctatggtcccctgaaattttgacttactatataggtgcagagacacccacttagaaagttaactgttcggaaaaacatttctctttagtttcaaaaaccatatataattaaatttgtaaggacatactgagtaccctaggccaacatttttttctttgcagagaaccttttgtgttttattcttcagtgttcatattgcacctggcccattatatgtctgngcaactaaaaacaaacattgtgagaatgaatatttttaaggtagtaattcctagttataatagatacataaagtaatgaactcagcattctgtatttttgcttcaggtttgaaataaaattatctagttaaattttttatgtttcacatttacatgccatc

SEQ ID NO: 33945 - DNA, 310 bp, Macaca Mulatta
ttgcattcttcatctgatactttctgagactgcctttgaaagtgggaatgaggtaaagggctgaggaaaaaagcattcttagttgcatcttgcctggcatgggggtggttgtaggccctggatcacctcttcccctggcctcttcttgctgtcctaactgactttaaggatctggtcttgagtcttcccataggatctctaagtccttaaggtatgggttttggctctgatggcgccctgattctgaagagggatgcttaattgagcagtgagcctcctggtagttgcctagctgttctctctattccct

SEQ ID NO: 33946 - DNA, 367 bp, Macaca Mulatta
gcacacgaggggctatgcacgaggtcgctcgcatcctgctgggtgagggcccgaccaaccagaaaggctacacgctggcagcactgggagacctggcaaagaccctgggccgtgcccggaaacaggctgtgcttagagaagagcgagatcatctttaccgggcccggaaaaagtgccaattcctcctggcctggaccaatgaaaatgaggcggccctcacacccctggctctagattgcgccagggctcaccaagcccatgctgtggcagccgaggaggtggccgccctcactggggagctggagcggctttggggaggccccgtgccacctgccccaaggactctcattgaggagctccctggctg

SEQ ID NO: 33947 - DNA, 994 bp, Macaca Mulatta
  misc_feature (1)...(994): n = A,T,C or G
gagactggtgagccaaagaatttcgagcctgggggagatggaagcaggagaggagggaagcgggatgacgttgcctggtggaggcggatgcagaaggnnnnnnnnnnnnnnnnnnnnnnnnnnnnnnnnnnnnnnnnnnnnnnnnnnnnnnnnnnntgccgtgggatttttctacctctattttcgagatcctggaagagaaatcacttggaagcactttgtacagaattacctggccagaggtctggtnnnnnnnnnnnnnnnnnnnnnnnnnnnnnnnnnnnnnnnnnnnnnnnnnnnnnnnnnnnnnnnnnnnnnnnnnnnnnnnnnnnnnnnnnnnnnnnnnnnnnnnnnnnnnnnnnnnnnnnnnnnnnnnnnnnnnnnnnnnnnnnnnnnnnnnnnnnnnnnnnnnngggagcagtgctcactggtcctcctggtaccggcaagacccttcttgccaaagcaactgcaggggaggccagtgtgcccttcatcactgtgaacgggtccgagttcctggaaatgtttgttggcgttgggccagcaagggnnnnnnnnnnnnnnnnnnnnnnnnnnnnnnnnnnnnnnnnnnnnnnnnnnnnnnnnnnnnnnnnnnnnnnnnnnnnnnnnnnnnnnnnnnnnnnnnnnnnnnnnnnnnnnnnnnnnacatcaaaggcaggtcctccatctttaaggtccacttgcgcccactgaagctggacgagagcctcaataaggacaccctggcgaggaagctggcagtgctcaccccaggcttcactggtnnnggtgtccatcatcccccggggcaaggggctcggctatgcacagtacctgccctgggagcagcacctctatatccgggagcagctcttcgactgcatgtgcacgatgctcgggggccgggtggccgagcagctgtgcttcgggcagatcactacgggggctcaggacgacctgaggaaggtcacccagagtgcgtatgcccagg

SEQ ID NO: 33948 - DNA, 1012 bp, Macaca Mulatta
  misc_feature (1)...(1012): n = A,T,C or G
tcggcacgagcccttcttgaaggttgtggtagaaccaaatcgttctggacgatggcactagcagattctaaaacaatgaaggcaatggtggaattccgagaacacacaggcaaacccaccacgagtagctcagaagcatgtcgcttctgtggttccaggagtggaacagagttatctgctgttggcagtgtttgttctgatgcagattgccaggaatatgccaagatagcctgtagtaagacgcatccttgtggccatccatgcgggggtgttaaaaacgaagagcactgtctgccctgtctacacggctgtgacaaaagtgccacaagcctgaagcaagatgccgatgacatgtgtatgatatgtttcaccgaagcgctctcagcagcaccagccattcagctggattgtagtcacgtattccacttacagtgctgtcggcgagttttagaaaatcgatggcttggcccaaggataacatttggatttatatcttgtcccatttgtaagaacaaaattaatcacatagtactaaaagacctacttgatccaataaaagaactctatgaggatgtcagaagaaaagccttaatgagattggaatatgaaggtctgcataagagtgaagctatcacaactcctggtgtgaggttttataatgacccagctggctatgcaatgaatcgatatgcctattatgtctgctacaaatgccgaaaggcgtatttnggcggggaaactcgctgtgatgctgaggctggacacggagatgaccatgatgcccgagaaagcacatgagggggccgtcctgaaggttcccagggcccaatggtccccacaggcgcgacctccggagaaaaaggcggcagcagtcaaagaggacccaccgcctgggaaaacccttgtcagccggcgcagaaatcaaaaaaaacaacctcggaaaaaaacactgcggccccaccactaggaaaaaaccacaaaacacccgaaaaaaccatatagaaacacacaa

SEQ ID NO: 33949 - DNA, 1418 bp, Macaca Mulatta
  misc_feature (1)...(1418): n = A,T,C or G
gaaggagtgtggccgagccccagtccctgggccccggcgcggcaagcgcatcgcctccaaggtgaagcactttgcctttgatcggaagaagcggcactacggcctgggcgtggtgggcaactggctgaaccgcagctaccgccgcagcatcagcagcaccgtacagcggcagctggagagctttgacagccaccgnnnnnnnnnnnnnnnnnnnnnnnnnnnnnnnnnnnnnnnnnnnnnnnnnnnnnnnnnnnnnnnnnnnnnnnnnnnnnnnnnnnnnnnnnnnnnnnnnnnnnnnnnnnnnnnnnnnnnnnnnnnnnnnnnnnnnnnnnnnnnnnnnnnnnnnnnnnnnnnnnnnnnnnnnnnnnnnnnnnnnnnnnnnnnnnnnnnnnnnnnnnnnnnnnnnnnnnnnnnnnnnnnnnnnnnnnnnnnnnnnnnnnnnnnnnnnnnnnnnnnnnnnnnnnnnnnnnnnnnnnnnnnnnnnnnnnnnnnnnnnnnnnnnnnnnnnnnnnnnnnnnnnnnnnnnnnnnnnnnnnnnnnnnnnnnnnnnnnnnnnnnnnnnnnnnnnnnnnnnnnnnnnnnnnnnnnnnnnnnnnnnnnnnnnnnnnnnnnnnnnnnnnnnnnnnnnnnnnnnnnnnnnnnnnnnnnnnnnnnnnnnnnnnnnnnnnnnnnnnnnnnnnnnnnnnnnnnnnnnnnnnnnnnnnnnnnnnnnnnnnnnnnnnnnnnnnnnnnnnnnnnnnnnnnnnnnnnnnnnnnnnnnnnnnnnnnnnnnnnnnnnnnnnnnnnnnnnnnnnnnnnnnnnnnnnnnnnnnnnnnnnnnnnnnnnnnnnnnnnnnnnnnnnnnnnnnnnnnnnnnnnnnnnnnnnnnnnnnnnnnnnnnnnnnnnnnnnnnnnnnnnnnnnnnnnnnnnnnnnnnnnnnnnnnnnnnnnnnnnnnnnnnnnnnnnnnnnnnnnnnnnnnnnnnnnnnnnnnnnnnnnnnnnnnnnnngcgtggtgcactgcctcgtgtctgtggtctttcaaatgaccatcctgagggacctggagaagctggccggctggcaccgtatcgccatcatcttcatcctcagcggcatcacaggcaacctcgccagcgccatcttcctcccataccgggcagaggnnnggtgggcccggccggctcacagttcggcctcctcgcctgcctctttgtggagctcttccagagctggccgctgctggagaggccctggaaggccttcctcaacctctcggccattgtgctcttcctgttcatctgtgtttttctgccctggatcgacaacattgcccacatcttcggcttcctcagtggtctgctgctggccttcgccttcctgccctacatcacctttgggaccagcgacaagtaccgcaagcgggcactcatcctggtg

SEQ ID NO: 33950 - DNA, 209 bp, Macaca Mulatta
  misc_feature (1)...(209): n = A,T,C or G
agtgtggctgccccagtctccccagtctcctgctgtagccgaattccagcctggcccgcagctagccctgtctgcagctccaagnnngctgcctggcagtccccacctagggtacgctgccacatcgttacctggtccaagtgcccgggaggctccgcctgtcggcttcgctctgcagttgcatctctgatctgtccggcaggctcagg

SEQ ID NO: 33951 - DNA, 772 bp, Macaca Mulatta
  misc_feature (1)...(772): n = A,T,C or G
ggcatgaggtctcttgtcaaaaatattactcagtttgtaagactgcattgtaactttaacatacactgtgactgacgtttctcaaagttcatattgtgtggctgatctgaagtcagtcagaatttgtaaacagggtagcaaacaagatatttttcttccatgtatacaataattttttttaaaagtgcaatttgcgttgcagcaatcagtgttaaatcatttgcataagatttaacagcattttttttataatgaatgtaaacattttaacttaatggtacttaaaataatttaaaagaaaaatgttaacttagacattcttatgcttcttttacaactacatcccatttctatatttccaattgttaaagaaaaatatttcaagaacaaatcttctctcaggaaaattgcctttctctatttgttaaggatttttatacaagaacaccaatataccccctttattttactgtggaatatgtgctggaaaaattgcaacaacactttactacctaacggatagaatttgtaaatactctaggtatctgtaaacactctgatgaaatctgtatagtgtgactaacccacaggcaggttggtttacattaattttttttgaatgggatgtcctatggaaacctatttcaccagagttttaaaaataaaaagggtattgtttttgtccttctgnnnnnnnnnnnnnnnnnnnnnnnnnnnnnnnnnnnnnnnnnnnnnnnnnnnnnnnnnnnnnnnnnnnnnnnnnnntttaaaa

SEQ ID NO: 33952 - DNA, 823 bp, Macaca Mulatta
  misc_feature (1)...(823): n = A,T,C or G
gcatgccccaggggaacagatgtgtatgtctcccaggaagtctctgtgggtgaaagactgatctcaaaagttgtggctgagagtagctaaagccaagttagagggctgtttcagggtctacattgagactacagttgatatgcctacctcctgagacactagtgtttgagtctcctcctgggcccctggacagatggttttggcagcatgacgaagtcctaatgtggctgaaggcaagtccacaggaggatgggtctcttttcaggtctggagatggaatcactgttnnnnnnnnnnnnnnnnnnnnnnnnnnnnnnnnnnnnnnnnnnnnnnnnnnnnnnnnnnnnnnnnnnnnnnnnnnnnnnnnnnnnnnnnnnnnnnnnnnnnnnnnnnnnnnnnnnnnnnnnnnnnnnnnnnnnnnnnnnnnnnnnnnnnnnnnnnnnnnnnnnnnnnnnnnnnnnnnnnnnnnnnnnnnnnnnnnnnnnnnnnnnnnnnnnnnnnnnnnnnnnnnnnnnnnnnnnnnnnnnnnnnnnnnnnaggattttctagggaattacaaaaccaatcactgcaaagnnnnnnnnnnnnnnnnnnnnnnnnnnnnnnnnnnnnnnnnnnnnnnnnnnnnnnnnnnnnnnnnnnnnnnnnnnnnnnnnnnnnnnnnnnnnnnnnacgtcactgtggccattgtcctaaggagtggattacatattccaacagttgttattatattggtaaggagaaaagaacttgggcagagagtttgctggcctgtactttgaagaactccagtctgctttctatagataatgaagaagaaatg

SEQ ID NO: 33953 - DNA, 209 bp, Macaca Mulatta
ttgtaagtaccagagttggtggaattcctgaggtgcttccagaagaccttattattttatgtgagccttcagtaaaatctttgtgtgaaggattggaaaaggctgttttgcaactgaagtcagggacattgctggctccggaaaacatccataacatagtcaagactttctacacctggaggaatgttgcggaaagaactgaaaaggta

SEQ ID NO: 33954 - DNA, 811 bp, Macaca Mulatta
  misc_feature (1)...(811): n = A,T,C or G
agactggagagaataaagagcagtcgcaaatgaagctgccccattcccctggcaccctgcagctttagtttactaaactagaagtcctcatagtntaaagtggcctcagcaggcctagtgtatacagactggttgtacgtatcatgccgtggagctgggggaggagtcgttgtggcacaagtacttgtacatactctgcttctcttcgtcagcgtcccgctgctctagaagactgtccgtggatgagtttagtgtacagacttgtaaacagctgccccctttgctcagtctagttcccagatccttttctttttaattgctcatttgtaaaattgtcctaatctttcctagctttctaatagttaatattagaaactctttaatagttttcctttcagtttgtgagctcttctctgtcgccctgaagggtcactgtattctgtatgaatgcatggcatgatacaactaatttaagagtcttttataaataaagtttgcattaactatacctgactcccaagatgctccatatcatggagtgttgggcagcaattttttaacttcttttggtaccagctgggtattcagccagttagggaaaggttcattactgctcacagagcttccctttttcttggctcacagacttgaagctgtcttttactcctttggaatggaaggaactctcctttcctgctctccacatgcagctcctagggagcagaaaaatctcatccttccttgttttgagattttggtcatgatttccctctgatcatcaccagtcgtttgaaggagctcttgggcatcc

SEQ ID NO: 33955 - DNA, 255 bp, Macaca Mulatta
tagtatgctgtgtcgtgggctggttatgttaaccgaaaaaaataaagtcattacctgagttttgcagcgctctaacttaaacagaagaacctctgttcacatcttttagcatttcacatttgcctaacttaaaaattgccatgtgtcaaaatcatggttttgtacttgctaaggcatatgtcaggttatttgaatataattactttttgaagtaattgtgaccacaaaacatcttttttacatgaaggagctgta

SEQ ID NO: 33956 - DNA, 888 bp, Macaca Mulatta
  misc_feature (1)...(888): n = A,T,C or G
ggggccgggaaaccccgtgggcctgcgcggcgttcgggcttttcgatccgccatctgcggtggagccgccacaaaaatgcagattttcgtgaaaacccttacggggaagagaccatcaccctcgcaggttgaaccctcggatacgatagaaaattgtaaaaggccaaggatccagggataagggacaggaattccctcctgaatcaggcaaaagactggatcttttgctggcaagcaactggaagcactggacgtactttgtctgactacaatattcaaaaggagtctactcttcatcttgtgttgagacttcgtggtggtgctaagaaaaggaagaagaagtcttacaccactcccaagaagaataagcacaagagaaagaaggttaagctggctgtcctgaaatattataaggtggatgagaatggcaaaattagtcgccttcgtcgagagtgcccatctgatgaatgtggtgctggggtgtttatggcaagccactttgacagacattattgtggcaaatgttgtctgacttactgtttcaacaagccagaagacaagtaactgtatgagttaataaaagacacgaactaaccaanannnnacccgccaactcactctgccgcttgtacgatagatacgattcgagnntttnnnnnnnnnnnnnnnnnnnnnagnnnnnnnnccattggtcaacgtgggcccttggggcctgcgggccccttcgctcaaaaaaaatttttctaaaaccatttgtctttggtgcggcgggggggccccattggggtaaagtggaagatttggccaaaaccctgtgtttccccaagggaaatacccggggggggatgaaaccaaggggcggttggaaattccccaccccaaaataaa

SEQ ID NO: 33957 - DNA, 792 bp, Macaca Mulatta
  misc_feature (1)...(792): n = A,T,C or G
ctgatgctccgaaggagggaagactgacccggtttctggacttcacccagctgacggacatggcatctgagtccgtaggaggaaaannnnnnnnnnnnnnnnnnnnnnnnnnnnnnnnnnnnnnnnnnnnnnnnnnnnnnnnnnnnnnnnnnnnnnnnnnnnnnnnnnnnnnnnnnnnnnnnnnnnnnnnnnnnnnnnnnnnnnnnnnnnnnnnnnnnnnnnnnnnnnnnnnnnnnnnnnnnnnnnnnnnnnnnnnnnnnnnnnnnnnnnnnnnnnnnnnnnnnnnnnnnnnnnnnnnnnnnnnnnnnnnnnnnnnnnnnnnnnnnnnnnnnnnnnnnnnnnnnnnnnnnnnnaaactaccagaaatcccagaaagaggaatcaggacaggagccgcagccactcccgaggagtttgaagccattgctgannnnnnnnnnnnnnnnnnnnnnnnnnnnnnnnnnnnnnnnnnnnnnnnnnnnnnnnnnnnnnnnnnnnnnnnnnnnnnnnnnnnnnnnnnnnnnnnnnnnnnnnnnnnnnnnnnnnnnnnnnnnnnnnnnnnnnnnnnnnnnnnnnnnnnnnnnnnnnnnnnnnnnnnnnnnnnnnnnnnnnnnnnnnnnnnnnnnnnnnnnnnnnnnnnnnnnnnnnnnnnnnnnnnnnnnnnnnnnnnnnnnnnnnnnnnnnnnnnnnnnnnnnnnnnnnnnnnnnnnnnnnnntaggagtcggtggggcaaagtctatggcggatggttgggaaacggcaagaaggctggaccggccaccgatattaga

SEQ ID NO: 33958 - DNA, 398 bp, Macaca Mulatta
ggatgctggggggaggagtttgatggggggcttcctggctgcttctggccctcacctcgttgggggccttcacagagaccctgtggaccctgtgccggcactgtccagtcatgaagcagctgtaaccacttccgtactgtggaaacaggactgagccagtgtgggcggctgaagctgacctcctcaggcctcaggatgacctcctgcctgagcctctcgcaggctggcttgtgcgccagttgcatctgctttcctgtagggggtcccgggcctatgctgtccccgagccactgatattctgtgccaggctacttcctatacaccaagtgcgcacctcacatctgccactgggcatgcaccaggttccacacagaatcccattatacagacgaggatgc

SEQ ID NO: 33959 - DNA, 202 bp, Macaca Mulatta
atgagaggcatagacaccccacatgatagaaagaaaagtctgaagctgttctttcaagccaagttggggcctggccatgacctcccccaaacaacaagaaactagtgagttagtagcaacgttctctggcagctgcatcgccagggcttgagtatcttggccaggactacttcctacttcctaccaagagtggggaggagac

SEQ ID NO: 33960 - DNA, 668 bp, Macaca Mulatta
tagcttttatgattttaaatttaagtataatacattgacagtagacataaaaatactatggccatagtaagtgggagcaaaaagggattttcttctgattttaataattgtgttctatttcttcaaggtaattattgcatgttatggcaaataactatcaaacccacaatttaatctcggtgtactttgatttgtagtgttcagtttagtaaatctagaggtaaacttttatttttacttcttaaaatctgttaaatattaactgttacttcctttcgccttcatccccctttcagtgtgctgttggaacaactggccagaaatctatctctagagtgattgaatatttggaacattgctagctgctttacctttgcttcaggtgctcggtaatgctggagctatccttagacaaagaaaagtcaagttatgaaagaagtccttgaagatgtaccaagaacattcatcagtatcattcgtgtttggatttttaaggccacctgatttcttcgtcatgcattcggcatttgctaaatgacagttactacatcaatctgcaactatcaaaaatgagggaaaaggttcaggctgttaacaattccatgcagtatttaaatacatttactttggcagagtttatgccctcccccttgttttcttgctttatt

SEQ ID NO: 33961 - DNA, 549 bp, Macaca Mulatta
  misc_feature (1)...(549): n = A,T,C or G
ctcagtaccagttctgccagccacagtgagcccgttactactttcacattgtctgtgacactcaagcccctctcattnttatctgtctacctccattctgaagagggaggttttggtgtccctgggcctctgggaatagaaggtccatttgtctcctttgtgtagagcaagcaagttttctgcctcactttctccatcctccacctctgagatggacacttagagacagggcaaatgtgggtccaagaaaccagggccatgaccgggtccactgtggagcagccatctatctacccgactcctgagccaggctgccgtggtgtcatttctgtcatctgtgctccgtttccttttggagtttcttccccacatatctattcctggggaataaaaactaccattggacctagaatttgggctcctgtactgtctccacctgctcttgtccaccccactgcatcccctggtgaggataaggagtcccatcctatgtacaggtcaccttcctgtgctcaggaggggggctgcggcttcaagtctctgctgtcc

SEQ ID NO: 33962 - DNA, 100 bp, Macaca Mulatta
ggtggagtgaccacctttgtggccctctatgactatgagtctaggacggagacagacctgtccttcaagaaaggcgagcggctccagattgtcaacaaca

SEQ ID NO: 33963 - DNA, 468 bp, Macaca Mulatta
  misc_feature (1)...(468): n = A,T,C or G
cctacccctttgccctccagcaccctggctcactgggcacaagcccctcgcaaggnnnncctcttcttgcccgtgtctccacattgccgacccagcatggcaagggcctggctggctgggaagagctggagatgctgccaacacatgggtcctggcaagaagggaagcagatggcttttactactgggctcaaataaaggctgctcctgaggcaantgttttctttcccacagctggagagacagggggtcctgcttgtggaatttgaggctcctcttgtcgcaggcccgaagctgccagcccggcagcagagagtggtcttagaagaggatgtcattcctctctcaccatcggtaggatactcactgagaccaggggacaaggtgctggcactttggcagccaggacaacagcagtatggtcccggcactgttcttttgggcttggagatgagagatccccggagag

SEQ ID NO: 33964 - DNA, 510 bp, Macaca Mulatta
  misc_feature (1)...(510): n = A,T,C or G
aggagcagaggcctccggacacctgccaacatgttcattatcaacctcgccatcagcgacttcctcatgtccttcacccaggcccctgtcttcttcgccagcagcctctataagcactggctctttggggagacaggnnnnnnnnnnnnnnnnnnnnnnnnnnnnnnnnnnnnnnnnnnnnnnnnnnnnnnnnnnnnnnnnnnnnnnnnnnnnnnnnnnnnnnnnnnnnnnnnnnnnnnnnnnnnnnnnnnnnnnnnnnnnnnnnnnnnnnnnnnnnnnnnnnnnnnnnnnnnnnnnnnnnnnnnnnnnnnnnnnnnnnnnnnnnnnnnnnnnnnnnnnnnngcctatgtgcccgaggggttgctgacatcctgctcctgggactacatgagcttcacaccggctgtgcgtgcctacaccatgcttctctgctgcttcgtgttcttcctccctctgcttatcatcatctactgctacatcttcatcttcagggccatccgggagacagga

SEQ ID NO: 33965 - DNA, 138 bp, Macaca Mulatta
aggctcagcctcgaagcggatggcgctggtgctggaacgggtgtgcagcaccctcctgggcctggaggaacacctgaatgccctggaccgggctgctggtgatggcgactgtggcaccacccacatccgtgcggccag

SEQ ID NO: 33966 - DNA, 162 bp, Macaca Mulatta
gttgtataggccagacataggttctgtcctgagtagtaaaagttgtgggaaattattagttatatccttcaaagaacattgtttcttgtgttttaagcacagtaaggggttggggggttgaagaaactatttttgaatttccgtaataatgaagagcagaat

SEQ ID NO: 33967 - DNA, 509 bp, Macaca Mulatta
gcagtataaaattagtatgaattagaaaaatataaatgtttatcatttataagtaaaacacttatacattgaaaaatcatactttttttttcctccataggatgccatagaagtttgcaagaagtttatggagcgtgaccctgatgaactaagatttaatgcgattgctctttctgcagcatagcttgtcaataatggaaacaccaaatactgtgtgatttgcaactaaattttctctgtcatacactaactcaaacattttgatattttccttaacttgatgattaaactttatgtgagttaaactttgccttaacctgtgttttatgttatttttgctccaagttaaaggcgcattgctttcctcctctttttcttgtgaaggatttatcgggtttgaaaactagcaatagctttcttattctctttatattttacaggaaattttgtattgggataccaggcacaatttccatttgcataacatgaatatatattatctatgttaa

SEQ ID NO: 33968 - DNA, 2013 bp, Macaca Mulatta
  misc_feature (1)...(2013): n = A,T,C or G
ttctgggccattgccgccgctgaccagtggaaattccagaccttcatgtgcaaggtggtcaacagcatgtacaagatgaacttctacagctgtgtgttgctgatcatgtgcatcagtgtggacaggtacattgctattgcccaggccatgagagcacacacttggagggagaaaaggcttctgtacagcaaaatggtttgctttaccatctgggtattggcagctgcgctctgcatcccagaaatcttatacagccaaatcaaggaggaatctggcattgctgtctgcaccatggtttaccctagcgacgagagcaccaaactgaagtcagctgtcttgaccctgaaggtcattctggggttcttcctccccttcatggtcatggcttgctgttacaccatcatcattcacaccctgatacaagccaagaagtcgtccaagcacaaggccctaaaagtgaccatcactgtcctgaccgtctttgtcttgtctcagtttccctataactgcattttattggtgcagaccattgacgcctatgccatgttcatctccagctgtgccgtttccaccaacattgacatctgcttccaggtcacccagaccatcgccttcttccacagttgcctgaaccctgttctctatgtttttgtgggtgagagattccgtcgggatcttatgaaaaccctgaagaacttgggttgcatcagccaggcccagtgggtttcatttacaaggagagagggaagcttgaagctgtcgtctatgttgctggagacaacctcaggagcgctctccctctgaggggtcttctctgaagtgcatggtccttttggnnnnnnnnnnnnnnnnnnnnnnnnnnnnnnnnnnnnnnnnnnnnnnnnnnnnnnnnnnnnnnnnnnnnnnnnnnnnnnnnnnnnnnnnnnnnnnnnnnnnnnnnnnnnnnnnnnnnnnnnnnnnnnnnnnnnnnnnnnnnnnnnnnnnnnnnnnnnnnnnnnnnnnnnnnnnnnnnnnnnnnnnnnnnnnnnnnnnnnnnnnnnnnnnnnnnnnnnnnnnnnnnnnnnnnnnnnnnnnnnnnnnnnnnnnnnnnnnnnnnnnnnnnnnnnnnnnnnnnnnnnnnnnnnnnnnnnnnnnnnnnnnnnnnnnnnnnnnnnnnnnnnnnnnnnnnnnnnnnnnnnnnnnnnnnnnnnnnnnnnnnnnnnnnnnnnnnnnnnnnnnnnnnnnnnnnnnnnnnnnnnnnnnnnnnnnnnnnnnnnnnnnnnnnnnnnnnnnnnnnnnnnnnnnnnnnnnnnnnnnnnnnnnnnnnnnnnnntctagaacctttccaggcaatctcagacctaatttccttgtgttctccttgttctgttctgggccagtgaaggtccttgttcttattttgaaacgatctgtaggtctggccagtgaaccnctggacaactggccccacccacaagacatccaaagtctgttnnnnnnnnnnnnnnnnnnntgtcctgctggaggttttgacctagacaaggattccacttattccttggtatggtgacagtgtccctccatggcctgagcagggagattataacagctgggttcgcagaagccagccttggccctgttgtaggcttgttctgttgcgtggcacttgctttgggtccaccgtctgctccctagaaaatgggctggttttcttggccctcttcttcctgaggcccactttatttggaggaataaagcgagcagatacgggcagcagccagggagggcaaaggggtgaagcacaggccttgctggaaaggctatttactgccatgcttctccttttcttactctatagtggcaacattttaaaagcttttaacttagagattaggctnnnnnnnnnnntaatagaattcacctttgaatctttcgtgtctttcttttcacaatttggcaaaatgtatcacctctgaaaatatttagcatattggaaaagtgctttttaatgtgtatatgaaacattaattactt

SEQ ID NO: 33969 - DNA, 1164 bp, Macaca Mulatta
  misc_feature (1)...(1164): n = A,T,C or G
gggtgctgcacctcacaccagctcctgctgtctcctcgaccaatgtgagggccatgtctctatcagatgccctgaagggcgttactgacaatgtggtggacacagtggtgcattacgtgccgnnnnnnnnnnnnnnnnnnnnnnnnnnnnnnnnnnnnnnnnnnnnnnnnnnnnnnnnnnnnnnnnnnnnnnnnnnnnnnnnnnnnnnnnnnnnnnnnnnnnnnnnnnnnnnnnnnnnnnnnnnnnnnnnnnnnnnnnnnnnnnnnnnnnnnnnnnnnnnnnnnnnnnnnnnnnnnnnnnnnnnnnnnnnnnnnnnnnnnnnnnnnnnnnnnnnnnnnnnnnnnnnnnnnnnnnnnnnnnnnnnnnnnnnnnnnnnnnnnnnnnnnnnnnnnnnnnnnnnnnnnnnnnnnnnnnnnnnnnnnnnnnnnnnnnnnnnnnnnnnnnnnnnnnnnnnnnnnnnnnnnnnnnnnnnnnnnnnnnnnnnnnnnnnnnnnnnnnnnnnnnnnngggcgggcgggtttctctaacaaacagaacccgcacagcccaggcgagtgttgccgctttcaaaatggtcccctggggaccccagcctcatcccgatgatgctgccgaggnnnnnnnnnnnnnnnnnnnnnnnnnnnnnnnnnnnnnagcatccttttggggcttcaccctcagagccagtttttaagggacaccagagccgcagcctgctctgattctatggctcggtttttactaaaagagtaattgcctaacttgatttttcatctctttaaccaaacttgtggccaaaagacatttgactgtttccaaaattcagattctgcctctgtgggtaaatatttgtcacgaatgagtaactcctgtcaccattaagaaggtccaaacagaagattttgacacattcttagcactgaacnnnnnnnnnnnnnnnnnnnnnnnnnnnnnnnnnnnnnnnnatcctctgatgtctaggctcccagcagactactttgaagggaacaatcagatgcaaaagctcttgcatgtttatttaaaatactagtgtcactttctgagtactcgccccttcacaggctgagtcccaggcctgtgcttcatagagccagcttattgctcacagccacatttccatttggatcattactgcctgcacct

SEQ ID NO: 33970 - DNA, 1903 bp, Macaca Mulatta
  misc_feature (1)...(1903): n = A,T,C or G
gcatcttggctcaacataagaaagccgtttcccacagaaacagctgcctacagcctgaagaaggtgccacagagatggaaggaggttccttacccacacctgggagacagccagccnnncagccagccgactgggcaggggcacccgggcaggggtgccagantacagtattgcatctggcaacctcccggggcgctcgatgtggttttcccacccgggagtctggaagagtctcccgcagcccgcaggagacagagacgcagcgctccccgctcaggacgagcaggagaaggagagccggctgctctcgggagccccaggcgcgaagcggcctccttccgcctcaggncaggctgccaggatggaaactaactacctaaagaggtgctttggaaattgcctggcccaggcactgacagaggtggcgaaggttcggcccagtgacccaatagaatacctggctcactggctttatcattatgagaaaacagcgaaagcaaaagaanagaatagggaagagaagatccagctgcaggaggaatatgacagtagcctcaaggaaatggaaatgacagaaatgctgaaacaggaagagtatcagattcaacagaactgtgaaaagtgtcacaaggnnnnnnnnnnnnnnnnnnnnnnnnnnnnnnnnnnnnnnnnnnnnnnnnnnnnnnnnnnnnnnnnnnnnnnnnnnnnnnnnnnnnnnnnnnnnnnnnnnnnnnnnnnnnnnnnnnnnnnnnnnnnnnnnnnnnnnnnnnnnnnnnnnnnnnnnnnnnnnnnnnnnnnnnnnnnnnnnnnnnnnnnnnnnnnnnnnnnnnnnnnnnnnnnnnnnnnnnnnnnnnnnnnnnnnnnnnnnnnnnnnnnnnnnnnnnnnnnnnnnnnnnnnnnnnnnnnnnnnnnnnnnnnnnnnnnntctctcaaagctggaagccaagtaaatgccagctagaaccaagatttaaggggctgtaaaaggagagttcagggactctccagcctactcctgttctgaaaaacctttaatcatgtgaatatttgaactagttataggataaaataaactcagaatatggattttaaataagtaaacaaatggctgtgactttttcctcttgttttatcaatgttttggagactacacagtgaaaatacatctgttggggtgatcggacccaacaccaggccgcgggggctacgaagtctggcggagtcaaaggaatgagaaaagacaagttaagagagaaagtgggaccagggggccaacgctagtatggaggctgcaaaggccccaagctctgggagcccacgctatttattggtgatcaaacaaagaaacaggtggtgaggatgtggggggttgaaaggaagtggtgtatcaagtgaacaagctacagctgtgatggtttagcattttctttgaaatatatggctacttgagataatgaaagtgctagaagcaaggagccagcaagtctagacacattccaaaggccccaaggagttttaccctggaccccggacatgttccaagccctgcctcagctcctcgctcaacactcagctttcctcccaacatacatccatcttgtgtgttcatgtcttaacttttgcttcacgtcacagtcaggcctctcagagtattatttacacatatcctgtagtctgcctttgtcactgatagcagatatttttcttcaacatatattaccagttttttaatactttttttcaatttttgtaattgtggtaaaatacatgtaagacgtaccatcttaaccatttttaagtgtgcagatcggtggtgttaagtagattcatattcttgtgcaaccatcaccaccatccagctccaaaactcatcttgcaaaactgaaactctacacccattaaa

SEQ ID NO: 33971 - DNA, 637 bp, Macaca Mulatta
gttcactactaaaagataaacaggacaaaatagtctttcctgactttgctggcgtaaatattaagaaaatggcttgagaattaaatttttttagtatgtatataaaaacagcaccattctttgtataaatcagatagatcttgaagatgaagccaagaccctggagtctacactgggtagactctgagaggtttatattttactgggtattaagatgaagaaggatcacatgagagcaaagcttagcttagaagccatcacctcccaaatggtgaccaaggaggaaacttttaagccatagtatagatgctaacccccatttaagacccgtatcagaccacttgctaagacaagaaataccagcacctcctgttctttataggaatgaaacttagatccttaaaggctgctacctgatatactcatgactgaacagttttatttgataaaaacttccaaaattgaaaatcaaaatccagcaagaattaagacatggcagcttccaaaagcataattcaaattttattcaaaatttactgttttggcttcaagtaagtgtttactgttggttgggttttaaagccataatgatggttgagtaaggattcatttattaacttctaaggttttatacatt

SEQ ID NO: 33972 - DNA, 300 bp, Macaca Mulatta
  misc_feature (1)...(300): n = A,T,C or G
cctagtatagaggaggaggatctcctcatgctgaacagttctccatccacagccaaagacactctggacaatggcgattacggagaaccagactatgactggaccatgggccccagggacgatgagtctgatgacaccnttggaagaaaacaggggttacatggaaattgaacagtcagtgaaatcttttaagatgccatcctcaaatatagaagaggaagacagcnnnnnnnnnnnnnnnnnnnnnnnnnnnnnnnnnncattgctgttgtttacattacatatcacaacaaaaggaag

SEQ ID NO: 33973 - DNA, 669 bp, Macaca Mulatta
  misc_feature (1)...(669): n = A,T,C or G
gtcttctccacggtgctcccttcgtgcgtgacctggcagctgtagctcttgtgggacttccactggtcggacgtcaggctcaggtagctgctggccgcgtacttgttgttgctctgtttggagggtttggtggtctccacacccgcgttgacagcgctgccatctgccttccaggccacttccacggctcccgggtagaagtcactgatcagacacactagtgtggccttgttggcttgaagctcctcagaggagggcgggaagagagtgaccgagggggcagccttgggctgacagtaataatcagcctcatcgtctgcctgagtccccgtgatggtgagggcagctttgttcccaaggatggagccagagaagcgatcagggaccccagcagggcgagaatttgtgctgtagatcagcgtgcgtggagcctggcctggggtctgctggtaccagctggggaagttagtggtagagactgagccagagctcaggccacaggtgagtgtgactggtcctccaggggacacggacaacgatggctcctgggtcaccacagtctcagaatccactcctgagccataagcaaggagtccgaggagaagcatcatcncaggcncatggtggggacacttatgaaggccaagtgctctcaggcttctcagctgg

SEQ ID NO: 33974 - DNA, 432 bp, Macaca Mulatta
tgcttcacacggctatatcatgctggcagccattcctgggtctggctgtggtgttaatcttcatgggatccaccattggctgccctgctcgctgtgagtgctctgcccagaacaaatctgttagctgtcacagaaggcgattgatcgccatcccagaaggcattcccatcgaaaccaaaatcttggacctcagtaaaaacaggctaaaaagtgtcaaccctgaagaattcatatcatatcctctgctggaagagatagacttgagtgacaacatcattgccaatgtggaaccaggagcattcaacaatctctttaacctgcgttccctccgcctaaaaggcaatcgtctaaagttggtccctttgggggtattcacagggctgtccaatctcactaagcttgacattagtgagaataagattgtcattttac

SEQ ID NO: 33975 - DNA, 298 bp, Macaca Mulatta
ggtcaaggggtggaagttacacctggtgcagccctcggctctgatgcaaaagcagcttttgcccctggctgcgggacagcaatgtgactactcgcatcgggagagctgctgtccgtccccacaccgtgcagaaagcgccggcgactcgggcgctgacaatggtctgcagaggggagcagagagaagcctctgttccaccctagatccgccgcctcggcgcccgcccgcggggaggagggggcgcgacaagtcatctagcgcgtgctccggagcccgcgcccgggtccggccgcctggg

SEQ ID NO: 33976 - DNA, 371 bp, Macaca Mulatta
caggtgtggttccagaaccgccgggccaagtggcgccgccaggagcggctggagtcaggctcgggtgccgtggcagccccgagacttcctgaggccccggcgctgcccttcgcccgccccccggccatgtcgctgcccctggagccctggttgggccctggaccgccggccgtgccaggcctcccccgcctcctgggtctaggcccggggctgcaagcatccttcgggcctcatgcctttgctcctaccttcgcagacggcttcgccctggaggaagcgtccctgcggctgctggccaaggacacgcacaggctcttgacagggcttggccgccagcctgagcctgctgccctcctgggcccccttctcgg

SEQ ID NO: 33977 - DNA, 370 bp, Macaca Mulatta
  misc_feature (1)...(370): n = A,T,C or G
agacggggattggccatcgcttccggaagttgtgagctttgtttccgagcgggagatcttccgagacgcgctggggnnnnnnnnnnnnnnnnnnnnnnnnnnnnnnnnnnnnnnnnnnnnnnnnnnnnnnnnnnnnnnnnnnnnnnnnnnnnnnnnnnnnnnnnnnnnnnnnnnnnnnnnnnnnnnnnnnnnnnnnnnnnnnnnnnnnnnnnnnnnnnnnnnnnnnnnnnnnnnnnnnnnnnnnnnnnnnnnnnnnnnnnnnnnnnnnnnnnnnnnnnnnnnnnnnnnnnnnnnnnnnnnnnnnnnnnnnnnnnnnnnnacaagaactctatctactgaaattattttcaacctttccccaaataacaat

SEQ ID NO: 33978 - DNA, 843 bp, Macaca Mulatta
  misc_feature (1)...(843): n = A,T,C or G
cctcggacgagagcagcctggagaccagcccgccagactcgtcgcagcggccgtccgttatgcccgcgtctccgggctcggacgccgagaaaagaaagaagcggcgggtgctattctccaaggcgcagacgctggagttggagcggcgcttccggcagcagcggtacctgtctgcgcccgagcgcgagcagctggctagtgtgctgcgcctcacgcccacgcaggtcaagatctggttccagaaccatcgatacaagctgannnnnnnnnnnnnnnnggggccgcggagtcgcccgacctggcagcatccgccgagctgcacactacgccaggcctgctgcgtcgcgtggtggtgccggtgcttgttcgcgacgggcagccgtgcggcggcggcgaggctggcaccgccgcggcccaggacaagtgcggcgcccctccagccgccgcctgaatctgccgggctaccctgccttcggtcccggttcggcgcttgnnnnnnnnnnnnnnnnnnnnnnnnnnnnnnnnnnnnnnnnnctcctggaactggtgaggccgctggggggcacctggggctaccctggactttggagcgcgctgtgcggttggagcagggccagagccgaacacctggaactctctccggccgcctctcggcagccccatctccttgggcgccagggtcccctggcgcgccctcaccagccatcgcgcaagcacacacgggggacgtgtgccagagccccctccctcaccttccctccaccgccagtcccagagttagattttatgcttgggccttatttgtatattttaaatagagatttgtatggcaagcaagttatt

SEQ ID NO: 33979 - DNA, 660 bp, Macaca Mulatta
  misc_feature (1)...(660): n = A,T,C or G
agcgtcagagcggtccgctcttctcaaatcttattggctcaagtccacgcgtctcatggcactnnnnnnnnnnnnnnnnnnnnnnnnnnnnnnngcgcgagaagatgacgtcacagtagcccggccgggcgcggaagttgcctggggctctctgcccagtaactggcatccaccggtgccgaccgaagacccctccgtcggcagcgcagttgcaatggccatttgtcaattcttccttcaaggccggtgccgctttggagatcggtgctggaacgaacatcctggtgccaggggtgcaggaggaggacggcagcaaccgcagcagcagtcttcaggtnnnnnnnnnnnnnnnnnnnnnnnnnnnnnnnnnnnnnnnnnnnnnnnnnnnnnnnnnnnnnnnnnnnnnnnnnnnnnnnnnnnnnnnnnnnnnnnnnnnnnnnnnnnnnnnnnnnnnnnnnnnnnnnnnnnnnnnnnnnnnnnnnnnnnnnnnnnnnnnnnnnnnnnnnnnnnnnnnnnnnnnnnnnnnnnnnnnnnnnnnnnnnnnnnnnnnnnnnnnnnnnnnnnggaaggaattgtaaaagatatggaggtttgggaatcatcagggcagtggatgttttctgtttattcaccagtgaaaaagaaacctaatatttcagg

SEQ ID NO: 33980 - DNA, 661 bp, Macaca Mulatta
aggcccgaggcccagagccgggagagcctggtcggaaagacatgcagcatctgagccgcgaggagcgccggcgccggcgccgcgccacagccaagtaccgcacggcccatgccacgcgagagcgcatccgcgtggaagccttcaacctggccttcgccgagctgcgcaagctgctgcccacgctgccccccgacaagaagctctccaagattgagatcctgcgcttggccatctgctatatctcctacctgaaccacgtgctggacgtctgaactcggcctgtttcccacctcccggacttctctggggcccctttccaccgctcactgcttagaatggccgcatcctccccgagcccttaaaccttggcatggagtcccaaaggccctgggcccaggcagagagcccacgggctggtcatgagggcatctttctttcactgacccgggcacctcgagggcttttctcctgggttcctcccggggtttactgctgaggcccagctgtgcagaattgtttgctagtgtggttggtatggaatccttgctagctttactaagccagccgcacttggagtctgcccccaagctctctcacggaatgctgcctcttctacccctatgtccaaattttcagcgactacagaccccagctctgtatc

SEQ ID NO: 33981 - DNA, 288 bp, Macaca Mulatta
caggtatatgtcctcgttttgctcaagacctttggccagagcagggcatggatgattcttttcaaaaagtaatactgagaagatatgaaaaatacagacctgagaatttacagttaagaaaaggctataaaagtgtggatgagtgtaaggtgaacaaagaaggttataatggacataaccagtgtttcacaactgcccagagcaaagtatttcaaagtgataaatatttgaaagtcttatttaaatttttaaattcaaacagacataagataagacatacgaaaagaa

SEQ ID NO: 33982 - DNA, 422 bp, Macaca Mulatta
  misc_feature (1)...(422): n = A,T,C or G
tgggtgtgttttggtccttattcctgggctgggtctggttgcagctgcttgaagtgcctgatcctcatgttgtccctcactatgcaactggagtggtgctgtttggtctctcggcagtggtggagcttctaggagagcccttttgggtcttggcacaagcacatatgtttgtgaagctcaaggtgannnnnnnnnnnnnnnnnnnnnnnnnnnnnnnnnnnnnnnnnnnnnnnnnnnnnnnnnnnnnnnnnnnnnnnnnnnnnnnnnnnnnnnnnnnnnnncagcttttctataccacagttctggtgctctgctatgttatttatttcacaaagttactgggttccccagaatcaaccaagcttcagactcttcctgtctccagaataacagatctgttacccaatattacaagaagtgga

SEQ ID NO: 33983 - DNA, 561 bp, Macaca Mulatta
aaagcacctctctcttctggacctctgcttcatctctgtcacagtcccccagtccattgcaaattcacttatgggcaacggttacatttctcttgttcagtgcattcttcaggttttcttcttcatagctctggcctcatcagaagtggccattctcacagtgatgtcttatgaccggtacgcagcgatctgtcaaccacttcactatgagaccactatggatcccagtgcctgtaggcatgcagtgatagctgtgtggattgctgggggcctctctgggctcatgcatgctgccattaacttctccatacctctctgtgggaagagagtcattcagcaattcttctgtgatgttcctcagatgctgaaactagcctgttcttatgaatccattaacgagattgcactggctgcattcacgacatctacagcatttatctgtttgatatccattgtgctctcctacattcgcatcttctctacagtgctgagaatcccatcagctgagggccggaccaaggtcttctccacctgcctaccacagctatttgtagtcacctt

SEQ ID NO: 33984 - DNA, 163 bp, Macaca Mulatta
caggccccacggtgcacaggtccccaagctcaaggctgcactgacccacaacccctcgggggaaggctctaagccccgcaagcggcgttgccctttccgggtgcgattcgctgacgagaccctgcaggacacaacgctccgctactgggagcgcagatgctca

SEQ ID NO: 33985 - DNA, 1157 bp, Macaca Mulatta
aacactcctgcggctgatttcatagaccctaaagcagacctgacactgatccagatttgcagtccatttttaaggacacctgtctttatctcctcaaagtcaagcagctttctctggaaaatgaatgctaactagtgtgaaccaaaagagtaagtaatagtctgaagttttttaagggagaaagctcaaaagtcattggttctcccctccgcacagggaagatgcccagtagataatgaaccaaattaagttccttccctccagccagaagttaaacatctgggatatgacgtcttcacaccaggggcactcatttcttagcagcctctctacacacatctctcaggtggtgccaagaggcacaccacgtagagcaaacttggcagctctaacaggctgcaaagtacaacttcagattccgtggcagagatttggaaagcacccacctccagactgcttcctttctaaactcgtccgagttaccagcgacagctcaaatacatgctgacaaaaaactctcatggccctaggaagaagtgacactaagccaacgccttttctttgtgcgggagcagacccagctgatgaaggggtgggcagcagtgtggggcaggcaacccactggctgcagctagcccaccataggcacagcacatcccaccactctccttctagtcccgaccaggccccagccagcaacttctaccgagagccatggctcagcaccaaactggacagtagacatcatgatccctccagttagctctaaaattacagaccccaccagtagagcttgacagctcccggcaccatcacttccttcatctgactttattgaacttttacaaactaacagtcaccagcaccaaagaattaagtcaactaacctgccttgaattttagaccagcaatccatatggctttatctggtataaatcttctgcctttgatcatttctggaccgtaggaaaaaggaatagcaatcattaaaatcttgggccagagaacactatttttacataacagtttcttaacctaaagtcaaggccttggactcttccctgagggttgcctgcgattccttcatgctttctattcagggctaagtcccttactgcaaatgtgttagctctaacatctcccacaagctagaggaa

SEQ ID NO: 33986 - DNA, 331 bp, Macaca Mulatta
  misc_feature (1)...(331): n = A,T,C or G
ggtagaggtagccttatgagtatcagtggaacacttttaagctgcaaaagccacacactttccttgtccttgttttttccccatgaggttccctcacctacaaatacttattctgtgccctacagatcggtgctttgaagccttttggacagtggttgctaggagatgacaacttttctgcttcttcacaaagttattttaaaaaaattagaacctcggttatgtttaccccatctcgctttacctggttattgaaaaagttacttggaaaatttgccagaagttttaagtctttttcaggaaaattgagagatganaaagagtggtattc

SEQ ID NO: 33987 - DNA, 459 bp, Macaca Mulatta
  misc_feature (1)...(459): n = A,T,C or G
agaatgaggaaattgaagcaatggcagccatttatggcgaggaatggtgtgtcattgacgactgtgccaaaatattttgtattagaattagcgacgatatagatgaccccaaatggacgctttgcttgcaggtnnnnnnnnnnnnnnnnnnnnnnnnnnnnnnnnnnnnnnnnnnnnnnnnnnnnnnnnnnnnnnnnnnnnnnnnnnnnnnnnnnnnnnnnnnnnnnnnnnnnnnnnnnnnnnnnnnnagaatatcggtgaaagtattctttacctgtgggtggagaaaataagagatgttctaatacaaaaatctcagatgacagaaccaggnnaggcccagatgtaaagaagaaaactgaagaagaagatgttgaatgtgaagatgatctcattttagcatgtcagccagaaagttcggttaaagcactggattttgatatcagtgaaactcggaca

SEQ ID NO: 33988 - DNA, 873 bp, Macaca Mulatta
ggcatctgagggagcttcacttggacaacaacaagcttaccagagtacctggtgggctggcagagcataagtacatccaggttgtctaccttcataacaacaatatctctgtagttggatcaagtgacttctgcccacctggacacaataccaaaaaggcttcttattcgggtgtgagtcttttcagcaacccggtccagtactgggagatacagccatccaccttcagatgtgtctacgtgcgctctgccattcaactcggaaactataagtaattctcaagaaagccctcatttttataacctggcaaaatcttgttaatgtcattgctaaaaaataaataaaagctagatactggaaacctaactgcaatgtggatgttttacccacatgacttattatgcataaagccaaatttccagtttaagtaattgcctacaataaaaagaaattttgcctgccattttcagatcatcttttgaagctttctgttgatgttaactgagctattagagatattcttatttcactaaatgtaaaatttggagtaaatatatatgtcaatatttagtaaagcttttctttttgaatttccaggaaaaaataaaaagagtatgagtcttctgtaattcattgagcagttagctcttttgagataaagtcaaatgccaaacactagctctgtattaatccccattattactggtaagcctcatttgaatgtgtgaattcaatacaggctatgtaaaatttttggtaatgtcattatttttgaaaaaataaattaaaaaatacattcaaaaattactatttgtataacaagccttaatttgttaatatttcccctaaacacaaatttttattgaagaagaa

SEQ ID NO: 33989 - DNA, 727 bp, Macaca Mulatta
aaataaggggtcggataatcctggcaaatccttctatccaaaaggggttaattgtccagagacctagattggatatgaactagcagtacttccttcctgactgtgactcctaccacctgccggccttcttccttgttctgcactgggatcacactcccagatcacattactaaatgccaacaattatctcttaattccctatccaggctcccctcatttcaccttcagcatatattctagtcatgaatttccttcttcacacaccccacatctccgggctttgtgccagaccatctctaacttaatcctctcatccctgttcccctttctccaaagagatgaagctcaaataaaatgtataactctagtactaaacatttggatccttcctgcaccttctcccttctctgtattctgtatcctgaaggaaatgtcaaataggagggatcccagaagggagtggacatggtggagaagagatgaacaagagaaaaaaaaattaagcagcatttgattttatatgcaaggtatcttccctgtactgataggggaaatggggaaaacaggtaggttaatccgggtcaaaagcaagccagcctgtgagacttgtagtacaacgtcctgctaaactgagagcacttttgctgtcattctcagaggtcaagatcttatcctgccactggtttcataaggccaatgagctgtaccaactgatgggaattgcctt

SEQ ID NO: 33990 - DNA, 421 bp, Macaca Mulatta
acagtgctcttttaattaatctggagaaatacaaaataaaatgtaattaatgatttacatggagaaagattcatcatagagggttcaggtaggttgtccatttcgaataaagatatgtgaattggactcaaataacctgttccatcaggctttaatgcctgccattagcccagaactgggctgggaatgcttcggcctccacaaaataagtaacatgaatatagaatatccatactcagggagcttccagaccaattaaggaggtaagagattttcatagaataattactaagatataaactttgactttgtgtgtcaaagaagtttctttaagaagaattcactttgtctaatactgtggagcagatcttcacagaggatggaatatgagagtccaggaaatgaataagaaatgtttagg

SEQ ID NO: 33991 - DNA, 723 bp, Macaca Mulatta
agaaggtgatgctgcaaacaactattgcacgttgacaacagccccgatgcttatgcctattcacccctcagaaaaggattctagtccaggtttgacttggaggttaaagttttgctatgttatattttacattacttattgttttagctgtcttcatgaatgtcttttcactattcgtttacttatcctgcacctctcagccttgattccacttagttctcttgcttagagatattacttttcccttaaagtgttccttccatgttttatggccagatggtttcttctcacctggccacttagccttagttgtctctgttgtgttatagaggtctacttgaagaaggaaaaacagggggccatggtttgactgtcctgtgagcccttcttccctgcctcccctactaacagtgctccggaatctgcaatgctagtctcctggaactttcactctttcacagtctgctttggaaggactgggcttagagtgaaaatgtaggactgagaagaatgtgaaagggggctttttgtagcttggtattcactgttgccttattaccctgtcataggcccacgccaaatggaagtcccattcttcctcaggatgtttaagattggtaagtgattagaggtctgctcgctcccttatcgtgccccttatcgtgcttctggctctgcagttactagcacagtgttaccatcaacaaccttaacttcattttc

SEQ ID NO: 33992 - DNA, 534 bp, Macaca Mulatta
tttcttgttctgcgttagcttatctctagcctctctgtgggctgttcctaccctatcctggaatcttctacgagactgtataaagagtggagtacccttccagctgggagatggagggtcacttggggcgagattcccatatatgcctgtgtgggaagagcaaggaccaggtgccttctaagggctttagctgaaattcttctggtgaaacaggagtttgaacttggtctgctttttcctgtttttcagcttcctgatgacttgtatctcacttcgaaatctgatattaggccgcccttccctggagcagctggcccaggaggtgacttatgcaaacttgagaccctttgagccagttggagaaccgagtccttcaaacatggattcttcacatcctaatcctcccgagtcaaatcctgatcctgtccactcagagttctgaagggggccagatgttgggtgcagatgtagaagcagccagtcacagacccattctatgcaatggacatttatttgaaaaaagttctcaaaagt

SEQ ID NO: 33993 - DNA, 846 bp, Macaca Mulatta
gattctaaaataacaactacacctacagtgcttcattcagcttcctcaggagtggaaaagcaagttgaacatggtccacatgcactagcattttcagctttgtcagaagaaattaaaaaagaaatggaacccagttcctcaacaaccacagcatctgtaactaagcttgattcaaacttaaccaaagtagtaaaagaagaaatctcaacagattcatctcttgtcactcctgtaggtcatccagtcttaacaaaagtaggaaagggtgaattaggaagtggtttgccaccactggtaacatctacagatgagcattcagttcttgcagaagaagacaaggtggcaattaaaggtgcttctcccaatgaaacttcatccaaacatttagcttggtcagaagcagagaaggaaattaaatttgattcacctccaagtgtctcctctatagcagagcattctgttttgtcagaagttgaagccaaagaagttaaagctgggttgccagtaatcaaaacatcatcttctcaatattcagacgaatctgaggaagcaagggtagaagataaacaaggtctttcatgttctacagttcgcgactctgagcatttggtttcatcagagaaaaagagcttggtgtctacctcagaggtgttagggcctgaacatgagctttcactcagcctatggggtgagataaagaaggaagaaactgaacttccttcatcacaaaatgtgtcacctgcatccaaacatataattccaaaaggcaaagatgaggaaatagcaagttcatctcctgagttggaaaattcagcatcaggtttagctccaacattactgctcctc

SEQ ID NO: 33994 - DNA, 114 bp, Macaca Mulatta
aagattgatgagctggaagaacaatgcagtgagatcaacagagagaaggagaagaacacacaactgaagaggaggatcgaggagctggaggcagagctccgagaaaaggagaca

SEQ ID NO: 33995 - DNA, 966 bp, Macaca Mulatta
ggggtgaccagtatgcactgaagatgaggtttgtagaccatgtgtttgatgaacaagtgatagattctctgactgtgaagatcatcctgcctgaaggagccaagaacattgaaattgatagtccctatgaaatcagccgtgccccagatgagctgcactacacctatctggacacattcggccgccctgtgattgttgcctacaagaaaaatctggtggaacagcacattcaggacattgtggtccactacacgttcaacaaggtgctcatgctgcaggagcccctgctggtggtggcggccttctacatcctgttcttcaccgtcatcatctatgttcgactggacttctccatcactaaggatccggccgcagaagccaggatgaaggtagcctgcatcacagagcaggtcttgaccttggtcaacaagagaataggcctttaccgtcactttgacgagactgtcaataggtacaagcaatcccgggacatctccaccctcaacagtggcaagaagagcctggagaccgaacacaaggccttgaccagtgagattgcactgctgcagtccaggctgaagaacagagggctctgatctttgtgaaagagtgagcgaaatggagaagctgggatgcacaggtcaaggagctggtgctgaattcggcggtggaaggcttagcgccctggtggcctggcaagctccaagaaagaacacgtacatttgagaatgagaagctcatctcaggaaagcgccaggagctggtcaccaagatcgaccacatcctggatgccctgtagcccctgcccgcatcctcagggaggcccagggtgcctgcactttgcagtggcaggcagaatgggtggtagtgggaggttgtgcatggaggccagtgaaggctgacatctgtcaaaggccttcaaggaagagaaaccaggccctgcctcaggcagtgtgagaagcttgc

SEQ ID NO: 33996 - DNA, 652 bp, Macaca Mulatta
attgttcaagatgacatttgtattaccggcactgtcatcacaaccgtcactcgtggtgggagtttgcacgccacagtctcgatcatcaacatctacaaagagggaaatttggcgattcagcaggcgggcaagaacatgagtgccaggctcactgtggtctgcaagcagtgccctctcctcagaagaggtctaaattacattattatgggccaagtaggtgaagatgggcgaggcaaaatcatgccaaacagctttatcatgatgttcaagaccaagaatcagaagcttctgaatgccttaaaaaacaagcagtgttaacagtgaactgtgtccgtttaagctgtattctgccattgcctttgaaagatctattttctctcagtagaaaaaaaaatacttataaaattacatattctgaaagagcattccgaaagatgggactgattgactcttcacatgatggaggtatgaggcctcggagatagctgagggaagttctttgcctgctgtcagaggagcagctatctgattggaaacctgctgacttagtgtggtgataggaagctgaaagtgtcaagcgttgacagcttggaagcagtttattttatacatctctgtaaaaggatattttagaattgagttgtgtgaagat

SEQ ID NO: 33997 - DNA, 227 bp, Macaca Mulatta
ccatcctccgccctcccctccacccagagacaggcatgcccgcccttggaggagagaacgcgggagagacagaccaaggaggcatttttgcagtgcaaggaaggaggggccaaaaagtaaaaagcataataaacacccagactattttatatacatgtataacaaacaaaaccggaagagaaaaagggggcgatcatgagatctcgtttatactgtggtggtgtttc

SEQ ID NO: 33998 - DNA, 1713 bp, Macaca Mulatta
  misc_feature (1)...(1713): n = A,T,C or G
actgatgctgttggagacaagtatagttggcgaattcccattaaccacaatgacttcaaaatttttaaaaataatgagcgtcagctgtgtgaagttctccagaataagtttggctgtatctctaccgtggtctctccagttcaggaaggcaacagcaaatctctgcaagtgttcagaaaaatgctgactcctagggtagagttatcagtctggaaagatgacctcaccacacatgctgttgatgctgtggtgaatgcagccaatgaagatcttctacatggaggaggcctggccctggccctggtgaaagctggtggatttgaaatccaagaagaaagcaaacagtgggttgccagatttggtaaagtattagctggtgagataggtgtcacgggagctgggaggcttccctgcaaacagatcannnnnnnnnnnnnnnnnnnnnnnnnnnnnnnnnnnnnnnnnnnnnnnnnnnnnnnnnnnnnnnnnnnnnnnnnnnnnnnnnnnnnnnnnnnnnnnnnnnnnnnnnnnnnnnnnnnnnnnnnnnnnnnnnnnnnnnnnnnnnnnnnnnnnnnnnnnnnnnnnnnnnnnnnnnnnnnnnnnnnnnnnnnnnnnnnnnnnnnnnnnnnnnnnnnnnnnnnnnnnnnnnnnnnnnnnnnnnnnnnnnnnnnnnnnnnnnnnnnnnnnnnnnnnnnnnnnnnnnnnnnnnnnnnnnnnnnnnnnnnnnnnnnnnnnnnnnnnnnnnnnnnnnnnnnnnnnnnnnnnnnnnnnnnnnnnnnnnnnnnnnnnnnnnnnnnnnnnnnnnnnnnnnnnnnnnnnnnnnnnnnnnnnnnnnnnnnnnnnnnnnnnnnnnnnnnnnnnnnnnnnnnnnnnnnnnnnnnnnnnnnnnnnnnnnnnnnnnnnnnnnnnnnnnnnnnnnnnnnnnnnnnnnnnnnnnnnnnnnnnnnnnnnnnnnnnnnnnnnnnnnnnnnnnnnnnnnnnnnnnnnnnnnnnnnnnnnnnnnnnnnnnnnnnnnnnnnnnnnnnnnnnnnnnnnnnnnnnnnnnnnnnnnnnnnnnnnnnnnnnnnnnnnnnnnnnnnnnnnnnnnnnnnnnnnnnnnnnnnnnnnnnnnnnnnnnnnnnnnnnnnnnnnnnnnnnnnnnnnnnnnnnnnnnnnnnnnnnnnnnnnnnnnnnnnnnnnnnnnnnnnnnnnnnnnnnnnnnnnnnnnnnnnnnnnnnnnnnnnnnnnnnnnnnnnnnnnnnnnnnnnnnnnnnnnnnnnnnnnnnnnnnnnnnnnnnnnnnnnnnnnnnnnnnnnnnnnnnnnnnnnnnnnnnnnnnnnnnnnnnnnnnnngtcccccagtcaaccagagaggagaaaagagaaaatgggcttgaagctagatttcctgccatcaatctgatgggattcaacatggaaaaaatgtgggaggcccatgcatggatccaaagaatactgagtctccagaaccatcacatcattgagaataatcatattctgtaccttgggagaaaggaacatgacattttatctcagcttcagaaaacttcaagtgtctccatcacagaaattatcaaaccaggaaggacagagttagagattaaaggagcccaggctgacctcattgaggtggttatgaacattgaagatatgctttgtaaagtacaggaggaaatggcaaggaaaaaggagcaagaactttggagcttgttag

SEQ ID NO: 33999 - DNA, 355 bp, Macaca Mulatta
  misc_feature (1)...(355): n = A,T,C or G
gggcggagaatcattacaaaagaaactcctggacattgaaggattatattcaaaagttcgatctcgatatagtttcatacaggctcttgtcagacgtatccgtggcctcttgaggatatcaaggaactgagagcccgtgcttatgctcttctatgagagagatgaattggggagaactgtctccattttatagattaatttctttctaaattatgaccaaaaatattttgctatttctttctttgtatatggacatcttttctgtaaactttgcctagttccatcctcactagnnnnnnnnnnnnnnnnnnnnnnnnnnnccnnnnnnnnnnnnnnnnnnnnnnnnnnnnnnnnn

SEQ ID NO: 34000 - DNA, 767 bp, Macaca Mulatta
ggtgcgctatggcaaagtgtggagtgactatgtcgttgagggcagtggagacctggaggagatctttctgcaccctggggaatcagtgatccaggtttccgggaagtacaaggggtacctgaagaaggtggtctttgtgacagacaagggccgctatctggcttttgggaaagacagcggcacaagtttcaatgctgtccccttgcaccccaacaccgtgctccgcttcatcagtggccggtctggttccgtcattgatgccattggcctgcactgggatgtttaccccagtatctgcagcagctgctgagtcccctctccttggcagggacactgtgatgaggagtaagaactcttttatcactaacccccatccaaatggctcaataaaaaaatatggttaaggctagtgtgtgtgggggcatatgtggctgggatatctgcctcctgactcagctggggacgtgcaaatctcacttctggctggctttggacatctgtctggaagagtgggaagatgagggagaggtgtgtgagaatcctgggcttgtactatgatttatcaagaggagatgagactctggcttccatcaacgctcttcaaggacagctccttagaacattgatccaaactggagtcctgggtctgaggggaaggcctagttgtggcttataccaaaaccgcagatgtcccactctccagctctcctcatccctggtcctccccttgagaaagtgctgaactcacttgctgtgtgtgggtggcc

SEQ ID NO: 34001 - DNA, 1049 bp, Macaca Mulatta
  misc_feature (1)...(1049): n = A,T,C or G
tgtgctgtccgtgggagccgatgtccagtttcgcatctaggacccggtgctgtcggtgatgactgtgaaagacctgaacacagccacacgcatgacggcccagaacgccatgaccaaggccctgctcaagaggccgctgcgggagatccagatggagaagctcaagatcagcgaccagcttctnnnnnnnnnnnnnnnnnnnnnnnnnnnnnnnnnnnnnnnnnnnnnnnnnnnnnnnnnnnnnnnnnnnnnnnnnnnnnnnnnnnnnnnnnnnnnnnnnnnnnnnnnnnnnnnnnnnnnnnnnnnnnnnnnnnnnnnnnnnnnnnnnnnnnnnnnnnnnnnnnnnnnnnnnnnnnnnnnnnnnnnnnnnnnnnnnnnnnnnnnnnnnnnnnnnnnnnnnnnnnnnnnnnnnnnnnnnnnnnnnnnnnnnnnnnnnnnnnnnnnnnnnnnnnnnnnnnnnnnnnnnnnnnnnnnnnnnnnnnnnnnnnnnnnnnnnnnnnnnnnnnnnnnnnnnnnnnnnnnnnnnnnnnnnnnnnnnnnnnnnnnnnnnnnnnnnnnnnnnnnnnnnnnnnnnnnnnnnnnnnnnnncaggacaaggaagagtgggacacggggtgcctgatggcatccctgatgtggtggtagagatggccgaggcagacctgcgggccctgctgtgcagagagctacggcccctgggggcctacatgagcggacggctgaaggtgaagggcgacctggccgtggccatgaagctggaggctgtcctcagggccctgaagtagcagccttggttgactttccatagcccagtcccaagcctggcaccaagcccgaggggcctattggaggaggaagtgttcatctgtaccactgagagttgaggccctaacaagtttcaggcccagccaagagcccatggatggaggctgggggagactgagtctggctgccatgcacttctcccctacaatggttctctggacaagcctttgtccatcctggtccccagctgagtgcccagccttgagctgggtgcacggtgtgat

SEQ ID NO: 34002 - DNA, 384 bp, Macaca Mulatta
atatattctattttgtggggaatttatatgttggagaataactgaatttaagtgacccattaaaatctagcacacctgtatgaaaaattagtgtagaataatacctcatgtgcagatgcagatgctaggtggcaggacagtctcattcatctgactagctctcaacagtaaataaggtacatctggcgtctcagcagagttactgtactcaaatggcacgtgtctccaggacagcttatgaatatctaaaatgtcagctacctgcctaggagccactatatgtatagatagctgtaagttatgaacccagttcataggccaccttgagttagaattttggtacctacaacatgcttgatttcgagtgataaaacaaaaagaatt

SEQ ID NO: 34003 - DNA, 776 bp, Macaca Mulatta
  misc_feature (1)...(776): n = A,T,C or G
ggggcggatgggtagatacatatcacaacacaggtattacaggaataactgaagcagttaaagagatcacattggaaaacaaggacaatataagacttcaagattgctcagcactatgtnnnnnnnnnnnnnnnnnnnnnnnnngagaagctgcagatatggaagaatatgaagagagtggattgttggaaacagatgaggctaccctagatacaagcaaaatagtagaagcttgtaaagccaaaactgatgctggcggtgaagatgctattttgcaaaccagaacttatgacctttacatcacttatgataaatattaccagactccacgattatggttgtttggctatgatgagcaacggcagcctttaacagttgagcacatgtatgaagacatcagtcaagatcatgtgaagaaaacagtgaccattgaaaatcaccctcatctgccaccacctcctatgtgttcagttcacccatgcaggcatgctgaggtgatgaagaaaatcattgagactgttgcagaaggagggggagaacttggagttcatatgtatcttcttattttcttgaaatttgtacaagctgtcattccaacaatagaatatgactacacaaggcatttcacaatgtagtgaagagagcataaaatctatcctaattactggttctgatttttaaagaattaacccatagatgtgaccattgaccatattcatcaatatatacagttttctctaaataaaggaactttatatgtttatgcattaaaataa

SEQ ID NO: 34004 - DNA, 603 bp, Macaca Mulatta
ccagatgcaggccatactgctgggccacagcacagctggagccatagccaggctgctggcatcctccccccgggccaccgtcacagtggagcacagcccagaggggggcgactatgcctctgtgaggacagcgctgctggcagccagggctgtggataggacccgagtctactacaggctgccccaggggcaccgcaaggacttgctggccgatgttggcagaaactgagcaccccggggtggtggcccagcgggctccagggcggaggcttcccacggggaggcaggaagaaataaaggcctttggctttctccaggcactgtatgtgagtccttgggggcaggatggagtgggagtgggcatgatgtggccactgagggcatctagagggtctggaggctgggggccagatcattccggttgtccaagagaaactgctcgcaagccttgaaggtggtgtagaactcagaggagaggccggccacattggtagtcacatagttgagaacacctggggtagcctggttgtagtaggacacctgcagggtgggaagccaggctcagggggaccgagctaggggagggtactgggaaggggtggg

SEQ ID NO: 34005 - DNA, 599 bp, Macaca Mulatta
  misc_feature (1)...(599): n = A,T,C or G
cacaacatttttcaggaaaacgacccagcatatatactgaatgatctctacatctcagactactgtgcgtggattcagaaagtcaaatccaaaacgttggcagctcttgcagaagccttaaaggaagtctcccttacaaagccccagttggggttagaactggaagaactagaagcagcagcacttcttgtccaggaggaagaatctgcattaaaagcagcccattcagtttctgggcagcagaaactttgctccagctctgaggcaagtgattcggaggactcagacagcactgtgtcatctggaaacgaagactcagactcagattcagaacaagatgaactcaaagatagtccatctgagacagtcagttctttgcaaggtccctttcttgaagaaagtggtgcccttcttattgttgatggtggaatatgcacaaacacagccatccaggagtctgataccagtcaaggaaagttacttgcctcttnnnncctcttggagtgtctgggcctctgatagaggagcttggggaacaactgaagaccacagttcaggtttctgaaccaagggcaccactgttgtaaccacagcaatat

SEQ ID NO: 34006 - DNA, 1020 bp, Macaca Mulatta
  misc_feature (1)...(1020): n = A,T,C or G
agattttctgcatttatttggaaaaaacatgactccagagaggactgtagagttccaacatatcatccccatatctgcagttactggagaaggtatcgaagaattaaagaactgtataagaaagtcactggatgaacaggccaaccaggaaaatgatgcgcatcataagaaacaattgcttaatttgtggatttctgatacagtgtcttctagtgagccaccatcaaagcatgctgttactacttccaaaatggatataatttaaatatattaaaaatggtattaatggaatagttatttaatgcttaaaaacaaggaaatcctttcgtctgtgataacctggaggacatgttaagtaaaataagcaaggcttagaaagacaaatactgcataatctcacttacatgtggaatcttaaaaagttgaactcatagaaggagagaacagaatttggttatcaagggctggtggggcagtggaggattgaggagatcgtcaaaatatgcaaaatttcggttagannnnnnnnnnnnnnnnnnnnnnnnnnnnnnnnnnnnnnnnnnnnnnnnnnnnnnnnnnnnnnnnnnnnnnnnnnnnnnnnnnnnnnnnnnnnnnnnnnnnnnnnnnnnnnnnnnnnnnnnnnnnnnnnnnnnnnnnnnnnnnnnnnnnnnnnnnnnnnnnnnnnnnnnnnnnnnnnnnnnnnnnnnnnnnnnnnnnnnnnnnnnnnnnnnnnnnnnnnnnnnnnnnnnnnnnnnnnnnnnnnnnnnnnnnnnnnnnnnnnnnnnnnnnnnnnnnnnnnnnnnnnnnnnnnnnnnnnnnnnnnnnnnnnnnnnnnnnnnnnnnnnnnnnnnnnnnnnnnnnnnnnnnnnnnnnnnnnnnnnnnnnnnnncaggcacggtggctcacgcctgtaatcctagcactttgggaggccgaggagggtggatcacttgaggtcaggagatcgagaccagtctggccaacgtggtgaaaccctgtctctactaaaaatacaaaaaa

SEQ ID NO: 34007 - DNA, 799 bp, Macaca Mulatta
  misc_feature (1)...(799): n = A,T,C or G
cagggagggccggcccgaggagtggaggacaccggccgcctgggggccccgcagcagagaccccggcccggggcccagtcgcccggcgcagcccaaggccccccgcttccccagcaacatcatcgtcaccaacggcgcggcccgggagccccacaggaccctgtccagggcggccgtcagcgtgcaggagcgcagggcgcaggtgctggccaccatccacggccacgccggcgccttccccgccgcaggggatgtgggcgagggggccccggggggcagctcctccccggagcaggtggcacgtggccagggcctgcctggccccgctgagagtctccgggcagggggtcaggctccgcggggcccggcgctggccaacggcttctcaagtgcgcacgaggccctgaagagcgcacccagcgccttcgcgcccaccgggaagtccctctgcttccgccccggcccggccctgcccagtgcgcgggcccgccagagcttccccgggccccggcagcccgacggtgcccaggactggcgcctcgcagactccctgccccggccgcagggcatcaccgtgcagttcgcaggccgcggctcctcggaggaggcccgcagggaggcgctgcggaagctggggctgctcagggagagctcgtgagggccgcgcgggctccggtccaccnnnnnnnnnccaccctgaagagagggtgagagtcgctgcacgcaggagctgtttggcctaaaacggaagtggcaggggaacgcttgccctctgcggcgcatcagagtctagaggtgc

SEQ ID NO: 34008 - DNA, 1123 bp, Macaca Mulatta
gggggccgccggaactaccaccgtggccgccgccgtaaccgccgccggagcttcctcctccgtaaccgccgccggagcttcctcctccgtagccgccgccgtaacttccgccgccgcgtccaccgcctccggaactaaacggggtgaggtcacattcggttatctctaacgttggaaaacgatggcgctaacacccattatggagattaaccacttttcatcgggtttttaactctaagtcttgaggaatacaacggtgaatgcaagattcattttattttcatcaccatggggcgtaccctgttgttgagttctctgggtcagacctctacagacttctcagatggatcctaggtctctgggcttgccgtgaaattactcgctgctcagggagagagttgaaatggtggcatcctccccctctgttgttccggctgtgtcccctaactctgttgctccggctgtgtcccctaactctgttgcttcggctgtgtccctcactctgttgctctggctgcagctcattctgttggagcctcctcatctcagctggtcacctgctggtaatagggtgttcggcatgctccatttctccacggtcccccatatagttattctcattgtttcgcggaatcaccccccttttttccgcgcgcgtcttgcccgagagcgtgtgcctttcccttactccgttctggcctgcgttctatgggccaagctcccatgcctactgccgtggcactcttatccgggaaacacgcagcgggaaggttcgaacaaaggataggaggcgtttcgccccccggtccggacgcattatacctctacccttccgcagtacccgacacccgctgcggcctggcacctcttttcgctgtcatgtcgtgcactcggccgtatcgcatgactcgccatctccccatcccccctctttttgctccggcgatggcaccggacgcatgcatcgcgcggggtctctcgcccaccggcagggtacgtcccccctgtcttttggtcgcttttgtccccacccttccggtgccggatgcggcgggcgctgaccctgcacatcgcatacacttcctagcggtctgtcttgctgtaacgccacttctacgtatac

SEQ ID NO: 34009 - DNA, 1040 bp, Macaca Mulatta
  misc_feature (1)...(1040): n = A,T,C or G
caaatatggaaagaagcaagaattgacattcctcctcttttgagaggtttaacctgggctgctcttctgggagttgaggnnnnnnnnnnnnnnnnnnnnnnnnnnnnnnnnnnnnnnnnnnnnnnnnnnnnnnnnnnnnnnnnnnnnnnnnnnnnnnnnnnnnnnnnnnnnnnnnnnnnnnnnnnnnnnnnnnnnnnnnnnnnnnnnnnnnnnnnnnnnnnnnnnnnnnnnnnnnnnnnnnnnnnnnnnnnnnnnnnnnnnnnnnnaggtcttgactcactctgtgctccattcctgtatctaaacttcaataatgaagnnnnnnnnnnnnnnnnnnnnnnnnnnnnnnnnnnnnnnnnnnnnnnnnnnnnnnnnnnnnnnnnnnnnnnnnnnnnnnnnnnagagtatctgactgtcttctctcagatgattgcatttcatgatccagagctgagtaatcatctcaatgagattggcttcattccagatnnnnnnnnnnnnnnnnnnnnnnnnnnnnnnnnnnnnnnnnnnnnnnnnnnnnnnnnnnnnnnnnnnnnnnnnnnnnnnnnnnnnnnnnnnnnnnnnnnnnnnnnnnnnnnnnnnnnnnnnnnnnnnnnnnnnnnnnnnnnnnnnnnnnnnnnnnnnnnnnnnnnnnnnnnnnnnnnnnnnnnnnnnnnnnnnnnnnnnnnnnnnnnnnnnnnnnnnnnnnnnnnnnnnnnnnnnnnnnnnnnnnnnnnnnnnnnnnnnnnnnnnnnnnnnnnnnnnnnnnnnnnnnnnnnnnnnnnnnnnnnnnnnnnnnnnnnnnnnnnnnnnnnnnnnnnnnnnnnnnnnnnnnnnnnnnnnnnnnnnnnnnnnnnnnnnnngtcaagagaatccatcccattaaatgacctaaagtcagaagtatcaccacggatttcagcagaggacctgattgacttgtgtgagctgacaatgacaggccacttcaaaacacccaccaagaaaacaaagtccagtaaaccaaagctcctggtggttgacatccggaacagtgaaga

SEQ ID NO: 34010 - DNA, 112 bp, Macaca Mulatta
acggcatgaagaccaagaacatcccagtttatgaatgtgaaagatctgatgtgcaaatacatgtgcccacattcaccttcagagtaaccgttggtgacataacctgcacagg

SEQ ID NO: 34011 - DNA, 301 bp, Macaca Mulatta
agtttataaagaattctgtttctgccaccagcagtttgacctgtagtcacacaggattttatgataataacagagatgaaaatggacttttattttctctctgtttggtgctctaagtgggtttgtagccacttttctgttactttatgattctcatttcaacaggaatggccagtaaaagttgttttatttttcctgttaaggtttataacctttttacatttttgacctgtattagattagaatttcattatgcattccgtttagttgaggcgcttcatagttttctggagatagtcag

SEQ ID NO: 34012 - DNA, 196 bp, Macaca Mulatta
aggtacacatgggcactcacatgtggaatagcacccctgcacgacggggtcggcggctgtaggtggatggccccatgacatttctaggaggcaatcccgtcaagttcccagaaatgttccagaaggatttggagggaagatcaggaagtggggatccttccagtttctggaatacaggatgcagcagcgctctcca

SEQ ID NO: 34013 - DNA, 1633 bp, Macaca Mulatta
  misc_feature (1)...(1633): n = A,T,C or G
caggtgctggccagcctccggagcgtccgtagcaacttctcactcctgaccaatgtgcccgttcccactaacaannnnnnnnnnnnnnnnnnnnnnnnnnnnnnnnnnnnnnnnnnnnnnnnnnnnnnnnnnnnnnnnnnnnnnnnnnnnnnnnnnnnnnnnnnnnnnnnnnnnnnnnnnnnnnnnnnnnnnnnnnnnnnnnnnnnnnnnnnnnnnnnnnnnnnnnnnnnnnnngttcaagaggatgttgaaccgtgaactcacacacctgtcagaaatgagcaggtcgggaaaccaggtctcagagtacatttccacaacattcctggnnnnnnnnnnnnnnnnnnnnnnnnnnnnnnnnnnnnnnnnnnnnnnnnnnnnnnnnnnnnnnnnnnnnnnnnnnnnnnnnnnnnnnnnnnnnnnnnnnnnnnnnnnnnnnnnnnnnnnnnnnnnnnnnnnnnnnnnnnnnnnnnnnnnnnnnnnnnnnnnnnnnnnnnnnnnnnnnnnnnnnnnnnnnnnnnnnnnnnnnnnnnnnnnnnnnnnnnnnnnnnnnnnnnnnnnnnnnnnnnnnnnnnnnnnnnnnnnnnnnnnnnnnnnnnnnnnnnnnnnnnnnnnnnnnnnnnnnnnnnnnnnnnnnnnnnnnnnnnnnnnnnnnnnnnnnnnnnnnnnnnnnnnnnnnnnnnnnnnnnnnnnnnnnnnnnnnnnnnnnnnnnnnnnnnnnnnnnnnnnnnnnnnnnnnnnnnnnnnnnnnnnnnnnnnnnnnnnnnnnnnnnnnnnnnnnnnnnnnnnnnnnnnnnnnnnnnnnnnnnnnnnnnnnnnnnnnnnnnnnnnnnnnnnnnnnnnnnnnnnnnnnnnnnnnnnnnnnnnnnnnnnnnnnnnnnnnnnnnnnnnnnnnnnnnnnnnnnnnnnnnnnnnnnnnnnnnnnnnnnnnnnnnnnnnnnnnnnnnnnnnnnnnnnnnnnnnnnnnnnnnnnnnnnnnnnnnnnnnnnnnnnnnnnnnnnnnnnnnnnnnnnnnnnnnnnnnnnnnnnnnnnnnnnnnnnnnnnnnnnnnnnnnnnnnnnnnnnnnnnnnnnnnnnnnnnnnnnnnnnnnnnnnnnnnnnnnnnnnnnnnnnnnnnnnnnnnnnnnnnnnnnnnnnnnnnnnnnnnnnnnnnnnnnnnnnnnnnnnnnnnnnnnnnnnnnnnnnnnnnnnnnnnnnnnnnnnnnnnnnnnnnnnnnnnnnnnnnnnnnnnnnnnnnnnnnnnnnnnnnnnnnnnnnnnnnnnnnnnnnnnnnnnnnnnnnnnnnnnnnnnnnnnnnnnnnnnnnnnnnnnnnnnnnnnnnnnnnnnnnnnnnnnnnnnnnnnnnnnnnnnnnnnnnnnnnnnnnnnnnnnnnnnaggtgggttttattgactacattgtgcacccattgtgggagacctgggcagaccttgtccacccagacgcccattatattctggacactttggaggacaaccgggactggtactacagcgccatccggcagagcccgtcgccgccacctgaggaggagtcaagggggccaggtcacccacccccacctgataagttccagtttgagctgactctggaggaggaagaaaaggaaaaaatatcaatggccccgataccgt

SEQ ID NO: 34014 - DNA, 4655 bp, Macaca Mulatta
  misc_feature (1)...(4655): n = A,T,C or G
ggcaagcttgggctttagttggtgtcattgatggtggaagcacttcttgcaatgaatctgtgagaaactatgaaaatcatagcagtggcgggaaggctcttgcccaaagagaattttataccgtggatggccagaagttctctgtgacagcttatagtgaatggatcgaaggnnnnnnnnnnnnnnnnnnnnnnnnnnnnnnnnnnnnnnnnnnnnnnnnnnnnnnnnnnnnnnnnnnnnnnnnnnnnnnnnnnnnnnnnnnnnnnnnnnnnnnnnnnnnnnnnnnnnnnnnnnnnnnnnnnnnnnnnnnnnnnnnnnnnnnnnnnnnnnnnnnnnnnnnnnnnnnnnnnnnnnnnnngaaacccctcagttcctgcacatgggtgagatcatagacggtgtagacatgagagctgaggttggaattcttacccggaatattgtgatccaaggagaagtggaggaatcgtgctatgcagaaaatcagtgccaattttttgattatgatacctttgggggacacgttatgnnnnnnnnnnnnnnnnnnnnnnnnnnnnnnnnnnnnnnnnnnnnnnnnnnnnnnnnnnnnnnnnnnnnnnnnnnnnnnnnnnnnnnnnnnnnnnnnnnnnnnnnnnnnnnnnnnnnnnnnnnnnnnnnnnnnnnnnnnnnnnnnnnnnnnnnnnnnnnnnnnnnnnnnnnnnnnnnnnnnnnnnnnnnnnnnnnnnnnnnnnnnnnnnnnnnnnnnnnnnnnnnnnnnnnnnnnnnnnnnnnnnnnnnnnnnnnnnnnnnnnnnnnnnnnnnnnnnnnnnnnnnnnnnnnnnnnnnnnnngggactcctcaccaagccgggcactctcctgcccactgataggaacaactccatgtgtaccaccatgcgagataaagtgtttggaaattacatccctgtgcctgctactgactgtatnnnnnnnnnnnnnnnnnnnnnnnnnnnnnnnnnnnnnnnnnnnnnnnnnnnnnnnnnnnnnnnnnnnnnnnnnnnnnnnnnnnnnnnnnnnnnnnnnnnnnnnnnnnnnnnnnnnnnnnnnnnnnnnnnnnnnnnnnnnnnnnnnnnnnnnnnnnnnnnnnnnnnnnnnnnnnnnnnnnnnnnnnnnnnnnttttcaggctggcttatttattgacaaaggtgtcaaaacaacaaactctagtgctgctgacccaagggaatacctctgtttggacaacagtgcaannnnnnnnnnnnnnnnnnnnnnnnnnnnnnnnnnnnnnnnnnnnnnnnnnnnnnnnnnnnnnnnnnnnnnnnnnnnnnnnnnnnnnnnnnnnnnnnnnnnnnnnnnnnnnnnnnnnnnnnnnnnnnnnnnnnnnnnnnnnnnnnnnnnnnnnnnnnnnnnnnnnnnnnnnnnnnnnnnnnnnnnnnnnnnnnnnnnnnnnnnnnnnnnnnnnnnnnnnnnnnnnnnnnnnnnnnnnnnnnnnnnnnnnnnnnnnnnnnnnnnnnnnnnnnnnnnnnnnnnnnnnnnnnnnnnnnnnnnnnnnnnnnnnnnnnnnnnnnnnnnnnnnnnnnnnnnnnnnnnnnnnnnnnnnnnnnnnnnnnnnnnnnnnnnnnnnnnnnnnnnnnnnnnnnnnnnnnnnnnnnnnnnnnnnnnnnnnnnnnnnnnnnnnnnnnnnnnnnnnnnnnnnnnnnnnnnnnnnnnnnnnnnnnnnnnnnnnnnnnnnnnnnnnnnnnnnnnnnnnnnnnnnnnnnnnnnnnnnnnnnnnnnnnnnnnnnnnnnnnnnnnnnnnnnnnnnnnnnnnnnnnnnnnnnnnnnnnnnnnnnnnnnnnnnnnnnnnnnnnnnnnnnnnnnnnnnnnnnnnnnnnnnnnnnnnnnnnnnnnnnnnnnnnnnnnnnnnnnnnnnnnnnnnnnnnnnnnnnnnnnnnnnnnnnnnnnnnnnnnnnnnnnnnnnnnnnnnaggtctatgtacagacatggagcactcagaatctttctatgaccattacacgagatgagtatccgtcccaccctatggtgctccgaggtattaatcagaaggctgcctttccacagtaccagcctgtggtcatgctggagaagggatataccatccactggaatgggccagcacagcggactacatttctatacctcgtcaacttcaacaantgactggattcgagttggcctttgctatccgtcaaacacaagttttcaagttacctttggctatttgcagcggcagaatggctcattatccaaaatcgaagaatatgagcctgtgcattcattggaagaactgcaaagaaagcaatctgagaggaaattctattttgactccagcacggggtnnnnnnnnnnnnnnnnnnnnnnnnnnnnnnnnnnnnnnnnnnnnnnnnnnnnnnnnnnnnnnnnnnnnnnnnnnnnnnnnnnnnnnnnnnnnnnnnnnnnnnnnnnnnnnnnnnnnnnnnnnnnnnnnnnnnnnnnnnnnnnnnnnnnnnnnnnnnnnnnnnnnnnnnnnnnnnnnnnnnnnnnnnnnnnnnnnnnnnnnnnnnnnnnnnnnnnnnnnnnnnnnnnnnnnnnnnnnnnnnnnnnnnnnnnnnnnnnnnnnnnnnnnnnnnnnnnnnnnnnnnnnnnnnnnnnnnnnnnnnnnnnnnnnnnnnnnnnngtcaatggcactgactttaccttccgaagtgcaggcgtcctcctccttgttgtggatccgtgcagcgttccattccggttgacggaaaaaaaggtttatcgtcttgctgatgtcannnnnnnnnnnnnnnnnnnnnnnnnnnnnnnnnnnnnnnnnnnnnnnnnnnnnnnnnnnnnnnnnnnnnnnnnnnnnnnnnnnnnnnnnnnnnnnnnnnnnnnnnnnnnnnnnnnnnnnnnnnnnnnnnnnnnnnnnnnnnnnnnnnnnnnnnnnnnnnnnnnnnnnnnnnnnnnnnnnnnnnnnnnnnnnnnnnnnnnnnnnnnnnnnnnnnnnnnnnnnnnnnnnnnnnnnnnnnnnnnnnnnnnnnnnnnnnnnnnnnnnnnnnnnnnnnnnnnnnnnnnnnnnnnnnnnnnnnnnnnnnnnnnnnnnnnnnnnnnnnnnnnnnnnnnnnnnnnnnnnnnnnnnnnnnnnnnnnnnnnnnnnnnnnnnnnnnnnnnnnnnnnnnnnnnnnnnnnnnnnnnnnnnnnnnnnnnnnnnnnnnnnnnnnnnnnnnnnnnnnnnnnnnnnnnnnnnnnnnnnnnnnnnnnnnnnnnnnnnnnnnnnnnnnnnnnnnnnnnnnnnnnnnnnnnnnnnnnnnnnnnnnnnnnnnnnnnnnnnnnnnnnnnnnnnnnnnnnnnnnnnnnnnnnnnnnnnnnnnnnnnnnnnnnnnnnnnnnnnnnnnnnnnnnnnnnnnnnnnnnnnnnnnnnnnnnnnnnnnnnnnnnnnnnnnnnnnnnnnnnnnnnnnnnnnnnnnnnnnnnnnnnnnnnnnnnnnnnnnnnnnnnnnnnnnnnnnnnnnnnnnnnnnnnnnnnnnnnnnnnnnnnnnnnnnnnnnnnnnnnnnnnnnnnnnnnnnnnnnnnnnnnnnnnnnnnnnnnnnnnnnnnnnnnnnnnnnnnnnnnnnnnnnnnnnnnnnnnnnnnnnnnnnnnnnnnnnnnnnnnnnnnnnnnnnnnnnnnnnnnnnnnnnnnnnnnnnnnnnnnnnnnnnnnnnnnnnnnnnnnnnnnnnnnnnnnnnnnnnnnnnnnnnnnnnnnnnnnnnnnnnnnnnnnnnnnnnnnnnnnnnnnnnnnnnnnnnnnnnnnnnnnnnnnnnnnnnnnnnnnnnnnnnnnnnnnnaagtctgaggctgttgggaccatttttgcagctttactccttagcctgttttgactgtatatttgtatttaaaatgcagagctgaactgaatatttccttttttgtttgtctgctttgttttaagaagtcggttgttttcctgaaccgtaaacttgtatctttttaacttgcacaaaggaagtctgttcttggtatcgctcttgcacttggnnnnnnnnnnnnnnnnnnnnnnnnnnnnnnnaagcttttctgttcaccctcctgccaggaaaatcccagaaagcttaatgataccccaaaatgattacacccagggagggaaaaaaaggagcgctttctagggtcagaatcgtggagagaatactcagaaatgaacctctttaaagccttacaggaatgagtcactcttacttaatgaaatgttaaagccaattaaaaagcatgccgtgatgcccagcttccctttccacagggtgcatgtgtctcctgctggtgaatcacatgtggcaagaggcaactggctccacagcctgggatgctgccataccaagaggaaagaagcagcaaaatgcctttgttgttccaaacccccatgcataaagtatagaggagggatggccaagggtgggtggtataaagtgtgttcaggctgacactggcaaggaatacagataatttcactttcctcttccaggggcaaaggctgatggcctctacctttgtatccaggagaaactgcagagcagccctgtgactttacaaaatatgctacctcaaagtgctaccgataaacctttctaactgtaagtgcccttactaagggcacatgtcttaatcaaagttagt

SEQ ID NO: 34015 - DNA, 223 bp, Macaca Mulatta
aatgtgtcctggcagttctctgccttgtgcagacagtagcctgtagccagcccagccagtgacagagtgagtctagaggtgtgatatattggtaggccaacctggctgcagccctgaagctgccttccccagttttattagcaatagttactttgacctccatcgacctgactccagcgctctcagttccaagcttggataggaaggagggtgttcttcactg

SEQ ID NO: 34016 - DNA, 1801 bp, Macaca Mulatta
  misc_feature (1)...(1801): n = A,T,C or G
aggaaatgacccactcatggcctcctcctttgacagcaatacatacgcctagtacagctgagccatccaagtttcctttccccacaaaggnnnnnnnnnnnnnnnnnnnnnnnnnnnnnnnnnnnnnnnnnnnnnnnnnnnnnnnnnnnnnnnnnnnnnnnnnnnnnnnnnnnnnnnnnnnnnnnnnnnnnnnnnnnnnnnnnnnnnnnnnnnnnnnnnnnnnnnnnnnnnnnnnnnnnnnnnnnnnnnnnnnnnnnnnnnnnnnnnnnnnnnnnnnnnnnnnnnnnnnnnnnnnnnnnnnnnnnnnnnnnnnnnnnnnnnnnnnnnnnnnnnnnnnnnnnnnnnnnnnnnnnnnnnnnnnnnnnnnnnnnnnnnnnnnnnnnnnnnnnnnnnnnnnnnnnnnnnnnnnnnnnnnnnnnnnnnnnnnnnagcctgagcctccaacaacaaacaaatggcagctggacaactggctgaccaaagtcagccagcccgctgcaccaccagagggtcccggcagcacagagcccccaccgcggcgcccagagagtaagggcagcagcgacggtgccacgagtcaggagcgttctgaatccaaagatcctcccccgaaaagctccagcaaannnnnnnnnnnnnnnnnnnnnnnnnnnnnnnnnggaaagaggagctgtcagaagtccccggcacagcaggaacccccacagaggcaaactgttggaaccaaacaacccaaaaaacctgtcaaggcctctgcccgggcggattcacgggccagcctgcaggtggaaagggaggcgggacttcttccctacggctccagagaccagacttccaaagacaagcccaaggtgaagacgaaaggacggccccggaccgcagcaagcaaagagcccaagccagcagtgcccccctccagtgagaagaagaagcacaagagctccctccctgccccctctaaggctccctcaggcccggaacccacgaaggacaatgtgggggacaggagccctgagcactttgctcttgttcccctgactcagagccagggcccgctccacagtggcggcggcagcaggactagtggctgccgccaagccgtggtggtccaggaggacagccgcaaagacagactcccattgcctttgagagacaccaagctgctctcaccgctcaggnnnnnnnnnnnnnnnnnnnnnnnnnnnnnnnnnnnnnnnnnnnnnnnnnnnnnnnnnnnnnnnnnnnnnnnnnnnnnnnnnnnnnnnnnnnnnnnnnnnnnnnnnnnnnnnnnnnnnnnnnnnnnnnnnnnnnnnnnnnnnnnnnnnnnnnnnnnnnnnnnnnnnnnnnnnnnnnnnnnnnnnnnnnnnnnnnnnnnnnnnnnnnnnnnnnnnnnnnnnnnnnnnnnnnnnnnnnnnnnnnnnnnnnnnnnnnnnnnnnnnnnnnnnnnnnnnnnnnnnnnnnnnnnnnnnnnnnnnnnnnnnnnnnnnnnnnnnnnnnnnnnnnnnnnnnnnnnnnnnnnnnnnnnnnnnnnnnnnnnnnnnnnnnnnnnnnnnnnnnnnnnnnnnnnnnnnnnnnnnnnnnnnnnnnnnnnnnnnnnnnnnnnnnnnnnnnnnnnnnnnnnnnnnnnnnnnnnnnnnnnnnnnnnnnnnnnnnnnnnnnnnnnnnnnnnnnnnnnnnnnnnnnnnnnnnnnnnnnnnnnnnnnnnnaagggttcttccggagatactgcaaatccttttccagtgccttctttgccaaatggtaactctaaaccagggaagcctcaagtgaagtttgacaa

SEQ ID NO: 34017 - DNA, 258 bp, Macaca Mulatta
  misc_feature (1)...(258): n = A,T,C or G
tggccagtgagagctcacctctgctggcctaccgactcctgggggaggaggggactgccctccctctcaatggggccggggctcctggaggggcatctgcccggaagctgtccaccttcctgggtgtggtggtgcccactgtcctgtccatgttctttttagttgtttttctgaggattggnggttcgtggtgggccatgctgggctgctgcaggccctggccatgctgctggttgcctacttcatcctggcgctcac

SEQ ID NO: 34018 - DNA, 401 bp, Macaca Mulatta
tcctaagggtatttatactttatgatgataacatggaaactgaaataaaatacaatgcgctatatcttttatgtattctaactttaaaagacaagtgcaacactgttagactgacttttatatgtgctcttttattctgataatattagggctaacttatgttttataatgattataatttacatgcttatttttaaaatagtatatgtggacgcatatatatcattatattaaaataaattctaccattttaaattggtcttttgtgagtttttatccactaaaagggcccagaaagtaatccctagaaagtaatttatgataattttattaatgcattagtaagaaacattaatactgttttgcttttctgtttccagaatatcgggctcacaccactt

SEQ ID NO: 34019 - DNA, 142 bp, Macaca Mulatta
agattttggccacaggaatctgtcgcacagatgaccatgtcataaaaggaacaatggtgtctaagtttccagtgattgtgggacatgaagcaactgggattgtagaaagcattggagaaggagtgactacagtacaaccagg

SEQ ID NO: 34020 - DNA, 463 bp, Macaca Mulatta
ccagagagtcagcagtggtcagaaaatgttttggatgtaagacaagaccattcaatttggacaccactgcggtggttaagtttgtatttccagtcaccactggggatctgtttccttcctgtggatcagccatctccagttaccactaactcagacgctacagtctgcacattgtgacttagattgaactgtcagttttcttccctcaactgtctggttttgttttaaataaccacatttgtgagttcttttggccatttcctccacctctgcccaagaagccatcatataagttgtgcctcattttgtacattcatagtagagctccatgctggtttctacatgatatttaccaccatggttcaatgtcacgatcccgtgtttcttctctaaatgtctctctgtaagctgtagataccttgtcttttgacctctgggaaaacaagacttaccatggttctgt

SEQ ID NO: 34021 - DNA, 645 bp, Macaca Mulatta
  misc_feature (1)...(645): n = A,T,C or G
aatgaaaagcacgtggcctgtgtctaatatacagatctcaaatggtaacacntgaaacacaaaatgcagtaaagtggctttgtaagttttctgcgccgagacacaccttctggtgacttctggtgaatcgagacatttatgattattaacatagaataagcaagagaaatccagattttccaacctcatgatcagtaaattcatttgaaaaatgaatgaaggtatcagagtcatcaaaaggggaaacagttggtaggtttgatggccctgcctacactgtataatgtaagacacacaataagagctataagaaactacagttaaatgttagaaataaaggcaatatcgctttctcagacttctcccagtgattatatacctgatatataaacatcttcaaatgtaaaatagttcaataacacaatgatactttgccagtgtattaatctgatatatattttgaactggaatgatctataaagaaagaaataagaaaccctaaaaagaaatcattagttccaagtcaaattatgttaatggtctatagaaaaaagtgtgggcaggaaacattggctacatgccaatttttatttcaaagagtaatgttgcacaaataatagtcatcattgtcttacacaacaaaaa

SEQ ID NO: 34022 - DNA, 306 bp, Macaca Mulatta
  misc_feature (1)...(306): n = A,T,C or G
gggccacttctagaaaaggattgtgggacggcaggtggaagatggatgcctgaagtgtagactgctgctagctcaataccatctgggagcacaaaggtgaccagaaggatgtccttggtgaagagtttgaaaatttggtcttcacaagagttgcttggctcatttgaaattgccaggagtctgaggatttctgacataactgcctgttggagtctgtaaatacacacttaagacagtgaggatgtgaataaatatattaatgcacnnnnnnnnnnnnnnnnnnnnnnnnnnnnnnnnnnnnnnnnn

SEQ ID NO: 34023 - DNA, 254 bp, Macaca Mulatta
tgaggcgtacaacggagcaacaatatcggttctcagtgtctatttcaagatacacttggagacaaccgtccggattttccacttcggttctttcgagcttagtaatactgataataaaagaaaactatgatttccccttccctttggaaaataaacataagactaaacatgagaaaacgctaacttattggaagaaaatcggagaaacgttggtgtcaatgctttgagagctggttgactgagacgcacgaact

SEQ ID NO: 34024 - DNA, 534 bp, Macaca Mulatta
ccctgtggaccagttagttttgcctagaatccagttttcttctgaatttgcaactgtctctctgatgggtgccttttgttcaacagagtaacccctgctccctgccctgctctaatacactacctgtacaaaggtcttttccttattttcaataaatgtcagacattattaaaaaagaatgaaatctcaatgaatatggcacctttccttctctggttctgtaaatggggtccatatcttgttcaaacactgtgtgccctgtcatgctatggctaaagttgactcttgcattataaaaacaaaagattgagtcctgtggtgccctagggatggagaccttaatggcaaccatctaatgccaaatgatggcccttctaaaccagtcagtttcatgccactttcaaagtagaccttgatctgattttggccaaggtgatgtgaagagctgtgaaaaaattttttgaaaaaggtttccttatttccaaaaaatggctagaaagcacaaatcccaaattgttacagaacataaatccc

SEQ ID NO: 34025 - DNA, 658 bp, Macaca Mulatta
atggaagaggacaacacatcctctacggacttcactttcatggggctgttcgacagaaaggaaacctcaggtcttctttttgccatcatcgctatcatcttcgtcaccgcactgatggccaatggggttatgatcttcctgatccaaacagatttgcgccttcacacacccatgtacttcctcctcagccacctttccttaatggacatgatgcacatttccaccattgtgcctaagatgctggttgattacctgctggatcaaaggaccatttcctttgtggggtgcacagctcaacacttcctctaccttacccttgtgggagctgaattcttcctgttgggcctcatggcctatgaccgctatgtggccatctgcaaccctctgagataccctgtcctcatgagccgccgggtctgttggatgattatagcaggttcctggtttgggggctctttggatggcttcctcctaacccccatcaccatgagctttcccttctgcaattcccgggagatcaaccacttctgtgaggctccggcagtcctgaagttggcatgtgcagacacagccctctacgagacagtgatgtacgtgtgctgtgttttgatgctgctgactcctttctctgtagtccttgcttcctatgcccgaatcc

SEQ ID NO: 34026 - DNA, 506 bp, Macaca Mulatta
actagggatcccccctctagcctatgcccctacctccccacacctcaatccactgaaccatccacaatgcacccagataggcccacccccaaaagcctggacaccttgagtacacagttatgaccaaggacagactcatctctctaggcaaatagctgctggcaaactggcattacctggtttgtggggatggggggcaagtgagtggcctctcggcctggatagcaagaagcatttggggtaggcctaggttagtcatgttaggtcttccctgtgctgagtagagacttcaggagcaccagaaatggagccagatgaaaggaccccaacacctcctggccccagccttgacagaatgtgggggcatcttcagcctggacacgcatgcatctcccctctcaagaccctcagcacttcctctactcccatcaagagccccctcacagtcccgctcacactctgccattccccctagacacccctcctctcctgtgccctctctcctc

SEQ ID NO: 34027 - DNA, 4475 bp, Macaca Mulatta
  misc_feature (1)...(4475): n = A,T,C or G
acaggaagaaggaatggaatccgaaggaagaaaattcattccagagacaaaatagctcccctcctctgttgtagctgttcctctggcaatacaaactttctgctttcannnnnnnnnnnnnnnnnnnnnnnnnnnnnnnnnnnnnnnnnnnnnnnnnnnnnnnnnnnnnnnnnnnnnnnnnnnnnnnnnnnnnnnnnnnnnnnnnnnnnnnnnnnnnnnnnnnnnnnnnnnnnnnnnnnnnnnnnnnnnnnnnnnnnnnnnnnnnnnnnnnnnnnnnnnnnnnnnnnnnnnnnnnnnnnnnnnnnnnnnnnnnnnnnnnnnnnnnnnnnnnnnnnnnnnnnnnnnnnnnnnnnnnnnnnnnnnnnnnnnnnnnnnnnnnnnnnnnnnnnnnnnnnnnnnnnnnnnnnnnnnnnnnnnnnnnnnnnnnnnnnnnnnnnnnnnnnnnnnnnnnnnnnnnnnnnnnnnnnnnnnnnnnnnnnnnnnnnnnnnnnnnnnnnnnnnnnnnnnnnnnnnnnnnnnnnnnnnnnnnnnnnnnnnnnnnnnnnnnnnnnnnnnnnnnnnnnnnnnnnnnnnnnnnnnnnnnnnnnnnnnnnnnnnnnnnnnnnnnnnnnnnnnnnnnnnnnnnnnnnnnnnnnnnnnnnnnnnnnnnnnnnnnnnnnnnnnnnnnnnnnnnnnnnnnnnnnnnnnnnnnnnnnnnnnnnnnnnnnnnnnnnnnnnnnnnnnnnnnnnnnnnnnnnnnnnnnnnnnnnnnnnnnnnnnnnnnnnnnnnnnnnnnnnnnnnnnnnnnnnnnnnnnnnnnnnnnnnnnnnnnnnnnnnnnnnnnnnnnnnnnnnnnnnnnnnnnnnnnnnnnnnnnnnnnnnnnnnnnnnnnnnnnnnnnnnnnnnnnnnnnnnnnnnnnnnnnnnnnnnnnnnnnnnnnnnnnnnnnnnnnnnnnnnnnnnnnnnnnnnnnnnnnnnnnnnnnnnnnnnnnnnnnnnnnnnnnnnnnnnnnnnnnnnnnnnnnnnnnnnnnnnnnnnnnnnnnnnnnnnnnnnnnnnnnnnnnnnnnnnnnnnnnnnnnnnnnnnnnnnnnnnnnnnnnnnnnnnnnnnnnnnnnnnnnnnnnnnnnnnnnnnnnnnnnnnnnnnnnnnnnnnnnnnnnnnnnnnnnnnnnnnnnnnnnnnnnnnnnnnnnnnnnnnnnnnnnnnnnnnnnnnnnnnnnnnnnnnnnnnnnnnnnnnnnnnnnnnnnnnnnnnnnnnnnnnnnnnnnnnnnnnnnnnnnnnnnnnnnnnnnnnnnnnnnnnnnnnnnnnnnnnnnnnnnnnnnnnnnnnnnnnnnnnnnnnnnnnnnnnnnnnnnnnnnnnnnnnnnnnnnnnnnnnnnnnnnnnnnnnnnnnnnnnnnnnnnnnnnnnnnnnnnnnnnnnnnnnnnnnnnnnnnnnnnnnnnnnnnnnnnnnnnnnnnnnnnnnnnnnnnnnnnnnnnnnnnnnnnnnnnnnnnnnnnnnnnnnnnnnnnnnnnnnnnnnnnnnnnnnnnnnnnnnnnnnnnnnnnnnnnnnnnnnnnnnnnnnnnnnnnnnnnnnnnnnnnnnnnnnnnnnnnnnnnnnnnnnnnnnnnnnnnnnnnnnnnnnnnnnnnnnnnnnnnnnnnnnnnnnnnnnnnnnnnnnnnnnnnnnnnnnnnnnnnnnnnnnnnnnnnnnnnnnnnnnnnnnnnnnnnnnnnnnnnnnnnnnnnnnnnnnnnnnnnnnnnnnnnnnnnnnnnnnnnnnnnnnnnnnnnnnnnnnnnnnnnnnnnnnnnnnnnnnnnnnnnnnnnnnnnnnnnnnnnnnnnnnnnnnnnnntgtagcctgccgaggaacggaacagaacggaggtgtgcacgggaggccccgacgtcatcactgcgcgcaggtgtgagaggagaggcctctcctgcaccgcccggctacctcactcctctgctggtagcagtgcctagagctggacctcggttctcagaagcacacacgtgcaaacaagcgatggagctgggctttaggaggggaggacacatcgtaggagagaacccagggtctctgagctggttttctcttcaggcagacatctgaggggcctgtaagcagggcagttcctttttccagtttgcctgtagaagtgggaagactgttgatgtttctgtcctttccaggacttcagaaaacagtggtgtaattacacaaggtggatctttatcttgcctaacatgctgggaatcttcaccccaccagggcaaatttccaaatagctcattttattataagtctttcaaactttcatctgacatatttccctttcccattgtcgctgatttccaagtcgctgtcnnnnnnnnnnnnnnnnnnnnnnnnnnnnnnnnnnnnnnnnnnnnnnnnnnnnnnnnnnnnnnnnnnnnnnnnnnnnnnnnnnnnnnnnnnnnnnnnnnnnnnnnnnnnnnnnnnnnnnnnnnnnnnnnnnnnnnnnnnnnnnnnnnnnnnnnnnnnnnnnnnnnnnnnnnnnnnnnnnnnnnnnnnnnnnnnnnnnnnnnnnnnnnnnnnnnnnnnnnnnnnnnnnnnnnnnnnnnnnnnnnnnnnnnnnnnnnnnnnnnnnnnnnnnnnnnnnnnnnnnnnnnnnnnnnnnnnnnnnnnnnnnnnnnnnnnnnnnnnnnnnnnnnnnnnnnnnnnnnnnnnnnnnnnnnnnnnnnnnnnnnnnnnnnnnnnnnnnnnnnnnnnnnnnnnnnnnnnnnnnnnnnnnnnnnnnnnnnnnnnnnnnnnnnnnnnnnnnnnnnnnnnnnnnnnnnnnnnnnnnnnnnnnnnnnnnnnnnnnnnnnnnnnnnnnnnnnnnnnnnnnnnnnnnnnnnnnnnnnnnnnnnnnnnnnnnnnnnnnnnnnnnnnnnnnnnnnnnnnnnnnnnnnnnnnnnnnnnnnnnnnnnnnnnnnnnnnnnnnnnnnnnnnnnnnnnnnnnnnnnnnnnnnnnnnnnnnnnnnnnnnnnnnnnnnnnnnnnnnnnnnnnnnnnnnnnnnnnnnnnnnnnnnnnnnnnnnnnnnnnnnnnnnnnnnnnnnnnnnnnnnnnnnnnnnnnnnnnnnnnnnnnnnnnnnnnnnnnnnnnnnnnnnnnnnnnnnnnnnnnnnnnnnnnnnnnnnnnnnnnnnnnnnnnnnnnnnnnnnnnnnnnnnnnnnnnnnnnnnnnnnnnnnnnnnnnnnnnnnnnnnnnnnnnnnnnnnnnnnnnnnnnnnnnnnnnnnnnnnnnnnnnnnnnnnnnnnnnnnnnnnnnnnnnnnnnnnnnnnnnnnnnnnnnnnnnnnnnnnnnnnnnnnnnnnnnnnnnnnnnnnnnnnnnnnnnnnnnnnnnnnnnnnnnnnnnnnnnnnnnnnnnnnnnnnnnnnnnnnnnnnnnnnnnnnnnnnnnnnnnnnnnnnnnnnnnnnnnnnnnnnnnnnnnnnnnnnnnnnnnnnnnnnnnnnnnnnnnnnnnnnnnnnnnnnnnnnnnnnnnnnnnnnnnnnnnnnnnnnnnnnnnnnnnnnnnnnnnnnnnnnnnnnnnnnnnnnnnnnnnnnnnnnnnnnnnnnnnnnnnnnnnnnnnnnnnnnnnnnnnnnnnnnnnnnnnnnnnnnnnnnnnnnnnnnnnnnnnnnnnnnnnnnnnnnnnnnnnnnnnnnnnnnnnnnnnnnnnnnnnnnnnnnnnnnnnnnnnnnnnnnnnnnnnnnnnnnnnnnnnnnnnnnnnnnnnnnnnnnnnnnnnnnnnnnnnnnnnnnnnnnnnnngctccgaactggtactgaactgccttctgcatgcttgaccaaagcagtgatgagggtggccagtacctgcagtgtgcatggtaggtttaaagaaaagggaatgtgttctgctgtttcctttgtccttgggctgctcaagctggacagtaggtaaccactgttttcaaggaccagcccaacttctctggcttggttcggagttcgtttcatccctagctgtgagtgccttttggtctggaaagttggcttgtctcataatacccacagctaggacattctctctgtaattatgaattgtccttgttttccattaaaagagaatgtctctgatcactagagttggtcggtgttggattatttccactgtgagattcttaaaactttttcgcttcataataaaacaactcatgttagagaccctttcaacatgaaaggtttgtagttgagacattacatatattttattgtttataataaaaatcatctatacaaaagtcctgggtgttaatattttgcacaagatctgttttccatgatgtgttgacatctacaatttcactaactgttgatgttcttttctattgagattctggagcctagggagctgtgttctttttgttcatttcgttcttatttccctgaagcaagagactatatggccttcagtgcaaagacttcagaccaattctttgtattacacttggttgcctcttggctatataacttctgagtgc

SEQ ID NO: 34028 - DNA, 1387 bp, Macaca Mulatta
  misc_feature (1)...(1387): n = A,T,C or G
ctgggctccacccttctgtgacaacccaggctttggtggcagcacggacagtggccctgtgcagcctgaaannnngacaccttcctgctggccatgctcctcagcgtcctgctgcctctgctcccaggggctggcctggcctggtgttgctaccgactcccaggagcccatctgcagcgatgcagctggggctgcaggagggaccctgcgtgcagtggnnnnnnnnnnnnnnnnnnnnnnnnnnnnnnnnnnnnnnnnnnnnnnnnnnnnnnnnnnnnnnnnnnnnnnnnnnnnnnnnnnnnnnnnnnnnnnnnnnnnnnnnnnnnnnnnnnnnnnnnnnnnnnnnnnnnnnnnnnnnnnnnnnnnnnnnnnnnnnnnnnnnnnnnnnnnnnnnnnnnnnnnnnnnnnnnnnnnnnnnnnnnnnnnnnnnnnnnnnnnnnnnnnnnnnnnnnnnnnnnnnnnnnnnnnnnnnnnnnnnnnnnnnnnnnnnnnnnnnnnnnnnnnnnnnnnnnnnnnnnnnnnnnnnnnnnnnnnnnnnnnnnnnnnnnnnnnnnnnnnnnnnnnnnnnnnnnnnnnnnnnnnnnnnnnnnnnnnnnnnnnnnnnnnnnnnnnnnnnnnnnnnnnnnnnnnggcacactctccagctcaataatccatcagtcccagaagcttttgtcacacaaaaactgacctccctcaccagtggaggctgggtagtgctggccacctgaaaagggctctgtcctgggagcctggtgcgtctcctacatgcaatttccacagacccagctctgtggagggcatgactgctggccagaagctagaagtcctggggccctatnnnnnnnnnnnnnnnnnnnnnnnnnnnnnnnnnnnnnnnnnnnnnnnnnnnnnnnnnnnnnnnnnnnnnnnnnnnnnnnnnnnnnnnnnnnnnnnnnnnnnnnnnnnnnnnnnnnnnnnnnnnnnnnnnnnnnnnnnnnnnnnnnnnnnnnnnnnnnnnnnnnnnnnnnnnnnnnnnnnnnnnnnnnnnnnnnnnnnnnnnnnnnnnnnnnnnnnnnnnnnnnnnnnnnnnnnnnnnnnnnnnnnnnnnnnnnnnnnnnnnnnnnnnnnnnnnnnnnnnnnnnnnnnnnnnnnnnnnnnnnnnnnnnnnnnnnnnnnnnnnnnnnnnnnnnnnnnnnnnnnnnnnnnnnnnnnnnnnnnnnnnnnnnnnnnnnnnnnnnnnnnnnnnnnnnnnaaaattagctgggcatgggggcatgtacctgtaatcctagctactcaagaggctgaggcaggaggatcacttgagcccaggagttcgaggttgcagtgagctatgatcacgccactgcattccaccctgggcaacagagtgaggccctgtctc

SEQ ID NO: 34029 - DNA, 120 bp, Macaca Mulatta
ggaacccgagattttgtggcttgcaatcacctaagaagctacaagtattacttggaaagcatcctcgaccccgatgggtttgctgcatacccctgcacttcctacaagtcctttgagtct

SEQ ID NO: 34030 - DNA, 164 bp, Macaca Mulatta
gggcgggacagtgactgcagacccgtctgcctccacaggagaactcactacttgaggctcagctgctgtgtcagagcggaggcacaccggtgagtccctgccccactctccccgcccaccaggccacctcagctgggctctgccctgccggtccagggccagtc

SEQ ID NO: 34031 - DNA, 358 bp, Macaca Mulatta
  misc_feature (1)...(358): n = A,T,C or G
gattaccctcttgacttgaaccacagtgaaaccttcctgcaaactacaacgtttcttcctgaagacttcacctactttgcanaccatacctgccctgaaaggctcccttccatgannnnnnnnnnnnnnnnnnnnnnnnnnnnnnnnnnnnnnnnnnnnnnnnnnnnnnnnnnnnnnnnnnnnnnnnnnnnnnnnnnnnnnnnnnnnnnnnnnnnnnnnnnnnnnnnnnnnnnnnnnnggtggcgatccttatccccttccggaatcgccacgagcacctccctgtcctgttcagacacctgattcccatgctccagcgccagcgcctgcagtttgcattttatgtggttgaacaagt

SEQ ID NO: 34032 - DNA, 1051 bp, Macaca Mulatta
  misc_feature (1)...(1051): n = A,T,C or G
taaaatcaaaaagtagttatattaggtatatacacgacagcataagtgaaacacataatgtgatacagaaatttccattcaaagcttacaggagaaaaatttagtaaacaaaacggcttgaacctcccgccaccatggctcactagagcctcctagtcacttacgttccttcatatccttgggtataaatagtctcatacacatgctacacaatttagaaaagattgctgaatcataaaaatagccccaaatgtggcactttaactttctagagtacaactaaaattaatacttgatctttaacataatgttcaaatctttgaagcaacaaaggaaactcttatgttttagaaggccctataaggttcttcagagattagaatcttagttcttccaaactacactgtcaaaacaaatctggatataggaaattgtggaaatgaaaaagctggacccttaaaaatattccttctaaacacagagcagtttctgaggctcttctccctttcctgggaggtccaggtgagcccagtgccctcgggtgcacattgcacggcacggcagctatgtgtgctcacgggctcttcttgctggaagagacagagatgtgcacgccactcctgtggcatgtctagcacgtctgagcagcgtttcatgggacaaacaatgtgctacaatctccgaatctgggaagctcggaaaaaaacacccttcgaatctgcaacaaccttttaagctgtgattactgcaaatctcaccaggtggactaacaattattttatacagtagccaccttaaaaaaccgaaaagctgcaggtgctgtagcacacaaatatgacaaaggacactgagggacagttttcgagagcatgggcgtagagacacagaagaccaggcaaagacatgttgtttttttcttctcctcgcttgccacgccccgccaccagcgcagcgccaaaaacacgaaaaaccaaaaaagaggacatagaaagagcnnnnnnnnnnnnnnnnnnnnnnngaaaaacaacataaacaaaagagaaaaaaacag

SEQ ID NO: 34033 - DNA, 1598 bp, Macaca Mulatta
  misc_feature (1)...(1598): n = A,T,C or G
gacacctatgagtatgaactcaccttgcgaaccgacctctacactaacagacacactcagtggttttattttcgtgttcagaacaccagaaaagatgccacctatcgcttcaccattgtcaacttgctaaaacccaagagtctttatactgtaggaatgaagccactcttatactcccaaatggatgccaacacgcgcaatattggctggaggagagaaggaaatgaaatcaagtactacaagaacaacatggatgatgggcagcagcccttctactgtctcacatggaccattcagtttccatatgaccaggacacttgcttctttgcacacttctacccatatacatacactgatttgcaatgctacctcctgtcagtggcaaacaaccccatccagtctcagttctgcaagctccaaactttatgcagaagcctagcaggaaataccgtttacttgctcaccatcaccaacccatcccagacccctcaagaggcagctgcaaagaaagctgtggtcttgagtgccagagtccaccctggggaaagtaatggctcctgggttatgaaaggctttttggatttcatccttagcaactccccagatgcccagctcctcagagatatttttgtcttcaaggtgcttcccatgttaaatccagatggtgtgattgtggggaattatcggtgttccttggctggaagggatttgaacaggcattataaaaccattctgaaggagtnnnnnnnnnnnnnnnnnnnnnnnnnnnnnnnnnnnnnnnnnnnnnnnnnnnnnnnnnnnnnnnnnnnnnnnnnnnnnnnnnnnnnnnnnnnnnnnnnnnnnnnnnnnnnnnnnnnnnnnnnnnnnnnnnnnnnnnnnnnnnnnnnnnnnnnnnnnnnnnnnnnnnnnnnnnnnnnnnnnnnnnnnnnnnnnnnnnnnnnnnnnnnnnnnnnnnnnnnnnnnnnnnnnnnnnnnnnnnnnnnnnnnnnnnnnnnnnnnnnnnnnnnnnnnnnnnnnnnnnnnnnnnnnnnnnnnnnnnnnnnnnnnnnnnnnnnnnnnnnnnnnnnnnnnnnnnnnnnnnnnnnnnnnnnnnnnnnnnnnnnnnnnnnnnnnnnnnnnnnnnnnnnnnnnnnnnnnnnnnnnnnnnnnnnnnnnnnnnnnnnnnnnnnnnnnnnnnnnnnnnnnnnnnnnnnnnnnnnnnnnnnnnnnnnnnnnnnnnnnnnnnnnnnnnnnnnnnnnnnnnnnnnnnnnnnnnnnnnnnnnnnnnnnnnnnnnnnnnnnnnnnnnnnnnnnnncagcaccagtggctctgacagttctctctcagatggtcttcctgttcacctagcaaacatagcagatgagnnnnnnnnnnnnnnnnnnnnnnnnnnnnnnnnnnnnnnnnnnnnnnnnnnnnnnnnnnnnnnnnnnnnnnnnnnnnnnnnnnnnnnnnnnnnnnnnnnnnnnnnnnnnnnnnnnnnnnnnnnnnnnnnnnnnnnnnnatttgcttctactctgcaaaagcatccagcctttttcaaaaactcagagaattccagttttttaccaatgagaaatgaaagaccgaggttaaatga

SEQ ID NO: 34034 - DNA, 1408 bp, Macaca Mulatta
  misc_feature (1)...(1408): n = A,T,C or G
agaaaccgcagccagacgctcagctctgaggcgagtgtggatgaaggcggcgtctttgagagtctgaaggcagaggcggcctccccaccagcgctcttctcgggcttatcaggaagcctccccaccagctcgttcccctccagcctggtgctnnnnnnnnnnnnnnnnnnnnnnnnnnnnnnnnnnnnnnnnnnnnnnnnnnnnnnnnnnnnnnnnnnnnnnnnnnnnnnnnnnnnnnnnnnnnnnnnnagccccaccaccacttccaccacggcggccaccgcgggggctccctgctgcagcacgtgggtggggagcaccgggggcactcggaggagggaggtgacgagcagcctgggacgcctgcccctgccctgtccgagctgaaggctgnnnnnnnnnnnnnnnnnnnnnnnnnnnnnnnnnnnnnnnnnnnnnnnnnnnnnnnnnnnnnnnnnnnnnnnnnnnnnnnnnnnnnnnnnnnnnnnnnnnnnnnnnnnnnnnnnnnnnnnnnnnnnnnnnnnnnnnnnnnnnnnnnnnnnnnnnnnnnnnnnnnnnnnnnnnnnnnnnnnnnnnnnnnnnnnnnnnnnnnnnnnnnnnnnnnnnnnnnnnnnnnnnnnnnnnnnnnnnnnnnnnnnnnnnnnnnnnnnnnnnnnnnnnnnnnnnnnnnnnnnnnnnnnnnnnnnnnnnnnnnnnnnnnnnnnnnnnnnnnnnnnnnnnnnnnnnnnnnnnnnnnnnnnnnnnnnnnnnnnnnnnnnnnnnnnnnnnnnnnnnnnnnnnnnnnnnnnnnnnnnnnnnnnnnnnnnnnnnnnnnnnnnnnnnnnnnnnnnnnnnnnnnnnnnnnnnnnnnnnnnnnnnnnnnnnnnnnnnnnnnnnnnnnnnnnnnnnnnnnnnnnnnnnnnnnnnnnnnnnnnnnnnnnnnnnnnnnnnnnnnnnnnnnnnnnnnnnnnnnnnnnnnnnnnnnnnnnnnnnnnnnnnnnnnnnnnnnnnnnnnnnnnnnnnnnnnnnnnnnnnnnnnnnnnnnnnnnnnnnnnnnnnnnnnnnnnnnnnnnnnnnnnnnnnnnnnnnnnnnnnnnnnnnnnnnnnnnnnnnnnnnnnnnnnnnnnnnnnnnnnnnnnnnnnnnnnnnnnnnnnnnnnnnnnnnnnnnnnnnnnnnnnnnnnnnnnnnnnnnnnnnnnnnnnnnnnnnnnnnnnnnnnnnnnnnnnnnnnnnnnnnnnnnnnnnnnnnnnnnnnnnnnnnnnnnnnnnnnnnnnnnnnnnnnnnnnnnnnnnnnnnnnnnnnnnnnnnnnnnnnnnnnnnnnnnnggaaccaaggaaactaattatgtaggttactagtgaataccccaatggtttctccaattatgcccatgccaccaaaacaataaaataaaattctctaacactg

SEQ ID NO: 34035 - DNA, 643 bp, Macaca Mulatta
tgaagttaacgttcaatcattgctcatcagtgttatccaaggcactctttctcataacactttttaaaatagtggacttactataagtcaagatacaatttgaagtattgaatctgtcatctgttttaatctctcacattcaccagtgtagttagaaataccttaactggcattttggcaaaatcataaacgtagatgagcttcatgtggtattattgtggaaggatgtgataaaatcactaagaaggtgaattaacttagtctctgatattcatctaagatggactcctctcaaaaatctctaaccagtcctccatgcccaacctcatagaactctctgctctgttcagggtgccatttcatgttgattgggttttatttgctttggttcttttccctctgtgttatgtgcttgggtcctgcctaccttccacagtcaaaacatattcattgattgtgagtgctgtttttcagagtgagattgtcactaatgtttgccagatttataaatgtaaaaaaacttgacagattttgtacgagttttttgggtgcagatgagttaagtagaattattaacatgtgactgagagaaaaacctgtgccaatttctagggaagcctaaaataattacgaggtaaataaa

SEQ ID NO: 34036 - DNA, 731 bp, Macaca Mulatta
  misc_feature (1)...(731): n = A,T,C or G
aaatggcagagctgacangctcgaatctcccagctggagatggcccgacagaagaaggagagtgaggctgtggagtggcagcagaaggcccagatggtacaggaagacttggagaagacccgtgctgagctgaagactgccatgagtacacctcatgtggctgagcctgctgagaatgagcaggatgagcaggatgagaatggggcagaagctagtgctgactacgggctgatgctatggccaaggaccgcagtgaggaggaacgtaccacttgaggcggagaagaatgagcgtgtgcagaagcacctgaaggccctcacttcggagctggccaatgcgcgagatgagtccaagaagaaccttggcccaattggaaccatttggagtctccattgggcctgggaagcaananccaattggctgnacttggtggccctgggaggaactaataagttaccataggaacccctgtcggcccaggatcccgggcaggggcaacacccaagcagcgccattgacgaatttgagtccatgtaatgggcacccagcctctagggacccctcctccctttttccttgtccccacactcctacacctaactcacctaactcatactgtgctggagccactaactagagcagccctggagtcatgccaagcatttagtgtagccatgggaccaaacctaggcccttaggccccaaccacttccctgggcaaatgaatgggt

SEQ ID NO: 34037 - DNA, 107 bp, Macaca Mulatta
agttcggaatcaagaccatgctggagacagaagaaggaatcctactgctggtcagagccatggatcctgctgttcccaacatgatgattgaagcagataagctgctt

SEQ ID NO: 34038 - DNA, 2409 bp, Macaca Mulatta
  misc_feature (1)...(2409): n = A,T,C or G
ggatgggaacggatttgacttgtccttttggcgtctccccagcctgtggagcccaggcctcttggagcatctttggggctgacgcagcggaggttccgggcacacgtggccactcccagcaggaggctgccatgccccacattcccgaggacgaggagccccccggagagccacaggcagcccagagccctgccggccaagnnnnnnnnnnnnnnnnnnnnnnnnnnnnnnnnnnnnnnnnnnnnnnnnnnnnnnnnnnnnnnnnnnnnnnnnnnnnnnnnnnnnnnnnnnnnnnnnnnnnnnnnnnnnnnnnnnnnnnnnnnnnnnnnnnnnnnnnnnnnnnnnnnnnnnnnnnnnnnnnnnnnnnnnnnnnnnnnnnnnnnnnnnnnnnnnnnnnnnnnnnnnnnnnnnnnnnnnnnnnnnnnnnnnnnnnnnnnnnnnnnnnnnnnnnnnnnnnnnnnnnnnnnnnnnnnnnnnnnnnnnnnnnnnnnnnnnnnnnnnnnnnnnnnnnnnnnnnnnnnnnnnnnnnnnnnnnnnnnnnnnnnnnnnnnnnnnnnnnnnnnnnnnnnnnnnnnnnnnnnnnnnnnnnnnnnnnnnnnnnnnnnnnnnnnnnnnnnnnnnnnnnnnnnnnnnnnnnnnnnnnnnnnnnnnnnnnnnnnnnnnnnnnnnnnnnnnnnnnnnnnnnnnnnnnnnnnnnnnnnnnnnnnnnnnnnnnnnnnnnnnnnnnnnnnnnnnnnnnnnnnnnnnnnnnnnnnnnnnnnnnnnnnnnnnnnnnnnnnnnnnnnnnnnnnnnnnnnnnnnnnnnnnnnnnnnnnnnnnnnnnnnnnnnnnnnnnnnnnnnnnnnnnnnnnnnnnnnnnnnnnnnnnnnnnnnnnnnnnnnnnnnnnnnnnnnnnnnnnnnnnnnnnnnnnnnnnnnnnnnnnnnnnnnnnnnnnnnnnnnnnnnnnnnnnnnnnnnnnnnnnnnnnnnnnnnnnnnnnnnnnnnnnnnnnnnnnnnnnnnnnnnnnnnnnnnnnnnnnnnnnnnnnnnnnnnnnnnnnnnnnnnnnnnnnnnnnnnnnnnnnnnnnnnnnnnnnnnnnnnnnnnnnnnnnnnnnnnnnnnnnnnnnnnnnnnnnnnnnnnnnnnnnnnnnnnnnnnnnnnnnnnnnnnnnnnnnnnnnnnnnnnnnnnnnnnnnnnnnnnnnnnnnnnnnnnnnnnnnnnnnnnnnnnnnnnnnnnnnnnnnnnnnnnnnnnnnnnnnnnnnnnnnnnnnnnnnnnnnnnnnnnnnnnnnnnnnnnnnnnnnnaggagcacatcctgatgagaaatcagaacttagtggggctcaagcttccggaccttagtgaagcgactgagcaggaaaaagnnnnnnnnnnnnnnnnnnnnnnnnnnnnnnnnnnnnnnnnnnnnnnnnnnnnnnnnnnnnnnnnnnnnnnnnnnnnnnnnnnnnnnnnnnnnnnnnnnnnnnnnnnnnnnnnnnnnnnnnnnnnnnnnnnnnnnnnnnnnnnnnnnnnnnnnnnnnnnnnnnnnnnnnnnnnnnnnnnnnnnnnnnnnnnnnnnnnnnnnnnnnnnnnnnnnnnnnnnaccaggctgaaagggaacgcaacctgacagaggagaacactgagaaggaactggaaaacttcaaagcttccattacnnnnnnnnnnnnnnnnnnnnnnnnnnnnnnnnnnnnnnnnnnnnnnnnnnnnnnnnnnnnnnnnnnnnnnnnnnnnnnnnnnnnnnnnnnnnnnnnnnnnnnnnnnnnnnnnnnnnnnnnnnnnnnnnnnnnnnnnnnnnnnnnnnnnnnnnnnnnnnnnnnnnnnnnnnnnnnnnnnnnnnnnnnnnnnnnnnnnnnnnnnnnnnnnnnnnnnnnnnnnnnnnnnnnnnnnnnnnnnnnnnnnnnnnnnnnnnnnnnnnnnnnnnnnnnnnngaagatggggtccctcgcacggcacggtccatgtccctcacgctgggaaannnnnnnnnnnnnnnnnnnnnnnnnnnnnnnnnnnnnnnnnnnnnnnnnnnnnnnnnnnnnnnnnnnnnnnnnnnnnnnnnnnnnnnnnnnnnnnnnnnnnnnnnnnnnnnnnnnnnnnnnnnnnnnnnnnnnnnnnnnnnnnnnnnnnnnnnnnnnnnnnnnnnnnnnnnnnnnnnnnnnnnnnnnnnnnnnnnnnnnnnnnnnnnnnnnnnnnnnnnnnnnnnnnnnnnnnnnnnnnnnnnnnnnnnnnnnnnnnnnnnnnnnnnnnnnnnnnnnnnnnnnnnnnnnnnngattccaagaaggtctaaagaagaccaaagaacttcaagacctgaaggaggaggaggaagaacagaagagtgagagtcctgaggaacctgaagaggtagaagaaactgaggaagaggaaaagggcccaagaagca

SEQ ID NO: 34039 - DNA, 2196 bp, Macaca Mulatta
  misc_feature (1)...(2196): n = A,T,C or G
tgtgatagccagcatgagggagtgccaaggatttgctccagatgcagagcttcacattttcagggtctttaccaataatcaggtnnnnnnnnnnnnnnnnnnnnnnnnnnnnnnnnnnnnnnnnnnnnnnnnnnnnnnnnnnnnnnnnnnnnnnnnnnnnnnnnnnnnnnnnnnnnnnnnnnnnnnnnnnnnnnnnnnnnnnnnnnnnnnnnnnnnnnnnnnnnnnnnnnnnnnnnnnnnnnnnnnnnnnnnnnnnnnnnnnnnnnnnnnnnnnnnnnnnnnnnnnnnnnnnnnnnnnnnnnnnnnnnnnnnnnnnnnnnnnnnnnnnnnnnnnnnnnnnnnnnnnnnnnnnnnnnnnnnnnnnnnnnnnnnnnnnnnnnnnnnnnnnnnnnnnnnnnnnnnnnnnnnnnnnnnnnnnnnnnnnnnnnnnnnnnnnnnnnnnnnnnnnnnnnnnnnnnnnnnnnnnnnnnnnnnnnnnnnnnnnnnnnnnnnnnnnnnnnnnnnnnnnnnnnnnnnnnnnnnnnnnnnnnnnnnnnnnnnnnnnnnnnnnnnnnnnnnnnnnnnnnnnnnnnnnnnnnnnnnnnnnnnnnnnnnnnnnnnnnnnnnnnnnnnnnnnnnnnnnnnnnnnnnnnnnnnnnnnnnnnnnnnnnnnnnnnnnnnnnnnnnnnnnnnnnnnnnnnnnnnnnnnnnnnnnnnnnnnnnnnnnnnnnnnnnnnnnnnnnnnnnnnnnnnnnnnnnnnnnnnnnnnnnnnnnnnnnnnnnnnnnnnnnnnnnnnnnnnnnnnnnnnnnnnnnnnnnnnnnnnnnnnnnnnnnnnnnnnnnnnnnnnnnnnnnnnnnnnnnnnnnnnnnnnnnnnnnnnnnnnnnnnnnnnnnnnnnnnnnnnnnnnnnnnnnnnnnnnnnnnnnnnnnnnnnnnnnnnnnnnnnnnnnnnnnnnnnnnnnnnnnnnnnnnnnnnnnnnnnnnnnnnnnnnnnnnnnnnnnnnnnnnnnnnnnnnnnnnnnnnnnnnnnnnnnngtcaaaaaatggtgcagaacagacttcaacagtaaagctccccattaaagtgaagataattcccactcccccacgaagcaagagagttctctgggatcagtaccacaacctccgctatccgcctggctatttccccagggataatttaaggatgaagaatgaccctttagactggnnnnnnnnnnnnnnnnnnnnnnnnnnnnnnnnnnnnnnnnnnnnnnnnnnnnnnnnnnnnnnnnnnnnnnnnnnnnnnnnnnnnnnnnnnnnnnnnnnnnnnnnnnnnnnnnnnnnnnnnnnnnnnnnnnnnnnnnnnnnnnnnnnnnnnnnnnnnnnnnnnnnnnnnnnnnnnnnnnnnnnnnnnnnnnnnnnnnnnnnnnnnnnnnnnnnnnnnnnnnnnnnnnnnnnnnnnnnnnnnnnnnnnnnnnnnnnnnnnnnnnnnnnnnnnnnnnnnnnnnnnnnnnnnnnnnnnnnnnnnnnnnnnnnnnnnnnnnnnnnnnnnnnnnnnnnnnnnnnnnnnnnnnnnnnnnnnnnnnnnnnnnnnnnnnnnnnnnnnnnnnnnnnnnnnnnnnnnnnnnnnnnnnnnnnnnnnnnnnnnnnnnnnnnnnnnnnnnnnnnnnnnnnnnnnnnnnnnnnnnnnnnnnnnnnnnnnggattggaggttttaaagcaggaaacagcagttgttgaaaacgtccccattttgggactttatcagattccagctgagggtggtggccggattgtactgtatggggactccaattgcttggatgacagtcaccgacagaaggnnnnnnnnnnnnnnnnnnnnnnnnnnnnnnnnnnnnnnnnnnnnnnnnnnnnnnnnnnnnnnnnnnnnnnnnnnnnnnnnnnnnnnnnnnnnnnnnnnnnnnnnnnnnnnnnnnnnnnnnnnnnnnnnnnnnnnnnnnnnnnnnnnnnnnnnnnnnnnnnnnnnnnnnnnnnnnnnnnnnnnnnnnnnnnnnnnnnnnnnnnnnnnnnnnnnnnnnnnnnnnnnnnnnnnnnnnnnnnnnnnnnnnnnnnnnnnnnnagtaacctttggaaacatcagaagctactctccatcgacctggacaaggtggtgttacccaactttcgatcaaatcgccctcaagtgaggcccttgtcccctggagagagcggtgcctgggacattcctggag

SEQ ID NO: 34040 - DNA, 823 bp, Macaca Mulatta
  misc_feature (1)...(823): n = A,T,C or G
gggagagtgtctaatcctgcagtgatggcgcaggaggaggaagatgttagagattacaatttgactgaggaacagaaggcgatcaaggccaagtatccgccagtcaataggaagtacgagtatttggatcatacagcggatgtccagttacacgcgtggggagatactctggaggaagcattcgagcaatgtgcaatggccatggttggttacatgacagatactgggacagtggagcccctccaaacagtagaagtagaaacccaaggagatgacttacagtctcttctgtttcactttttggatgaatggctttataagttcagtgctgatgaattcttcatacccggggaagtgaaagtacttagtattgatcaaagaaatttcaaattacgatcaattgggtgggggagaagaattttcattgtccaagcaccctcagggagcagaagtcaaagcaataacatattcagcaatgcaggtgtatgacgaagagaagccaggagtttttgtgatcattgacgtttaagacaccaaaaaagaaaagactcctatgaataactnnnnnnnnnnnnnnnnnnnnnnnnnnnnnagaagacactatgaattaaattctacagcggcttttgatacgtggaaaatggtagaacagaaatgttttagtggaaatgggacgttcaaaaggaaatcggtacttcgtcaacataattaccnnnnnnnnnnnnnnnnnnnnnnnnnnnnnnnnnnnnnnnnnnnnnnnnnnnnnnnnnnnnnnnnnnnnnnnnnnnnnnnnnnnnnanncccccccgcccccccgggcaaa

SEQ ID NO: 34041 - DNA, 647 bp, Macaca Mulatta
  misc_feature (1)...(647): n = A,T,C or G
taggctttccttcaagaacagtcagatcacaaagtatctttaggaaattaagggatattaaattttaagtgatttttggatggttattgatatctttgtagtagccttttttaaaagactaccaaaatgtatgtttgnnnnnnnnnnnnnnnnnnnnnnnnattactcttagcagatcagcaatccctctagggacctaaatactaggtcaggttaggggacactgtgtcttctcacataaccacctgtagcaagatggatcataaatgagaagtgtttgcctattgatttaaagctcattggaatcatgtctcttgtctcttcgtcttttccatgcttttctcctaacttttccctctagcctttcctccccacaatttgctgcttactgctggtgttaatatttgtgtgaggacaaccacttctcgaactgttataatgaagataataatatctttattctttatccccttcaaagaagttaactttgtgtcaaatgccgctttgttaagcccttcaaataccacctcctcatgtgtgaattgacacaatcactaatattctggtaatttaaacaattgagatagcaaaagtgtttaacaaactaggataattttggttcatatttcgccaaatttgtgtaaacc

SEQ ID NO: 34042 - DNA, 683 bp, Macaca Mulatta
ggggagtgcctggaatgtagagcagcttggcagatgtttattgagctgaattgaaaaagttaagaatcagtggatataaactacttttacatgtgtagtcatgttcgactacatcattgactccaagtgttgctggaagaggttgctgtgaactaaggaagtttttagagtggctggccttgacttgaagattcaagttcgaaatatggcaactttgaaagatattaccaggagactaaagtccatcaaaaacatccagaaaattaccaagtctatgaaaatggtagcagcagcaaaatatgcccgagctgagagagagctgaaaccagctcgaatatatggattgggatctttggctttgtatgaaaaagctgatatcaaggttcctgaagacaagaagaaacacctccttattggtgtgtcctcagatcgaggactgtgtggtgctattcattcctccatcgctaaacagatgaaaaatgaggttgctaccctaacagcaactggggaaaaaattattccttgttggaattgtgaccaaatcaaaagcatacttttaaaggacccattctgaccgtttctggtgccatcataaaagtgtgtaaaaccccccccctttgggaaatctttcctttgcctttaattttaaatctggttacatctactacgcccttctcttaacc

SEQ ID NO: 34043 - DNA, 908 bp, Macaca Mulatta
cagaggtgtggacgcgtgtgtggcaggcgccctgtgagtctgtccctgagaacagctgcaactgctttgcttttcagatcagccgggagatgatggagaaaatcccagtattgaggagcctccgcgcccgagagcagcaggctgggaaggacgtcaccctccagggtgagcaccagcaccttccggaaccaggccgccagcaggcagtgcccctgagtgctggcagaaggcccccggacacacccgggccagaagccaattccatggaggcagcccgtggctccccagcaggggagggtgccccgcttgcagccgacgtttatgttgggaacctcccccgggacgcccgtgtgagtgacctgaagagagccctgcgtgaactcggctccgtgcccctgcggctcacctggcagggcccacagcgcagagccttcctccgttacccagactcagccgcagcccagcaggccgtctcctgcttgcagggcctgcgcctgggcaccgacaccctgagggtggcgctggccaggcagcagagggacaagtgaccttgtggagagccacagagctcactgcagactcaccatccccatcccctgctgctccggttcccatggcactcgagaggcctgtgtggcaagacgtggcagagccactgcgtgagctgctcgggtctcggttctttccagaagtcaccactcagtgaacgcccagggcctcctgtgagtggggaagcgagcccacagtccatctcacagcacacgcagacttcagcctcccgttcgtgcaggctcaggccttgagccagtttgtgtttctctggagggacagagcagaggggccggggactgagtgagtggcgaagcaggggtgggtgatgtgaagatgatctcgggtttgccaggggt

SEQ ID NO: 34044 - DNA, 260 bp, Macaca Mulatta
tatattcatttaccttgtatagtaaggatcagaatggtgagaatttaactaaattcacatggagatgaggaaataaagggaatctgtgatagagtataaaagtgatgcagagaacttgtactactttaggtttactccttatagccaagtaagagatcctgcagtcttggtaggaggaaaaagaaaaagaaaggagaattctagatttgggggagtatagacttctcaccagttgttaaatagtaggaaagaaaggagaa

SEQ ID NO: 34045 - DNA, 587 bp, Macaca Mulatta
  misc_feature (1)...(587): n = A,T,C or G
ggtgtccctggcaaccttgtgtgtctatttcttactggatgaaggaaacattttaacagccactaaagtgttcacatcgatgtctttgtttaatattttaaggattcctctgtttgagttaccaaccgtgatctcaactgtggtccangacaaagatatccctggggcgtttggaagactttctccacgctgaggagcttcttcctcaaaatattggaacaaactatataggaggnnnnnnnnnnnnnnnnnnnnnnnnnnnnnnnnnnnnnnnnnnnnnnnnnnnnnnnnnnnnnnnnnnnnnnnnnnnnnnnnnnnnnnnnnnnnnnnnnnnnnnnnnnnnnnnnnnnnnnnnnnnnnnnnnnnnnnnnnnnnnnnnnnnnnnnnnnnnnnnnnnnnnnnnnnnnnnnnnnnnnnnnnnnnnnnnnnnnnnnnnnnnnnnnnnnnnnnnnnnnnnnnnnnnnnnnnnnnnnnnnnnnnnnnnnnnnnnnnnnnnnngttttatgagcaactattaaaagcctgtgctctccttccagatttggagcagttcctaaagggagatcaaactgagattggagaaagag

SEQ ID NO: 34046 - DNA, 5808 bp, Macaca Mulatta
  misc_feature (1)...(5808): n = A,T,C or G
ctcaccacaacctccacctcccgggttcaagcgattctcctncctcagcctcccgnnnnnnnnnnnnnnnnnnnnnnnnnnnnnnnnnnnnnnnnnnnnnnnnnnnnnnnnnnnnnnnnnnnnnnnnnnnnnnnnnnnnnnnnnnnnnnnnnnnnnnnnnnnnnnnnnnnnnnnnnnngttttcaattatagaacataaccatgaaaggaaacatgcaaacgaccagacagtcatcttttcagatgaaaaccagatggacctgacatcaagtcatactgtaatgattaccaaaggcctttnnnnnnnnnnnnnnnnnnnnnnnnnnnnnnnnnnnnnnnnnnnnnnnnnnnnnnnnnnnnnnnnnnnnnnnnnnnnnnnnnnnnnnnnnnnnnnnnnnnnnnnnnnnnnnnnnnnnnnnnnnnnnnnnnnnnnnnnnnnnnnnnnnnnnnnnnnnnnnnnnnnnnnnnnnnnnnnnnnnnnnnnnnnnnnnnnnnnnnnnnnnnnnnnnnnnnnnnnnnnnnnnnnnnnnnnnnnnnnnnnnnnnnnnnnnnnnnnnnnnnnnnnnnnnnnnnnnnnnnnnnnnnnnnnnnnnnnnnnnnnnnnnnnnnnnnnnnnnnnnnnnnnnnnnnnnnnnnnnnnnnnnnnnnnnnnnnnnnnnnnnnnnnnnnnnnnnnnnnnnnnnnnnnnnnnnnnnnnnnnnnnnnnnnnnnnnnnnnnnnnnnnnnnnnnnnnnnnnnnnnnnnnnnnnnnnnnnnnnnnnnnnnnnnnnnnnnnnnnnnnnnnnnnnnnnnnnnnnnnnnnnnnnnnnnnnnnnnnnnnnnnnnnnnnnnnnnnnnnnnnnnnnnnnnnnnnnnnnnnnnnnnnnnnnnnnnnnnnnnnnnnnnnnnnnnnnnnnnnnnnnnnnnnnnnnnnnnnnnnnnnnnnnnnnnnnnnnnnnnnnnnnnnnnnnnnnnnnnnnnnnnnnnnnnnnnntatgggggcagaaactcacatagtctcacagacttgtaatcaagatgccagaatattagccatgaccccagaatctgtttgttctaatccatgtattcaaggttgtaagacagttttctattctagttgtaatgatgccatggaaatgaccaaatgtctctcaaatatgagagaggagaaaaatttgctaaagcatgacagtaattattctaaaatgtattgcaatccagatgctatgtcttgtctcacagagaaaactatttattccggagaggagaacatggacattaccaagagtcatacagttgcaatagataatcagatttttaaacaagatcaatcaaatgtgcaaatagcagctgtaccaacacctgaaaaagaaatgatgctccaaaatcgtatgaccacatcagaagatgggaaaatgaatgtaaattgtaactcacttcctcatatgtctaaggaaagaatacagcagagcctgtcaaatcctttatctatttcattgactgatagaaagactgaactcttagcaggtgaagatatggatttgactgaaagtcacacaagtaacttaggaagtcaagttcctcttgcaacttataatctagcaccggagaataccagtgaatctcactctcacaacaaaagctcttcagatgaatgtgaagaaatgaccaaaagtcataatgaaccatttcaacggccagacatgataaccaaaaacagcttaaccgatacctggaacaaagacaaagatcgggttttgaaggttttgccctaccttgataaagattctcctcagtcagctgatgtaatcagnnnnnnnnnnnnnnnnnnnnnnnnnnnnnnnnnnnnnnnnnnnnnnnnnnnnnnnnnnnnnnnnnnnnnnnnnnnnnnnnnnnnnnnnnnnnnnnnnnnnnnnnnnnnnnnnnnnnnnnnnnnnnnnnnnnnnnnnnnnnnnnnnnnnnnnnnnnnnnnnnnnnnnnnnnnnnnnnnnnnnnnnnnnnnnnnnnnnnnnnnnnnnnnnnnnnnnnnnnnnnnnnnnnnnnnnnnnnnnnnnnnnnnnnnnnnnnnnnnnnnnnnnnnnnnnnnnnnnnnnnnnnnnnnnnnnnnnnnnnnnnnnnnnnnnnnnnnnnnnnnnnnnnnnnnnnnnnnnnnnnnnnnnnnnnnnnnnnnnnnnnnnnnnnnnnnnnnnnnnnnnnnnnnnnnnnnnnnnnnnnnnnnnnnnnnnnnnnnnnnnnnnnnnnnnnnnnnnnnnnnnnnnnnnnnnnnnnnnnnnnnnnnnnnnnnnnnnnnnnnnnnnnnnnnnnnnnnnnnnnnnnnnnnnnnnnnnnnnnnnnnnnnnnnnnnnnnnnnnnnnnnnnnnnnnnnnnnnnnnnnnnnnnnnnnnnnnnnnnnnnnnnnnnnnnnnnnnnnnnnnnnnnnnnnnnnnnnnnnnnnnnnnnnnnnnnnnnnnnnnnnnnnnnnnnnnnnnnnnnnnnnnnnnnnnnnnnnnnnnnnnnnnnnnnnnnnnnnnnnnnnnnnnnnnnnnnnnnnnnnnnnnnnnnnnnnnnnnnnnnnnnnnnnnnnnnnnnnnnnnnnnnnnnnnnnnnnnnnnnnnnnnnnnnnnnnnnnnnnnnnnnnnnnnnnnnnnnnnnnnnnnnnnnnnnnnnnnnnnnnnnnnnnnnnnnnnnnnnnnnnnnnnnnnnnnnnnnnnnnnnnnnnnnnnnnnnnnnnnnnnnnnnnnnnnnnnnnnnnnnnnnnnnnnnnnnnnnnnnnnnnnnnnnnnnnnnnnnnnnnnnnnnnnnnnnnnnnnnnnnnnnnnnnnnnnnnnnnnnnnnnnnnnnnnnnnnnnnnnnnnnnnnnnnnnnnnnnnnnnnnnnnnnnnnnnnnnnnnnnnnnnnnnnnnnnnnnnnnnnnnnnnnnnnnnnnnnnnnnnnnnnnnnnnnnnnnnnnnnnnnnnnnnnnnnnnnnnnnnnnnnnnnnnnnnnnnnnnnnnnnnnnnnnnnnnnnnnnnnnnnnnnnnnnnnnnnnnnnnnnnnnnnnnnnnnnnnnnnnnnnnnnnnnnnnnnnnnnnnnnnnnnnnnnnnnnnnnnnnnnnnnnnnnnnnnnnnnnnnnnnnnnnnnnnnnnnnnnnnnnnnnnnnnnnnnnnnnnnnnnnnnnnnnnnnnnnnnnnnnnnnnnnnnnnnnnnnnnnnnnnnnnnnnnnnnnnnnnnnnnnnnnnnnnnnnnnnnnnnnnnnnnnnnnnnnnnnnnnnnnnnnnnnnnnnnnnnnnnnnnnnnnnnnnnnnnnnnnnnnnnnnnnnnnnnnnnnnnnnnnnnnnnnnnnnnnnnnnnnnnnnnnnnnnnnnnnnnnnnnnnnnnnnnnnnnnnnnnnnnnnnnnnnnnnnnnnnnnnnnnnnnnnnnnnnnnnnnnnnnnnnnnnnnnnnnnnnnnnnnnnnnnnnnnnnnnnnnnnnnnnnnnnnnnnnnnnnnnnnnnnnnnnnnnnnnnnnnnnnnnnnnnnnnnnnnnnnnnnnnnnnnnnnnnnnnnnnnnnnnnnnnnnnnnnnnnnnnnnnnnnnnnnnnnnnnnnnnnnnnnnnnnnnnnnnnnnnnnnnnnnnnnnnnnnnnnnnnnnnnnnnnnnnnnnnnnnnnnnnnnnnnnnnnnnnnnnnnnnnnnnnnnnnnnnnnnnnnnnnnnnnnnnnnnnnnnnnnnnnnnnnnnnnnnnnnnnnnnnnnnnnnnnnnnnnnnnnnnnnnnnnnnnnnnnnnnnnnnnnnnnnnnnnnnnnnnnnnnnnnnnnnnnnnnnnnnnnnnnnnnnnnnnnnnnnnnnnnnnnnnnnnnnnnnnnnnnnnnnnnnnnnnnnnnnnnnnnnnnnnnnnnnnnnnnnnnnnnnnnnnnnnnnnnnnnnnnnnnnnnnnnnnnnnnnnnnnnnnnnnnnnnnnnnnnnnnnnnnnnnnnnnnnnnnnnnnnnnnnnnnnnnnnnnnnnnnnnnnnnnnnnnnnnnnnnnnnnnnnnnnnnnnnnnnnnnnnnnnnnnnnnnnnnnnnnnnnnnnnnnnnnnnnnnnnnnnnnnnnnnnnnnnnnnnnnnnnnnnnnnnnnnnnnnnnnnnnnnnnnnnnnnnnnnnnnnnnnnnnnnnnnnnnnnnnnnnnnnnnnnnnnnnnnnnnnnnnnnnnnnnnnnnnnnnnnnnnnnnnnnnnnnnnnnnnnnnnnnnnnnnnnnnnnnnnnnnnnnnnnnnnnnnnnnnnnnnnnnnnnnnnnnnnnnnnnnnnnnnnnnnnnnnnnnnnnnnnnnnnnnnnnnnnnnnnnnnnnnnnnnnnnnnnnnnnnnnnnnnnnnnnnnnnnnnnnnnnnnnnnnnnnnnnnnnnnnnnnnnnnnnnnnnnnnnnnnnnnnnnnnnnnnnnnnnnnnnnnnnnnnnnnnnnnnnnnnnnnnnnnnnnnnnnnnnnnnnnnnnnnnnnnnnnnnnnnnnnnnnnnnnnnnnnnnnnnnnnnnnnnnnnnnnnnnnnnnnnnnnnnnnnnnnnnnnnnnnnnnnnnnnnnnnnnnnnnnnnnnnnnnnnnnnnnnnnnnnnnnnnnnnnnnnnnnnnnnnnnnnnnnnnnnnnnnnnnnnnnnnnnnnnnnnnnnnnnnnnnnnnnnnnnnnnnnnnnnnnnnnnnnnnnnnnnnnnnnnnnnnnnnnnnnnnnnnnnnnnnnnnnnnnnnnnnnnnnnnnnnnnnnnnnnnnnnnnnnnnnnnnnnnnnnnnnnnnnnnnnnnnnnnnnnnnnnnnnnnnnnnnnnnnnnnnnnnnnnnnnnnnnnnnnnnnnnnnnnnnnnnnnnnnnnnnnnnnnnnnnnnnnnnnnnnnnnnnnnnnnnnnnnnnnnnnnnnnnnnnnnnnnnnnnnnnnnnnnnnnnnnnnnnnnnnnnnnnnnnnnnnnnnnnnnnnnnnnnnnnnnnnnnnnnnnnnnnnnnnnnnnnnnnnnnnnnnnnnnnnnnnnnnnnnnnnnnnnnnnnnnnnnnnnnnnnnnnnnnnnnnnnnnnnnnnnnnnnnnnnnnnnnnnnnnnnnnnnnnnnnnnnnnnnnnnnnnnnnnnnnnnnnnnnnnnnnnnnnnnnnnnnnnnnnnnnnnnnnnnnnnnnnnnnnnnnnnnnnnnnnnnnnnnnnnnnnnnnnnnnnnnnnnnnnnnnnnnnnnnnnnnnnnnnnnnnnnnnnnnnnnnnnnnnnnnnnnnnnnnnnnnnnnnnnnnnnnnnnnnnnnnnnnnnnnnnnnnnnnnnnnnnnnnnnnnnnnnnnnnnnnnnnnnnnnnnnnnnnnnnnnnnnnnnnnnnnnnnnnnnnnnnnnnnnnnnnnnnnnnnnnnnnnnnnnnnnnnnnnnnnnnnnnnnnnnnnnnnnnnnnnnnnnnnnnnnnnnnnnnnnnnnnnnnnnnnnnnnnnnnnnnnnnnnnnnnnnnnnnnnnnnnnnnnnnnnnnnnnnnnnnnnnnnnnnnnnnnnnnnnnnnnnnnnnnnnnnnnnnnnnnnnnnnnnnnnnnnnnnnnnnnnnnnnnnnnnnnnnnnnnnnnnnnnnnnnnnnnnnnnnnnnnnnnnnnnnnnnnnnnnnnnnnnnnnnnnnnnnnnnnnnnnnnnnnnnnnnnnnnnnnnnnnnnnnnnnnnnnnnnnnnnnnnnnnnnnnnnnnnnnnnnnnnnnnnnnnnnnnnnnnnnnnnnnnnnnnnnnnnnnnnnnnnnnnnnnnnnnnnnnnnnnnnnnnnnnnnnnnnnnnnnnnnnnnnnnnnnnnnnnagctgaaggcctttggaatttaccttaacaaaataaaatcacgttttaccaagatgactaaagtcttcactcaccaaggaaaagtggctctgtatggcaagctggtgcagtcagctcag

SEQ ID NO: 34047 - DNA, 299 bp, Macaca Mulatta
tgtgtctacaaaaaatttaaaaattagccaaatatggtgacaggcacctatggttccagctactcagaaggctgaggtgggaggatcccttgggccttggaggtcaaaactgcactgagccgtggttgcaccactgctctccaggcctgagtgacagagcaagactgtatctcaaaggaaaaaggaaactaggccaggcgtggtggctcacacctgtaatctgagcactttgagaggcggaggtggacggatcacgaggtcaagggatcgagatcttcctagccaacatggtgacaccc

SEQ ID NO: 34048 - DNA, 809 bp, Macaca Mulatta
  misc_feature (1)...(809): n = A,T,C or G
ggagaaaagcagcatctttgtggatagtctttttcacaaacctccaaggctccttagattgggtcattactaaaagtacattaaaacactcttgtttaaaaatgaattatttccgtaatcgaagtgtattgatgtattctaaagctagtaaacttccctaatgtttaattgccctacagatgcttcttttgctgtgggttttctcctgttagtggtctgaaataatgattttcctgttctattaatatatagtgtattttgcacaaaaaattaacctggtcagtagtgattaccaaaatatgtattaataatcttggcaatttttgacattttagcccacgttagttctacattattcttaaaagaaactcagctactgcaaattttgtctttctgtaaatgttattaaaatatccagtgagctcttttagaaggactcagtaatatttcaagactatttttgaggtagttctagccttttaaaatattctacagacctatggggcttaaaagaacccaagtaccgactaagcaaataggcaaaagacatgttggaaatgtagtatagtacttgaaccattcactatcatanggattattggtgcatcctgtgtaaatggaagctgagcttgacacctggtgcttttaactagtgataaagtcatccttttcactgcaagcacagcatacctgtacctccaaaagtgatgttttagtgaacaggccgtttttccacacttgtgcccttggggtgatcattgaaagctttgttgaaaactactgaagttttctccaatctccttaaagtt

SEQ ID NO: 34049 - DNA, 95 bp, Macaca Mulatta
  misc_feature (1)...(95): n = A,T,C or G
cggtccccactctcccccagttcaccatggccttcaatgtgaagatcaacgtgctggngaagactttgagggagagaaccctcaagtgcccaagc

SEQ ID NO: 34050 - DNA, 1058 bp, Macaca Mulatta
  misc_feature (1)...(1058): n = A,T,C or G
aggtcattttcttggtgaacagtggctcagaagccaatgagctggccatgctgatggccagggcgcactcaaacaacatagacatcatttctttcannnnnnnnnnnnnnnnnnnnnnnnnnnnnnnnnnnnnnnnnnnnnnnnnnnnnnnnnnnnnnnnnnnnnnnnnnnnnnnnnnnnnnnnnnnnnncaatgtgtccagatgtttttcgtggcccttggggaggaagccactgtcgagattctccagtgcaaacaatcaggaagtgcagctgtgcaccagnnnnnnnnnnnnnnnnnnnnnnnnnnnnnnnnnnnnnnnnnnnnnnnnnnnnnnnnnnnnnnnnnnnnnnnnnnnnnnnnnnnnnnnnnnnnnnnnnnnnnnnnnnnnnnnnnnnnnnnnnnnnnnnnnnnnnnnnnnnnnnnnnnnnnnnnnnnnnnnnnnnnnnnnnnnnnnnnnnnnnnnnnnnnnnnnnnnnnnnnnnnnnnnnnnnnnnnnnnnnnnnnnnnnnnnnnnnnnnnnnnnnnnnnnnnnnnnnnnnnnnnnnnnnnnnnnnnnnnnnnnnnnnnnnnnnnnnnnnnnnnnnnnnnnnnnnnnnnnnnnnnnnnnnnnnnnnnnnnnnnnnnnnnnnnnnnnnnnnnnnnnnnnnnnnnnnnnnnnnnnnnnnnnnnnnnnnnnnnnnnnnnnnnnnnnnnnnnnaggtgattaaagaagaaaatctacaggaaaacagtcaagaagttgggacctacatgttactaaaatttgccaagctgagggatgagtttgaaattgttggagacgttcgaggcaaaggcctcatgataggcatagaaatggtgcaggataagnnnnnnnnnnnnnnnnnnnnnnnnnnnnnnnnnnnnnnnnnnnnnnnnnnnnnnnnnnnnnnnnnnnnnnnnnnnnnnnnnnnnnnnnnnnnnnctcagacatttcgcattgcaccctcaatgtgcatcactaaaccagaagttgattttgcaacagaagtatttcgttctgccttaacccaacacatggaaagaagagctaagta

SEQ ID NO: 34051 - DNA, 629 bp, Macaca Mulatta
ccatgggcaacgccgccgccaagaaggacaccgagcaggagaccgtgaacgagttcctagccaaagccagaggagatttcctctacagatggggaaaccccgctcaaaacaccgccagctcggatcagtttgaacggctcaagacgctgggcaccggctcctacgggcgggtgatgctggtgaggcaccgggagaccggcaaccactacgccatgaagatcctcgacaagcagaaggtggtgaggctgaagcaggtcgagcacacactgaacgagaagcgcatcctgcaggcgatcaactttccgttccttgtcaagctccagttctcctttaaggacaactccaacctgtacctggtgatggagtatgtgccgggtggggagatgttctctcacctacggcgcgtcggaaggttcagcgagccccaggcctgtttctatgccgcccaggtcgtcctggccttccagtacctacactcgctcgacctcatccaccgcgacctgaagcccgagaatctcctcatcgaccagcagggctacctgcaggtgacggacttcggtttcgccaagcgcgtgaagggccgcacttggaccctgtgcgggaccccagagtacctggcccccgagatc

SEQ ID NO: 34052 - DNA, 106 bp, Macaca Mulatta
cccccatgagcgtgccgcgcaaccgcatcggggtgggggtcatcgatgggcacatctagcagtcggcggctcccacggctgcatccaccacaacagtgtggagagg

SEQ ID NO: 34053 - DNA, 715 bp, Macaca Mulatta
gggcttatttcatcccttcagcttggaccataaaagacaggacgctttgagagggtcatccacaggcctaccctcagggcgcattctctttctcagggatgttccttgctaagaaaaagaattcagcaatatttctcctatttgctcatgaaagagaactacagctctgttccggctcaccggcagccagttcaaagttacctctcttgttccctgaacattgctgttatcctgttctttttttaagatgcccagatttcatattgttcaaacacacgtgctctacaaacaatttgtgcagttgatacaatcacagggtcctgaggcgacattcatcctcctcagcttacaaagaagatgacgggattaagagatcaaagacaggcacaggaaatcacaaggatattctttggggaagtgacaagtgtccatgaaatcttcacagtttatgttcagagattacagtaaagacaggtgtaagaaattataaaagtattaatttggggaactaataaatgttcatgaaatcttcacaatttatgctcttctgccgcggcttcagccgctccctccgttcgggatccctgacttcccacaacaatttatcagtccctgctgatatggttttggatctatgttcccaccaaattctcatgttgaaaatatatttccccaattgttgggaagtggggttactggtggaaaaaatgaattt

SEQ ID NO: 34054 - DNA, 730 bp, Macaca Mulatta
  misc_feature (1)...(730): n = A,T,C or G
ggggttccggtttctggtcgtaactcaggagcaaaccaccgtactgcaaaggaaccagatattgtgctcgcggtttcaaaccgggcatgggcaccgaatgcttctcgataaatccccttacggtctctgagcattagagaatgcaagggaggaaaacatgcgcccaagctggttcgcaggaacatgctcgcgtgtctgcgcctgtgtgcgcggccagttttctggctgaggatcgcttgccaactacagacatcacccgcccaggacccggtgccacactcacccagaagacgaaactccacgggagcgagaaaaggagtccatttctccgccggcaccacgcggggatgcaggcccctgattcagtaagttctgtggaagtggagcgagaagccaagacttggggcgggtctcagggtggcccaaaagaccctgttcacgccactaccagcctaactttaggaactgtcggccacctggcttttattataccgccttaaacatactttgagactctagaaatttcacaagtctcgagatagagcacactgggctttgggtgtgtttctcatgagggcactggcgctgaatggtgcagtgagaaaggacggtcgaaaccactgccctttgcttttaccatttgaagaaactgaangtcttgtgacttttcccgaggtcatcgggaatctgcctttacacagggaggacttnnnnnnnnnnnnnnnnnnnn

SEQ ID NO: 34055 - DNA, 711 bp, Macaca Mulatta
gccagagccgcactctttgcagataatttgccatttgttctgccctggtcctagctatatctctggcgggacaggagactcatctggaggcactggagagaggcagggcctcgtcctgctccctggggcctgagcttccccacagtgctgtgggagccaccaccctcacagctcaaatgctctcccctcccctaagtggaaaccttctccattcctcccactacctcccctgcctcaggagaaattaggccaggggcaagctctgctgggccccggatagagtccccgagttgcaatatcccgcgtgctggcgaggacaagtcgtcctgtcccgctaacgttcttgtcttttctttctcttcccaagaaaccagactaaactcctggttggtgatgagaaggggagaatattctgctggtctgcagatggataggaagagagaggcagcagaggctctggcactgcagtgccaggctgagggcggcagaggtgactggggcctgagctctgcctacagaggaaacccccagggcctccctcaccacaactctcaaggaagggcctctgcttcagagctctacaccccaaccttctccatgacccatgggaattctatgaaaaagatgagcgcacacactcggagggctgagcagcactctggaaactatgaaagggtgatgcccagttgcacacgaaattacagatgactc

SEQ ID NO: 34056 - DNA, 760 bp, Macaca Mulatta
  misc_feature (1)...(760): n = A,T,C or G
ggctgctcaccaccatgggtgaccgcttcacggacgaggaagtggatgagatgtaccgggaggcgcccattgataagaaaggaaacttcaactacgtggagttcacccgcatcctcaaacatggcgccaaggataaagacgactaggccaccccagccccccgacactccagcccccgccagtcacccctccccgcacacactcgtccataccagctccctgcccatgaccttcgctcagggatcccccctttgagggattagggtcccagctcccagtggaagaaacaggccaggaaaacggtatgccgagctgaggcaggtattcccatggtgaccccagagccctgggctggagtctctgacacctccaaggaaagaccaccttctggggacatgggctggagggcaagacctagaggcaccgagggaagaccccatttccggcctgctccccaaggaggaaagggctctgtgtgcccccaaggagaaagaggccctgggtcctgggatcctacaccccttcacgtgcatccccacacaaatgcaagctcaccaaggtctcctctcagtcccctcctctacaccctgaccagccactgccgcacacccacccagagcgcgccacctgccacgagagtgtgctcaggagttgcgggcagcatggacatctgtcccagaaggagcagaatctcccaatagaggctgagcncnnnnnnnnnnnnnnnnnnnnnnnnnnnnnnnntggtcggccgcctcct

SEQ ID NO: 34057 - DNA, 749 bp, Macaca Mulatta
taacttttccttagactacaaaagaatgcatggtctggggaactatatgctttccatttttaagtcaggactgcaatactgattccagttgatgagcagctaagatccagtctgtctaatacagtgacccctagccatccgggcctggcaatctacaatttttttcccctccgagtttgtaacactccccttccagaaaggcattgtgcaacacaggattatttttaaatgcttctgaatttgaagtaactttttggagaattgtgtgatgccctttgaagaaattggacacgtattaagtgtcacaaagctggggccggaaattggtctaatgtttcattagactaagaacctaaaatttttctcagttgggtggataaaaccactaacgcttagcaaactgttttctcatgcagctatgtttctcttatttatgccttgaggactaatttctggttttctagctgttaatgcactgttgaccttcataatggtgccttacgcaagcgatcccttatgtgggggtctcatacaggtgtgtgggcgatgcatgcttaattaaggctcttttttcacctggcagtgtactgtatcaacatataacacagaaaaaaaaaatctcctttaaggtcctccttcacaaaaacatagagtgaaactccctttacatgtcagtatttgttcaatactttagacaacttgactgtcagtgttccaatggaaaacatgacaatggcaaaatctgacca

SEQ ID NO: 34058 - DNA, 118 bp, Macaca Mulatta
ggtaatctgtaagtcggatgctccaacaggggatgttcttcttgatgaagctctgaagcatgttaaggaaactcagcctccagaaacggtccagaactggattgaattacttagtggt

SEQ ID NO: 34059 - DNA, 384 bp, Macaca Mulatta
gtctgacttcctcccagcacattcctgcactgtgccgcgtccacactgccccacagacccagtcctccaagcctgctgccagccccctgcaaacccctcaggttggccttgccacagtgccagcaggcagccctgggctaggagtaggggactctctacaggcacgcagccctgagacctcagagtgccaccctttaagggtggccaggccctcagtggccaatctgagtgctgcctctgccaccagccctgctggcccctggttccgctggccccccagatgcctggctgagacacaccagtggcctcagctgcccacacctcttcccggtccctaaagttggcactgcagcagacagctccctggtcaccaggcagctaaca

SEQ ID NO: 34060 - DNA, 522 bp, Macaca Mulatta
actaaaccctcacaagtaaccagagtggagaaaaagtggcaagagatcatgtcctcagaccaggtggaattacttaaattttaaagcctgaaaatgccggtctgggggtgggaggtggaaaaggaacccaattttcttatgaacagatatttttaacttaatggcacaaagtcttagaatattattatgtgccccgtgttccctgttcttcgttgctgcattttctccacttgcaggcaaacttggctctcaataaacttttaccacaaattgaaatacatatatttttttcaactgccaatcaaggctaggaggctcgaccacctcaacattggagacatcacttgccaatgtacataccttgttatatgcagacatgtatttcttatgtacactgtacttctgtgtgcaattgtgaacagaaattgccatatggatgtttctttgcattataaaatttttccgctcttaatgaaaaattactgtctaattgaccatactcaggataaccgagaatggtgg

SEQ ID NO: 34061 - DNA, 103 bp, Macaca Mulatta
gaatgccgagtcatgaagggaaacccatcagccacagctggcccaaaggcatccccaacacctcagaagagttcagccaagagccctggtcctatgcgccgaa

SEQ ID NO: 34062 - DNA, 1532 bp, Macaca Mulatta
  misc_feature (1)...(1532): n = A,T,C or G
caccgacatttgggaaccgtgcacgctgactcaaagcaaagctcagctgaccgtgaggagtcccctgggagctgctgcagtagttgccgttgagtccatccgtgcagctggnnnnnnnnnnnnnnnnnnnnnnnnnnnnnnnnnnnnnnnnnnnnnnnnnnnnnnnnnnnnnnnnnnnnnnnnnnnnnnnnnnnnnnnnnnnnnnnnnnnnnnnnnnnnnnnnnnnnnnnnnnnnnnnnnnnnnnnnnnnnnnnnnnnnnnnnnnnnnnnnnnnnnnnnnnnnnnnnnnnnnnnnnnnnnnnnnnnnnnnnnnnnnnnnnnnnnnnnnnnnnnnnnnnnnnnnnnnnnnnnnnnnnnnnnnnnnnnnnnnnnnnnnnnnnnnnnnnnnnnnnnnnnnnnnnnnnnnnnnnnnnnnnnnnnnnnnnnnnnnnnnnnnnnnnnnnnnnnnnnnnnnnnnnnnnnnnnnnnnnnnnnnnnnnnnnnnnnnnnnnnnnnnnnnnnnnnnnnnnnnnnnnnnnnnnnnnnnnnnnnnnnnnnnnnnnnnnnnnnnnnnnnnnnnnnnnnnnnnnnnnnnnnnnnnnnnnnnnnnnnnnnnnnnnnnnnnnnnnnnnnnnnnnnnnnnnnnnnnnnnnnnnnnnnnnnnnnnnnnnnnnnnnnnnnnnnnnnnnnnnnnnnnnnnnnnnnnnnnnnnnnnnnnnnnnnnnnnnnnnnnnnnnnnnnnnnnnnnnnnnnnnnnnnnnnnnnnnnnnnnnnnnnnnnnnnnnnnnnnnnnnnnnnnnnnnnnnnnnnnnnnnnnnnnnnnnnnnnnnnnnnnnnnnnnnnnnnnnnnnnnnnnnnnnnnnnnnnnnnnnnnnnnnnnnnnnnnnnnnnnnaaactcagttgatttctcccttttgttcttgaacatttaagatcattggtttgtggttactaatcatgttacaacaaatattcttgaattccaaaatttgctcattcctgattatttccttagatttccaggtatggaacaatttggttaaagtgtttgaaatcnnnnnnnnnnnnnnnnnnnnnnnnnagatgtagcctccctctgttgcccaggctggagtgcactggcatgatctcagctcactctctgcaacctctgcttcctggttcaagcaattctcctgcctcagcctcccgaatagctggggttacaggtgtgcaccaccacaccttgctaattttagtatttttagtagagacagggtttcaccatgttggtcaggtgggtctcaaactcctgacctcaggcgatccttctgcctcggcctcccaaaatgctgagattacaggcatgagccaccatgcccggccaaagtgtttgaaatctttaagcatcctggtaaatactgagttttgtcaatatttagaaaagttgcatgaatttacatttacatttcctccacccatatttcagagcatctggtttgtcagactgtcaccaaaaataggcttttatcaaaacgtaataaaaaataaatacaacttttccaatgacaaa

SEQ ID NO: 34063 - DNA, 787 bp, Macaca Mulatta
  misc_feature (1)...(787): n = A,T,C or G
ggcccataccaggtgnnnnnnnnnnnnnnnnnnnnncaatggtttttaggaccagtagaataataatggcttagctagttaatatttttaaatttgggagcagactaaaaaaagtgttttgaaataaatggtacctgtaagtgatgcttactgcaatacttgttaaatgttatttgtcagcactgaccggaattatatagtgctagtaacacagctcccactgtcctagaattcctctaatcggtcagctatagctaccattatcttgataagcatttcaagagttgtgttgctgagcctttaaaagataactagtttataacctatgtctccttatgtggctacatcagttactcgtggtcccagtgaagtataaaagaggatgtaagctgctgacgatttcacagaagaaacggagatatcagaaacttcatgatcatcaaacttaaaccaccgttgtcttgctgcatttttacaataggctgtgtagtggcctccatccagtccgccgtagtgatttgaaacagaaaacaaattatatttcttcaaattgttctttggaccaataacatactgtgacaagtcaaggttttctaacgggaagtccacagatgtctgtaatttttgtttccacctgccatcgtaggaaaaacgtttcagatgcactaaaagtacaggtggtaacttccagatttctatcttttttagagaatctcgtcgagctctgcaatgactgcagtaaaatctgttgttatctgtgagtttttcttctttggaaaataatccc

SEQ ID NO: 34064 - DNA, 545 bp, Macaca Mulatta
cccagaaaacttttaagtgttgctggaatatcctgcctacagtgggcacctccttgaagaagctgatagcttttacacagtattagattgaaataatggacagaaacacattcttgtcaagaaagggggagagaactctgtttgcaactttaaaagcaaaaagcaaaagtgaaatgatgtgaggatttctgttctaatgagggtgattctctgttagaaatggcaaatgttgatgattgtgtgctattgattggtgcaggatacttggtgtacgagtaaatacttgaggctcgtgtcacttgataaattttctttttggactaggtcgcacagttattaaaacaacttttaaccctctctcttcacacacatacatatcaggttgttttctagttgaaaacccaagtagctcagattctactttaatgtcagtgcagatttgcattgaatcatgccattatattttttctcatttttatgctgttgggtcttagattttaaattgatataaagaactcagcagtggttttattttctactcatac

SEQ ID NO: 34065 - DNA, 1667 bp, Macaca Mulatta
  misc_feature (1)...(1667): n = A,T,C or G
tcaaaatggcggcgaggggaacctggagcagtcccggagcctgagccactgacaggagaggagagggcggcggcggcggtgggaggaggatggctgggggtgctggcgccggtgcggacggcggnnnnnnnnnnnnnnnnnnnnnnnnnnnnnnnnnnnnnnnnnnnnnnnnnnnnnnnnnnnnnnnnnnnnnnnnnnnnnnnnnnnnnnnnnnnnnnnnnnnnnnnnnnnnnnnnnnnnnnnnnnnnnnnnnnnnnnnnnnnnnnnnnnnnnnnnnnnnnnnnnnnnnnnnnnnnnnnnnnnnnnnnnnnnnnnnnnnnnnnnnnnnnnnnnnnnnnnnnnnnnnnnnnnnnnnnnnnnnnnnnnnnnnnnnnnnnnnnnnnnnnnnnnnnnnnnnnnnnnnnnnnnnnnnnnnnnnnnnnnnnnnnnnnnnnnnnnnnnnnnnnnnnnnnnnnnnnnnnnnnnnnnnnnnnnnnnnnnnnnnnnnnnnnnnnnnnnnnnnnnnnnnnnnnnnnnnnnnnnnnnnnnnnnnnnnnnnnnnnnnnnnnnnnnnnnnnnnnnnnnnnnnnnnnnnnnnnnnnnnnnnnnnnnnnnnnnnnnnnnnnnnnnnnnnnnnnnnnnnnnnnnnnnnnnnnnnnnnnnnnnnnnnnnnnnnnnnnnnnnnnnnnnnnnnnnnnnnnnnnnnnnnnnnnnnnnnnnnnnnnnnnnnnnnnnnnnnnnnnnnnnnnnnnnnnnnnnnnnnnnnnnnnnnnnnnnnnnnnnnnnnnnnnnnnnnnnnnnnnnnnnnnnnnnnnnnnnnnnnnnnnnnnnnnnnnnnnnnnnnnnnnnnnnnnnnnnnnnnnnnnnnnnnnnnnnnnnnnnnnnnnnnnnnnnnnnnnnnnnnnnnnnnnnnnnnnnnnnnnnnnnnnnnnnnnnnnnnnnnnnnnnnnnnnnnnnnnnnnnnnnnnnnnnnnnnnnnnnnnnnnnnnnnnnnnnnnnnnnnnnnnnnnnnnnnnnnnnnnnnnnnnnnnnnnnnnnnnnnnnnnnnnnnnnnnnnnnnnnnnnnnnnnnnnnnnnnnnnnnnnnnnnnnnnnnnnnnnnnnnnnnnnnnnnnnnnnnnnnnnnnnnnnnnnnnnnnnnnnnnnnnnnnnnnnnnnnnnnnnnnnnnnnnnnnnnnnnnnnnnnnnnnnnnnnnnnnnnnnnnnnnnnnnnnnnnnnnnnnnnnnnnnnnnnnnnnnnnnnnnnnnnnnnnnnnnnnnnnnnnnnnnnnnnnnnnnnnnnnnnnnnnnnnnnnnnnnnnnnnnnnnnnnnnnnnnnnnnnnnnnnnnnnnnnnnnnnnnnnnnnnnnnnnnnnnnnnnnnnnnnnnnnnnnnnnnnnnnnnnnnnnnnnnnnnnnnnnnnnnnnnnnnnnnnnnnnnnnnnnnnnnnnnnnnnnnnnnnnnnnnnnnnnnnnnnnnnnnnnnnnnnnnnnnnnnnnnnnnnnnnagaggagactacagtcagcaggcctgcctgtgcagcagagctttcaaacagctgtttactgcctcagtcttacaaatgaaaacccatccaaggataactggacatttgaggaaagcttccaaattgagatagagatcagagcaaaaagaacaaagtcctggaggaaacagacaatgaagggagcagaagaaaaacttcagtag

SEQ ID NO: 34066 - DNA, 500 bp, Macaca Mulatta
gggcttggctcggagaatgctgccgggccctgcaactgggatgaagctgatattggaccctgggccaaagcccggatccaggcgggagcagaagctaaagccaaagcccaagagagtggcagtgccagcaccggtgccagtaccagtaccaataacagtgccagtgccagcgccagcaccagtggtggcttcagtgctggtgccagcctgaccgccactctcacatttgggctcttcgctggccttggtggagctggtgccagcaccagtggcagctctggtgcctgtggtttctcctacaagtgagatttcaggtatctgccttggtttcagtggggacatctggggcttatggggctgggatgaggagctggatgattctaggaaggcccaagctggagaatgatgtggagagtgtgccaagacactgcttttggcattttattcgttcgtgtttgctggatgtcaattgacccttttattttctcttacttgtgttt

SEQ ID NO: 34067 - DNA, 5238 bp, Macaca Mulatta
  misc_feature (1)...(5238): n = A,T,C or G
nagaaatttgcccttggccattgggatttctatgccaattgtgacgctcatctacatcctgacaaatgtggcctattacacagtgctgaacatttcagatgtccttagcagtgatgccgtggctgtnnnnnnnnnnnnnnnnnnnnnnnnnnnnnnnnnnnnnnnnnnnnnnnnnnnnnnnnnnnnnnnnnnnnnnnnnnnnnnnnnnnnnnnnnnnnnnnnnnnnnnnnnnnnnnnnnnnnnnnnnnnnnnnnnnnnnnnnnnnnnnnnnnnnnnnnnnnnnnnnnnnnnnnnnnnnnnnnnnnnnnnnnnnnnnnnnnnnnnnnnnnnnnnnnnnnnnnnnnnnnnnnnnnnnnnnnnnnnnnnnnnnnnnnnnnnnnnnnnnnnnnnnnnnnnnnnnnnnnnnnnnnnnnnnnnnnnnnnnnnnnnnnnnnnnnnnnnnnnnnnnnnnnnnnnnnnnnnnnnnnnnnnnnnnnnnnnnnnnnnnnnnnnnnnnnnnnnnnnnnnnnnnnnnnnnnnnnnnnnnnnnnnnnnnnnnnnnnnnnnnnnnnnnnnnnnnnnnnnnnnnnnnnnnnnnnnnnnnnnnnnnnnnnnnnnnnnnnnnnnnnnnnnnnnnnnnnnnnnnnnnnnnnnnnnnnnnnnnnnnnnnnnnnnnnnnnnnnnnnnnnnnnnnnnnnnnnnnnnnnnnnnnnnnnnnnnnnnnnnnnnnnnnnnnnnnnnnnnnnnnnnnnnnnnnnnnnnnnnnnnnnnnnnnnnnnnnnnnnnnnnnnnnnnnnnnnnnnnnnnnnnnnnnnnnnnnnnnnnnnnnnnnnnnnnnnnnnnnnnnnnnnnnnnnnnnnnnnnnnnnnnnnnnnnnnnnnnnnnnnnnnnnnnnnnnnnnnnnnnnnnnnnnnnnnnnnnnnnnnnnnnnnnnnnnnnnnnnnnnnnnnnnnnnnnnnnnnnnnnnnnnnnnnnnnnnnnnnnnnnnnnnnnnnnnnnnnnnnnnnnnnnnnnnnnnnnnnnnnnnnnnnnnnnnnnnnnnnnnnnnnnnnnnnnnnnnnnnnnnnnnnnnnnnnnnnnnnnnnnnnnnnnnnnnnnnnnnnnnnnnnnnnnnnnnnnnnnnnnnnnnnnnnnnnnnnnnnnnnnnnnnnnnnnnnnnnnnnnnnnnnnnnnnnnnnnnnnnnnnnnnnnnnnnnnnnnnnnnnnnnnnnnnnnnnnnnnnnnnnnnnnnnnnnnnnnnnnnnnnnnnnnnnnnnnnnnnnnnnnnnnnnnnnnnnnnnnnnnnnnnnnnnnnnnnnnnnnnnnnnnnnnnnnnnnnnnnnnnnnnnnnnnnnnnnnnnnnnnnnnnnnnnnnnnnnnnnnnnnnnnnnnnnnnnnnnnnnnnnnnnnnnnnnnnnnnnnnnnnnnnnnnnnnnnnnnnnnnnnnnnnnnnnnnnnnnnnnnnnnnnnnnnnnnnnnnnnnnnnnnnnnnnnnnnnnnnnnnnnnnnnnnnnnnnnnnnnnnnnnnnnnnnnnnnnnnnnnnnnnnnnnnnnnnnnnnnnnnnnnnnnnnnnnnnnnnnnnnnnnnnnnnnnnnnnnnnnnnnnnnnnnnnnnnnnnnnnnnnnnnnnnnnnnnnnnnnnnnnnnnnnnnnnnnnnnnnnnnnnnnnnnnnnnnnnnnnnnnnnnnnnnnnnnnnnnnnnnnnnnnnnnnnnnnnnnnnnnnnnnnnnnnnnnnnnnnnnnnnnnnnnnnnnnnnnnnnnnnnnnnnnnnnnnnnnnnnnnnnnnnnnnnnnnnnnnnnnnnnnnnnnnnnnnnnnnnnnnnnnnnnnnnnnnnnnnnnnnnnnnnnnnnnnnnnnnnnnnnnnnnnnnnnnnnnnnnnnnnnnnnnnnnnnnnnnnnnnnnnnnnnnnnnnnnnnnnnnnnnnnnnnnnnnnnnnnnnnnnnnnnnnnnnnnnnnnnnnnnnnnnnnnnnnnnnnnnnnnnnnnnnnnnnnnnnnnnnnnnnnnnnnnnnnnnnnnnnnnnnnnnnnnnnnnnnnnnnnnnnnnnnnnnnnnnnnnnnnnnnnnnnnnnnnnnnnnnnnnnnnnnnnnnnnnnnnnnnnnnnnnnnnnnnnnnnnnnnnnnnnnnnnnnnnnnnnnnnnnnnnnnnnnnnnnnnnnnnnnnnnnnnnnnnnnnnnnnnnnnnnnnnnnnnnnnnnnnnnnnnnnnnnnnnnnnnnnnnnnnnnnnnnnnnnnnnnnnnnnnnnnnnnnnnnnnnnnnnnnnnnnnnnnnnnnnnnnnnnnnnnnnnnnnnnnnnnnnnnnnnnnnnnnnnnnnnnnnnnnnnnnnnnnnnnnnnnnnnnnnnnnnnnnnnnnnnnnnnnnnnnnnnnnnnnnnnnnnnnnnnnnnnnnnnnnnnnnnnnnnnnnnnnnnnnnnnnnnnnnnnnnnnnnnnnnnnnnnnnnnnnnnnnnnnnnnnnnnnnnnnnnnnnnnnnnnnnnnnnnnnnnnnnnnnnnnnnnnnnnnnnnnnnnnnnnnnnnnnnnnnnnnnnnnnnnnnnnnnnnnnnnnnnnnnnnnnnnnnnnnnnnnnnnnnnnnnnnnnnnnnnnnnnnnnnnnnnnnnnnnnnnnnnnnnnnnnnnnnnnnnnnnnnnnnnnnnnnnnnnnnnnnnnnnnnnnnnnnnnnnnnnnnnnnnnnnnnnnnnnnnnnnnnnnnnnnnnnnnnnnnnnnnnnnnnnnnnnnnnnnnnnnnnnnnnnnnnnnnnnnnnnnnnnnnnnnnnnnnnnnnnnnnnnnnnnnnnnnnnnnnnnnnnnnnnnnnnnnnnnnnnnnnnnnnnnnnnnnnnnnnnnnnnnnnnnnnnnnnnnnnnnnnnnnnnnnnnnnnnnnnnnnnnnnnnnnnnnnnnnnnnnnnnnnnnnnnnnnnnnnnnnnnnnnnnnnnnnnnnnnnnnnnnnnnnnnnnnnnnnnnnnnnnnnnnnnnnnnnnnnnnnnnnnnnnnnnnnnnnnnnnnnnnnnnnnnnnnnnnnnnnnnnnnnnnnnnnnnnnnnnnnnnnnnnnnnnnnnnnnnnnnnnnnnnnnnnnnnnnnnnnnnnnnnnnnnnnnnnnnnnnnnnnnnnnnnnnnnnnnnnnnnnnnnnnnnnnnnnnnnnnnnnnnnnnnnnnnnnnnnnnnnnnnnnnnnnnnnnnnnnnnnnnnnnnnnnnnnnnnnnnnnnnnnnnnnnnnnnnnnnnnnnnnnnnnnnnnnnnnnnnnnnnnnnnnnnnnnnnnnnnnnnnnnnnnnnnnnnnnnnnnnnnnnnnnnnnnnnnnnnnnnnnnnnnnnnnnnnnnnnnnnnnnnnnnnnnnnnnnnnnnnnnnnnnnnnnnnnnnnnnnnnnnnnnnnnnnnnnnnnnnnnnnnnnnnnnnnnnnnnnnnnnnnnnnnnnnnnnnnnnnnnnnnnnnnnnnnnnnnnnnnnnnnnnnnnnnnnnnnnnnnnnnnnnnnnnnnnnnnnnnnnnnnnnnnnnnnnnnnnnnnnnnnnnnnnnnnnnnnnnnnnnnnnnnnnnnnnnnnnnnnnnnnnnnnnnnnnnnnnnnnnnnnnnnnnnnnnnnnnnnnnnnnnnnnnnnnnnnnnnnnnnnnnnnnnnnnnnnnnnnnnnnnnnnnnnnnnnnnnnnnnnnnnnnnnnnnnnnnnnnnnnnnnnnnnnnnnnnnnnnnnnnnnnnnnnnnnnnnnnnnnnnnnnnnnnnnnnnnnnnnnnnnnnnnnnnnnnnnnnnnnnnnnnnnnnnnnnnnnnnnnnnnnnnnnnnnnnnnnnnnnnnnnnnnnnnnnnnnnnnnnnnnnnnnnnnnnnnnnnnnnnnnnnnnnnnnnnnnnnnnnnnnnnnnnnnnnnnnnnnnnnnnnnnnnnnnnnnnnnnnnnnnnnnnnnnnnnnnnnnnnnnnnnnnnnnnnnnnnnnnnnnnnnnnnnnnnnnnnnnnnnnnnnnnnnnnnnnnnnnnnnnnnnnnnnnnnnnnnnnnnnnnnnnnnnnnnnnnnnnnnnnnnnnnnnnnnnnnnnnnnnnnnnnnnnnnnnnnnnnnnnnnnnnnnnnnnnnnnnnnnnnnnnnnnnnnnnnnnnnnnnnnnnnnnnnnnnnnnnnnnnnnnnnnnnnnnnnnnnnnnnnnnnnnnnnnnnnnnnnnnnnnnnnnnnnnnnnnnnnnnnnnnnnnnnnnnnnnnnnnnnnnnnnnnnnnnnnnnnnnnnnnnnnnnnnnnnnnnnnnnnnnnnnnnnnnnnnnnnnnnnnnnnnnnnnnnnnnnnnnnnnnnnnnnnnnnnnnnnnnnnnnnnnnnnnnnnnnnnnnnnnnnnnnnnnnnnnnnnnnnnnnnnnnnnnnnnnnnnnnnnnnnnnnnnnnnnnnnnnnnnnnnnnnnnnnnnnnnnnnnnnnnnnnnnnnnnnnnnnnnnnnnnnnnnnnnnnnnnnnnnnnnnnnnnnnnnnnnnnnnnnnnnnnnnnnnnnnnnnnnnnnnnnnnnnnnnnnnnnnnnnnnnnnnnnnnnnnnnnnnnnnnnnnnnnnnnnnnnnnnnnnnnnnnnnnnnnnnnnnnnnnnnnnnnnnnnnnnnnnnnnnnnnnnnnnnnnnnnnnnnnnnnnnnnnnnnnnnnnnnnnnnnnnnnnnnnnnnnnnnnnnnnnnnnnnnnnnnnnnnnnnnnnnnnnnnnnnnnnnnnnnnnnnnnnnnnnnnnnnnnnnnnnnnnnnnnnnnnnnnnnnnnnnnnnnnnnnnnnnnnnnnnnnnnnnnnnnnnnggacatcacattacgatcagtctgaatccaggtcgtgggcggctgtcatacttaaactccttctgcacatccagagggtatttgctccacatccgttgtctgctgctgcctctttcctcctcactcaagctgttgtagtcagcagagcctagaatgagattccgggaatggattctaaatgtgattttcctaggctactgcaggaaccccttctcttctcagaaaggtctgtttttgttcccgattgtaatgcaaaatgcttgctcaataaagaaaannnnnnnnnnnnnnnnnnnnnnnnnaagaagcaatcactttcctatcatctaaaacaagttccttcatactggagtattctgtcacttctcccctccgtntggagtattctgtcacttctcccctccgtatagtattttttttgttgttgtaacagttgtaatcatattgtaaatatttttgtacctttctccttttaacgtgttattgacaaacctccccaatacaatattcaattgtttgtttcatttctctgttgtcagacaccaataaattc

SEQ ID NO: 34068 - DNA, 2048 bp, Macaca Mulatta
  misc_feature (1)...(2048): n = A,T,C or G
ggaaatgtttttctaaaacatggttcagaactgcggattattcctagagatcgtgttggaagttgttaatatctgctacttggaacatacgatttcctttcagaataaatactggtattttttgttgttgtaaaattgaaatcaagcatataacatattatgaaaacaccaagagnnnnnnnnnnnnnnnnnngactcatctgcccctttttgttgtccatactcttcctatgaagagggaatgcgcatgaatccaggctactacggtcacagaagannnnnnnnnnnnnnnnnnnnnnnnnnnnnnnnnnnnnnnnnnnnnnnnnnnnnnnnnnnnnnnnnnnnnnnnnnnnnnnnnnnnnnnnnnnnnnnnnnnnnnnnnnnnnnnnnnnnnnnnnnnnnnnnnnnnnnnnnnnnnnnnnnnnnnnnnnnnnnnnnnnnnnnnnnnnnnnnnnnnnnnnnnnnnnnnnnnnnnnnnnnnnnnnnnnnnnnnnnnnnnnnnnnnnnnnnnnnnnnnnnnnnnnnnnnnnnnnnnnnnnnnnnnnnnnnnnnnnnnnnnnnnnnnnnnnnnnnnnnnnnnnnnnnnnnnnnnnnnnnnnnnnnnnnnnnnnnnnnnnnnnnnnnnnnnnnnnnnnnnnnnnnnnnnnnnnnnnnnnnnnnnnnnnnnnnnnnnnnnnnnnnnnnnnnnnnnnnnnnnnnnnnnnnnnnnnnnnnnnnnnnnnnnnnnnnnnnnnnnnnnnnnnnnnnnnnnnnnnnnnnnnnnnnnnnnnnnnnnnnnnnnnnnnnnnnnnnnnnnnnnnnnnnnnnnnnnnnnnnnnnnnnnnnnnnnnnnnnnnnnnnnnnnnnnnnnnnnnnnnnnnnnnnnnnnnnnnnnnnnnnnnnnnnnnnnnnnnnnnnnnnnnnnnnnnnnnnnnnnnnnnnnnnnnnnnnnnnnnnnnnnnnnnnnnnnnnnnnnnnnnnnnnnnnnnnnnnnnnnnnnnnnnnnnnnnnnnnnnnnnnnnnnnnnnnnnnnnnnnnnnnnnnnnnnnnnnnnnnnnnnnnnnnnnnnnnnnnnnnnnnnnnnnnnnnnnnnnnnnnnnnnnnnnnnnnnnnnnnnnnnnnnnnnnnnnnnnnnnnnnnnnnnnnnnnnnnnnnnnnnnnnnnnnnnnnnnnnnnnnnnnnnnnnnnnnnnnnnncaaaatacttgagatagtcttaagcagaagaaggcaattagagaaaacaaagtgtctactggacttgtcaacatacagacttcaagatatcccttatgagaatccaaagaatgatgtgtaagggaagattttatttgcccttccagaagaaatcagtatctatgcaaatcttgaaagatgaaatcaaagctcataatgattcagaatcagtgcttgaccttctgtattctgaatggtgaactctggaagcagggattgtgtctgtctggctctttttagagctggaaatgtagtggctttcattaaatacttgctgtaaagtctttctaagaccaattatcatcttagcatgtttcagtatcttctctgtcatagaccctaagttcattagggnnnnnnnnnnnnnnnattcaacagaatccgcatttgaagtgtgccattggtacttgtttatgaaattaccagatattcataaatgtgacagatgaacagcaggattatgaattatcaaaggaaaaatatttgctgaggtgaaaaaatctgatatttgaggaannnnnnnnnnnnnnnnnnnnnnnnnnnnnnnnnnnnnnnnnnnnnnnnctctgtcgccaggcttctcttgcctcagcctcccgagtagctggaactacaggcgtgtgccgccacgctcagctaatttttgtatttttagcagagacagggaggaagtttttatttttataaacaaaatctgatgttcagaggccccgttttttacaataaatgttgagtctcagttaagcaggaatttgtgaacaaccatttcctgactttttgctttaatttagatttttctccactctgtttcgagaacaacaatttgcctgctgt

SEQ ID NO: 34069 - DNA, 666 bp, Macaca Mulatta
tgtcatctgatagggtatgttgctcatactgttgctctgagggagtacatcttgagtattttcaaataatgatgtgaagtttgaggtaggtatctttccactgttctcctttactagaattaggttattaagcttctctagtggccttaacttttgttacacagagatttaaagaaaaccaaagcagtacctcagttatgtattgcatccttcttttcctcagccaccctatcgtaacaagttatttcccttccattctttatttggctttgttctttccctgtctgccttctgcattttctcagttatctaccagtggttctcaaactttagactttttgagaatcgcctggtgggttgctaaaagatgcagattagtcctttcctagagatttataaacaggggccagaaatctgtatttttaacatggagcccacgtgattttgatccaggtggccccaaatccagttacgtaaacactgctttagcttctctcctgaagccttgttaagtaaactggtttaatctttaatctctagtcacttttcatgttccttttggcttcctaccaagtggtagtatccatttagtgccttaaaatatggataataccaaggagatttcattccagacaaatctagaaaagccattagcttctaagtgtc

SEQ ID NO: 34070 - DNA, 526 bp, Macaca Mulatta
tgttactctctctcctatattatatataaaatccagcctttggaagtagactgctacctaagttttggtcccttcctaaaaccattgagtagggttctattacataaacagtaggattttttcctctcctgaccttatccatttacagttcaatgaaataagtgtctgtgcattgctgtctgtctctattggcaaagtcaaataaatggcttctcagctgctgtttacaacaaacttccctaacaaaacagaacctctaatttagggctgggaatcgaagtcttttggttccagtccctgggacagttttgtatgctatatcttgtacacaggttgtaggttggtttattgccattttgtcttatttctgctatataaaaaccaagagccatacaattagacaaatatggaggaatgaaaggcaattcaaccatctgcttgatttccaagccccgaccccgtccgccgccctaattttggcgagaatactggttagagaacatttcatctcacttgaaacatcctt

SEQ ID NO: 34071 - DNA, 1993 bp, Macaca Mulatta
  misc_feature (1)...(1993): n = A,T,C or G
tttgagaaaggccaaggcgtgctcgttgggaactggactggggactaccaagatggcacagccccatacaagtggacaggcagcgccccaatcctgcagcagtactacagcacgaagcaggctgtgcgttttggccagtgctgggtattcgctgggatcctgactacagncagtgctgagagcgctgggcatcccagcacgcagcgtgacagcctttgattcagctcatgacactgaaaagaacctcacggtggacacctatgtgaatgagaatggcgagaaaatcaccaatatgagccgcgactctgtctggnnnnnnnnnnnnnnnnnnnnnnnnnnnnnnnnnnnnnnnnnnnnnnnnnnnnnnnnnnnnnnnnnnnnnnnnnnnnnnnnnnnnnnnnnnnnnnnnnnnnnnnnnnnnnnnnnnnnnnnnnnnnnnnnnnnnnnnnnnnnnnnnnnnnnnnnnnnnnnnnnnnnnnnnnnnnnnnnnnnnnnnnnnnnnnnnnnnnnnnnnnnnnnnnnnnnnnnnnnnnnnnnnnnnnnnnnnnnnnnnnnnnnnnnnnnnnnnnnnnnnnnnnnnnnnnnnnnnnnnnnnnnnnnnnnnnnnnnnnnnnnnnnnnnnnnnnnnnnnnnnnnnnnnnnnnnnnnnnnnnnnnnnnnnnnnnnaggctcccctgaggagaggcaggtcatggatcatgccttcctccttctcagttctgagagggagcacagacgacctgtaaaagagaactttcttcacatgtcggtacagtcagatgatgcgctgctgggaaaccctgttaatttcaccgtgattctcaaaaggaagactgctgccctacagaatgtcaacatctcgggctcctttgaactacagttgtacaccggcaagaaggtggcaaaactgtgtgacctcaataagacctcgcagatccaaggtcaannnnnnnnnnnnnnnnnnnnnnnnnnnnnnnnnnnnnnnnnnnnnnnnnnnnnnnnnnnnnnnnnnnnnnnnnnnnnnnnnnnnnnnnnnnnnnnnnnnnnnnnnnnnnnnnnnnnnnnnnnnnnnnnnnnnnnnnnnnnnnnnnnnnnnnnnnnnnnnnnnnnnnnnnnnnnnnnnnnnnnnnnnnnnnnnnnnnnnnnnnnnnnnnnnnnnnnnnnnnnnnnnnnnnnnnnnnnnnnnnnnnnnnnnnnnnnnnnnnnnnnnnnnnnnnnnnnnnnnnnnnnnnnnnnnnnnnnnnnnnnnnnnggacggtgcagcctggtgagaccatccaatcccaaataaaatgcatcccaataaaaactggacccaagaaatttatcatcaagttaagttccaaacaagtgaaagagattaacgctcagaagattgttctcatcaccaagtagccttgtctgatgctgtggagccttagttgagatttcagcatttcctactttgtgcttagctttcagattatggatgattaaatttgatgacttttatgagggcagattcaagagcaggaggtcagaaaggccaacacaaccataagcagccagacccacaaggccaggtcctgtgctatcacnnnnnnnnnnnnnnnnnnnnnnaaacaccaaacgaggccacagaatcccatccctttcctgagtcatggccacagaaatcagggccaccnnnnnnnnnnnnnnnnnnnnnnnnnnnnnnnnnnnnnnnnnnnnnnnnnnnnnnnnnnnnnnnnnnnnnnnnnnnnnnnnnnnnnnnnnnnnnnnnnnnnnnnnnnnnnnnnnnnnnnnnnnnnnnnnnnnnnnnnnnnnnnnnnnnnnnnnnnnnnnnnnnnnnnnnnnnnnnnnnnnnnnnnnnnnnnnnnnnnnnnnnnnnnnnnnnnnnnnnnnnnnnnnnnnnnnnnnnnnnnnnnnnnnnnnnnnnnnnnnnnnnnnnnnnnnnnngtttgaagcccaatgtgcaaggacatttctcaagggccatgtggttttgcagaca

SEQ ID NO: 34072 - DNA, 777 bp, Macaca Mulatta
  misc_feature (1)...(777): n = A,T,C or G
ggggaacacagtcagttggaacccagtcaattggtaaagttggtgaagatgaagatggtagtgatgaagaagtagttcataatgaagatatccattttgaaccaatagtgtcactaccagaggtagaagtaaaatctggagaagaagatgaagaaattttgtttaaagagagagccaaactttatagatgggatcgggatgtcagtcagtggaaggaacgtggtgttggagatataaagattctttggcatacaatgaagaactattaccggatccttatgagaagagaccaggtttttaaagtgtgtgcaaaccacgttattactaaaacaatggaattaaagcccttaaatgtttcaaataatgctttagtttggactgcctcagattatgctgatggagaagcaaaagtagaacagcttgcagtgagatttaaaactaaagaagtagctgattgtttcaagaaaacatttgaagaatgtcagcagaatttattgcaactccagaaaggacatgcagcagaattatcaaaggagaccaatcctgtggtgttttttgatgtttgtgcggacggtgaacctctagggcggataactatggagttattttcgaacattgttcctcggactgctgagaacttcagagcactatgcactggagagaaaggctttggttttcagaattccattttttccagagtaatttccggattttgttttgcaaggaaggagatatcnaccaaaacatgatgggaacagggcggaacaagtcccattt

SEQ ID NO: 34073 - DNA, 601 bp, Macaca Mulatta
tcttctccactgttttgattctcaggagcagttgagaccctcagcccatcacaaaaccagacagactccaagactggtgagtgaggagatgctctcggttatggggctggcacagagggtcagggactgtccaggggaggtgggtgccctgggtggacatccaggggtcccggggtgattctgacctgccgtgacctctgtgacctctttgtccaccacccctaggccaacacccacaggattacacagtggagaatctcatccgcatgggcgtggctggcttggtcctggtggtcctcgggattctgctatttgaggctcaaaacagccagagaagcccccaagatgcagccggccggtgaacagcagaaatgacaatgctcccttcagagtggtggagcctcagggacagatctgatgatcccaggaagttctggaggacaatctaggacctacgttatctgaactctctgctggtcacttctagagacaggaatccatatctgagtgcagggaaactgtctggggtgattcctagaagatcattaaactgtgccacatttttttgtctatgaatgttgactttccttgactggatccc

SEQ ID NO: 34074 - DNA, 654 bp, Macaca Mulatta
  misc_feature (1)...(654): n = A,T,C or G
gggaacatcatccatctattagccgtgtgtatcactgatgaccctctctgcatgatcactgaatacatggaaaatggagatctcaatcagtttctttctcgccatgagccccctaattcttcctccagcaatgtacccactgtcagttacaccaatctgaagtttatggctacccaaattgcctctggcatgaagtacctttcctctcttaatttcgttcaccgagatctggccacacgaaattgcttagtgggtaagaactacacaatcaagatagctgactttggaatgagcaggaacctgtacagtggtgactattaccggatccagggccgggcagtgctccctatccgctggatgtcttgggaaagtatcttgctgggcaagttcactacggcaagtgatgtgtgggcctttggggttactttgtgggagactttcaccttttgccaggaacagccctattcccagctgtcagatgaacaggttattgagaatactggagaattcttccgagaccaagggaggcagacttacctccctcaaccagccatttgtcctgactctgtgtataagctgatgcttagctgctggagagagatacgaagaacgtccctcattcacagaatccacttctgctccntcacaggcgac

SEQ ID NO: 34075 - DNA, 278 bp, Macaca Mulatta
  misc_feature (1)...(278): n = A,T,C or G
tggctttgagtntgataaggataaagagaatgatgtctgccctaaagacacttggatccaaaaacaaacaacagcagcgaaccccaccaagttagtttattcatttgtataaaagcacatttcggatatttagttctgaagattatttgtttcatggttattgtgaggccatattgagttcgattttctaccagtgtgaaaaccacttaaaatcctagagtatgtggccaatgacatgagagcagcttcttttctgctctggctcttcctgagaggca

SEQ ID NO: 34076 - DNA, 506 bp, Macaca Mulatta
ggcagtatcaatgtcaacatcatttatggcctcactgtggccctactctctacaggactggatatagtgcttatcattatatcctatgtaatgatcctttacgcagtgtttcagataccttcctgggctgccaggttcaaggcccttagtacgtgtggctctcatatctgtgtcacacttatgttctatgccccagcattcttttcatttcttgcccatcgctttggaggtaaaaccatccctcaccacattcacattctagtggccaatctctatgtgttggtgccccctatgctaaaccccatcatttatggggtgaagaccaaacaaattaaagatcgagtgattttgcttttctctcctatcagtgtatgctgttaaaatttaaaagtctgttttagggaatggaaataaatacaatccatagaaatcctcaaacacacttaaaaggttggtgtctatcaaaatgcccactgcattttgctaaagcactcaaagatcaaaga

SEQ ID NO: 34077 - DNA, 245 bp, Macaca Mulatta
  misc_feature (1)...(245): n = A,T,C or G
gggtgttccctgcttccttggggggatggcacgggggctgttaggccgcaaccactccctccacatccgggagaaccgcagtgcggccctgaagaaggcagatgtcattgtcctagcaggnnnaggaaccgtgtgcgactttcgcctatcgtatggccgtgtcctcagccacagcagcaagatcatcattgtcaatcgtaaccgggaagatatgttgctcaactcagacgtcttctggaagcccc

SEQ ID NO: 34078 - DNA, 2026 bp, Macaca Mulatta
  misc_feature (1)...(2026): n = A,T,C or G
agggggatttcattctgaagattgagcctcccctagggtggagttttgnnnnnnnnnnnnnnnnnnnnnnnnnnnnnnnnnnnnnnnnnnnnnnnnnnnnnnnnnnnnnnnnnnnnnnnnnnnnnnnnnnnnnnnnnnnnnnnnnnnnnnnnnnnnnnnnnnnnnnnnnnnnnnnnnnnnnnnnnnnnnnnnnnnnnnnnnnnnnnnnnnnnnnnnnnnnnnnnnnnnnnnnnnnnnnnnnnnnnnnnnnnnnnnnnnnnnnnnnnnnnnnnnnnnnnnnnnnnnnnnnnnnnnnnnnnnnnnnnnnnnnnnnnnnnnnnnnnnnnnnnnnnnnnnnnnnnnnnnnnnnnnnnnnnnnnnnnnnnnnnnnnnnnnnnnnnnnnnnnnnnnnnnnnnnnnnnnnnnnnnnnnnnnnnnnnnnnnnnnnnnnnnnnnnnnnnnnnnnnnnnnnnnnnnnnnnnnnnnnnnnnnnnnnnnnnnnnnnnnnnnnnnnnnnnnnnnnnnnnnnnnnnnnnnnnnnnnnnnnnnnnnnnnnnnnnnnnnnnnnnnnnnnnnnnnnnnnnnnnnnnnnnnnnnnnnnnnnnnnnnnnnnnnnnnnnnnnnnnnnnnnnnnnnnnnnnnnnnnnnnnnnnnnnnnnnnnnnnnnnnnnnnnnnnnnnnnnnnnnnnnnnnnnnnnnnnnnnnnnnnnnnnnnnnnnnnnnnnnnnnnnnnnnnnnnnnnnnnnnnnnnnnnnnnnnnnnnnnnnnnnnnnnnnnnnnnnnnnnnnnnnnnnnnnnnnnnnnnnnnnnnnnnnnnnnnnnnnnnnnnnnnnnnnnnnnnnnnnnnnnnnnnnnnnnnnnnnnnnnnnnnnnnnnnnnnnnnnnnnnnnnnnnnnnnnnnnnnnnnnnnnnnnnnnnnnnnnnnnnnnnnnnnnnnnnnnnnnnnnnnnnnnnnnnnnnnnnnnnnnnnnnnnnnnnnnnnnnnnnnnnnnnnnnnnnnnnnnnnnnnnnnnnnnnnnnnnnnnnnnnnnnnnnnnnnnnnnnnnnnnnnnnnnnnnnnnnnnnnnnnnnnnnnnnnnnnnnnnnnnnnnnnnnnnnnnnnnnnnnnnnnnnnnnnnnnnnnnnnnnnnnnnnnnnnnnnnnnnnnnnnnnnnnnnnnnnaggtgatggttcctgaggcagagaccagagcagggctgacactgaaaccccagatgtttcctcttactgtgactgacaggcccgtgatggatgtggcctttgtacagttcttggcatccgtttctgggaaagtctcttgtttggnacacctgtggtgacctgctggtgactctgcagtccctgagccgccagggtgagaagcggagcctccagctctccggcaaggtcaactccatgactttcacctttgacaacgtgctccctggaaaatacaannnnnnnnnnnnnnnnnnnnnnnnnnnnnnnnnnnnnnnnnnnnnnnnnnnnnnnnnnnnnnnnnnnnnnnnnnnnnnnnnnnnnnnnnnnnnnnnnnnnnnnnnnnnnnnnnnnnnnnnnnnnnnnnnnnnnnnnnnnnnnnnnnnnnnnnnnnnnnnnnnnnnnnnnnnnnnnnnnnnnnnnnnnnnnnnnnnnnnnnnnnnnnnnnnnnnnnnnnnnnnnnnnnnnnnnnnnnnnnnnnnnnnnnnnnnnnnnnnnnnnnnnnnnnnnnnnnnnnnnnnnnnnnnnnngtcttcacctagtatcttgacattgacagccattcgccaccatgtccttggaactatcaccaccgacaaaatgatggatgtcactgtgactatcaagtngtcttccatcgacagtgaacccgccttggtcttaggccctctgaagtctgtgcaggagctgcggagggagcagcaactggctgagatcgaggcccgcaggcaggagagggagaagaacggcaaagaggaaggcggagaaagaatgaccaagcctcccgtgcaggagatggtagatgagttacaaggccccttcttgtatgatttctcttactgggcacggt

SEQ ID NO: 34079 - DNA, 643 bp, Macaca Mulatta
cggttcatctcgagtctgacgctttcctcgtttgtctcaaccacgctctgagcacagagaaggaggaagtgatggggctgtgcataggggagttgaacgatgatccaagtaggagtgactccaaatttgcatatactggaactgaaatgcgcacagttgctgaaaaggttgatgccgtcagaattgttcacattcattctgtcatcatcttacgacgttctgataagaggaaggaccgagtagaaatttctccagagcagctgtctgcagcttcaacagaggcagagaggttggctgaactgacaggccgccccatgagagttgtgggctggtatcattcccatcctcatataactgtttggccttcacatgttgatgttcgcacacaagccatgtaccagatgatggatcaaggctttgtaggacttattttttcctgtttcatagaagataagaacacgaagactggccgggtactctacacttgcttccaatccatacaggcccaaaagagttcagagtatgagagaatcgaaatcccaatccatattgtacctcatgtcactatcgggaaagtgtgccttgaatcagcagtagagctgcccaagatccttgtgccaggaggagcaggatgcgtatagga

SEQ ID NO: 34080 - DNA, 839 bp, Macaca Mulatta
agcaggagaagctgtcaggaagatcagaagccagtcatggatgaccagcgcgacctgatctccaacaatgagcaactgcccatgctgggccggcgccctggaaccccagagagcaagtgcagccgcggagccctgtacacaggcttttccatcctggtgactctgcttctggctggccaggccaccactgcctacttcctgtaccagcagcagggccggctggacaaactgacagtcaccacccagagcctgcagctggagaacctgcgcatgaagcttcccaagcctcccaagcctgtgagcaagatgcgcatggcaaccccgctgctgatgcaggcgctacccatgggagcccaggggcccatgcagaatgccaccaagtatggcaacatgacggaggaccatgtgatgcacctgctccagaatgctgaccccctgaaggtgtacccgccgctgaaggggagcttcccggagaacctgagacaccttaagagcaccatggagaccttggactggaaggtctttgagagctggatgcaccattggctcttgtttgaaatgagcaagcactccttggagcaaaagcccactgaggctccaccaaaagagtcactggaactggaggacccgtcttctgggctgggtgtgaccaagcaggatctgggcccagtccccatgtgagagcagcagaggcggtctccacatcctgccaggcctgcacagcaaaggattcttgatccttcggaccaagccctcccaaatacaaccgaactatacaaaaaacatgtgagatcatgaaactggaagaaaacactgaaacaataaaacagagcaaggac

SEQ ID NO: 34081 - DNA, 2538 bp, Macaca Mulatta
  misc_feature (1)...(2538): n = A,T,C or G
gggcctgagccatggaattggccctagggcagcaggaacctgttgtttcagaagttggtgacctttgnnnnnnnnnnnnnnnnnnnnnnnnnnnnnnnnnnnnnnnnnnnnnnnnnnnnnnnnnnnnnnnnnnnnnnnnnnnnnnnnnnnnnnnnnnnnnnnnnnnnnnnnnnnnnngatttccacttctcaaacctgctgtgatctcacaactggagggaggaggtgagctggggggcccatctccactggctgcaggaacaggcctctggggcctccggactgnnnnnnnnnnnnnnnnnnnnnnnnnnnnnnnnnnnnnnnnnnnnnnnnnnnnnnnnnnnnnnnnnnnnnnnnnnnnnnnnnnnnnnnnnnnnnnnnnnnnnnnnnnnnnnnnnnnnnnnnnnnnnnnnnnnnnnnnnnnnnnnnnnnnnnnnnnnnnnnnnnnnnnnnnnnnnnnnnnnnnnnnnnnnnnnnnnnnnnnnnnnnnnnnnnnnnnnnnnnnnnnnnnnnnnnnnnnnnnnnnnnnnnnnnnnnnnnnnnnnnnnnnnnnnnnnnnnnnnnnnnnnnnnnnnnnnnnnnnnnnnnnnnnnnnnnnnnnnnnnnnnnnnnnnnnnnnnnnnnnnnnnnnnnnnnnnnnnnnnnnnnnnnnnnnnnnnnnnnnnnnnnnnnnnnnnnnnnnnnnnnnnnnnnnnnnnnnnnnnnnnnnnnnnnnnnnnnnnnnnnnnnnnnnnnnnnnnnnnnnnnnnnnnnnnnnnnnnnnnnnnnnnnnnnnnnnnnnnnnnnnnnnnnnnnnnnnnnnnnnnnnnnnnnnnnnnnnnnnnnnnnnnnnnnnnnnnnnnnnnnnnnnnnnnnnnnnnnnnnnnnnnnnnnnnnnnnnnnnnnnnnnnnnnnnnnnnnnnnnnnnnnnnnnnnnnnnnnnnnnnnnnnnnnnnnnnnnnnnnnnnnnnnnnnnnnnnnnnnnnnnnnnnnnnnnnnntatcagtgcaatgactgtggaaatggcttcagctgtagttctgcatatattacacatcagagagtccacactggggagaaaccttacgagtgtaatgactgtgggaaagctttcaatgttaatgcaaaattaattcagcatcagagaatccacactggagagaagccttatgaatgtaatgaatgtggaaaaggcttcaggtgcagctcccagcttaggcagcatcagagcatccacacaggagaaaagccctatcagtgtaaagagtgtggaaaaggcttcaataataatacaaaactcattcagcatcagagaatccacacaggtgagaaaccctatgaatgcactgaatgtggaaaagccttcagtgtcaaagggaagttaatccaacaccagagaattcacacaggcgagaaaccctatgagtgtaatgaatgtgggaaagccttcaggtgtaactcccaatttcggcagcatctgagaattcacactggggagaagccctatgagtgtaatgagtgtggaaaggccttcagcgttaatgggaaactaatgcggcatcagagaattcacactggggagaaaccttttgaatgtaatgaatgtgggagatgctttacttctaaaaganacctacttgatcatcaccgaatccatactggagaaaagccctatcaatgtaaggaatgtgggaaagccttcagtatcaatgccaaactaactaggcatcagaggatacatannnnnnnnnnnnnnnnnnnnnnnnnnnnnnnnnnnnnnnnnnnnnnnnnnnnnnnnnnnnnnnnnnnnnnnnnnnnnnnnnnnnnnnnnnnnnnnnnnnnnnnnnnnnnnnnnnnnnnnnnnnnnnnnnnnnnnnnnnnnnnnnnnnnnnnnnnnnnnnnnnnnnnnnnnnnnnnnnnnnnnnnnnnnnnnnnnnnnnnnnnnnnnnnnnnnnnnnnnnnnnnnnnnnnnnnnnnnnnnnnnnnnnnnnnnnnnnnnnnnnnnnnnnnnnnnnnnnnnnnnnnnnnnnnnnnnnnnnnnnnnnnnnnnnnnnnnnnnnnnnnnnnnnnnnnnnnnnnnnnnnnnnnnnnnnnnnnnnnnnnnnnnnnnnnnnnnnnnnnnnnnnnnnnnnnnnnnnnnnnnnnnnnnnnnnnnnnnnnnnnnnnnnnnnnnnnnnnnnnnnnnnnnnnnnnnnnnnnnnnnnnnnnnnnnnnnnnnnnnnnnnnnnnnnnnnnnnaatcaggaaaggatgaccacttaaagagaaacatccaagaataaatagctttgttttttactaacaggaattagaaaatataatgaaggaaaagatttcattcccagcagcatcaagaaaagtagattttctagaaataaacagttatggaagacttgtatggagaaatttaagtcttcactgagagccactttagaaaggaaatttgaataaatggagagagagagaagccttgttgttggataggaaaacccatactaaagatactctacctgcattaatttatttgtttaatttttgacaacaagcatgtattactttt

SEQ ID NO: 34082 - DNA, 1308 bp, Macaca Mulatta
  misc_feature (1)...(1308): n = A,T,C or G
ggttacaagacaagtggctcagtgcaaatgtgcaaaaaggtttcaggtggagcagatcggagagaataaataccggnnnnnnnnnnnnnnnnnnnnnnnnnnnnnnnnnnnnnnnnnnnnnnnnnnnnnnnnnnnnnnnnnnnnnnnnnnnnnnnnnnnnnnnnnnnnnnnnnnnnnnnnnnnnnnnnnnnnnnnnnnnnnnnnnnnnnnnnnnnnnnnnnnnnnnnnnnnnnnnnnnnnnnnnnnnnnnnnnnnnnnnnnnnnnnnnnnnnnnnnnnnnnnnnnnnnnnnnnnnnnnnnnnnnnnnnnnnnnnnnnnnnnnnnnnnnnnnnnnnnnnnnnnnnnnnnnnnnnnnnnnnnnnnnnnnnnnnnnnnnnnnnnnnnnnnnnnnnnnnnnnnnnnnnnnnnnnnnnnnnnnnnnnnnnnnnnnnnnnnnnnnnnnnnnnnnnnnnnnnnnnnnnnnnnnnnnnnnnnnnnnnnnnnnnnnnnnnnnnnnnnnnnnnnnnnnnnnnnnnggttatctcatcatcaggtagcaagttgaaacgaccaacaccaacttttcattctagtcggacatcccttgctggtgataccagcaatagttcttccccggcctccacaggtgccaaaactaaccgggnnnnnnnnnnnnnnnnnnnnnnnnnnnnnnnnnnnnnnnnnnnnnnnnnnnnnnnnnnnnnnnnnnnnnnnnnnnnnnnnnnnnnnnnnnnnnnnnnnnnnnnnnnnnnnnnnnnnnnnnnnnnnnnnnnnnnnnnnnnnnnnnnnnnnnnnnnnnnnnnnnnnnnnnnnnnnnnnnnnnnnnnnnnnnnnnnnnnnnnnnnnnnnnnnnnnnnnnnnnnnnnnnnnnnnnnnnnnnnnnnnnnnnnnnnnnnnnnnnnnnnnnnnnnnnnnnnnnnnnnnncactctccactttgaatcctgctccgtacattgggtgtatatttattctgaacgggagaagttatattgttaaaagtgtaaaagaataattgtgttatgaagctgccttnnnnnnnnnnnnnngtaagttactattttcatgtgaatatttatgtagataaaatttgcctcctggtaaccctgtaatggatggggcccagaaatgaaatatttgagaaaaacaagtgaaaaggtcaagatacaaatgtgtatnnnnnnnnnnnngcctattaatagggtttctgcgcggtgcagggttgtaaacctgctttatcttttaggattattcctaaatgcatcttctttataaacttgacttgctatctcagcaagataaattatat

SEQ ID NO: 34083 - DNA, 365 bp, Macaca Mulatta
  misc_feature (1)...(365): n = A,T,C or G
ctggcatattagagaaaatgatgtgtacataaaatttcctctcattattttcctctacacaatttatactacggtaatgagcgccggtagcccggacaagtacataagtaggatcagaaacccaagtcaaaaggaagtcagcagaagagcgagttcacccgtgctgtgaaaggtttgttgttactgttgttttggggagatgtggggaggtgggtgtgtgctggtatttctcatanaggatgataacagccttaaaatgtatacatatataatattttctgacaagcgtctggcattgtcatttgtgtcagattgtcgtcattagatattttagttggaatcgtttgtttgaaaaccaatcttcg

SEQ ID NO: 34084 - DNA, 1312 bp, Macaca Mulatta
  misc_feature (1)...(1312): n = A,T,C or G
cagtggaggagctgaaggcggcgctggagcgcgggcannnnnnnnnnnnnnnnnnnnnnnnnnnnnnnnnnnnnnnnnnnnnnnnnnnnnnnnnnnnnnnnnnnnnnnnnnnnnnnnnnnnnnnnnnnnnnnnnnnnnnnnnnnnnnnnnnnnnnnnnnnnnnnnnnnnnnnnnnnnnnnnnnnnnnnnnnnnnnnnnnnnnnnnnnnnnnnnnnnnnnnnnnnnnnnnnnnnnnnnnnnnnnnnnnnnnnnnnnnnnnnnnnnnnnnnnnnnnnnnnnnnnnnnnnnnnnnnnnnnnnnnnnnnnnnnnnnnnnnnnnnnnnnnnnnnnnnnnnnnnnnnnnnnnnnnnnnnnnnnnnnnnnnnnnnnnnnnnnnnnnnnnnnnnnnnnnnnnnnnnnnnnnnnnnnnnnnnnnnnnnnnnnnnnnnnnnnnnnnnnnnnnnnnnnnnnnnnnnnnnnnnnnnnnnnnnnnnnnnnnnnnnnnnnnnnnnnnnnnnnnnnnnnnnnnnnnnnnnnnnnnnnnnnnnnnnnnnnnnnnnnnnnnnnnnnnnnnnnnnnnnnnnnnnnnnnnnnnnnnnnnnnnnnnnnnnnnnnnnnnnnnnnnnnnnnnnnnnnnnnnnnnnnnnnnnnnnnnnnnnnnnnnnnnnnnnnnnnnnnnnnnnnnnnnnnnnnnnnnnnnnnnnnnnnnnnnnnnnnnnnnnnnnnnnnnnnnnnnnnnnnnnnnnnnnnnnnnnnnnnnnnnnnnnnnnnnnnnnnnnnnnnnnnnnnnnnnnnnnnnnnnnnnnnnnnnnnnnnnnnnnnnnnnnnnnnnnnnnnnnnnnnnnnnnnnnnnnnnnnnnnnnnnnnnnnnnnnnnnnnnnnnnnnnnnnnnnnnnnnnnnnnnnnnnnnnnnnnnnnnnnnnnnnnnnnnnnnnnnnnnnnnnnnnnnnnnnnnnnnnnnnnnnnnnnnnnnnnnnnnnnnnnnnnnnnnnnnnnnnnnnnnnnnnnnnnnnnnnnnnnnnnnnnnnnnnnnnnnnnnnnnnnnnnnnnnnnnnnnnnnnnnnnnnnnnnnnnnnnnnnnnnnnnnnnnnnnnnnnnnnnnnnnnnnnnnnnnnnnnnnnnnnnnnnnnnnnnnnnnnnnnnnnnnnnnnnnnnnnnnnnnnnnnnnnnnnnnnnnnnnnnnnnnnnnnnnnnnnnnnnnnnnnnnnagccgctgttcaagaggttcacgcacacccgctgggcggcccccatggagacgctggaaaaaatcatcaccaccgtggacgtcaggctgcctgccttctgggaactgcaggnctgtttccgggag

SEQ ID NO: 34085 - DNA, 155 bp, Macaca Mulatta
gtttgagcaggaagttctgggggctccagtacccggaatcccaactgctgtgcctgcggtgcccacggtccccacggtccccacggtagaagcgatgcaggtcccagcggctcctgtgatccgtccaattatcgcgaccaacacataccagcagg

SEQ ID NO: 34086 - DNA, 738 bp, Macaca Mulatta
aggtgggagggggacacgggaggtgagtcccgagctcacggcgtcccccaccgccacagcttaccgcatccacgtgaacttgagcaccgtggggattctccgtgctctggactcgggctaccaggtggagctgcgaggccgcacggagctgaaggtgaggcaggaccctgccccctcctggaggccccgccttgtcctgaggccccgcccatcccgggccacggctgcaacctcccctcacccttcctgacccggtctcccagttccatccagaccttgagatcccccacccctcgcccgagtccgcctaagtccttccctctcccatgtctccccagggcaagggcgccgaggacactttctggctagtgggcagacgcggcttcaacaagcccatccccaaaccgcctgacctgcaaccggggtgagtggctggcctccgtggcagggcgagggacgagggatcgctgcctccggctctgtgtctgacgccccgcgcgtgaggcagcgatgacgtgggccctgtcccccacgccccattccccttccctgaggtcaccgccccctccttgcaggtccagcaaccacggcatcagcctgcaggagatcccacccgagcggcgacggaagctggagaaggctcggccgggccagttttcttgagaagtgagacccggccccggacaggtgctgccccctccgcccccaccccaactgccgcgtcccctctgctgcctg

SEQ ID NO: 34087 - DNA, 908 bp, Macaca Mulatta
gggtactctgctccagacatgtgtggcctcagactcatcatgataccagttgagctgctactttgctacgtcttgctgcaccctgtggatgccacttcatctggaaagcagacaaatgtcttgatgcaccttcccttgtccttggaatcccagacaccctcctcagaccccttgtcctgccaatttctgcacccaaagtcactgcctggtttcagccacatggcccctctacccaagttcttggtaagcctggctctaaggaatgccctggaggaagctggttgccaggctgatgtttgggctctacagctacagctctaccgccagggtggtgtgaatgctacacaggtcctcatccagcatcttcgagggctccagacaggaagaagcacagagaggaacgtgtcagtggaagccctggcctctgctctgcagctgttagccagggagcagcaaagcacaggaagggtccggcgctccctccccacagaggactgtgagaatgagaaggagcaaggtatgcacaatgtcatccagctgctgccaggagtgggaaccttctacaacctgggcacagctttgtattatgctactcaaaactgcctgggcaaggccagggaacgaggccgagatggggccatagatctgggatatgaccttctgatgaccatggccgggatgtcagggggacctatgggtctagcgatcagtgctgcacttaaacctgcattaaggtctggggttcagcagttgatccagtattaccaagatcggaaagacgcaaacatctctcagccagagaccaccaaggaggggttgagggccatctcagatgtgagtgacttggaagaacaactaccctggcttctttcatatcagaagtagtaagttcagctccttactggggg

SEQ ID NO: 34088 - DNA, 650 bp, Macaca Mulatta
ctgctgcgcaccatcgctgagtcaaaaatggctggacattgcgtcagcgaaatcaaaatcaccagcaagtttcgaggcaaatacctctccattatgcccctcggtaccattcattgtattttccatgcaactgggcaccactacacttggaagaaagttaccacaactgtacacaacattattgtgggcaagttgtggatagatcagtctggtgaaattgatattgtgaatcacaagacaggagacaagtgtaatcttaaatttgttccttatagctacttctctcgggatgtagcaagaaaggaagaatgcagaaaacatgtattacttctcagagcttgctctgactctcaatgcttgggaaagtggcactgcccccacagacagccggttacgacctgaccagagactgatggaaaatgggcgctgggatgaagcaaatgcggagaagcagcgcctggaggaaaaacaaaggctttccagaaagaagagagaagcagaagctatgaaagccacagaggatggtaatgaacgtcccttctacttttctttcttaatgcatagagaatgtcagcactaatttttttctttcctctcttttccttttaggcacaccatatgatccctataaggcactgtggtttgagcgg

SEQ ID NO: 34089 - DNA, 228 bp, Macaca Mulatta
  misc_feature (1)...(228): n = A,T,C or G
ggaatccagaagaatgcacaggccctacaacacatgctgaagcacccactcctgtgccactcctccaagcccaagctggatactcttcagaaaccctatgttcccaaagagaaacgggnggcccagaggatcccgattccacccccaaggaagactagaacccaactgctggatgacatcttcattcgcttgcgggatccccggaacattacagaggctccactaggt

SEQ ID NO: 34090 - DNA, 579 bp, Macaca Mulatta
gatcggcagaggggacagtatggtttcagacgaagatgaattgaatcttctggttattgtagttgatgccaacccaatttggtggggaaagcaagcattaaaggaatctcagtttaccttatccaaatgcatagatgctgtgatggtgctgggaaattcgcatttattcatgaatcgttccaacaaacttgctgtgatagcgagtcacattcaagaaagccgattcttatatcctggaaagaatggcagacttggagacttcttcggagaccctggcaaccctcctgaatttaatccctctgggagtaaagatggaaaatacgaacttttaacctcagcgaatgaagttattgttgaagagattaaagatctaatgaccaaaagtgacataaagggtcaacatacagaaactttgctggcaggatccctggccaaagcactttgctacattcacagaatgaacaaggaaattacagataatcaggaaatgaagtcaaggatattggtgattacggctgcagaagacagtgcgttgcagtatatgaacttcatgaatgtcatcttcgcagcacagaaaca

SEQ ID NO: 34091 - DNA, 823 bp, Macaca Mulatta
  misc_feature (1)...(823): n = A,T,C or G
ggggccgaagaggtgatcaatcatgtgacggtggcttgaggaggaacctgtctttaaagctgtccctgaagtgacaacggagagaaccaggcaacccagaaaccccaggcgtggagattgatcctgcgagagaaaggggttcatcatggcggatgacctaaagcgattcttgtataaaaagttaccaagtgttgaagggctccatgccattgttgtatcagatagagatggagtacctgttattaaagtggccaatgacaatgctccggagcatgctttgcgacctggtttcttatccacttttgccctggcaacagaccaagggagcaaacttggactttcaaaaaataaaagtatcatctgttactataacacctaccaggtggttcagtttaatcgtttacctttggtggtgagtttcatagccagcagcagtgccaatacaggactaattgtcagcctagaaaaggaacttgctccattatttgaagaattgagacaagttgtggaagtttcttaatctgacagtggtttcagtgtgtaccttatcttcattataataacacactatcaatccagcaatctttagactacaataatacttttatccatgtgctcaagaaagggccacttttttccaacttatactaaagagctagcatataagatggttaattttatgggataagaatcaggtttgctaatatttttccctggtggtaacgcgtccttttcttaaatttaagatggtggaattctaggggaatacccccacccaggaaatggtttgggttctatcacggactccccntggaagttaggt

SEQ ID NO: 34092 - DNA, 257 bp, Macaca Mulatta
  misc_feature (1)...(257): n = A,T,C or G
tggtcaagccctctgggctgttatatgatattccaggagacagtggagtgaagcggacctcagcgtcccagaggggtgctgccaagacagtgtgctttccttgcttggaagtcttggnnnnnnnnnnnnnnnnnnnnnnnnnnnnnnnnnnnnnnnnnnnnnnnnnnnnnnnnnnnnnnnnnnnnnnnnnnnnnnnnnnnnnnnnnnnnnnnnnnnnnnnnnggttatgaggatgagggtggctatccaaaggattg

SEQ ID NO: 34093 - DNA, 1585 bp, Macaca Mulatta
  misc_feature (1)...(1585): n = A,T,C or G
tttttgcaagtggcggggcaggcagtgtagaccgctccggcagcgcgctctgcccggcttcttcagtctcctcgctgggagcgtccgggagcagctccgaggccgcggcgaaaccagnnnnnnnnnnnnnnnnnnnnnnnnnnnnnnnnnnnnnnnnnnnnnnnnnnnnnnnnnnnnnnnnnnnnnnnnnnnnnnnnnnnnnnnnnnnnnnnnnnnnnnnnnnnnnnnnnnnnnnnnnnnnnnnnnnnnnnnnnnnnnnnnnnnnnnnnnnnnnnnnnnnnnnnnnnnnnnnnnnnnnnnnnnnnnnnnnnnnnnnnnnnnnnnnnnnnnnnnnnnnnnnnnnnnnnnnnnnnnnnnnnnnnnnnnnnnnnnnnnnnnnnnnnnnnnnnnnnnnnnnnnnnnnnnnnnnnnnnnnnnnnnnnnnnnnnnnnnnnnnnnnnnnnnnnnnnnnnnnnnnnnnnnnnnnnnnnnnnnnnnnnnnnnnnnnnnnnnnnnnnnnnnnnnnnnnnnnnnnnnnnnnnnnnnnnnnnnnnnnnnnnnnnnnnnnnnnnnnnnnnnnnnnnnnnnnnnnnnnnnnnnnnnnnnnnnnnnnnnnnnnnnnnnnnnnnnnnnnnnnnnnnnnnnnnnnnnnnnnnnnnnnnnnnnnnnnnnnnnnnnnnnnnnnnnnnnnnnnnnnnnnnnnnnnnnnnnnnnnnnnnnnnnnnnnnnnnnnnnnnnnnnnnnnnnnnnnnnnnnnnnnnnnnnnnnnnnnnnnnnnnnnnnnnnnnnnnnnnnnnnnnnnnnnnnnnnnnnnnnnnnnnnnnnnnnnnnnnnnnnnnnnnnnnnnnnnnnnnnnnnnnnnnnnnnnnnnnnnnnnnnnnnnnnnnnnnnnnnnnnnnnnnnnnnnnnnnnnnnnnnnnnnnnnnnnnnnnnnnnnnnnnnnnnnnnnnnnnnnnnnnnnnnnnnnnnnnnnnnnnnnnnnnnnnnnnnnnnnnnnnnnnnnnnnnnnnnnnnnnnnnnnnnnnnnnnnnnnnnnnnnnnnnnnnnnnnnnnnnnnnnnnnnnnnnnnnnnnnnnnnnnnnnnnnnnnnnnnnnnnnnnnnnnnnnnnnnnnnnnnnnnnnnnnnnnnnnnnnnnnnnnnnnnnnnnnnnnnnnnnnnnnnnnnnnnnnnnnnnnnnnnnnnnnnnnnnnnnnnnnnnnnggatgggccaccgagagccccagggagtcgatgtggaggaggcttggaagtgccggacatgtacatatgcaaacatttgtgagtggagaaagggcagtggagtactcggctctacactggggccccaagccaaaaaagccaaatgaatagaaggtatgctttcaagaatgtcgatccttcctgtttttgttgtacctaagcaaaagaggaccagtctctgagcttggcttttatggacagtgttcttattttggttctttttttatttccacaacctctaaccacattcagtccaggaccaaggctcagggatgagtgggagagatgggttatactaccctggagcttcaccatgattgcctaagaagacagatgctcatcatggctggaatgaaggtatccttc

SEQ ID NO: 34094 - DNA, 366 bp, Macaca Mulatta
aacattattaataaacaaagaggatgtggataatatgtacgacatttttcaaaaatccctttcaagttacgttttgtcttttttactacattttccctcctcactgttattattgtttgggcttttcaaattacattattcattataattttctttgtgtaataaaaataaaatctcatgaggaaataaattttctgtttgaagtctattctttctcaagtattacattaccaaggccctaaaaatattataaagcccaaaatacaaaatatcattcagtaaaatattttatgttccaaccaaattaatgcgtaagaaacttagaaacactgtgacgagttaaagttgtattttaaagaggaagca

SEQ ID NO: 34095 - DNA, 100 bp, Macaca Mulatta
cactggcagatccccctgagccgacggtttcggtctattaaactctggttcgtgattcggtccttcggggtgaaaaatcttcaagcacatgtcagacatg

SEQ ID NO: 34096 - DNA, 2363 bp, Macaca Mulatta
  misc_feature (1)...(2363): n = A,T,C or G
gtcatgatgtttgaaggaaaagccaatgagagcagccccaagccagctggcccccctccagagagagacatcgctagcctgccctgaggaccccgcctggactccccagccttcccgccccactcctccctccccatcttgctgcccttcttgacacactgtgnnnnnnnnnnnnnnatttgtttgctcattgacggtttgtttgtgttgtcctcgatgtctttgtaaagcacaaattatctgccttaaaggggctctgggtcaggaaatcctgagccttgggtcccctccctctcttcttccctccttccccgctccctgtgcagaagggccaacatcaaaccaaaaactagagggggcaggnnngggcagggaggcttctagcctgtgttccccactcttggaaccggcactctccatccttccagaaagtctccaagccaagttcaggctcactgacctggatctgatgaggaccccaggccactctgagaagatcttggagtagggacaaggctgcagggcctctttcgggtttccttggacagtgccttggtcccagggctctggggtcacccaggacacagccactcatggcccagctgccccagctgatccccactcattccatacctcttctcnnnnnnnnnnnnnnnnnnnnnnnnnnnnnnnnnnnnnnnnnnnnnnnnnnnnnnnnnnnnnnnnnnnnnnnnnnnnnnnnnnnnnnnnnnnnnnnnnnnnnnnnnnnnnnnnnnnnnnnnnnnnnnnnnnnnnnnnnnnnnnnnnnnnnnnnnnnnnnnnnnnnnnnnnnnnnnnnnnnnnnnnnnnnnnnnnnnnnnnnnnnnnnnnnnnnnnnnnnnnnnnnnnnnnnnnnnnnnnnnnnnnnnnnnnnnnnnnnnnnnnnnnnnnnnnnnnnnnnnnnnnnnnnnnnnnnnnnnnnnnnnnnnnnnnnnnnnnnnnnnnnnnnnnnnnnnnnnnnnnnnnnnnnnnnnnnnnnnnnnnnnnnnnnnnnnnnnnnnnnnnnnnnnnnnnnnnnnnnnnnnnnnnnnnnnnnnnnnnnnnnnnnnnnnnnnnnnnnnnnnnnnnnnnnnnnnnnnnnnnnnnnnnnnnnnnnnnnnnnnnnnnnnnnnnnnnnnnnnnnnnnnnnnnnnnnnnnnnnnnnnnnnnnnnnnnnnnnnnnnnnnnnnnnnnnnnnnnnnnnnnnnnnnnnnnnnnnnnnnnnnnnnnnnnnnnnnnnnnnnnnnnnnnnnnnnnnnnnnnnnnnnnnnnnnnnnnnnnnnnnnnnnnnnnnnnnnnnnnnnnnnnnnnnnnnnnnnnnnnnnnnnnnnnnnnnnnnnnnnnnnnnnnnnnnnnnnnnnnnnnnnnnnnnnnnnnnnnnnnnnnnnnnnnnnnnnnnnnnnnnnnnnnnnnnnnnnnnnnnnnnnnnnnnnnnnnnnnnnnnnnnnnnnnnnnnnnnnnnnnnnnnnnnnnnnnnnnnnnnnnnnnnnnnnnnnnnnnnnnnnnnnnnnnnnnnnnnnnnnnnnnnnnnnnnnnnnnnnnnnnnnnnnnnnnnnnnnnnnnnnnnnnnnnnnnnnnnnnnnnnnnnnnnnnnnnnnnnnnnnnnnnnnnnnnnnnnnnnnnnngctgatcagggagttcagccttaaccccacctgtgttctgaagtctcttaccctacctgctcaggacttagacacagttattcactgaacatattgattaagcacttgctgtaggccaacagttaagaatccaataatgaaatggacagattcatggaacttagagtccaataggaaagtgagacccagacaatgacaatgagataaatgttagggagggggaggtatggggtgacttccctgcagtctcagggggcctagctgggcccaggactgggtgagagtcttggcagagcctttgcaacaccttaagtggacagaactgggagctcttggtggttggaaccaacgtgggttccctgcggctccttagtcacctctgacagcagattgagggaggaaagcaggtaaggcatgaggaaatggccaggttgggttaacccactggtttcaaccagttcaggaatgaggttatttggccacgactggctgatcttgagctcaaggatctgtttcaaatgcacacaggcctagttgaagtttaaaccccagcaaaacattcctccctgtaaatggaaaatcctactgctaccnnnnnnnnnnnnnnnnnnnnnnnnnnnnnnnnnnnnnnnnnnnnnnnnnnnnnnnnnntcctcactgcctctcctctccgggacaggctgggacctttgaggaagataaagccttccttgactacccatgataatcagtgtccctgtt

SEQ ID NO: 34097 - DNA, 2511 bp, Macaca Mulatta
  misc_feature (1)...(2511): n = A,T,C or G
ttgcaggatggctactcgtatacctccacacatgatcatcnnnnnnnnnnnnnnnnnnnnnnnnnnnnnnnnnnnnnnnnnnnnnnnnnnnnnnnnnnnnnnnnnnnnnnnnnnnnnnnnnnnnnnnnnnnnnnnnnnnnnnnnnnnnnnnnnnnnnnnnnnnnnnnnnnnnnnnnnnnnnnnnnnnnnnnnnnnnnnnnnnnnnnnnnnnnnnnnnnnnnnnnnnnnnnnnnnnnnnnnnnnnnnnnnnnnnnnnnnnnnnnnnnnnnnnnnnnnnnnnnnnnnnnnnnnnnnnnnnnnnnnnnnnnnnnnnnnnnnnnnnnnnnnnnnnnnnnnnnnnnnnnnnnnnnnnnnnnnnnnnnnnnnnnnnnnnnnnnnnnnnnnnnnnnnnnnnnnnnnnnnnnnnnnnnnnnnnnnnnnnnnnnnnnnnnnnnnnnnnnnnnnnnnnnnnnnnnnnnnnnnnnnnnnnnnnnnnnnnnnnnnnnnnnnnnnnnnnnnnnnnnnnnnnnnnnnnnnnnnnnnnnnnnnnnnnnnnnnnnnnnnnnnnnnnnnnnnnnnnnnnnnnnnnnnnnnnnnnnnnnnnnnnnnnnnnnnnnnnnnnnnnnnnnnnnnnnnnnnnnnnnnnnnnnnnnnnnnnnnnnnnnnnnnnnnnnnnnnnnnnnnnnnnnnnnnnnnnnnnnnnnnnnnnnnnnnnnnnnnnnnnnnnnnnnnnnnnnnnnnnnnnnnnnnnnnnnnnnnnnnnnnnnnnnnnnnnnnnnnnnnnnnnnnnnnnnnnnnnnnnnnnnnnnnnnnnnnnnnnnnnnnnnnnnnnnnnnnnnnnnnnnnnnnnnnnnnnnnnnnnnnnnnnnnnnnnnnnnnnnnnnnnnnnnnnnnnnnnnnnnnnnnnnnnnnnnnnnnnnnnnnnnnnnnnnnnnnnnnnnnnnnnnnnnnnnnnnnnnnnnnnnnnnnnnnnnnnnnnnnnnnnnnnnnnnnnnnnnnnnnnnnnnnnnnnnnnnnnnnnnnnnnnnnnnnnnnnnnnnnnnnnnnnnnnnnnnnnnnnnnnnnnnnnnnnnnnnnnnnnnnnnnnnnnnnnnnnnnnnnnnnnnnnnnnnnnnnnnnnnnnnnnnnnnnnnnnnnnnnnnnnnnnnnnnnnnnnnnnnnnnnnnnnnnnnnnnnnnnnnnnnnnnnnnnnnnnnnnnnnnnnnnnnnnnnnnnnnnnnnnnnnnnnnnnnnnnnnnnnnnnnnnnnnnnnnnnnnnnnnnnnnnnnnnnnnnnnnnnnnnnnnnnnnnnnnnnnnnnnnnnnnnnnnnnnnnnnnnnnnnnnnnnnnnnnnnnnnnnnnnnnnnnnnnnnnnnnnnnnnnnnnnnnnnnnnnnnnnnnnnnnnnnnnnnnnnnnnnnnnnnnnnnnnnnnnnnnnnnnnnnnnnnnnnnnnnnnnnnnnnnnnnnnnnnnnnnnnnnnnnnnnnnnnnnnnnnnnnnnnnnnnnnnnnnnnnnnnnnnnnnnnnnnnnnnnnnnnnnnnnnnnnnnnnnnnnnnnnnnnnnnnnnnnnnnnnnnnnnnnnnnnnnnnnnnnnnnnnnnnnnnnnnnnnnnnnnnnnnnnnnnnnnnnnnnnnnnnnnnnnnnnnnnnnnnnnnnnnnnnnnnnnnnnnnnnnnnnnnnnnnnnnnnnnnnnnnnnnnnnnnnnnnnnnnnnnnnnnnnnnnnnnnnnnnnnnnnnnnnnnnnnnnnnnnnnnnnnnnnnnnnnnnnnnnnnnnnnnnnnnnnnnnnnnnnnnnnnnnnnnnnnnnnnnnnnnnnnnnnnnnnnnnnnnnnnnnnnnnnnnnnnnnnnnnnnnnnnnnnnnnnnnnnnnnnnnnnnnnnnnnnnnnnnnnnnnnnnnnnnnnnnnnnnnnnnnnnnnnnnnnnnnnnnnnnnnnnnnnnnnnnnnnnnnnnnnnnnnnnnnnnnnnnnnnnnnnnnnnnnnnnnnnnnnnnnnnnnnnnnnnnnnnnnnnnnnnnnnnnnnnnnnnnnnnnnnnnnnnnnnnnnnnnnnnnnnnnnnnnnnnnnnnnnnnnnnnnnnnnnnnnnnnnnnnnnnnnnnnnnnnnnnnnnnnnnnnnnnnnnnnnnnnnnnnnnnnnnnnnnnnnnnnnnnnnnnnnnnnnnnnnnnnnnnnnnnnnnnnnnnnnnnnnnnnnnnnnnnnnnnnnnnnnnnnnnnnnnnnnnnnnnnnnnnnnnnnnnnnnnnnnnnnnnnnnnnnnnnnnnnnnnnnnnnnnnnnnnnnnnnnnnnnnnnnnnnnnnnnnnnnnnnnnnnnnnnnnnnnnnnnnnnnnnnnnnnnnnnnnnnnnnnnnnnnnnnnnnnnnnnnnnnnnnnnnnnnnnnnnnnnnnnnnnnnnnnnnnnnnnnnnnnnnnnnnnnnnnnnnnnnnngatcatcactgttgaggaggcaaagcgcaggaagagcacgtgcagctactatgaagacgaggatgaggaggtgctgcctgttctacggccccacagtgcgctcctggagaatatgcacatcgagcag

SEQ ID NO: 34098 - DNA, 900 bp, Macaca Mulatta
ggtgctccctacagtgggctgcaactcctgtacttgaagctgagacctcgtatgatgttgacgtggccttggtgttgtcagagtgtctggaagctgctgctgccatcttgaacaactcaccaacctccaacccagagccccagtgagagaggagcatttggcctcctgcttccttctgtggcctctgccaggctccttttccaagggaaagagaggagcttgggctcacagaaagagaaagggatgaaaccccaaggggccctatctttgggatttacatggaattttattttctacaagtttgaccttagccgtggtttgcaagtgaaccgaacattcagacctctgcaaagaaaagaaagtgtagggaaaagatagaacttgttggccgcctccggcccctcgaaaaacttttttaaaactattccttttggccccgtgtgcccatgaagtgtaacctgaaaatgagtcataaattgttttcataggagaatcttgggcccataaatagattttttggattttttccgaaaataataaaattcccttggtggaattcctaatctgtttttagaatagagtcctgtaatggaattcttgggagcgatctttacttggacatttaacgtctacaagggatttctcaatttataaaattagatcttcaaaagttaagtgccacttccctcttatctttcctcttctgtaagataccgagatcgataaaatcgataaaaagagagttctgatccttaccagtgaagaagaatctgatctaatgctggtagacgctcgaaacttcttaatattgtcaccgtagtgacatataagcgcacctcggtcctcctacctagcgtaaggagcatgtaatgacacccgctgtatacacacccacgacgg

SEQ ID NO: 34099 - DNA, 678 bp, Macaca Mulatta
gtaggactacagaccttttcatgatccagcagttgctgcccctaactttcctcaaccccggggcagcattatgtttcatttaattggatgtcatgacacctcttcttgcagctatgctggggctcatgtatgtgtactggactcagctcaacatgttccagaccttgaagtacctggccatcttgggcagtgtgacgtttctggctggcaatcggatgctggcccagcaggcagtcaagaggtaaggctggacatgggccagggatctagagtagggttagaaatactcagctctaccagcctagctctttgaagggtaggtggcaaaatgatttgtgttcttaggggcaagtctggcaccttaacctagcccaatacagaagccataagcactttgaagtcaaaaaaggggccttagtggtcagctttgaatgtattacaaccatagtaatttatgccccaatacaatagaatgagggaggaaaattattgctttatgaagatgaaagtgcattcatagatgtggcagaagattaattctttagctgtgtaaaaattctctgctgccacagagaatcctgccctgcccttcccaccctcaacatgtcccagagagttgctcctctgtaatcctcacagctccaggagcttgtcccagaagcacgaggtctgtgttat

SEQ ID NO: 34100 - DNA, 150 bp, Macaca Mulatta
ggtctctccaccaaatgaaaatgttgcaatttacaatccttcaagaccttggtgggaaagataccaaccagttagctataaattatgcacaagatctggaaatgaagatgaatttagaaacatggtgactagatgtaacaatgttggggt

SEQ ID NO: 34101 - DNA, 4421 bp, Macaca Mulatta
  misc_feature (1)...(4421): n = A,T,C or G
tgagctcggcttcggtcaccgctttcgagaaggagcatctctggatgtatctgcaggcgctcggcttcgagccaggcccggcaaccattgcctgcggaaagatcgtgtcgcacacgcatctcggagtgnnnnnnnnnnnnnnnnnnnnnnnnnnnnnnnnnnnnnnnnnnnnnnnnnnnnnnnnnnnnnnnnnnnnnnnnnnnnnnnnnnnnnnnnnnnnnnnnnnnnnnnnnnnnnnnnnnnnnnnnnnnnnnnnnnnnnnnnnnnnnnnnnnnnnnnnnnnnnnnnnnnnnnnnnnnnnnnnnnnnnnnnnnnnnnnnnnnnnnnnnnnnnnnnnnnnnnnnnnnnnnnnnnnnnnnnnnnnnnnnnnnnnnnnnnnnnnnnnnnnnnnnnnnnnnnnnnnnnnnnnnnnnnnnnnnnnnnnnnnnnnnnnnnnnnnnnnnnnnnnnnnnnnnnnnnnnnnnnnnnnnnnnnnnnnnnnnnnnnnnnnnnnnnnnnnnnnnnnnnnnnnnnnnnnnnnnnnnnnnnnnnnnnnnnnnnnnnnnnnnnnnnnnnnnnnnnnnnnnnnnnnnnnnnnnnnnnnnnnnnnnnnnnnnnnnnnnnnnnnnnnnnnnnnnnnnnnnnnnnnnnnnnnnnnnnnnnnnnnnnnnnnnnnnnnnnnnnnnnnnnnnnnnnnnnnnnnnnnnnnnnnnnnnnnnnnnnnnnnnnnnnnnnnnnnnnnnnnnnnnnnnnnnnnnnnnnnnnnnnnnnnnnnnnnnnnnnnnnnnnnnnnnnnnnnnnnnnnnnnnnnnnnnnnnnnnnnnnnnnnnnnnnnnnnnnnnnnnnnnnnnnnnnnnnnnnnnnnnnnnnnnnnnnnnnnnnnnnnnnnnnnnnnnnnnnnnnnnnnnnnnnnnnnnnnnnnnnnnnnnnnnnnnnnnnnnnnnnnnnnnnnnnnnnnnnnnnnnnnnnnnnnnnnnnnnnnnnnnnnnnnnnnnnnnnnnnnnnnnnnnnnnnnnnnnnnnnnnnnnnnnnnnnnnnnnnnnnnnnnnnnnnnnnnnnnnnnnnnnnnnnnnnnnnnnnnnnaggtataggataaaagatgatctcacaactataagacaatctgttgttgaaaagcaaggagaatggcataaaaagtggaaagaatttcttggtttgtctcctttcagtctaattaaaggttggactccctgtagatcttttaccaccaatgtctcccctttcatttgatcctgcctcagaagaagtatatgcaaagagtattctttgtcagtattctgcttcacttccagnnnnnnnnnnnnnnnnnnnnnnnnnnnnnnnnnnnnnnnnnnnnnnnnnnnnnnnnnnnnnnnnnnnnnnnnnnnnnnnnnnnnnnnnnnnnnnnnnnnnnnnnnnnnnnnnnnnnnnnnnnnnnnnnnnnnnnnnnnnnnnnnnnnnnnnnnnnnnnnnnnnnnnnnnnnnnnnnnnnnnnnnnnnnnnnnnnnnnnnnnnncagaatttgaagtggaaaattctcccctttcagatgttgcaacgaatacagagagtagtacatttggagggtctctgccagctaaaaaaagtgatccatttcaaaaagagcaagatcatctggtagaagaggtnnnnnnnnnnnnnnnnnnnnnnnnnnnnnnnnnnnnnnnnnnnnnnnnnnnnnnnnnnnnnnnnnnnnnnnnnnnnnnnnnnnnnnnnnnnnnnnnnnnnnnnnnnnnnnnnnnnnnnnnnnnnnnnnnnnnnntaactgaaattaggagctcatggagaaaagctattgaaatggaagaaaacagaactgcagaaccaactcaaatggatgctgaacatagagaagtattgccagaatcattacctgtgttgcacagtcaaagagaatttagcatggatgattttctcttagaaaccactgtgtcagattttggccagtctcgttcgactgaagagaaagttgtttcagattgcaagtgtgtgcctcagaaacctgtgctgaccagtcacatagatgaaccaccaacacaaagtcagtcagatttgttaaataagaaagtaatttgcaagcaagatttggaatgtttagccttcaccaagctttcagaaactagccaaatggagacattctccccagctgttggcaataggatagatgtgatgggtggcagtgaagaggagtttatgaaaatattggaccacttagaagtttcttgtaacaaaccttccacaaataaaactatgttgtggaactcttttcagctatcaagtggaattagttctaagagttttaaagataatgattttggcatattacacgaaactcttccggaagaagttggtcacctaagttttaatagttccagtagttcagaggccaattttaaactggagccaaatagtcctatgcatggtggcattcttctagaaaatgttgtgggagggagacagactactccagaatcagacttcaatatacaggctcttcgcagtagatacgaggctctgaagaaatctctttccaagaaaggggaagaatcttacctctcgaattcccaaacacccgaaagacacaaaccagaattgagccctactccccaaaatgtacaaacagatgatgtgcttaactttttggacacccgtgatttgcatactgaccatacaaagacatctttacccatgtccatcggtgaaagaaaacggtctctttcaccactaattaagttttctccagtggaacaaagattgaggaccacaatatcatgtagtcttggagaactacctaatttaannnnnnnnnnnnnnnnnnnnnnnnnnnnnnnnnnnnnnnnnnnnnnnnnnnnnnnnnnnnnnnnnnnnnnnnnnnnnnnnnnnnnnnnnnnnnnnnnnnnnnnnnnnnnnnnnnnnnnnnnnnnnnnnnnnnnnnnnnnnnnnnnnnnnnnnnnnnnnnnnnnnnnnnnnnnnnnnnnnnnnnnnnnnnnnnnnnnnnnnnnnnnnnnnnnnnnnnnnnnnnnnnnnnnnnnnnnnnnnnnnnnnnnnnnnnnnnnnnnnnnnnnnnnnnnnnnnnnnnnnnnnnnnnnnnnnnnnnnnnnnnnnnnnnnnnnnnnnnnnnnnnnnnnnnnnnnnnnnnnnnnnnnnnnnnnnnnnnnnnnnnnnnnnnnnnnnnnnnnnnnnnnnnnnnnnnnnnnnnnnnnnnnnnnnnnnnnnnnnnnnnnnnnnnnnnnnnnnnnnnnnnnnnnnnnnnnnnnnnnnnnnnnnnnnnnnnnnnnnnnnnnnnnnnnnnnnnnnnnnnnnnnnnnnnnnnnnnnnnnnnnnnnnnnnnnnnnnnnnnnnnnnnnnnnnnnnnnnnnnnnnnnnnnnnnnnnnnnnnnnnnnnnnnnnnnnnnnnnnnnnnnnnnnnnnnnnnnnnnnnnnnnnnnnnnnnnnnnnnnnnnnnnnnnnnnnnnnnnnnnnnnnnnnnnnnnnnnnnnnnnnnnnnnnnnnnnnnnnnnnnnnnnnnnnnnnnnnnnnnnnnnnnnngagtagacacgtgtaaggaacactgtcaaactataaatccattcagtggggttgtataacatttatatttagtctaatttagactttgataatttaacttaatcctacttttatattttaacaaaaatataaattaaaattttcattagtctgttttattgttgttgggttgttttgtactccctgttgagagaaaggaacaaggaacaaccatcaaaattcctcagtccctacagaatagccccacaataacttgagaaaactgaacctagagttaaataacttgtcacacttgtagtctcctgcctcactccttcaggtgccctgcctagaaaaagacttaggtctagcatccaagtgaacacatactattgccctctgtgaaccaggaggaatggaacaggcactggaagggtgatagtacctacaataccctttgtagtccccatctcacaaccatcaaaatcttgtccactagcccccaaaaaactggcagggaaagaaggtggaggggaaatttatggaagtagatggcttaatagttcatctctcttcatttatcttggactgcctttctctaagttgtttgtgctgtcccagtgtgaagactcatctttttgtgagaaaagacaaaatgaagcacatgtaactaccttctttgcaatggaaaaggagaagaaaaaaatcttctaagttgctgttttcttttattagttaataaaacaaatcagggactatgcaggtctatggggaaacctttagtctgctttaagaaaactcagtatctgaaaatcttagcatgtaacgctatcatatcagcatctgcagaagtgccaaggccattgctagacacttaatgtgtattatttcatttaattatattttaaatgtgc

SEQ ID NO: 34102 - DNA, 626 bp, Macaca Mulatta
caccctgcctgtggacgcgacctgttaggtctcatgcccactcccccaggagcagctggcactgacagcctggggggccactctccccctgcagctgtgcaggactgtagctcatgagtggaaagtcatctacaggactgggccagtcctgggccctctggcttccctgcccagtcctccgtggagaagggacgtggaaatgaatggaaatgggctgctagacacccacagcagcacgcgcgtccctccaaggctgtcttctcccagagcacaagaagtccagcccactgggacctggggctgccctcggcaactgtggggaggccgtttgctgccccggggcatcacgggcaactcgtgacagcctctgactcaccacgatgacgcctctggacctcggtgatgccttccgacaccactgggaaccaagggccctcgctcaggaaccctggagacagaagtcaggtgtcatcgtcagacgtgtggccacagcactagagtcaccccccaggcctccagaacctcattgacactgtggcactgccaccagcaatgccctgcctcgctgccttcatcctgaacacttactaccctgcaggccaggccagcttcccctcacttaacca

SEQ ID NO: 34103 - DNA, 148 bp, Macaca Mulatta
aggcctacatcctgctgggacaattccttctgatgcacaagaatgaagccgagtttcagaggtggctcatctgctgttgtggtgccactgagtgtgaggcccagcagagttctaactgcctcaaggagtggtgcgcctgcttcctgta

SEQ ID NO: 34104 - DNA, 3537 bp, Macaca Mulatta
  misc_feature (1)...(3537): n = A,T,C or G
agctctccgtggctaacaaggcccctgggaccgaggggcagcagcaggtgcacgagaagaaggagactccagcagtgccctcagccccaccctcctatgaggaagccacatctggggaggggatgaaggcaggggtcttctccccagcccccccggcggtgcctctccacccaagctgggcttatgtggaccccagnnnnnnnnnnnnnnnnnnnnnnnnnnnnnnnnnnnnnnnnnnnnnnnnnnnnnnnnnnnnnnnnnnnnnnnnnnnnnnnnnnnnnnnnnnnnnnnnnnnnnnnnnnnnnnnnnnnnnnnnnnnnnnnnnnnnnnnnnnnnnnnnnnnnnnnnnnnnnnnnnnnnnnnnnnnnnnnnnnnnnnnnnnnnnnnnnnnnnnnnnnnnnnnnnnnnnnnnnnnnnnnnnnnnnnnnnnnnnnnnnnnnnnnnnnnnnnnnnnnnnnnnnnnnnnnnnnnnnnnnnnnnnnnnnnnnnnnnnnnnnnnnnnnnnnnnnnnnnnnnnnnnnnnnnnnnnnnnnnnnnnnnnnnnnnnnnnnnnnnnnnnnnnnnnnnnnnnnnnnnnnnnnnnnnnnnnnnnnnnnnnnnnnnnnnnnnnnnnnnnnnnnnnnnnnnnnnnnnnnnnnnnnnnnnnnnnnnnnnnnnnnnnnnnnnnnnnnnnnnnnnnnnnnnnnnnnnnnnnnnnnnnnnnnnnnnnnnnnnnnnnnnnnnnnnnnnnnnnnnnnnnnnnnnnnnnnnnnnnnnnnnnnnnnnnnnnnnnnnnnnnnnnnnnttcctggcacttgacacccagttgctgatgggtaaccgacgccactcgctgagccctgaggagtatatttttggagccctcaacatttnnnnnnnnnnnnnnnnnnnnnnnnnnnnnnnnnnnnnnnnnnnnnnnnnnnnnnnnnnnnnnnnnnnnnnnnnnnnnnnnnnnnnnnnnnnnnnnnnnnnnnnnnnnnnnnnnnnnnnnnnnnnnnnnnnnnnnnnnnnnnnnnnnnnnnnnnnnnnnnnnnnnnnnnnnnnnnnnnnnnnnnnnnnnnnnnnnnnnnnnnnnnnnnnnnnnnnnnnnnnnnnnnnnnnnnnnnnnnnnnnnnnnnnnnnnnnnnnnnnnnnnnnnnnnnnnnnnnnnnnnnnnnnnnnnnnnnnnnnnnnnnnnnnnnnnnnnnnnnnnnnnnnnnnnnnnnnnnnnnnnnnnnnnnnnnnnnnnnnnnnnnnnnnnnnnnnnnnnnnnnnnnnnnnnnnnnnnnnnnnnnnnnnnnnnnnnnnnnnnnnnnnnnnnnnnnnnnnnnnnnnnnnnnnnnnnnnnnnnnnnnnnnnnnnnnnnnnnnnnnnnnnnnnnnnnnnnnnnnnnnnnnnnnnnnnnnnnnnnnnnnnnnnnnnnnnnnnnnnnnnnnnnnnnnnnnnnnnnnnnnnnnnnnnnnnnnnnnnnnnnnnnnnnnnnnnnnnnnnnnnnnnnnnnnnnnnnnnnnnnnnnnnnnnnnnnnnnnnnnnnnnnnnnnnnnnnnnnnnnnnnnnnnnnnnnnnnnnnnnnnnnnnnnnnnnnnnnnnnnnnnnnnnnnnnnnnnnnnnnnnntcatgacagagcactgttggggcaggaggtgagagcagggggccctgctcctcagtgagggcctgtcctggggctcccagggaagtgggagccggggagccaatccacccagacccgcgtccacctgggaggcatttggggttgcagaaccgagatccacatcctctcactcgcttctctccacccaccaggctactgccacaggcctgaggctgagtgaggtgtgcttgggccctccggctggatgttctgggggaggaggcaatcactctagctgccaggccagccccatctggaaggagtccctgctctgtcccagccctaacccgaggctgtgtgggagtcccttctgcacctcttatttcctaaacccttcctgtcagctgctgtttgctggcttgtccccagccaggcctcctgaggccttcgtagttggcagagtccacatctcttctagcttcactggccgctcactcagcccagagtccctnnnnnnnnnnnacttatctctgcatctctccaagtgagaaaccatccagctgatgctaacagccagggccagtccctccagctggtccnnnnnnnnnnnnnnnnnnnnnnnnnnnnnnnnnnnnnnnnnnnnnnnnnnnnnnnnnnnnnnnnnnnnnnnnnnnnnnnnnnnnnnnnnnnnnnnnnnnnnnnnnnnnnnnnnnnnnnnnnnnnnnnnnnnnnnnnnnnnnnnnnnnnnnnnnnnnnnnnnnnnnnnnnnnnnnnnnnnnnnnnnnnnnnnnnnnnnnnnnnnnnnnnnnnnnnnnnnnnnnnnnnnnnnnnnnnnnnnnnnnnnnnnnnnnnnnnnnnnnnnnnnnnnnnnnnnnnnnnnnnnnnnnnnnnnnnnnnnnnnnnnnnnnnnnnnnnnnnnnnnnnnnnnnnnnnnnnnnnnnnnnnnnnnnnnnnnnnnnnnnnnnnnnnnnnnnnnnnnnnnnnnnnnnnnnnnnnnnnnnnnnnnnnnnnnnnnnnnnnnnnnnnnnnnnnnnnnnnnnnnnnnnnnnnnnnnnnnnnnnnnnnnnnnnnnnnnnnnnnnnnnnnnnnnnnnnnnnnnnnnnnnnnnnnnnnnnnnnnnnnnnnnnnnnnnnnnnnnnnnnnnnnnnnnnnnnnnnnnnnnnnnnnnnnnnnnnnnnnnnnnnnnnnnnnnnnnnnnnnnnnnnnnnnnnnnnnnnnnnnnnnnnnnnnnnnnnnnnnnnnnnnnnnnnnnnnnnnnnnnnnnnnnnnnnnnnnnnnnnnnnnnnnnnnnnnnnnnnnnnnnnnnnnnnnnnnnnnnnnnnnnnnnnnnnnnnnnnnnnnnnnnnnnnnnnnnnnnnnnnnnnnnccgtctctcctgaaacccctcgccaggttttgtgctctgaggtttctatcctccggacatgaactgggaggcaagatttctggtttctggttctaacctcaccgccagcgggctcctggtgttaggggagggtttcttgctgtctgggattcagtttttctatctgccacgtggaagttcatagccaggagagggtgggagaggcaccagaacnnnnnnnnnnnnnnnnnnnnnnnnnnnnnnnnnnnnnnnnnnnnnnnnnnnnnnnnnnnnnnnnnnnnnnnnnnnnnnnnnnnnnnnnnnnnnnnnnnnngggttagtcccagcaccccactctcctgccactgtcagacagccttggtcatgcttcctagaatctacttgtccaagttctcctctccctgggataagttattgcagaaaaactggggatttaaaagcttattcagggctgagtgccaaaagcttgggggaggagggacaggtcctcagctataaacaacatcacacacgcatcacagccatttgagaaatggcttctttgcagagctggggaggccaggcagaagatgctgcagcctcctactccgggtcgtga

SEQ ID NO: 34105 - DNA, 774 bp, Macaca Mulatta
  misc_feature (1)...(774): n = A,T,C or G
ggggtattgggaatatttattatattagctgtggttgccataacaaaataccaaatatggggtggcttcaacaacagacatttatttctcacagttccaggaggctggatagtccaagattaaggttccagcagatttgtttcctggtgagggctctcttattggcttgcagacagctgctttctctttgtacctttacatggccccatgggcattaactccctatatttcttgaaaagtgcatgcacaagtgccaagtgtgatctcagaagcactcaacgctttagtgtttaggccagtcatgtctgaactgaagaaagaggctaagcattgtcaggttgcatctgtgggaagctagtcaaagccaaaacacaactggagcaagagtatattgactgcatttgagggtatgcaagagaagtctaatacacccacacaggtatggattcttgattttaacaaaggtaattaattctgtttatctagttttaaatccttgtgtcaataccatactctcttattacatttttagaattattcttgacaccggacagagtatgtcctaccattttatttttttcaaaattgtcttggctcttcacacttctacataaattttagagtcggcttccacagttccataaaaaaaaacaaataaaaccctgctgaaaattgcttggatgcaatgatcaatttgggaaagattgccatctttancatgtttaacccttccacctataaacattatatagcccctctgtttattttggtctc

SEQ ID NO: 34106 - DNA, 2390 bp, Macaca Mulatta
atggagaccacacccttaaattctcagaagcagctctcagcgtgtaaggatggagaagactgtcaggaaaatggagttctacagaaggttgttcccaccccaggggacaaagtggagtccgggcaaatatccaatggatactcagcagttccaagtcctggtgcgggagacgatacacggcactctatcccggcggccaccaccaccctagtggctgagcttcatcaaggggaacgggagacctggggcaagaaggtggatttcctcctctcagtcattggctatgctgtggacctgggcaatgtctggcgcttcccctacatatgttaccagaatggaggaggggcattcctcatcccctacaccatcatggccatttttgggggaatcccgctcttttacatggagctcgcgctgggacagtaccaccgaaatggatgcatttcaatatggaggaaaatctgcccgattttcaaagggattggttatgccatctgcatcattgccttttacattgcctcctactacaacaccatcatggcctgggcgctatactacctcatctcctccttcacggaccagctgccctggaccagctgcaagaactcctggaacactggcaactgcaccaattacttctctgaggacaacatcacctggaccctccattccacctccccagctgaagaattttacacgcgccacgtcctgcagatccaccggtctaaggggctccaggacctggggggcatcagctggcagctggccctctgcatcatgctgatcttcactgttatctacttcagcatctggaaaggcgtcaagacctctggcaaggtggtgtgggtgacagccaccttcccttatatcatcctttctgtcctgctggtgaggggcgccaccctccctggagcctggaggggtgttctcttctacttgaaacccaactggcagaaactcctagagacaggggtgtggatagatgcagctgctcagatcttcttctctcttggtccgggctttggggtcctgctggcttttgctagctacaacaagttcaacaacaactgctaccaagatgccctggtgaccagcgtggtgaactgcatgacgagcttcgtttcgggatttgtcatcttcacggtgctcggttacatggctgagatgaggaatgaagatgtgtctgaggtggccaaagatgcaggtcccagcctcctcttcatcacgtatgcagaagcgatagccaacatgccagcgtccactttctttgccatcatcttctttctgatgttaatcacgctgggcttggacagcacgtttgcaggcttggagggggtgatcacagctgtgctggatgagttcccacacatctgggccaagcgccgggagtggttcgtgctcgccgtggtcatcacctgcttctttggatccctggtcaccctgacttttggaggggcctacgtggtgaagctgctggaggagtacgccacggggcctgcagtgctcactgtcgcgctgatcgaggcagtcgctgtgtcttggttctatggcatcactcagttctgcagggacgtgaaggaaatgctgggcttcagcccgggctggttctggaggatctgctgggtggccatcagccctctgtttctcctgttcatcatttgcagttttctgatgagcccaccacagctacgacttttccaatataattatccccactggagtatcatcttgggttactgcataggaacctcatctttcgtctgcatccccacatacatagcttatcggctgatcagcactccagggacatttaaggagcgtattattaaaagtatcaccccagaaacaccaacagaaattccttgtggggacgtccgcttgaatgctgtgtaacacactcaatgagaggaaaaaggcttccccacaacctcctcctccagttctgacgagccacgcctgccttgtcccttccaagtggatgagtttccagctaagcctgatgatggaaagggccttctctacagggacacagttccaagagacgatggtgcccagactcaaggcctccagccactcatttccatggactcccctggacatattcccacggtagactgtgacgcagctgagccggcctgttttggacgtgcgaggatgtgaatggaggtgatgaaaagcaccctatcagttaggattaggtttagaatcaagtctgtgaaagtctcctgtatcatttcttggtatgatcactgctatctgatatctgtttgcttctaaaggtttcactgttcatgaatacgtaaactgagtaggagagaacagggatgctatctcactagccacatattttctgagtagcatacagaattttattgctggaatctactaga

SEQ ID NO: 34107 - DNA, 203 bp, Macaca Mulatta
  misc_feature (1)...(203): n = A,T,C or G
tacatctaggagttaacaaaggagagggatgccctgagtctggaactgtacaggaacacncataaccgatgatgagctgaaggagaaaaatgccgaactacaagaaaaacttcgacttgtagaatctgagaagtctgagatccagctcaatgtaaaggagctagaaaggaagctggagaaggccaagctcctgctgccacagg

SEQ ID NO: 34108 - DNA, 442 bp, Macaca Mulatta
taccacagtttagagagtcaagcacataagtgcttttatgccatcaggtgagtgcattttctgtgatcctattcaaataaatattacataatgtgtttttcccccagatcggccatggatatggaacattccttatgtcaaagcaccggatacgcatgggaacatgtgggtgccctcctgagaatcttgaggcactgtgaaatttaagtgtaagacattgagccacaaacatggactctcttctttgtactggatgttcacttcccttaaagtcttacttgtaccccacaaaatctgcaaaggtcactctgatgaatggatgttggttatacttttaatggacattaacattctcaataaaaaaaagtattattttcttaatccacttttatatgttttggaaagaaaactagtgaacttctctatgccaaaaatatgtact

SEQ ID NO: 34109 - DNA, 1929 bp, Macaca Mulatta
  misc_feature (1)...(1929): n = A,T,C or G
gccccctaccgtggcatctcctgctaccgcggccttcagggggctttggcagccacagcgtgtgcggaggctatagggccggctcctgcggacgcagcttcggctaccgctctgggggcgtgtgcgggcccagccccccatgcatcaccaccgtgtccgtcaacgagagcctcctcacgcccctcaacctggagatcgaccccaacgcgcagtgtgtgaagcaggaggagaaggagcagatcaaatccctcaacagcaggttcgcggccttcatcgacaaggtgnnnnnnnnnnnnnnnnnnnnnnnnnnnnnnnnnnnnnnnnnnnnnnnnnnnnnnnnnnnnnnnnnnnnnnnnnnnnnnnnnnnnnnnnnnnnnnnnnnnnnnnnnnnnnnnnnnnnnnnnnnnnnnnnnnnnnnnnnnnnnnnnnnnnnnnnnnnnnnnnnnnnnnnnnnnnnnnnnnnnnnnnnnnnnnnnnnnnnnnnnnnnnnnnnnnnnnnnnnnnnnnnnnnnnnnnnnnnnnnnnnnnnnnnnnnnnnnnnnnnnnnnnnnnnnnnnnnnnnnnnnnnnnnnnnnnnnnnnnnnnnnnnnnnnnnnnnnnnnnnnnnnnnnnnnnnnnnnnnnnnnnnnnnnnnnnnnnnnnnnnnnnnnnnnnnnnnnnnnnnnnnnnnnnnnnnnnnnnnnnnnnnnnnnnnnnnnnnnnnnnnnnnnnnnnnnnnnnnnnnnnnnnnnnnnnnnnnnnnnnnnnnnnnnnnnnnnnnnnnnnnnnnnnnnnnnnnnnnnnnnnnnnnnnnnnnnnnnnnnnnnnnnnnnnnnnnnnnnnnnnnnnnnnnnnnnnnnnnnnnnnnnnnnnnnnnnnnnnnnnnnnnnnnnnnnnnnnnnnnnnnnnnnnnnnnnnnnnnnnnnnnnnnnnnnnnnnnnnnnnnnnnnnnnnnnnnnnnnnnnnnnnnnnnnnnnnnnnnnnnnnnnnnnnnnnnnnnnnnnnnnnnnnnnnnnnnnnnnnnnnnnnnnnnnnnnnnnnnnnnnnnnnnnnnnnnnnnnnnnnnnnnnnnnnnnnnnnnnnnnnnnnnnnnnnnnnnnnnnnnnnnnnnnnnnnnnnnnnnnnnnnnnnnnnnnnnnnnnnnnnnnnnnnnnnnnnnnnnnnnnnnnnnnnnnnnnnnnnnnnnnnnnnnnnnnnnnnnnnnnnnnnnnnnnnnnnnnnnnnnnncgtcagcagctcccgcggtggcgtcgtctgtggcgatctctgtgcctccactactgcccctgttgtctccaccagagtcagcagcgtccccagcaacagcaacgtggtggtgggcaccactaacgcttgcgccccctccatcgggattggcgcctgcggcggcagctgtaagaggtgctaggaagctgcggcctctgccagcgcctgtagccatcattctccacccagccagtcctcgggccaccggaacgcgcctccctggccggcctcccaagagccgccgccagctgcgtgcactctaagtgccctccccaccgctccgctctgggagccatccctggtcgcaggagtctggggaggcccggnnnnnnnnnnnnnnnnnnnnnnngcctttcctggtagtcaatttgttgtcccgaggattcatccttttcttccgcctaccttctgtttttttgctgtatgcattggtcttgcctgacctcttccccaaagcttggaggaacgggggaggccggggaatgtccctgtctgcacgacctgggactctgcccatgcgcttctgcctgtggaatggagacgtgcaccctggatggtggttctgtgactctgcgagggacaggcccacgnnnnnnnnnnnnnnnnnnnnnnnnnnnnnnncccgcaagagcttctgaaaaagtaatgactctgctgccttctcctttgtctttgtttcactct

SEQ ID NO: 34110 - DNA, 794 bp, Macaca Mulatta
  misc_feature (1)...(794): n = A,T,C or G
ggcacagcagacctgcacacttctgcagatccagctcctagagcttggggcaccaggctgcctttcctagtcctgtcaacaaccatacggtgtgaattgctgaattagctgctattctatgtggagtcacagtaagctttttcttatctttttctatggggaagctatagggtgggtaaggaaaaaatgttgaatgcttttactttgctgaaaatattagaactctcttgtgacaggatacagcaaattataattaaatataaattaccagaaccagagctacctctaagtcatacttcctcaagcacaaagctctcaggcatatgagacccactttaatgaagggtctctgatttcttgagcatcagcgagtttcagaagtgactatttttttgtactcttctagtttccttggtacggtacactttttcccattccagaatgaggcttaaatgacaaagactcttctgagaaaccaaattccttctaagtattaactagcgatattgttggattaaagaaaatctaaaaactgnnnnnnnnnnnnnnnnnnnttcggggttctaaaaagtcctgttgaaggaacaatttcttattctgaaacaagggttttccgtaaggtggaaagggctaaaaggttaaagggctgaaaatggatgcgggttcaggttgccgaacaggttttttgaaaaagcatttagaaattccgggcctaataaatctcgggaagagaaaaagtttatatccacattctcaaatggtgggcatagccaacgtttttagtaggctccact

SEQ ID NO: 34111 - DNA, 727 bp, Macaca Mulatta
  misc_feature (1)...(727): n = A,T,C or G
ggggagataaaaagcatggaatacctacatcagttgactttataggctgtgatccagctcatatggtaacctctttcaacactggtagtgccgtaatttatgatttagaaacatcacagtcattggtgatactttcatcacaggtagattctggtttacaatctaataatcatatcaacagagtagtaagtcatcccacacttcctgtatacaataactgctcatgaagatagacacatcaaattttttgacaataaaacgggtaaaatgatccattctatggtagctcacttggatgctgttacaagtctagcagtagatcctaatggaatctatttgatgtctggaagccatgactgttccatcagattatggaatttagacagcaagacatgtgtgcaagaaataacagctcacagaaagaaattggatgaatcaatttatgatgttgctttccacccgtcaaaagcatatatagctagtgcaggagctgatgcccttgccaaagtatttgtatgaatcaacaaaaacttgcatcgtaacaagatttgcttggacagaaagagggtctgcatcactgccatcaaaaaggttactgatatgacactacatgtgatctgcctggtgaaagctatttggggcaggtacagattggtggaaatcacacctttaatgtcaangctcattaagttaactgtaaattaactgtaattttgtggggacaaaa

SEQ ID NO: 34112 - DNA, 239 bp, Macaca Mulatta
ctgatcagataaggatttcaggacagttgcatgtgcaaaactgattttgttgagggttccagaaacactgatatagagaccctcacagaagatacagtcccttatgcaccccactatacttcactctttggggtgcagttagatattatgaccttcagccaagcttcttggcaataaatgcattgacacactgacatatttagtaatttggggtaagtgtttttagaagttttcgtcct

SEQ ID NO: 34113 - DNA, 238 bp, Macaca Mulatta
tgtgaatgaatttttagcttaataatgtgtaccgatgttagaatcaattgaaatagaacagttgtattctgcacaaaactgctgataatcttgaaattaagtgttgatttctgtatgatatataaattataacacaaatgtcatgtatgtatcacgtaattttgtaagcctcaatgttcttctgaccctacgagtgagctgttagtttcctactaaagaaattctgtaccattagaga

SEQ ID NO: 34114 - DNA, 447 bp, Macaca Mulatta
  misc_feature (1)...(447): n = A,T,C or G
gttatctacatctgcagctcccctgacgccttcagaaccctgatgctcctggccctggaagctggcttgtgtggggaggactacgttttcttccacctggatatctttgggcaaagcctgcaaggtggacagggccctgctccccgcaggccctgggagagaggggatggacaggatgtcagtgcccgccaggcctttcannnnnnnnnnnnnnnnnnnnnnnnnnnnnnnnnnnnnnnnnnnnnnnnnnnnnnnnnnnnnnnnnnnnnnnnnnnnnnnnnnnnnnnnnnnnnnnnnnnnnnnnnnnnnnnnnnggtgagcaccataccagcatctttccacgatgggctcctgctctatatccagggcagtgccggagactctggcacatggcggaactgttactgatgggggagaacatcactcagcggatgtggaaccgaagct

SEQ ID NO: 34115 - DNA, 786 bp, Macaca Mulatta
  misc_feature (1)...(786): n = A,T,C or G
gggaaaatacacacttctgagaaggtgaaacaacaggggaaagcagggctcactgcatccggacaccactgctctgcttccctccacgctgaaaaccacacttctcgaaccttcactcaacacttctttccccaaagccagaaaatgcacaaggaggagcacgaagtgtctgtgctgggggcaccccatagcaccatcctcccaaggtccaccatgatcaacatccaaagcgagacctccgtgcccgaccatatcgtctggtccctgttcaacaccatcttcttgaactggtgctgcctgggcttcatagcattcgcctactccgtgaagtctagggacaggaagatggttggcgacgtgaccggggcccaggcctatgcctccactgccaagtgcctgaacatctcggccctgattgtgggcatcctcatgaccatcggattcatcctgttactggtgtatggctctgtggcaatctaccatgttatgttacagatcgtacaggaaaaacagcgttactagtagctgcccatagccggcgacccttgtactccactttgcaatgctggccctcacgctggggctgttgtccctgtccccttggtcctgcccctagatacagcattttatccccacacacctgtccacaatgacattcaataaagtgcacatgctttgcnnnnanannnnnnnnnnnnnnnnnnnnnnnnnnnnnnnnngccgcggcccctcaaaatcctttctaaaccanntaaacccattccgttttgtggccccccgggggcc

SEQ ID NO: 34116 - DNA, 1654 bp, Macaca Mulatta
  misc_feature (1)...(1654): n = A,T,C or G
tagagggccccgctgggggtcggcctccggtccgggctcccggtcgcgccgtcctcgccgccccatggagtcccagtgtgactattcgatgtacttcccggccgtgccgctgccgccgcgcgcggagctggcaggggacccgggccggtaccgggcgctgccccggcgcaaccatctgtacttgggggagactgtccggtttctgctggtgttgcgctgccggggcggtgcggggtccggcgccgggggcagcccgggcttgggctccagaggagcctgggcataactggcaaccgccctggccgccctggcctcggtcagcgccggaggcgggatgccgggtggcggcggtgccggcgaccaggattcggannnnnnnnnnnnnnnnnnnnnnnnnnnnnnnnnnnnnnnnnnnnnnnnnnnnnnnnnnnnnnnnnnnnnnnnnnnnnnnnnnnnnnnnnnnnnnnnnnnnnnnnnnnnnnnnnnnnnnnnnnnnnnnnnnnnnnnnnnnnnnnnnnnnnnnnnnnnnnnnnnnnnnnnnnnnnnnnnnnnnnnnnnnnnnnnnnnnnnnnnnnnnnnnnnnnnnnnnnnnnnnnnnnnnnnnnnnnnnnnnnnnnnnnnnnnnnnnnnnnnnnnnnnnnnnnnnnnnnnnnnnnnnnnnnnnnnnnnnnnnnnnnnnnnnnnnnnnnnnnnnnnnnnnnnnnnnnnnnnnnnnnnnnnnnnnnnnnnnnnnnnnnnnnnnnnnnnnnnnnnnnnnnnnnnnnnnnnnnnnnnnnnnnnnnnnnnnnnnnnnnnnnnnnnnnnnnnnnnnnnnnnnnnnnnnnnnnnnnnnnnnnnnnnnnnnnnnnnnnnnnnnnnnnnnnnnnnnnnnnnnnnnnnnnnnnnnnnnnnnnnnnnnnnnnnnnnnnnnnnnnnnnnnnnnnnnnnnnnnnnnnnnnnnnnnnnnnnnnnnnnnnnnnnnnnnnnnnnnnnnnnnnnnnnnnnnnnnnnnnnnnnnnnnnnnnnnnnnnnnnnnnnnnnnnnnnnnnnnnnnnnnnnnnnnnnnnnnnnnnnnnnnnnnnnnnnnnnnnnnnnnnnnnnnnnnnnnnnnnnnnnnnnnnnnnnnnnnnnnnnnnnnnnnnnnnnnnnnnnnnnnnnnngcctgcccagtgtccgcctggaccgcccgtgtttcgtgatgaccgcttcttgtgagtcccctgttcggacctacgagcgattcactgtcacctacactttgctcaacaatctccaagacttccttgctgtgaggctcgtgtggaccccagagcatgcacaggctgnnnnnnnnnnnnnnnnnnnnnnnnnnnnnnnnnnnnnnnnnnnnnnnnnnnnnnnnnnnnnnnnnnnnnnnnnnnnnnnnnnnnnnnnnnnnnnnnnnnnnnnnnnnnnnnnnnnnnnnnnnnnnnnnnnnnnnnnnnnnnnnnnnnnnnnnagctaagccagcacatgaaactgaagctgcagttcaccgccagcgtgtcccaccctccacccgaggcccggcctctctcccgcaagagcagccccagcagccaagctgtccgggacttggtggagaggcatcaggctagcatgggccgctcccagtcgttttcccaccatgcagccttccaggagccacgtcatgagg

SEQ ID NO: 34117 - DNA, 843 bp, Macaca Mulatta
  misc_feature (1)...(843): n = A,T,C or G
tgnnnnnnnggggagtcgttccgcccgctggtcatcgcgccatctgccctgccggtgtcctgctcgccgtccccgccatgctgtctttagactttctggacgatgtgcggcggatgaacaagcggcagctctattatcaagtcctaaatttcggaatgattgtctcatcagcactaatgatctggaaggggttaatggtaataactggaagtgaaagtccaattgtagtggtgctcagtggcagcatggaacctgcatttcatagaggagatcttctatttctaacaaatcgagttgaagatcccatacgagtgggagaaattgttgtttttaggatagaaggaagagagattcctatagttcaccgagtcttgaagattcatgaaaagcaaaatgggcatatcaagtttttgaccaaaggagataataatgcggttgatgaccgaggcctctataaacaaggacaacattggctagagaaaaaagatgttgtggggagagccaggggatttgttccttatattggaattgtgacaatcctcatgaatgactatcctaaatttaaatatgcagtgctctttttgctgggtttattcgtgctggttcatcgtgagtaagaaaaccgccttgctgtttcctggggaagatgccctactttttcgttcctggatgtttgggaaaaaatacctggtctgtgaattgggggaaagggaaaaaacaccgtgttgggtggcttcttcgggtgacacttgggtttgggcattaaatgttaatgttctcccacccgccaaaatcctttgtgtgttggagcgggcggcgccatgtgttatacaacacacaggg

SEQ ID NO: 34118 - DNA, 777 bp, Macaca Mulatta
ggggcttttgggacgatggggcccaaatcatgctgcagatcccattataaccagaagcccctccaagtaggtattgatatatctgttttgagagtttgaaaatagactcactggggttaagtgacttgcctaaatgttacagatctgacatctgaatcagggatggaaaaaggatagcagtggaaataaaatcatgcatcctgtttctgggaaacacatcttacagtttgttgcaataaaaaggaaagactgtggagaatgggcaatcccaggggggatggtggatccaggagaaaagattagtgccacactgaaaagagaatttggtgaggaagctctcaactccttacagaaaaccagcgctgaaaagagagaaatagaggaaaagttgcacaaactcttcagccaagaccacctactgatatataagggatatgttgatgatcctcgaaacaccgataatgcatggatggagacagaagctgtgaactaccatgacgaaacaggtgagataatggataatcttacgctagaagctggagatgatgctggaaaagtgaaatgggtggacatcagtgataaactgaagctttatgccagtcattttcagttcatcaaacttgtggctgagaaacgagacgcacactgggagcgaagaactcttgaagcttgactgcccatggggtttgtaagctgaatggttcctccgttgttaagccaaaagggcccaaacagagggaattgttataacctggaaaaagaaaaggccatttatct

SEQ ID NO: 34119 - DNA, 529 bp, Macaca Mulatta
ggtgacttagatggattgattttaaaacatcatttagatttgcttattccaaaaggagattatggaaaagcagaatcagatgactttaatgtgtttgataatttttttctccattccaagcctgaggatactgatacctggttaaagtactatgactgtgataaatataaagagagctataaaaagtcacagattatcatatatcatagaaatcgtttaggggagaaactctatgaatgcagtgaatgtaggaagcgcttcagtaagaaaccaagtctcattaaacatcaaagcagacatataagagacatagcctttggctgtggtaattgtggcaaaacctttccccagaagtctcagtttattacacatcacagaactcatacaggagaaaaaccttataattgtagccagtgtggtaaagccttctcccaaaagtcacagctcacatcccatcagcggacacatacaggagagaaaccctatgagtgtggcgaatgtgggaaagccttctcccggaagtcacatc

SEQ ID NO: 34120 - DNA, 678 bp, Macaca Mulatta
  misc_feature (1)...(678): n = A,T,C or G
ggtacctggtcaccgagggccagatcttcatcctcttcatcttcaccttctttgccatgctggccctcgtcctgcaccagaagcgcaagcgcctcttcctggacagcaacggccttttcctcttctcatccttcacactgaccctcttgctggtggcgctctgggtcgcctggctgtggaatgaccctgttctcaggaagaagtacccgggtgtcatctacgtccctgagccctgggctttctacacccttcacgtcagcagtcggcactgagtccctggcaccaggctgtggtgctctgctgggtgggaggtgggccatagagggcgtctgaatacnnnnnnnnnnnnnnnnnnnnnnnnnnnnnnnnnnnnnnnnnnnnnnnnnnnnnnnnnnnnnnnnnnnnnnnnnnnnnnnnnnnnnnnnnnnnnnnnnnnnnnnnnnnnnnngagtgcatcattttcagactctactatttccgtcaagtttctgtttgatttggatcatctcaggatcggattctgttttagagtgtttttgggccaggatccgggcccctgccctcctctgcacctgaccacactnnnnnnnnnnnnnnnnnnnnnnnnnnnnnnnntcttctggtagccgtgcaggagagggctgggtggggcagaggccaggaggggacctggtgtgt

SEQ ID NO: 34121 - DNA, 122 bp, Macaca Mulatta
cccactgactgaggaaaacaagcatgtggcccagttgttgctcagtactggtacttgtccaccttgtatcttcagattctgtggtgtggattttcatgcaccttacaaacttccatacaagg

SEQ ID NO: 34122 - DNA, 373 bp, Macaca Mulatta
  misc_feature (1)...(373): n = A,T,C or G
ccagaaggaattgccctctgcgcggatccactgtcccaaaggctccaaggcctatggctcccactgctatgccttgtttttgtcaccaaaatcctggatggatgcagatnnnnnngccagaaacggccctctggaaacctggtgtctgtgctcagtggggctgagggatccttcgtgtcctccctggtgaggagcattagtaacagctactcatacgtctggattgggctccatgaccccacacaggnnnnngagcctgatggagatggatgggagtggagtagcactgatgtgatgaattactttgcatgggagaaaaatccctccaccatcttaaaccctggccactgtgggagcctgtcaagaagcacag

SEQ ID NO: 34123 - DNA, 432 bp, Macaca Mulatta
  misc_feature (1)...(432): n = A,T,C or G
gtttggtgaggattcatcaatctccagtatgatgtctgtgaactttgatgttcaatcaaatcagagtgatatcagtgattcggtcaagtcttctcccgtagcccattctattctctggatttggggcagggactctgatgcatatagggnnnnnnnnnnnnnnnnnnnnnnnnnnnnnnnnnnnnnnnnnnnnnnnnnnnnnnnnnnnnnnnnnnnnnnnnnnnnnnnnnnnnnnnnnnnnnnnnnnnnnnnnnnnnnnnnnnnnnngatccacgaactcagcagtgatgattattctacagaagaagaggcccaaacccctgactgttccataactgacttcagaaaaagccacactctgtcctacttagtcaaagaattagaggttcgcatggatctgaaagccaaaatgccagatgaccatgcacgaaa

SEQ ID NO: 34124 - DNA, 285 bp, Macaca Mulatta
  misc_feature (1)...(285): n = A,T,C or G
ttataaacggcatcatgtcactgcaaagctgttgcagataacctttgtattttaatttgctttggtgatgattactgtattagcatcatgccttccaaattgtgggtggctcgatgggcacatcaataaaagccgtccttgnnnnnnnnnnnnnnnnnnnnnnnnnnnnnnnnnnnnnnnnnnnnnnnnnnnnnnnnnnnnnnnnnnnnnnnnnnnnnnnnnnnnnnnnnnnnnnnnnnnnnnnnnntcccaatttggcccttatagtgagttcgttttacaatt

SEQ ID NO: 34125 - DNA, 1931 bp, Macaca Mulatta
  misc_feature (1)...(1931): n = A,T,C or G
naatacggaggtacaggagcttcatttttatccactgtgatcgtgatagaggaattagccaaagttgatgcatctgtggctgtcttttgtgaggtccagaacacactcattaacacaatgattagaaaacatggaacagaagaacaaaaggccacctatttgcctcagctcactacagaaaaagnnnnnnnnnnnnnnnnnnnnnnnnnnnnnnnnnnnnnnnnnnnnnnnnnnnnnnnnnnnnnnnnnnnnnnnnnnnnnnnnnnnnnnnnnnnnnnnnnnnnnnnnnnnnnnnnnnnnnnnnnnnnnnnnnnnnnnnnnnnnnnnnnnnnnnnnnnnnnnnnnnnnnnnnnnnnnnnnnnnnnnnnnnnnnnnnnnnnnnnnnnnnnnnnnnnnnnnnnnnnnnnnnnnnnnnnnnnnnnnnnnnnnnnnnnnnnnnnnnnnnnnnnnnnnnnnnnnnnnnnnnnnnnnnnnnnnggttccagaagccaagatcttgggacaagttgggcatggctataagtatgccatagggagtcttaatgaaggtagaataggaattgctgcnnnnnnnnnnnnnnnnnnnnnnnnnnnnnnnnnnnnnnnnnnnnnnnnnnnnnnnnnnnnnnnnnnnnnnnnnnnnnnnnnnnnnnnnnnnnnnnnnnnnnnnnnnnnnnnnnnnnnnnnnnnnnnnnnnnnnnnnnnnnnnnnnnnnnnnnnnnnnnnnnnnnnnnnnnnnnnnnnnnnnnnnnnnnnnnnnnnnnnnnnnnnnnnnnnnnnnnnnnnnnnnnnnnnnnnnnnnnnnnnnnnnnnnnnnnnnnnnnnnnnnnnnnnnnnnnnnnnnnnnnnnnnnnnnnnnnnnnnnnnnnnnnnnnnnnnnnnnnnnnnnnnnnnnnnnnnnnnnnnnnnnnnnnnnnnnnnnnnnnnnnnnnnnnnnnnnnnnnnnnnnnnnnnnnnnnnnnnnnnnnnnnnnnnnnnnnnnnnnnnnnnnnnnnnnnnnnnnnnnnnnnnnnnnnnnnnnnnnnnnnnnnnnnnnnnnnnnnnnnnnnnnnnnnnnnnnnnnnnnnnnnnnnnnnnnnnnnnnnnnnnnnnnnnnnnnnnnnnnnnnnnnnnnnnnnnnnnnnnnnnnnnnnnnnnnnnnnnnnnnnnnnnnnnnnnnnnnnnnnnnnnnnnnnnnnnnnnnnnnnnnnnnnnnnnnnnnnnnnnnnnnnnnnnnnnnnnnnnnnnnnnnnnnnnnnnnnnnnnnnnnnnnnnnnnnnnnnnnnnnnnnnnnnnnnnnnnnnnnnnnnnnnnnnnnnnnnnnnnnnnnnnnnnnnnnnnnnnnnnnnnnnnnnnnnnnnnnnnnnnnnnnnnnnnnnnnnnnnnnnnnnnnnnnnnnnnnnnnnnnnnnnnnnnnnnnnnnnnnnnnnnnnnnnnnnnnnnnnnnnnnnnnnnnnnnnnnnnnnnnnnnnnnnnnnnnnnnnnnnnnnnnnnnnnnnnnnnnnnnnnnnnnnnnnnnnnnnnnnnnnnnnnnnnnnnnnnnnnnnnnnnnnnnnnnnnnnnnnnnnnnnnnnnnnnnnnnnnnnnnnnnnnnnnnnnnnnnnnnnnnnnnnnnnnnnnnnnnnnnnnnnnnnnnnnnnnnnnnnnnnnnnnnnnnnnnnnnnnttaatcttgtggcatcagaggaatatttgttatgtagtaggcaatttttatccagtactttatagattcaactctaagttgcaagtgaggtcaaaactcatgaaaatttatttagaaaaatctaaaaattctggttttaaatatgagaatcagtggaaaataagggtataattttgtaggtcatataattgaagaaaatattattttaacaatgtgtaagcatatgatttgttactataattaacctgtataaaagatacatttcatggtggtttcagtaggtcatt

SEQ ID NO: 34126 - DNA, 996 bp, Macaca Mulatta
  misc_feature (1)...(996): n = A,T,C or G
tgagcggggagaatgtcaccaaggtcagcaccttcatcctggtgggcttccccacggccccggggctgcggtacctgctcttnnnnnnnnnnnnnnnnnnnnnnnnnnnnnnnnnnnnnnnnnnnnnnnnnnnnnnnnnnnnnnnnnnnnnnnnnnnnnnnnnnnnnnnnnnnnnnnnnnnnnnnnnnnnnnnnnnnnnnnnnnnnnnnnnnnnnnnnnnnnnnnnnnnnnnnnnnnnnnnnnnnnnnnnnnnnnnnnnnnnnnnnnnnnnnnnnnnnnnnnnnnnnnnnnnnnnnnnnnnnnnnnnnnnnnnnnnnnnnnnnnnnnnnnnnnnnnnnnnnnnnnnnnnnnnnnnnnnnnnnnnnnnnnnnnnnnnnnnnnnnnnnnnnnnnnnnnnnnnnnnnnnnnnnnnnnnnnnnnnnnnnnnnnnnnnnnnnnnnnnnnnnnnnnnnnnnnnnnnnnnnnnnnnnnnnnnnnnnnnnnnnnnnnnnnnnnnnnnnnnnnnnnnnnnnnnnnnnnnnnnnnnnnnnnnnnnnnnnnnnnnnnnnnnnnnnnnnnnnnnnnnnnnnnnnnnnnnnnnnnnnnnnnnnnnnnnnnnnnnnnnnnnnnnnnnnnnnnnnnnnnnnnnnnnnnnnnnnnnnnnnnnnnnnnnnnnnnnnnnnnnnnnnnnnnnnnnnnnnnnnnnnnnnnnnnnnnnnnnnnnnnnnnnnnnnnnnnnnnnnnnnnnnnnnnnnnnnnnnnnnnnnnnnnnnnnnnnnnccttgcttttcatgtatgtccggccccaggccattgattcccggagctccaacaagctcatctctgttttgtacacagttctcacccccgtcttgaaccccttgatatactgcctgaggaataaggaatttaagaatgccttgaaaaaagcctccggcttggcttgagctgtgccatagagggcaagctttctacctttctggaactccatctcggaatacacaaccagcccctctg

SEQ ID NO: 34127 - DNA, 1088 bp, Macaca Mulatta
gggagccaatagggaggctgatgtgacggccggtttgcagccgccggcagctactgcaaggcaaaagccggagtggacctctcttttgaaactgctgctgtctcacttctcagacgtcaccgagagctcagcacccaggctgaactctgcaccattcggaagaatggaagctgatgcatctgttgacatgttttccaaagtcctggagaatcagctgcttcagacaaccaaactagtggaagaacatttggattctgaaattcaaaaactggatcagatggatgaggatgaattggaacgcctgaaagaaaagagacttgaggccctaaggaaagctcaacagcagaaacaagaatggctttctaaaggacacggggaatacagagaaatccctagtgaaagagatttttttcaagaagtcaaggagagtaaaaaagtggtttgccatttctacagagactccgcattcagatgtaaaatactagacagacacctggctatattgtccaagaaacacctcgagaccaaatttttgaagctgaatgtggaaaaagcacctttcctttgtgagagactgcgtatcaaagtcattcccacactagcactggtaaaagacgggaaaacacaggattatgttgttgggtttactgacctaggaaatacagatgacttcaccacagaaagtttagaatggaagctcggtttgttcggacattcttaattacagtgggaaatttaatggagccaccatttcagaaccaaaagaaatttggaacaaacttcacaaagctggaaaagaaaactatccgaggaaagaaatatgattcagactctgatgatgattagagctccgtaattctttgtaaattgtccttttttctgcttcagatttaaatgtgtttttaaaatcctattaatgtctgtacattggtcatctaaatactcatattctcaagtttgatacagttgtatcacatcgaaaggcgtctttattattttctgtgtggccatcatgtttacgttgaggaaaacttctcagttcttaaattatctgggaagggtctggattctctatttttgagattgac

SEQ ID NO: 34128 - DNA, 541 bp, Macaca Mulatta
  misc_feature (1)...(541): n = A,T,C or G
gactgaagcgggtcacaggcgggtttaactccaagaacatatgtgatgccaggacctattgctacctgctgcccacgtttgcctttgcgcacaaggaccgggacgtgcatgatgagacctaccgcctgagcgtctgagacgctgcagcaggtcaacaggctcctggcctgctactggggcacgcacaacttccacaatttctcctcgcaaaatgggccacaggagcccagcgcccgccgctacatcctggagatgtactgcgaggaaccctttgtgcggcagggcctggagttcgcagcgatcatggtgaagggccagagcttcatgatgcgtcatatccggaagatgggtggcctggtgatggccattgtgaagggctatgcccctgagagtgtgctggaacgcctgtgaggcacagagaatgtggacgtgcccaaggcgccgggacttggtctggtcctgtagagggtgcacttcgagaaggacaaccagcgctttgggaacgatgggctgcctgatccgctggactggnagcaggagc

SEQ ID NO: 34129 - DNA, 386 bp, Macaca Mulatta
  misc_feature (1)...(386): n = A,T,C or G
gaggaaatcaatgagatccaggtggtgagtgaggaggagcctcagagggacaggctggggctgccacaggagccaggccgggagcaggtggtggaagacaggcctgtagacggaagaggcttcgggggagccagagaactgggccggaccccacaggtgccagctgccctgtcagtgagccaggaaaatccggagatggagggccccgagcgagaccagcttgtcatccccgatggacaggaggaggagcaggaagctgccagggaaggnagggagaaaccagcagaaactgagaggagaagatgactacaacatggatgaaaatgaggcggaatctgagacagacaagcaggcagccctggcagggaatgacagaaacatagatg

SEQ ID NO: 34130 - DNA, 207 bp, Macaca Mulatta
gtcaggaggtcagtatacctcatgtgctaccctagagtcggtgcctggagggggtgcttggcttgtctggacccaggactgctactcagtctgcagacatgagctgccctacaggcaatgtggaaatggagcatgtggaacggatgcatccatgtgggcaaatttgtggtttgggaacataaaaatactcctctcaggccaggtgcc

SEQ ID NO: 34131 - DNA, 533 bp, Macaca Mulatta
gcttccaggagcttactggaaaacacctccattcagagggtgattcacctccagagagggggagaaaggtggccaacctgagttaacaccttacttccggcttcccctccttcctcagcagggtctttgggacccctttcctcccttcagaaggggcatcccaacccataagcaacagagcccacaagagtcgtacccttttccaggctgctgtttccatctcccacccagagaggatcagcattttgcttctgcggctgaaggggccagggttgtctggggtgggaaagactgtgcataccccttctctgtttataggggctccagcaggggctcaggcccttatgagtactgatactcaaaacatctagtcccctattattagccagtagtcctggtccccatcctaccctggtggcagggcctggatggggtggatgttttttctgatatgccactgggccaactgatgatccatgggaaacctggctaataacttggcaatcctcacatactcgtggcctgtaaaagga

SEQ ID NO: 34132 - DNA, 276 bp, Macaca Mulatta
  misc_feature (1)...(276): n = A,T,C or G
ggccttcgatgatattgccaagtacttctctaagaaagagtgggaaaagatgaaatactcggagaaaatcagctatgtgtacatgaagagaaactatgaggccatgactaaactaggtnctaggtttcaatgtcactctcccacctttcatgcataataaacaggccacagacttccaggggaatgattctgataatgaccgtaaccacaggaatcaggngttgaacgtcctcagatgacttttggcaagctccagagaatcatcccgaagntcag

SEQ ID NO: 34133 - DNA, 278 bp, Macaca Mulatta
  misc_feature (1)...(278): n = A,T,C or G
gctgagaccagtctttcctgaccaaatgacanttcttgaaggttcttctctggttggtcctgctgggattgtttgtggaactggaatttggcctggcatattttgtcctgtccttgttctattggatgtacgtcgggacacgaggccctgaagagaagaaggagggagagaagagcgcctactctgtgttcaatccgggctgcgaagccatccagggcaccctgactgcagagcagttggagcgcgagttacagttgagacccctggcagggagatag

SEQ ID NO: 34134 - DNA, 2448 bp, Macaca Mulatta
  misc_feature (1)...(2448): n = A,T,C or G
cagtccacctgcgcaccaggggcagggcacgtggctgggtgaagacgctggcctggatacggaggactcgcgggctggcagagcgcgcggcggcggcgnngcggcggcggcgggaggagacgcaggtcacgcccccttccnnnnnnnnnnnnnnnnnnnnnnnnnnnnnnnnnnnnnnnnnnnnnnnnnnnnnnnnnnnnnnnnnnnnnnnnnnnnnnnnnnnnnnnnnnnnnnnnnnnnnnnnnnnntgccgccccctgcgtcccctcctgggcttccgagagtctgactcattcaagccggcatcgcttcgcctcctacaacacaccccgagcgcgaggaaaaattacaggattgcaggggcacggctaatgcgctctaattacccaccaccgctgtcatccgcggcgctccgcggcgctgggccaacgcgccgtaattaggccgccgctccccggtcccagaaccctcccttcgccacccccgacccacctcgtggtccccaggaccactggctgccgcctcctgccgccctccgggactgcccctcagtcccaagagagctgtgaggcctcactgggggttagaacttggggagaccgaagccggcccctccgctaaacctacagtcctagaagatctctgctggaagagactgggagagtggggaggggccaaggacctatttcgttgacagaaacactgaggtctactggaaaattagtcttcagtgggaggagtggcaaaggcacgcagggcagcagtacccacgtttgggcacggagaagggaagggaagcccgcccagccagaactcccagacccgctcgtttaacagtggctttatgagcagcacaacgggctccctcccctgtcagggaaannnnnnnnnnnnnnnnnnnnnnnnnnnnnnnnnnnnnnnnnnnnnnnnnnnnnnnnnnnnnnnnnnnnnnnnnnnnnnnnnnnnnnnnnnnnnnnnnnnnnnnnnnnnnnnnnnnnnnnnnnnnnnnnnnnnnnnnnnnnnnnnnnnnnnnnnnnnnnnnnnnnnnnnnnnnnnnnnnnnnnnnnnnnnnnnnnnnnnnnnnnnnnnnnnnnnnnnnnnnnnnnnnnnnnnnnnnnnnnnnnnnnnnnnnnnnnnnnnnnnnnnnnnnnnnnnnnnnnnnnnnnnnnnnnnnnnnnnnnnnnnnnnnnnnnnnnnnnnnnnnnnnnnnnnnnnnnnnnnnnnnnnnnnnnnnnnnnnnnnnnnnnnnnnnnnnnnnnnnnnnnnnnnnnnnnnnnnnnnnnnnnnnnnnnnnnnnnnnnnnnnnnnnnnnnnnnnnnnnnnnnnnnnnnnnnnnnnnnnnnnnnnnnnnnnnnnnnnnnnnnnnnnnnnnnnnnnnnnnnnnnnnnnnnnnnnnnnnnnnnnnnnnnnnnnnnnnnnnnnnnnnnnnnnnnnnnnnnnnnnnnnnnnnnnnnnnnnnnnnnnnnnnnnnnnnnnnnnnnnnnnnnnnnnnnnnnnnnnnnnnnnnnnnnnnnnnnnnnnnnnnnnnnnnnnnnnnnnnnnnnnnnnnnnnnnnnnnnnnnnnnnnnnnnnnnnnnnnnnnnnnnnnnnnnnnnnnnnnnnnnnnnnnnnnnnnnnnnnnnnnnnnnnnnnnnnnnnnnnnnnnnnnnnnnnnnnnnnnnnnnnnnnnnnnnnnnnnnnnnnnnnnnnnnnnnnnnnnnnnnnnnnnnnnnnnnnnnnnnnnnnnnnnnnnnnnnnnnnnnnnnnnnnnnnnnnnnnnnnnnnnnnnnnnnnnnnnnnnnnnnnnnnnnnnnnnnnnnnnnnnnnnnnnnnnnnnnnnnnnnnnnnnnnnnnnnnnnnnnnnnnnnnnnnnnnnnnnnnnnnnnnnnnaggctgtgtctccctcagtctggggctccctgaagacagggctgtgtctccctcagactggggctccctgagtcatggctgtgtctccctcagactggggctccctgagtcatggctgtgtctccctcagactggggctccctgaggatgggtctgtgtctccctcagactggggatccctgaggacggggctgtgtctcctcgcagtctggggctccctgaggacagggttgcattcccccctcagactagggctccctgagtcagggttgtatctcccctcagactggggctccctgagggcagggctgtctccccgcttcagactggggcctcctccaaaggacagggactgtgtctcccctgggaataggttctttgtgtcttctgcatctactgagattctcatgaggacacagctgtgtctccccctccatctggagctccctgaaggcaatggcctctcccctcaaatgggatatttgcaccccaccccaccctccggctccccatggcgcccaggcattcctcccaggacaccatttgtcacgctttgatgaatgaaacgtaataagaata

SEQ ID NO: 34135 - DNA, 406 bp, Macaca Mulatta
  misc_feature (1)...(406): n = A,T,C or G
taccagtccaccagcgggacagtctccatcacctacggcaccggcagcatgacaggcatcctcggatacgacactgtccaggnnnnnccaggttggaggtatctcggacaccaatcagatcttcggcttgagcgagaccgaacccggctccttcctgtattatgctcccttcgacggcatcctggggctggcctaccccagcatttcctcgtccggggccacacccgtctttgacaacatctgggaccagggcctggtttctcaggacctcttctctgtctacctgagcgcgatgaccagagtggcagcgtggtgatatttggtggcattgactcttcttactacactggaagtctgaactgggttcctgtttctgtcgagggttactggcagatctccgtggaca

SEQ ID NO: 34136 - DNA, 806 bp, Macaca Mulatta
  misc_feature (1)...(806): n = A,T,C or G
gggcctttcggccggaaccgccatcttccagtaatttgccaaaatgacgaacacaaagggaaagaggagaggcacccgatatatgttctctaggccttttagaaaacatggagttgttcctttggccacgtatatgcgaatctataagaaaggtgatatcgtagacatcaagggaatgggtaccgttcaaaaaggaatgccccacaagtgttaccatggcaaaactgggagagtctacaacgttacccagcatgctgttggcattgttgtaaacaaacaagttaagggcaagattcttgccaagagaattaatgtacgtattgagcacattaagcattctaagagcagagatagcttcctgaaacgcgtgaaggaaaatgatcagaaaaagaaagaagccaaagagaaaggtacctgggttcaactgaagcgccagcctgctccacccagagaagcacactttgtgagaaccaatgggaaggagcctgagctgctggaacctattccctatgaattcatggcataataggtgtttannnnnnnnnnnnncagacctctgggctgaaaaataaacaaaacaatacaatgaaaaaaaaacatgtttggctcgccctcgggccctcggagaagcttttctagaaccatttcgtttgggcgccgccgggcccctgttagggtaaagtgaaacaatggtccaatagctggttttcctaaggaaaaatcttggtcccatgaacaaaagcgcttggaaattttcccgcccactaaaaaaaattccctgagagaggaaaccggaaccttttttg

SEQ ID NO: 34137 - DNA, 313 bp, Macaca Mulatta
ccagaggctgggcggtgggggccaggataatctgttggcagcctccaggccctgagtagctcccagagaggggacttcctggagtctgattctgtgggtgtcagtgtcccctgggatgacggcttgaggggtgcagtggctggtgcccccatgactgccctggaaactgagtcccaggacagtgctgagccttctggttcagaagaagagtcagaccctgtttccttggagagggaagacaaagtccttggggctctggaggtccccggtgggatggaggactcaggcccaggggcagacatcattggtgtta

SEQ ID NO: 34138 - DNA, 263 bp, Macaca Mulatta
ttttgctggcccccctaattatccattttctgatgaatattaacatggagggcattgcatgaggtctaccagaaggccctacgtgtggatggtgacacagaagatttctctgtggtggtgactggacacgtcatctctggttaaatctctcctgcttgaccacttcaccaagctacagctaagcccattggccagaaaagacagacaataacttttttatcattttgaaaaaattaaatgctctctcctaaagatttttcacc

SEQ ID NO: 34139 - DNA, 1328 bp, Macaca Mulatta
  misc_feature (1)...(1328): n = A,T,C or G
ctgcacgaggcctagcgtctgaagcagcatggccaagccgtgtggggtgtgcctgagcggggaagcccgcaaacaggtggaggtcttcaggcagaatcttttccaggaggctgaggaattcctctacagattcttgccacagaaaatcatatacctgaatcagctcttgcaagaggactccctcaatgtggctgacctgacttccctccgggccccactggacatccccatcccagaccctccacccaaggatgatgagatggaaacagataagcaggagaagaaagaagtccctaagtgtggatttctccctgggaatgagaaagtcctgtccctgcttgccctggttaagccagaagtctggactctcaaagagaaatgcattctggtgattacatggatccagcacctgatccccaagattgaagatggaaatgattttggggtagcaatccaggagaaggtgctggagagggtgaatgccgtcaagaccaaagtggaagctttccagacaaccatttccaagtacttctcagaacgtggggatgctgtggccaaggcctccaaggagactcatgtaatggattaccgggccttggtgcatgagcgagatgaggcagcctatggggagctcagggccatggtgctggacctgagggccttctatgccgagctttatcatatcatcagcagcaacctggagaaaattgtcaacccganaggtgaagagaagccatctatgtactgaacncaggactagaacgaaactaaatgatctatatgttgtatggcacaaacaaacaaaaaactcgcggggggcccgacccaatccccaagattatcgtaaatagacaggccgcgcccaaggcggtacggtaaccccgttcatatacgaccaggagaaaagaacaatcacacgagcgaggagcacgaggtgcaagaagagtagatgttcaacatacaaggacgcagacatgacaagacaaaccgcgcagcattttttcggccgctgcgacaataggagcacaccagagcaacccacgggaagaaagagcacagagaaagagaaagacacactagggaagaaagcggcgaggacgacgcgaggagagagaaggacgaaagcgcacaggaaaaggatcaagaagaaacgacagctaggagcagcggcccaagaccaaccgcagacagcacgaggaccaccaacgacaaaaacggcacaagagacgagcgagcgaaccaagagagcggcaagaagaacacaagacaaaaacaagacaagcaacaaaaaaacaggatnnnnnnnnnnnnnnnnnnnnnnnngaaaa

SEQ ID NO: 34140 - DNA, 621 bp, Macaca Mulatta
  misc_feature (1)...(621): n = A,T,C or G
ggggggttaacaccgcaggcaccacacctgttggtgttcagatggagcagtacactagtcatcctaacagaaaagttccagccaaagaggaagctaatgctgtgcctctttgtagagcaaaaccctcccccagctatattaatcttcaagcaagttccccaccagccacttttctgaacatccagacaacaaagcggccctcagttgatcacaagcccaaggaatgcctaggactcctggaatgtatgtatgccaacctccagcttcagacccagctcgcccaacaacagatggctattttggaacatttacaggcatccgtgacacaactggctcctgggaggggaagcaataactcttctctcccagccttatctcctaatccattgttaaatcacctgccccaattcagtaaatgaattgtggaacccaaaacaaaaaccaccaatatactataagcataatttaaaaaaagctcacccgcttaaaaaaccnnnnnnnnnnnnnnnnnnnnncggccccctcgcccctcaaaaactttcaaacatttctttggcccccgggcccaataagaaagggacaatggcctaacttttcctaagaatcccgctcggaaagggn

SEQ ID NO: 34141 - DNA, 397 bp, Macaca Mulatta
  misc_feature (1)...(397): n = A,T,C or G
cctacctcagtttcagagaatgaaggcatttcaaccataccaagccccgtgacctcaccagtcttgtcccgccgacactatggagaatctataacaaatataggcaaagcaagcatactaggnnnnnnnnnnnnnnnnnnnnnnnnnnnnnnnnnnnnnnnnnnnnnnnnnnnnnnnnnnnnnnnnnnnnnnnnnnnnnnnnnnnnnnnnnnnnnnnnnnnnnnnnnnnnnnnnnnnnnnnnnnnnnnnnnnnnnnnnnnnnnnnnnnnnnnnnnnnnnnnnnnnnnnnnnnnnnnnnnnnnnnnnnnnnnnnatttcagacttcaagaatcgttctttaatctcccacaacttctttttccggaaaatgtaatgcagaataaagataatgccctcg

SEQ ID NO: 34142 - DNA, 1405 bp, Macaca Mulatta
  misc_feature (1)...(1405): n = A,T,C or G
atgcccctatccaatctctctttagacctgtccctgaaccctataaactttatccaaccaggtgcatttaaagaaattaggcttcataagctgactttgagaagtaattttgatgatttaaatgtaatgaaaacttgtattcaaggtctggctggtttagaagtccatcgtttggttctgggagaatttagaaatgaaagaaacttggaagagtttgacaaatcttctctggagggattgtgcaatttgaccattgaagaattccgattaacatacttagactactacctcgataatattattgacttatttaattgtttggcaaatgtttcttcattttccctggtgagtgtgagtattaaaagagtagaagacttttcttataatttcagatggcaacatttagaattagtnnnnnnnnnnnnnnnnnnnnnnnnnnnnnnnnnnnnnnnnnnnnnnnnnnnnnnnnnnnnnnnnnnnnnnnnnnnnnnnnnnnnnnnnnnnnnnnnnnnnnnnnnnnnnnnnnnnnnnnnnnnnnnnnnnnnnnnnnnnnnnnnnnnnnnnnnnnnnnnnnnnnnnnnnnnnnnnnnnnnnnnnnnnnnnnnnnnnnnnnnnnnnnnnnnnnnnnnnnnnnnnnnnnnnnnnnnnnnnnnnnnnnnnnnnnnnnnnnnnnnnnnnnnnnnnnnnnnnnnnnnnnnnnnnnnnnnnnnnnnnnntttcagtattcctatcactctgacacctcatttaccttgacatttctcatactcacaccagagttgctttcaatggcatcttcgatggcttgctcagtctcaaagtcttaaaaatggctggcaattctttccaggaaaacttccttccagatatcttcacagatctgaaaaacttgaccttcctggacctctctcagtgtcaattggagcagttgtctccaacagcatttgacacactcaacaagcttcaggtactaaatatgagccacaacaacttcttttcattggatacgtttccttataagtgtctgccctccctccaggttctcgattacagtctcaatcacataatgacttccaacaaccaggaactacagcattttccaagtagtctagctttcttaaatcttactcagaatgactttgcttgtacttgtgaacaccagagtttcctgcagtggatcaaggaccagaggcagctcttggtggaagctgaacgaatggaatgtgcaacaccttcagataaacagggcatgccggtgctgagtttgaatattacctgtcagatgaataagaccatcattggtgtgtctgtgttcagtgtgcttgtggtatctgttgtagcagttctggtctataagttctattttcacctgatgcttcttgctggctgcataaagtatggtaga

SEQ ID NO: 34143 - DNA, 521 bp, Macaca Mulatta
ccagaaagctggaggcgattctggtaatgtggatgatgattgtgaaagagtcaaaggacctgtaggaagcctaaagtctgtggaagctattctagaagaaagcactgaaaaactcaaaagcttgtcactgcagcaacagcaggatggagataatggggacagcagcaaaagtactgagacaagtgactttgaaaacatcgaatcacctctcaatgagagggactcttcagcatcagtagataatagagaacttgaacaacatattcagacttctgatccagaaaattttcagtccgaagaacgatcagactcagatgtgaataatgacaggagtacaagttcagtggacagtgatattcttagctccagtcatagcagtgatactttgtgcaatgcagacaatgctcagatccctttggctaatggacttgactctcacagtatcacaagtagtagaagaactaaagcaaatgaagggaaaaaagaaacatgggatacagcagaagaagactctggaactg

SEQ ID NO: 34144 - DNA, 97 bp, Macaca Mulatta
tgtcagatatcctccgggaactgctctgtgtctctgaaaaggctgctaacattgcccgggcatgcaggcagcaggaggccctcttccagctgttgat

SEQ ID NO: 34145 - DNA, 131 bp, Macaca Mulatta
ggtttcgcctgcagtgccaccgcattgtcaacgacacgatcttcaccaacctgatcctcttcttcattctgctcagcagcatttccctggctgctgaggacccggtccagcacacctccttcaggaaccat

SEQ ID NO: 34146 - DNA, 646 bp, Macaca Mulatta
gacttggcaagtatacaccctggagtgtttgtgtggcttaaggttggtttcaagaacactgttctggatctccttcgggagttccccataccaggtgtagtttacagactcgccaggtatgacacatgacagtttcagataacagttgtcatccacatcttctctcttctcaattttgatgacaggcttgggtacagggtcaagcacctgcagcttgatcttccattcttgctcatacccatcctttttcaacaccctcatgacgtaggtgctgttgtcctctttctggaccttagagatgtacagtgcaccactttgaggatcaagtctgaccctgcctttaaatttggattcaaagtacttagattttctggaatcccattctacaatcttctggtcgaaagtataaaaccaggttagttgtttgtagttctcaggcaggctctcagagatgttcagagtaacattgctgccggagaccacggtcatatgtaccaagtgaccttcagtgcacaatcacaggcagacggttggtagaaagtaccttgaatgctgatcgccaggagtgacagagacagcagtagcaattccagagccagacaccgattccaacctctggagcccatgcttccttccagacttccca

SEQ ID NO: 34147 - DNA, 1211 bp, Macaca Mulatta
ggagtaaaatgtggggcagactgtcttgcagttaattgcatattgtcagagcagcatgagaaatacaatatttggatagggatttcagcaaccaaacattctctgttctgagatctctttattcctgaataatgaatgaatagtagtttagtgctgacaccaatgagtcacttctcttggtcctagtagaggatgcagtgtcttgttaaaccagtatcacatctcgagtcttaccaagttttcattctctgtcaatatgacaagctcaaagtgacaggatatgttataggttgaggcacacatatttgcagtttactgaaaactagatttcttatgtgacttttttcccttcccagcaaagagccctatgctgtatttctaccatcactaatatttggaagtgtttcattactaacaatctcactacaacatgaaaattgttgcttcacatctgaattacaattttgtctatcagaataaacacaagtgaaattttcacctacattaacattatgtctttgcagctttaggtttgtttgatgtgttcttaagcagaattgttagccacaaacccattgttagctatctatggatatagagctatatctatagatagaggtatacacacacatactatactcacacatatggccataaaatactcatcagagggctagattattccaaatttcgttgcacaaaattattatagcctatttatgcaaagttacgaccatagtaaagatttttaaaaaggacgcctaaactagttaggagggaagcacctttaaaggatgggattttgggaaattaatctaaaaatgtggaatattttaataatcgtgggggaatattagagacctaagtgtttaaaccaatgggatcatatatttataactttctcaaaaacaacatagtacaaaattggaaaaatctggataacctgtgggggaaaaggtgtgaaagtcaccccgttatcaatttgcaccacagagatcaatcgaacacaaagtgggggtgaagtttttccattctcgcccagagagtggattagcttgttttgtgcagaatcaaactaagaacaatttatcaacaaataacttagaaaaaaacatatgaacagattacagtcatgttcccctactattctaactggggagaaacagagaaaaactatgggtggctagtattaagagagattaatgacgtcg

SEQ ID NO: 34148 - DNA, 1965 bp, Macaca Mulatta
  misc_feature (1)...(1965): n = A,T,C or G
tgacaatcggaaaaagcagagggtcccacaccgggagcggaagcggcatgacttctccttgtttaagctttcggacacagacatgcgggtgaagatctcaccacagcttctgctggccacacaccgcttcatggccacagnnnnnnnnnnnnnnnnnnnnnnnnnnnnnnnnnnnnnnnnnnnnnnnnnnnnnnnnnnnnnnnnnnnnnnnnnnnnnnnnnnnnnnnnnnnnnnnnnnnnnnnnnnnnnnnnnnnnnnnnnnnnnnnnnnnnnnnnnnnnnnnnnnnnnnnnnnnnnnnnnnnnnnnnnnnnnnnnnnnnnnnnnnnnnnnnnnnnnnnnnnnnnnnnnnnnnnnnnnnnnnnnnnnnnnnnnnnnnnnnnnnnnnnnnnnnnnnnnnnnnnnnnnnnnnnnnnnnnnnnnnnnnnnnnnnnnnnnnnnnnnnnnnnnnnnnnnnnnnnnnnnnnnnnnnnnnnnnnnnnnnnnnnnnnnnnnnnnnnnnnnnnnnnnnnnnnnnnnnnnnnnnnnnnnnnnnnnnnnnnnnnnnnnnnnnnnnnnnnnnnnnnnnnnnnnnnnnnnnnnnnnnnnnnnnnnnnnnnnnnnnnnnnnnnnnnnnnnnnnnnnnnnnnnnnnnnnnnnnnnnnnnnnnnnnnnnnnnnnnnnnnnnnnnnnnnnnnnnnnnnnnnnnnnnnnnnnnnnnnnnnnnnnnnnnnnnnnnnnnnnnnnnnnnnnnnnnnnnnnnnnnnnnnnnnnnnnnnnnnnnnnnnnnnnnnnnnnnnnnnnnnnnnnnnnnnnnnnnnnnnnnnnnnnnnnnnnnnnnnnnnnnnnnnnnnnnnnnnnnnnnnnnnnnnnnnnnnnnnnnnnnnnnnnnnnnnnnnnnnnnnnnnnnnnnnnnnnnnnnnnnnnnnnnnnnnnnnnnnnnnnnnnnnnnnnnnnnnnnnnnnnnnnnnnnnnnnnnnnnnnnnnnnnnnnnnnnnnnnnnnnnnnnnnnnnnnnnnnnnnnnnnnnnnnnnnnnnnnnnnnnnnnnnnnnnnnnnnnnnnnnnnnnnnnnnnnnnnnnnnnnnnnnnnnnnnnnnnnnnnnnnnnnnnnnnnnnnnnnnnnnnnnnnnnnnnnnnnnnnnnnnnnnnnnnnnnnnnnnnnnnnnnnnnnnnnnnnnnnnnnnnnnnnnnnnnnnnnnnnnnnnnnnnnnnnnnnnnnnnnnnnnnnnatctgcttccccccaaggcctcccacaggtgacagaacgttctgccttcccttccatctcttcctccctagctgtcagtttggcagattttccctcattacctccagtttgactcacaactttgacatggccataacagaagcaggtaccgctaatggaacatgctagaaatggtcttttccacagcatagtctgggactggagaagagatgtctgactgcaagctgataatgccactctgggacccctaatgttcttctttgttcttggggatcccctgatgccacaggagacctatcatcttggaactcgccattctttcctccagaacaaaatgttaactttctaatatgtttcatgcatagcttggctcagaaggtgccattggcagacaggcacatgggaggctgcagtaggaagtctgaagattagttcaggggatggaccaagaattccccccagagctttaaagaagtgggactcagccatgttggcatgtgattgacattacagcacagaaaactgttagtgactggtttcctgttagataagggttccagaagcctggagaaatatgtctcagctggaatggaaagaatgtgagatggaacctcaagtcactgtttttaccagggacacatctgttttggctcccaatcagcagtcttcaatagatcagtaattctgccctggaagagaaggaacaggatgcagagagaccccgttgggagccagagatggaacttcaggtcttaagt

SEQ ID NO: 34149 - DNA, 514 bp, Macaca Mulatta
atggcccgtgctgccgcccaccccgcctcggagcctctgggagcagcagtgccgccgcgtgtggcgtgggctgagccttggtgtgtggctgttctggtggctgcacacctggcatcgtcctgggcccttgggaggagcacggccgcccctggttttgctgcagtcccagctggacagttttcccaggcaggattttaatctggacttcagaagcatttgtatttgtgatgacttctggccagaccacgtgtcctggctggatgtaattgttttcccagctcctgttcgtggagggtgtctgttttgctcctgcagtccccgaggccttagatgtgcagccagggaaggagcgtcctgctggccccgcggggcccccaggactccggggtaaagcgtgggcaaaaggctcagactcaggtgtgctcgtctctctcctgtcaagagtgggtgtccccaggccacggtgcaggcttgaaagcttccactggccccgtccagtcatccctggaggggc

SEQ ID NO: 34150 - DNA, 163 bp, Macaca Mulatta
caatctttctagacaggtgcttcaggacagaggacaggcatggctcccccttgggcctcctcagtaggcggtaagtctgagcttggtgaggataacttggagtataaggtccagagaccctcacacacacctggcacccttctcaggaaatgtggatggaata

SEQ ID NO: 34151 - DNA, 454 bp, Macaca Mulatta
cctttcctcttttctttacaaagctttctactctttctcagcctgccaaaaatttcatttgtgaatagcctttatcgagttcctgatttcttttgctttggttattttaccacaggagcccttttagatatcagtttaatctattcaatcttgggagagatctcagggtgtgtagggcgatttgcaaatgtagacatcatcttgaccaggctgttgtaattatcaaaccagttactgccattcttgtaattatttcctccccaaagtaggaagcagaagccactgtacttcccagaatgatgttaggatgattatttggttgctgttcttgctatttcacaaaactgtttagagagttggtatgaatagaactctatgttacattattcagttcatacacattgaatattacttgttcctttagagaggatatcttttaagtgcagtctctagc

SEQ ID NO: 34152 - DNA, 709 bp, Macaca Mulatta
  misc_feature (1)...(709): n = A,T,C or G
aaagtgttattttgtataaatgggaagaaagattcaattaagttattaacatttgggacctggataattatatcagagtatgtcaatccaataaattatttaactaattaaaaaaatagattgcaaagcatntgagctgtggttgaggaagtggtgtaaaagtgcatcccttaggaatgatgcactttcattaggatggactcgtgtctgattagaatgtcagttgatcagctagatttgtgtccacactaccagtttcacaccccctttccatctgtttgatacagtannnnnnnnnnnnnnnnnnnnnnnttctctgtggccatttgtgatacttcctcatatacttgaatattatacttctttattcacagtatctgtgtctcctgcaccctttggtgttgcaattttagatatgtgaaagtagatgttagcagggttctctccctattnnnnnnnnnnnnnnnnnnnnnnnnnnnnnttttagcatgaagttgctttctgtaacaactcaaagccgtaaccctgttttagtgccagatacaagtctctcccgtgatgctagaaaaaaattatttttctttgctttcaccaacatggagtttgtgggggtgggtccagttatacatgaaagggtttacagattgttggtttaagattatggatttatctcatttttaatcgcaagatagtttggggtttatgccta

SEQ ID NO: 34153 - DNA, 920 bp, Macaca Mulatta
gggtcattcaagaagctttagaagaacatgacaaaaatggtgatggatttgttagtttggaagaatttcttggtgattacaggtgggatccaactgcaaatgaagatccagaatggatacttgttgagaaagacagattcgtgaatgattatgacaaagataacgatggcaggcttgatccccaagagctgttaccttgggtagtacctaataatcagggcattgcacaagaggaggctcttcatctaattgatgaaatggatttgaatggtgacaaaaagctctctgaagaagagattctggaaaacccggacttgtttctcaccagtgaagccacagattatggcagacagctccatgatgactatttctatcatgatgagctttaatctccgagcctgtctcagtagagtactagctccttttataatttgttaccagctttacttttgtgataaaatgttgatgttgtattttacactcttaagtcttaccacagtcagaattatcttaatgtagattataattttggttttttaggaaaaaaaaccccaaatacctgataatttatttcaaaacgtattgaagcaacaaaacattaatattgtgccatatgacaacgaagtctttcctaaatactccatccgtttagtactgtattgtggaatatttgagttctatttccatacttgaaaacatggaggattttagagttgcctgaacaatattatttaagtagtatgtgactgagctataaattttttgtttttgttctaagtagatttaatttggggaactgacaagacagtggtttttaggttttagcattttggtttaatttttgcataatgtataggataggtaattaaaatttaaatggtaataacctttagcattttaagggtggaattggaaatatt

SEQ ID NO: 34154 - DNA, 564 bp, Macaca Mulatta
gcttctcttgtgagccagctggaggtcttacctctttgactgaaccacccaagggacctggctttggtgtacaagcaggcctttaatttatattgaactgtaaatatgtcactagagaaataaaatatggacttccaatctacataaactttttatattatgtttattctgctttggggacatcctcgtggtaaccttagcaacttgcagctctaagtattatgtcataatgacagaggaccattttaaagtcttctatctatgactgtgaagacattacataatctagttaacagttactctggtgtcaccccttttcaatttccagattgcttttatcaagatcaggttactgtgaagtaaaaatttggtcaaatttcacatgttttgctttcccatctttagccacagccaagttttaagttaacatgatctttctataaacttttgtcagtgttccttggaaacattattgtatttacaacacataatggttactgtatttccaactggtgagacctcaagtgcactgtaggtttaaggaggatatggtaattgtctcta

SEQ ID NO: 34155 - DNA, 244 bp, Macaca Mulatta
  misc_feature (1)...(244): n = A,T,C or G
ccagcccctcaaggatcgagaagatgaccagtacagtcaccttcaaggaaaccagttgaggaggaattgaactcaggactcagagtagntccaggtgttctccttctattcagttcccagaatcaaagcaatgcatttttggaaagctcctagcagagagactttcagccctaaatctagactcaaggctcccagaggtgacaaatggagaagaaagccatcagagcacatttggggttttctc

SEQ ID NO: 34156 - DNA, 591 bp, Macaca Mulatta
  misc_feature (1)...(591): n = A,T,C or G
gatgggtcccatcagccttctggtcataggcatcgtggccgtgcactgcatggggatcctggtgaaatgtgctcaccacttctgccgcaggnnnnnnnnnnnnnnnnnnnnnnnnnnnnnnnnnnnnnnnnnnnnnnnnnnnnnnnnnnnnnnnnnnnnnnnnnnnnnnnnnnnnnnnnnnnnnagacatgttgtggacttcttcctgattgtcactcagctgggattctgctgtgtctatttcgtgtttctggctgacaactttaaacaggtnnnnnnnnnnnnnnnnnnnnnnnnnnnnnnnnnnnnnnnnnnnnnnnnnnnnnnnnnnnnnnnnnnnnnnnnnnnnnnnnnnnnnnnnnnnnnnnnnnnnnnnnnnnnnnnnnnnnnnnnnnnnnnnnnnnnnnnnnnnnnnnnnnnnnnnnnnnnnnnnnnnnnnnnnnnnnnnnnnnnnnnnnnnnnnnnnnnnnnnnnnnnnnnnnnnnttcagaggatcccagaccccagccacctccccttggtggctccctggaagacctaccctctcttctttggcacagcgatttttgcattcgaaggcattggaatggt

SEQ ID NO: 34157 - DNA, 881 bp, Macaca Mulatta
tgcaagaacaaaaacatacttataaaacacagtttataagtgctgggataggacttttttcgtgaaattttggtggattttttcagattcaagtttcaggcggataagtcgctaaggacagagccaaaggtaatcccctagactttcgaggtggagagaaattttttctgaaatcccaggcttgccattgcaagattccccaaacttaaaggttaattccctctggccattgtgccctttcaaaagctttccctttaaggggttaagatggctggtatggaatggcatctttcaaagttcccagaatctccattataccttttctcaaaggaaagtttttccccattcacatagttctcttccccattgctgtaagctttccaggcaaaagtaagctcccagatgggatctgaatgaaaaataaaatatggttcgtccctcattccaaccacaaataagtaaagaaaactccaaatggacgaacaccacctgactgagtatattcttgcatcacagaagctactctctgtactagctgagctgtaggaatgggttcttggtacacaagatagtactgttgagctagctttcgagctctgtgcacaagcactctgtaatcggggcccatgccactgtacaccaaacctatatgcttggtaattggttccactttgtgtacacttcgctcatcatacagaatggatttctgttttttctcagttgctaataccacaccatttgcagctttaattcccactgacggggctcctccagctacagcagccaaagcatattcaatctggacaagtttaccagacgggctgaatgtagtcagcgaaaagctgtacccgcgctccgccatctttacccgaagagccccc

SEQ ID NO: 34158 - DNA, 812 bp, Macaca Mulatta
tctctaagaaagaggaacgtaagcgtacaaaaaagaaaaaggaacaaggccaagaaaggacagaggaggaaatgctttgggaccagtctattcttggattttgaagctttcaaagttggttcttccaaagttaagttgaaaaaataggtgagagcttggttttatgatgtccatgttcataccacttttcttatgtgaataggttaacttctaacaaaggccaagtgaacagaaagtgtttagcatgcttgctctccaacacagaaattacttttcctcattttctaaaagcattattacatttttttgacatatagtgtaatttcctttaatgaaagtcactctgcttttattcatcaaattgctttgatggtagaattattttctcttgggaggttatttattttaaattggaggattaatggactttgcacaatctgtttcttgattgggtttgttacagttttgagttgggtattttatgttcattggtttttctctatgaagcaatttttttctcctgtattagatctaacttgcagtgtattttctaggctggaaagtggaaaatgaaatacattataatcttaggttacataaagtttctaaagtttcaaataatcttgatacaaaatcagtttatattctggaaatatttataataaagtattctaatttctacatgttgttgtgtgtcagtctatttaataatgatttttcttttgggaggaggagagaataacttggcagttcatacttaagaggcaagatcttttgggtaggtcacactttaaagttgtaaaagttccttg

SEQ ID NO: 34159 - DNA, 572 bp, Macaca Mulatta
attatttcttttctggtttgatttccattaatgctgctacatttatgtaataaactaaaactataataaaatgttacttaggataagaacagaaggacaaagagaaagtaaatgccatctgaggccacgctacttttaggatacatgtggaatttgtctggcttgacgttgaaaatgttctgtggttttatattaaaagaaccttgtttctcctcacagatcgaagcctgcaataaagaagcagagaagattgagtcccttatcaactctgacagtccgactttggcgtcccatgtccctctctctgccctcatcatttcccaggtacaggtctccagcagtgtgccatcagctggtgtcagggccaggccttcttaccactccttcctccttcccctcagcctgggccttgccttgcacttgttctggacgtataactgactgcccacggaaggtgcagaatgctcctccatctcactctcctgccttgagaaagacattcaggactgctggtttgtagttgaatagtggccaaggaaaggcacatgtcacctctattcaccacacagtat

SEQ ID NO: 34160 - DNA, 287 bp, Macaca Mulatta
aagatggcggacttcctgccgtcgcggtccgtgctgtccgtgtgcttccccggctgcttgctgacgagcggcgaggccgagcagcaacgcaagtccaaggagatcgacaaatgcctgtctcgggaaaagacttacgtgaagcggctggtgaagatcctgctgctgggcgcaggcgagagcggcaagtccaccttcctgaagcagatgcggatcatccacgggcaggatttcgaccagcgcgcgcgcgaggagttccgccccaccatgtacaacaacgtgatcaaagg

SEQ ID NO: 34161 - DNA, 360 bp, Macaca Mulatta
  misc_feature (1)...(360): n = A,T,C or G
cctggagctgtgcgacccaacccagaggcttcgggtggccctggcaggggagttggtgggggtgggagggcacttcctgttcctgggcctggcccttgtctctaaggattggcgattcctacagcgaatgatcaccgctccctgcatcctcttcctgttttatggngctggcctggtttgttcctggagtccgcacggtggctgatagtgaagcggcagatcgaggaggctcaatctgtgctgaggatcctggctgaacgaaaccggccccatgggcagatgctgggggaggaggcccaggaggccctgcaggngacctggagaatacctgccctctccctgcaacatcctccttttcct

SEQ ID NO: 34162 - DNA, 613 bp, Macaca Mulatta
ggtggccccaggcaattgactgcatcacgcagggacgtgagttggagcggccacgtgcctgcccaccagaggtctacgccatcatgcggggctgctggcagcgggagccccagcaacgccacagcatcaaggacgtgcacgcccggctgcaagccctggcccaggcacctccggtctacctggacgttctgggctagggggccggcccaggggctggagtggttagccggaatactggggcctgccctcagcatcccccatagctcccagcagtcccagggtgatctcaaagcatctaactcaccctcagcatgcgggaggggacaggtgggggctgggagtagaggatgttcctgcttctctaggcaaggttccgtcatagcaattatatttattatcccttggctgtgtgtcttgccaattcttgggatgacgtcgttccaggagggaggcattgggattcaggtaaggggacagctctctgggatcctcccccactcaggttcccctcagctgcctacccctactccatggacctgtcactctcacctttgactataggttggatcccagtcccgtggtcacctggctcacctgctgtagaggcagcctc

SEQ ID NO: 34163 - DNA, 185 bp, Macaca Mulatta
ggactcagtaatgttgaacggctttggcacagtggttaatgctcttggcaaacgagtcaaaccatacttgcctcagatctgtggtacagttttgtggcgtttaaataacaaatctgcaaaagttaggcagcaggcagctgacttgatttctcgaactgctgttgtcatgaagacttgtcaagagg

SEQ ID NO: 34164 - DNA, 136 bp, Macaca Mulatta
tcaggcctttaaaattgtgccctacaacacagagacccttgataaactgctaaccgaatccctgaagaacaatatccctgcaagcggactgcacctctttggaatcaaccagctggaagaagaagatatgatgaca

SEQ ID NO: 34165 - DNA, 835 bp, Macaca Mulatta
  misc_feature (1)...(835): n = A,T,C or G
acacggcagcgtgtttgtgagaggcacatattctgtggcgactaggtcccggggagatgtatgggagtttgtcgcatgttgggcgagtggaaaagtatctccccattttcgggggtggttgggggcctttccgacaggttttttcttttctggaagggaaggcatcgggtaagaatttttggggattgtgagccgtggctgatatcggatttgggtgaaggtggcaatgacaaaatttcttggtgggttcttggaggaggaactggatgagggccagaggtccagtcacaagtaacaagccactagccagctgtttcagaaaaaccaccctcttgcccctgtggcgtccagtgaggatgatcagaatggtcccgggggtaatgctggctcgcagttttctcacgtgctgactgaagggttttttgccgtggctcaacagctttcgaggtacatcttcagtaggataatatctaggcattttgcgaagtttaaccacccgggtaccgccgttcttgtcaccaccaactggttttgtaagagttgcaagaaccttcnnnnnnnnnnnnnnnnnnnncttggatttagcggctgagtacttcctcttgtacatggcctttctggaatacatggcagatcgggaatacctgccaattcctctgacaaggacagggttgcggctgcaatggggcttccccttcttgggcttcttagccttgaggttaccctttttcaccttgccaccagcatcagccttcttggcttcgggtttcttctctttagtatctggcttctcaactttttcacccgccatcttgcaagatgggaaagagagccc

SEQ ID NO: 34166 - DNA, 1540 bp, Macaca Mulatta
  misc_feature (1)...(1540): n = A,T,C or G
gaaacagcacctaagttgttaccaccttgaagaaggtggagtcactaagaagcaaagaactgggaaaaaagtgtatgtatgtcagtactgtgagaagcagtttgactgttttggaaatcttaaagaacatcttagaaaaatatacaggtgaaaaaccttttgagtgtccaaattatcatgaaagatttgctagaaatagcaccctcaaatgtcacctcactgcatgccaaactggagtaggggcaaaaaggaagaaagaagctctgtgaatgccacgtctgtaacagtgtgtttaacagctgggcccagttcaaagatcacttcataatacaaattggatgtaaacccaaccattgttctttatgtgacttgcggttaatgcaaggaaataaattaatgaggtacctcagtgatacaatatttcagagtatctagtaatggaagaagttctttcagtagaaacttacatgcaaagtgaacctgtgacatcaatgactattatagaacaaattgggaaggtgtgtgtgctaccattgcttcaggtccaggtggattcagcacaagtgactgtggaacacatccatccagatgtgctccaggacagccaggtacttggttcatacctgagtgtgcttccagagcaggtccaaataagttatctagaagtgggtcgaattcagactgaagaaggtactgaagtacatgtagagaagcttcatgttgaatggataaatcagatgccagtggaagtacaaactgaacttctagaagcagacttggaccatgtgaccccagaaatctatgacccaagaggagagagaacctagccaactagacgctgttcaggctgccagggaagatcacgaagatgctgaggattagagagcaagccaatggtggatnnnnnnnnnnnnnnnnnnnnnnnnnnnnnnnnnnnnnnnnnnnnnnnnnnnnnnnnnnnnnnnnnnnnnnnnnnnnnnnnnnnnnnnnnnnnnnnnnnnnnnnnnnnnnnnnnnnnnnnnnnnnnnnnnnnnnnnnnnnnnnnnnnnnnnnnnnnnnnnnnnnnnnnnnnnnnnnnnnnnnnnnnnnnnnnnnnnnnnnnnnnnnnnnnnnnnnnnnnnnnnnnnnnnnnnnnnnnnnnnnnnnnnnnnnnnnnnnnnnnnnnnnnnnnnnnnnnnnnnnnnnnnnnnnnnnnnnntggattatattcttattatatagatgggtacgaatgtatctactttcactatggtcaaagttctcccttttctcttccccaggtcatgtccattctcaaattttcccatactgtaaagtcaaacttaaatcattagaatgcagctttatgtattcaagtgcatgttagaaaattgaatatataggaaacacaaggctgcatcataaaaactgcattgttaatgcatggttaaattttggcttaaaaatatatttagtttgaaaaatgttcctgtcgatcccagtagtcagagatgacatctctgcaacagaaagagtggtggaggcaaaatttctagaatgt

SEQ ID NO: 34167 - DNA, 623 bp, Macaca Mulatta
tttctcccccagtccaaggcactgggtcttggctggggtgcaggttccaagctgttctcctgctgtgtcggtgagttctggtcaacctgcaacctcctgatgtggtcactgcagttcgagtcttcagggactccccatggcctggagtgctttgccttgcttacatgggagaggataatggatttatagagaacatcatctaaatccaacttggccattttctgaccacacttgccagattactgtagtctaaatctaccattgtagaaagacgggggagcttagggctgcacaaacccgggtctggaactggctccttaccttggaaggtgaataatcctggcaggactcttagcctccctgggcctcagtttatgtttcatgggaatgaggatctctgctgggtggttgggtaatgtgggggctgtgtggaagcagtctatcaatgcaagctgaaatagaaatatttctccacagagtatgaaggtcaaatgagagaatacacttaaattaaatggaaaattaaaatggcaaaaaagacaaagctgtactgaaagttccaaacttctctataaggagctttttgactatgaaggaatcctgtactcattccccctaaatat

SEQ ID NO: 34168 - DNA, 680 bp, Macaca Mulatta
cagctgcactatgagaagattaaaggcctacctgaaggttttgctcatcccaaaatagggtcgaattattcagttaagactgtagagaagacatggaaagctctgcaggacttcaaggagggcaatgccatcttcaccttcccaaatactccagtgaagtgtgctggagccccccagaagatcatgtatttatcagaagcctacttcaggaagacagggaagcgatccaaggccaatatcattttcaatacttctcttggagccatttttggggttaagaagtatgcagatgccctgcaggagatcatccgggagcggaacctcactgttaactacaagcaaaagctcattgaagtccgagccgataaacaagaggctgtatttgagaacctggacaaacctggagagacccaagtgatttcatatgaaatgcttcatgtcacaccaccaatgggtccaccagatgtcctcaagaccagtcctgtggctgatgctgctggttgggtggatgtggataaagaaactctgcaacacaagagggtacccaaatgtgtatgggattggggacttgcacccaaccttcctacgtcaaagaccgctgctgcagtagctgcccaagtcaggaatacttgatagaacaatttctctgattatgaagaatcaaacaccaacgaagaagt

SEQ ID NO: 34169 - DNA, 489 bp, Macaca Mulatta
  misc_feature (1)...(489): n = A,T,C or G
cagaatttggagttatctgcttaatattttctgccacactagcttatttcccaccccgacctcctcttcctcccagtggtgctgcagctagccagcggttgagtnnnnnnnnnnnnnnnnnnnnnnnnnnnagcaattttagatttttgatgattgctttagcatatgccataccacttggtgtatttgctggctggtctggagttctggacttaattttaacaccagcgcacgtcagccaagtannnnnnnnnnnnnnnnnnnnnnnnnnnnnnnnnnnnnnnnnnnnnnnnnnnnnnnnnnnnnnnaggtttgcagattttatcaggggtatgctgaaactaattcttctcctcctgttttccggagctacgctgtcatccacgtggttcaccctgacctgtctgaacagcatcacccacctacctttaaccacagnagagatagggtctcaccatgtggtccaggctggtctcgaactcctgagct

SEQ ID NO: 34170 - DNA, 834 bp, Macaca Mulatta
ggaagaacatcatttccttcacaggctgtatgactcagctctttttcttctgcttctttgtcatctcttaatccttcatcctgtcagcaatggcatatgaccgctacgtggccatctgtaacccactgattgtacatggtcaccatgtctccccaggtgtgtttactccttttgttgggtgcctatgggatggggtttgctggggccatggcccacacaggaagcataatgaacctgaccttctgtgctgacaatcttgtcaatcatttcatgtgtgacatccttcctctccttcagctctcctgcaacagctcttacatgaatgagctggtgctctttattcttgtggctgttgacattggattgcccattgtcagtgtctttatttcttatgccctcatcctctccagcattcttcacatcagttctacagaaggcaggtccaaagcttttagtacttgcagttcccacataattgtagttttgcttttctttggttctggtgctttcatgtatctgaaacccccttccatcctgccccttgagcaaggaaaagtgtcctccctgttctataccatcatagtccccatgttaaacccattaatctatagcttgaggaacaaggatgtcaaagttgccttgaggagaactttgggcagaaaaatcttttcttaaaggagtagtattggaggaaggaaatacaatgctttgcttattagcatgtgttttcagtgagattcaagttccatttttttttcctgtcttgtacagaaagagaattttgaatctttacatttggatgaatgttaaatgcagacatattctccctgtctg

SEQ ID NO: 34171 - DNA, 543 bp, Macaca Mulatta
cgtcctcagagttttagtcccttccttgtttagaaactgaaagtagggatctcttgggactcttgttcagtgtctatgatcactgtgtagccagcagcaagtgctggtttgtatcacaactttccaaaggaacgagattgagaagaggttgtattgtgtccagttatggagagtgggatgggttctgggcaagactgagagtgatagaagacttaattaggaatgacaacgcctttccaaggtcaatgactcccagcgtggtgccatgcagacgcactgcgcctgaaggcagacagaatgagttccccctgctcttctaagcaactgcgaccctgccgtgcaccctcacatctcagggcccatttctaaggtctctaacagaggttattcatgtccgatatttggagcaaataaggagatcataaacagaggtgcttcatggagcgtgtagagtttcaggtttggatgtcatttacacccttgaagaaaaagacaaaatcattagggtggcattgagtacagggagcattgactcttactagc

SEQ ID NO: 34172 - DNA, 665 bp, Macaca Mulatta
ggggactgctgaaggctgccgaggtagaaattgagaagctggattaccatcattatctgcctctgttttttgatgggctttgtgaaatgacatttccctatgagttttttgctcggcaaggaatccacgacatgctggaacacggtgggaacaagatcctacctgtccttccacagctcattatcccgataaaaaatgccttgaatctccgaaaccgacaggtcatctgtgtcactctcaaggtcctccagcatctggttgtgtcagctgagatggtgggcaaggccttggtgccttattaccgtcaaatcctccccgtcctgaacatctttaagaatatgaatgtgaactccggagatggcattgactaccgccagcaaaaaaaaggagacatttggtgacttgatccagaaaacctggaagccttccagcgcctacgaagaaaaaaagcctttaccacaattaatactgggcccccccctaaaattttgcttgctaaataaaagggcacccctgggaatttaacccccccttggggtgggaaatcccccccccgccgttttaacatccattcctgggactccaaccttttttttcaacgcctcataaaaggccttaggcgctttgatgtttcccccttagaacagggtttcaaaaataaatgg

SEQ ID NO: 34173 - DNA, 383 bp, Macaca Mulatta
gttgagaagtcagcgttaccttgttgaaagttaactctgatttctttaaaggaatacataaaagaattcttctttaaatggcttgtagaagactccagtagtcccatgcccattcctccccacttgccccggtttcttcttgcagctccgtatttctaaacagtcatttttcttttactttttgtgtgtcctgaacacaaaatacgccactccccgctcagctgagcgttacttgtccctactgccacttcctctccctctccttagtcacatgttgtgcatattcctacaagggtggccccttcaggtagtcggttctcctcccgccgttgtgcggtccctcctggggtcctcctgccttgtctgggaggctccctgctgtc

SEQ ID NO: 34174 - DNA, 79 bp, Macaca Mulatta
aagaaaaatctatttaccttcgcttatggaaaagaaaccactgtaatcacagggactaccagaatatttcaagaaatgg

SEQ ID NO: 34175 - DNA, 741 bp, Macaca Mulatta
  misc_feature (1)...(741): n = A,T,C or G
tttccacgcgcgcctggtgcaccatggggcggcccacgcgggcgcggcaaaggcgcagggcagcacggcgcaccacttgggcccnnnnnnnnnnnnnnnnnnnnnnnnnnnnnnnnnnnnnnnnnnnnnnnnnnnnnnnnnnnnnnnnnnnnnnnnnnnnnnnnnnnnnnnnnnnnnnnnnnnnnnnnnnnnnnnnnnnnnnnnnnnnnnnnnnnnnnnnnnnnnnnnnnnnnnnnnnnnnnnnnnnnnnnnnnnnnnnnnnnnnnnnnnnnnnnnnnnnnnnnnnnnnnnnnnnnnnnnnnnnnnnnnnnnnnnnnnnnnnnnnnnnnnnnnnnnnnnnnnnnnnnnnnnnnnnnnnnnnnnnnnnnnnnnnnnnnnggctcatcggtgggcgagcactcggacgaggatgctcccagctcggacgacctggagcagttcgccaagcagttcaagcagcggcgcatcaagctgggtttcacgcaggccgacgtggggctggcgctgggcacgctctacggtaacgtgttctcgcagaccaccatctgccgcttcgaggccctgcagctgagcttcaagaacatgtgcaagctcaagccgctgctcaacaagtggctggaggagaccgattcgtccagcggcagccccaccaacctggacaagatcgcggcgcagggccgcaagcgcaagaagcgcacgtccatggaggtgggggtcaaagtgcgcgctcgagagccactt

SEQ ID NO: 34176 - DNA, 3403 bp, Macaca Mulatta
  misc_feature (1)...(3403): n = A,T,C or G
ccttagtcccgtggtcctcacggagtgagcggcatgcggcacccccaggcctgcccagtgtcctctggcctgctgccctgcacccccagaaggccctgacgccctggggcacttctgctctgcacaggaccacgcgggggtttgccatggtgacataaaggggcgcggaggaaggaaggagcgtgaccagcctgtggactgcgcccctggctgggaggaaggaccgggggcccagatcctccactcccagtgccccacaagggccttgcttcctaagtctctgtgaatttgttggtcagtggacgattctcgtgtctcctcctgtgtggggccttggggtagccagggcaggccgggcctccggtggccaaggtctcggaggccaggatgcctgccctggcatgcctccggaggctgtgtcggcacgtgtccccgcaggctgtccttttcctgctgttcgtcttctgcctgtttagcgtgttcatctcgggctactacctatatggctggaagcgannnnnnnnnnnnnnnnnnnnnnnnnnnnnnnnnnnnnnnnnnnnnnnnnnnnnnnnnnnnnnnnnnnnnnnnnnnnnnnnnnnnnnnnnnnnnnnnnnnnnnnnnnnnnnnnnnnnnnnnnnnnnnnnnnnnnnnnnnnnnnnnnnnnnnnnnnnnnnnnnnnnnnnnnnnnnnnnnnnnnnnnnnnnnnnnnnnnnnnnnnnnnnnnnnnnnnnnnnnnnnnnnnnnnnnnnnnnnnnnnnnnnnnnnnnnnnnnnnnnnnnnnnnnnnnnnnnnnnnnnnnnnnnnnnnnnnnnnnnnnnnnnnnnnnnnnnnnnnnnnnnccgggagctgctggacaagtactgtgtggcctacggcgtgggcatcattggcttcttcaagnnaggccaatgagaacagcctgctgagcgcgcagctcaagggcttccccctgttcgtgcactcaaacctgggcctgaaggactgcagcatcaaccccaagtccccgctgctctacgtgacgtgacctagcgaggtggagaagggtgtgctccccggcgaggactggacggtgttccagtcgaaccactccacatatgagccggtgctgctggccaagacgcgctcatccgaatccattccacacctgggcgcggacgccggcctgcatgccgcactgcacgccactgtggtccaggacctgggcctgcacgacggcatccagcgtgtgctgtttggcaacanccnnnnnnnnnnnnnnnnnnnnnnnnnnnnnnnnnnnnnnnnnnnnnnnnnnnnnnnnnnnnnnnnnnnnnnnnnnnnnnnnnnnnnnnnnnnnnnnnnnnnnnnnnnnnnnnnnnnnnnnnnnnnnnnnnnnnnnnnnnnnnnnnnnnnnnnnnnnnnnnnnnnnnnnnnnnnnnnnnnnnnnnnnnnnnnnnnnnnnnnnnnnnnnnnnnnnnnnnnnnnnnnnnnnnnnnnnnnnnnnnnnnnnnnnnnnnnnnnnnnnnnnnnnnnnnnnnnnnnnnnnnnnnnnnnnnnnnnnnnnnnnnnnnnnnnnnnnnnnnnnnnnnnnnnnnnnnnnnnnnnnnnnnnnnnnnnnnnnnnnnnnnnnnnnnnnnnnnnnnnnnnnnnnnnnnnnnnnnngagcatggcattcccacagacatggggtatgcagtggcgccccaccactcgggcgtgtaccccgtgcacgtgcagctgtacgaggcttggaagcaggtgtggagcatccgcgtgaccagcacggaggagtacccccatctgaagccagcccgctaccgccgtggcttcatccacaatggcatcatggnngttctcccgcggcagacctgtggcctcttcacacacaccatcttctacaacgagtaccctggcggctccagcgagctggacaagatcatcaacgggggcgagctcttcctcaccgtgctcctcaatcctnnnnnnnnnnnnnnnnnnnnnnnnnnnnnnnnnnnnnnnnnnnnnnnnnnnnnnnnnnnnnnnnnnnnnnnnnnnnnnnnnnnnnnnnnnnnnnnnnnnnnnnnnnnnnnnnnnnnnnnnnnnnnnnnnnnnnnnnnnnnnnnnnnnnnnnnnnnnnnnnnnnnnnnnnnnnnnnnnnnnnnnnnnnnnnnnnnnnnnnnnnnnnnnnnnnnnnnnnnnnnnnnnnnnnnnnnnnnnnnnnnnnnnnnnnnnnnnnnnnnnnnnnnnnnnnnnnnnnnnnnnnnnnnnnnnnnnnnnnnnnnnnnnnnnnnnnnnnnnnnnnnnnnnnnnnnnnnnnnnnnnnnnnnnnnnnnnnnnnnnnnnnnnnnnnnnnnnnnnnnnnnnnnnnnnnnnnnnnnnnnnnnnnnnnnnnnnnnnnnnnnnnnnnnnnnnnnnnnnnnnnnnnnnnnnnnnnnnnnnnnnnnnnnnnnnnnnnnnnnnnnnnnnnnnnnnnnnnnnnnnnnnnnnnnnnnnnnnnnnnnnnnnnnnnnnnnnnnnnnnnnnnnnnnnnnnnnnnnnnnnnnnnnnnnnnnnnnnnnnnnnnnnnnnnnnnnnnnnnnnnnnnnnnnnnnnnnnnnnnnnnnnnnnnnnnnnnnnnnnnnnnnnnnnnnnnnnnnnnnnnnnnnnnnnnnnnnnnnnnnnnnnnnnnnnnnnnnnnnnnnnnnnnnnnnnnnnnnnnnnnnnnnnnnnnnnnnnnnnnnnnnnnnnnnnnnccagattctggtcttggatggcaaactgctacgaacagaacctgccaaagtgatggacatggtgcagaagttccttggggtgaccaacaccattgactaccacaaaaccttggcgntttgatccaaagaaaggattttggtgccaactgctcgaaggaggaaaaaccaagtgtctgggcaaaagcaagggccgaaagtatcccgagatggacttggatntcccgagccttcctgaaggactattaccgggaccacaacatcgagctctccaagctgctgtacaagatgggccagacgcttcccacttggctacgagaggacctccagaacaccaggtagccgcggccaccacagccagactgaaagtttgtgacagccgggacgtcccgccacgcgctgagccagactgacctgcagagtgcgaagctgggcccgggcggccacgtacttacgagcaatactctgtggaggcctggtggggccgggagagcacccaggcgggtctgcaagcgcctcggagcacccaccgctgggtctgtggcctacgggacctccctcgccagcagaggtccattccgttcccagccgctcctggggaggccgcttcctggtaggagggagtccacgaggctcttttctgtccctcactgtgttccgccgaccgtcccctctcgtcacccatcactccctgc

SEQ ID NO: 34177 - DNA, 785 bp, Macaca Mulatta
ggggggggttgcggtttttctgggacaacaagtttgaccatgcaatggtggctttcctggactgtgtgcagcagttcaaagaagaggttgagaaaggcgagacacgtttttgtcttccctacaggatggatgtggagaaaggcaagattgaagacacaggaggcagcggcggctcctattccatcaaaacccagtttaactctgaggagcagtggacaaaagctctcaagttcatgctgacaaatcttaagtggggtcttgcgtgggtatcctcacaattttataacaaatgacttttttccttagggggaggtttgccttaaaggcttttaattttgttttgtttgcaaacatgttttaaattaaattcgggtaatattaaacagtacatgtttacaataccaaaaaagaaaaaatccacaaaagccactttattttaaaatatcatatgacagatagtttccagagctacaacatgccaggtatagctgccaaccattgtcacagttttgactcttaaccccatgaactcctttccctttcttctctgaaaaaaactaatttaaatttgctttttttttttaactgagttgaattgagattaatgtgttttcactggatttgtatctctctcaacttcccgcacttaacagtatgaaatagaaacttgtctttactgagacgaggatatgtttgagatgcacagtttggataatgtgggaaatgacatctaagctttacctggtcacaatgtgatgtgcagatgcctgaaatgtaacacttcc

SEQ ID NO: 34178 - DNA, 430 bp, Macaca Mulatta
ccccaccccggagggtccagactcccctactccgagccactgtggccagctccacccagaaattccaggacctgggcgtgaagaactcagagccctcagcccgccatgtggactccctaagccagcgctcccccaaggcatccctgcggagggtggagctctcgggccccaaggcggctgagccggtgtcccggcgcaccgagctgtccattgacatctcatccaagcaggtggagaacgccggggccatcgggccgtcccgatttgggctcaagagggctgaggtgttgggccacaagacgccagagccagctcctcggaggacggagatcaccctcgtcaaaccccaggagtcagcacaccggaggatggagccccccgcctccaagatccccgaggtgcccactgccccagccaccgacacagcccc

SEQ ID NO: 34179 - DNA, 715 bp, Macaca Mulatta
ccttcagggagcaggaacccagggcgccttgtaagctgagcctgggactcccaggacctccccccaggctgctctctgattcttcctcccaaccccagagactgcggatttgtgccatgcggctgcctgcaccccagacaataaagggacccaaaccactcagcccccaccctgcctctagcctgaggaagaccaagcaggcctggacccagagacgtcctccaaccctggatacgacacaccgagactgtgtgccccatcgttcttagcttcaatcctcacagcacctggtagacccaaggacttgggtagatcaggacacctgaagaagagcagcttcccgccactctgcaacccacccaaggaggctgctggggcggggatccccatggggctttgacacaatcctctgctgcctccccactaggatcattccacacccctgcacctgaccaaggggccaatgaggcagaggcttgccccaagtcatagccactcagatgcttcccgacccccagtgccctttccaggtcaggagatccaaggagcgcctgaggagctctgggtacagggcagcagcccagagcccatggaccctcccgggacatctggatgctgggcatagatttctcaacaaggaagactcccctgcctcctgaaggtctccattctcctaggagacaaagcaataataaaaggaagtgttagacaatgt

SEQ ID NO: 34180 - DNA, 483 bp, Macaca Mulatta
gccgggcgccagaactgtaccgggctccattcccgttgttagggcttcaggtcgaccccagcactgggctgctcatcgctgcaggcggaggaggcgccgccaaggcaggcataaagaatggcgtgcactttctgcagctagagcggattaatgggcgcctgagtgcctccttgctgcactcccatgacacagagacacgggtcaccatgaacttggcactggctggtgacatccttgctgcagggcaggatgcccactgtcagctcctgcgcttccaggcccatcaacagaaggtcaacaaggcagagaaggcaggttccaagaagcaggggcctcgacaaaggaagggagcagccccagcagagaagaaatgtggaaacccagcacgaggggctagaactcagggtggagaatttgcaggcagtgcagacagacttcagctctgatccactgcagaaagttgtgtgcttcaaccacgataat

SEQ ID NO: 34181 - DNA, 830 bp, Macaca Mulatta
  misc_feature (1)...(830): n = A,T,C or G
gggcctctttccttgcctaacgcagccatggctcgtggtcccaagaagcatctgaagcgggtagcagctccaaagcattggatgctggataaattgaccggtgtgtttgctcctcgtccatccaccggtccccacaagttgagagagtgtctccccctcatcatcttcctaaggaacagacttaagtatgccctgacaggagatgaagtaaagaagatgttgcatgcagcggttcattaagatcgatggcaaggtccgaactgatataacctaccctgatggattcatggatgtcatcaacattgacaaaacgggagagaaattccgtctgatccatgacaccaagggtcgcttttgcctgtacatcgtaatacacctgaaagaggccgnctaccaattatggccaaagtgagaaaaaattctttgttgggcacaaaatagaattcccaccatttgggtgaatcaatgattccccctcaacaattctacttacccccgaaatacccatgattaaagggggaaaaggaaaaccaatttcaaaattagatttaggaaaaaccggggcaaagaataaatagaattttccctccaagatttccgaacaacggggaaaaccgggaatataagggatgtaactgaggaagggggccctcccacctggggaagagaaactataaaatttggagcattcacaaccaaaaataaaaaaggcataacaccggacaacccattttggccctgtcgcactccaattcattaaaattaaatcgcgcactggtgcacaatataatttataatcaatacttagcgcactattgccacacaataat

SEQ ID NO: 34182 - DNA, 1690 bp, Macaca Mulatta
  misc_feature (1)...(1690): n = A,T,C or G
aggaacctggcggaccgaggctgtgttcagcgaggaagcactgatccaagttccaagtgacatccctcttcagagcgctgccacacagggcgtcaatccctgcacagcctacaggatgtagatagaaatcgagcagctgcagccagnnnnnnnnnnnnnnnnnnnnnnnnnnnnnnnnnnnnnnnnnnnnnnnnnnnnnnnnnnnnnnnnnnnnnnnnnnnnnnnnnnnnnnnnnnnnnnnnnnncagacctgatatccagaagctgagtgacagactgaagagtctgggggctgagcatgtcatcacagaagaggagctaagaaggcccgaaatgaaaaacttctttaagnnnnnnnnnnnnnnnnnnnnnnnnnnnnnnnnnnnnnnnnnnnnnnnnnnnnnnnnnnnnnnnnnnnnnnnnnnnnnnnnnnnnnnnnnnnnnnnnnnnnnnnnnnnnnnnnnnnnnnnnnnnnnnnnnnnnnnnnnnnnnnnnnnnnnnnnnnnnnnnnnnnnnnnnnnnnnnnnnnnnnnnnnnnnnnnnnnnnnnnnnnnnnnnnnnnnnnnnnnnnnnnnnnnnnnnnnnnnnnnnnnnnnnnnnnnnnnnnnnnnnnnnnnnnnnnnnnnnnnnnnnnnnnnnnnnnnnnnnnnnnnnnnnnnnnnnnnnnnnnnnnnnnnnnnnnnnnnnnnnnnnnnnnnnnnnnnnnnnnnnnnnnnnnnnnnnnnnnnnnnnnnnnnnnnnnnnnnnnnnnnnnnnnnnnnnnnnnnnnnnnnnnnnnnnnnnnnnnnnnnnnnnnnnnnnnnnnnnnnnnnnnnnnnnnnnnnnnnnnnnnnnnnnnnnnnnnnnnnnnnnnnnnnnnnnnnnnnnnnnnnnnnnnnnnnnnnnnnnnnnnnnnnnnnnnnnnnnnnnnnnnnnnnaaagtagaagtcattcctgtcaaggaccgtcactctgtactggtcagctcacagcaccaagaggcccccttcctgcttttctgtcacgtgttcccccagtaatcattttctgaccaccctgaaagcaaagcctgggtggacactgccagggcaaagaccagtaggccaccatccctggcttcaagctgcacaagcccacagaggagggtcctgtagaacgagcgctttgctgtgcttctcaggagtgtgcggcccagtccagggctgcgggaggatcagctgcacggaagagtcaatgccaggctgaggtcatcagagccctgaggaacgaggacgtgggatctccactgtcatggaactgccgttctaactgaagacatagacagtataccagtggttctcaaccagaggcaattttacccccaggagacatttgacaatgtctgggaatatttctggcagtcacagcttggggaggaggttgctactggcatctagcaggcagagtgagtactgctgttaaacccaccacaggacacgcaacagcctcctgcaacaaagaattacccaaggcctggcgcggtggctcacacctgtaataccagtactttgggtagccaaggcgagcggatcacttgagcccaggagttcaaggtcagcctaggcaacatggtgaaacgccatctctacaaaaaatacaaacattagccacccgtggtgctgtgcacctgtagtctcagctactcgggaggctgaggtgggaggatcacctg

SEQ ID NO: 34183 - DNA, 111 bp, Macaca Mulatta
gtgagaatgctggctccatgaaagaggtctgtgagagcagggaccttgtttgctctccagggcttactgcaacagactggcacataagtgtctaataaatattctgacaga

SEQ ID NO: 34184 - DNA, 141 bp, Macaca Mulatta
tgcccacccatggcagggtgtaccagaagggccacgaactggtgttggccagtattgctgaaagtgatgctggtgtctacacctgccacgcggccaacctggctggtcagcggagacaggacgtcaacatcactgtggcca

SEQ ID NO: 34185 - DNA, 383 bp, Macaca Mulatta
tcctgtgcgccatgctggccttctcatctggcatctccgtggcaggagaggctgcgggggcggtggacgaggctgcagagctgggagatgacaggtggatgggcggggttgactcagaaaacatggagcgcccaggcctcagggaatcccagtccttgtccccatgccctagcctgcccctctgtgagtagggcaggagctggcatttccgagggtgacctcggtgacctcagcaggctgctccacccctagggtggctctcattctcaatgtaatgggttaattagacctcgctggcacctcagccagttggggtgggtggcactaacctccctcaaataactgtccacagggtacctgccttacgagtcactccagggcca

SEQ ID NO: 34186 - DNA, 3211 bp, Macaca Mulatta
  misc_feature (1)...(3211): n = A,T,C or G
agcggaggcggggaaggcgcccatctgcgcagcgctgcgctcgggggggcgcgggcagatcgctgggttggagaggattgtggcagatgagaggacctgtgggtcgttctctgcagacctggccgcccagggtgtcagagagaggtggcgagttcgtgtccgccgggaattgttggctgttggggaaagttttctgcgaggtcagtcaaggctttgggggctctgttttgaatgtggatcaccactccgagtttactaatgtttacaaagctacgcagtagggaaacggaagagtaaggtgggggcnnnnnnnnnnnnnnnnnnnnnnnnnnnnnnnnnnnnnnnnnnnnnnnnnnnnnnnnnnnnnnnnnnnnnnnnnnnnnnnnnnnnnnnnnnnnnnnnnnnnnnnnnnnnnnnnnnnnnnnnnnnnnnnnnnnnnnnnnnnnnnnnnnnnnnnnnnnnnnnnnnnnnnnnnnnnnnnnnnnnnnnnnnnnnnnnnnnnnnnnnnnnnnnnnnnnnnnnnnnnnnnnnnnnnnnnnnnnnnnnnnnnnnnnnnnnnnnnnnnnnnnnnnnnnnnnnnnnnnnnnnnnnnnnnnnnnnnnnnnnnnnnnnnnnnnnnnnnnnnnnnnnnnnnnnnnnnnnnnnnnnnnnnnnnnnnnnnnnnnnnnnnnnnnnnnnnnnnnnnnnnnnnnnnnnnnnnnnnnnnnnnnnnnnnnnnnnnnnnnnnnnnnnnnnnnnnnnnnnnnnnnnnnnnnnnnnnnngcggcagctctcggggggcgcggggagtctcccgctggcctcctccccattggctgaggggccggctggtgtcgcccaggcccctctccccactcagcactgccacttttgggcgcggagttatggcagtaacggggaccccagggctgggggctcggggccggggctgcagttcgggccgcctcccgcgacccgcgagaccggcccgcagacagtcccaggccgcatctttgctgacccgagggaggggccgcgcgtggccggggaaacnagatcttgaaggagctggacgagtgctacgagcgctttagccgcgagacggacggggcgcagaagcggcggatgctgcactgtgtacagcgcgcgctgatccgcagccaggagctgggcgatgagaagatccagatcgtgagccagatggtggagctggtggagaaccgcacgcggcaagtggacagccacgtggagctgttcgaggcgcagcaggagctgggcgacacagcgggcaacagcggcaaggctggcgcggacaggcccaaaggcgaggcggcagcgcaggctgagaagcccaacagtaagcgctcgcgaaggcagcgcaacaacgagaaccgcgagaacgcgtccagcaaccacgaccacgaggacagcgcctcgggcacacccaaggagaagaaggccaagacctccaagaagaagaagcgctccaaggccaaggcggagcgggaggcgtcccctgccgacctccccatcgaccccaacgaacccacgtattgtctgtgcaaccaggtctcctacggggagatgatcggctgtgacaacgacgagtgtcccatcgagtggttccacttctcgtgcgtggggctcaatcataaacccaaggnnnnnnnnnnnnnnnnnnnnnnnnnnnnnnnnnnnnnnnnnnnnnnnnnnnnnnnnnnnnnnnnnnnnnnnnnnnnnnnnnnnnnnnnnnnnnnnnnnnnnnnnnnnnnnnnnnnnnnnnnnnnnnnnnnnnnnnnnnnnnnnnnnnnnnnnnnnnnnnnnnnnnnnnnnnnnnnnnnnnnnnnnnnnnnnnnnnnnnnnnnnnnnnnnnnnnnnnnnnnnnnnnnnnnnnnnnnnnnnnnnnnnnnnnnnnnnnnnnnnnnnnnnnnnnnnnnnnnnnnnnnnnnnnnnnnnnnnnnnnnnnnnnnnnnnnnnnnnnnnnnnnnnnnnnnnnnnnnnnnnnnnnnnnnnnnnnnnnnnnnnnnnnnnnnnnnnnnnnnnnnnnnnnnnnnnnnnnnnnnnnnnnnnnnnnnnnnnnnnnnnnnnnnnnnnnnnnnnnnnnnnnnnnnnnnnnnnnnnnnnnnnnnnnnnnnnnnnnnnnnnnnnnnnnnnnnnnnnnnnnnnnnnnnnnnnnnnnnnnnnnnnnnnnnnnnnnnnnnnnnnnnnnnnnnnnnnnnnnnnnnnnnnnnnnnnnnnnnnnnnnnnnnnnnnnnnnnnnnnnnnnnnnnnnnnnnnnnnnnnnnnnnnnnnnnnnnnnnnnnnnnnnnnnnnnnnnnnnnnnnnnnnnnnnnnnnnnnnnnnnnnnnnnnnnnnnncagactgatttcttgtggaggagggggactaaactcaacctaacacataaaatgtggaaggaaaatacttcatttagcttttttttaataaaagtaatattactttatgaacaattttttttaattggccggtcgccaaaaatacagcctatagtaaatgtggttcttgctgccatgatgtatatccatataacaattcagtaacaaaggtttcaagtttgaagattattttttaaaaaggtaaatggttaaattttacatgatagatattttatattttggcctgttccccaaatggccattttaaaatgcttgggtacacttctcttaaacaagcggtctagtcaaggaacctcaagtcatgcttttgctatcacgaatcatagtgtagccatctttaatttatatcaggtgtataaatgtacatttccaagtgaacttgcacttgctatattatgattggaagtgcagtcagcagatgctgttgtgaagctaatgtcacaattatgtgcaaaggtgtgcttcctgctgtatgtgagctgtaaaaatgttacgtgaagaaataaatgaaacttggccagtttgttcctctagtagtatatttaattttgacataagtaacttttaaaatttgtcttaaaaatttatacaccagcagtttagacgaagccttaagtaaattttgtattattgttctcacttattaataatgaagttacctaattgccagcaaataaatacgtgtcaaaacagaatctgtattcagaccctgggtcaggaaattactgcccacttgtcaagtccagtccaccacttgtttgaacattatatggagtttaaattctagtgtccataaataaagtttcggtggaaca

SEQ ID NO: 34187 - DNA, 2359 bp, Macaca Mulatta
  misc_feature (1)...(2359): n = A,T,C or G
caatgcaagaggtgacactacccattcacctactccagggaaagtgtccagtcccctgagacccctgtctccaggaatcaagtccccaaccatccccagagctgagagaggaaaccctccacccatcccacccaaaaaacctggcctcaccccttctccatctgctaccactccactgaccaaaactcattcccaggcagcctctttgaccaccacagaagaccttgccagcagctgctcttccaatactgttgtagcaaatggtaaggatgttgagttacttttgcctaccagcagctagtccctaggagggagtctccacgtttgacattccatcagatttcgtccaagagctcagtcagacttttgagtcagattacgttatttattttgatagtaactgaaaccatctgtataatacatttagtgtatttcaccattttgtattttttaagtagaaactgagtagtttggatttttatggctcacatctttttactgaagccagaaaggcacctcaaagatgtctcaagctcagcagtcaccgtcatgttgtgatgaagaaagcaaatcaccaggtggtgatttggtatctatttgggaactaaaatcactcaacactcattttgaattatgcagaagtggttcatgcagatttttattccagatgaacatgttttnnnnnnnnnnnnnnnnnnnnnnnnnnnnnnnnnnnnnnnnnnnnnnnnnnnnnnnnnnnnnnnnnnnnnnnnnnnnnnnnnnnnnnnnnnnnnnnnnnnnnnnnnnnnnnnnnnnnnnnnnnnnnnnnnnnnnnnnnnnnnnnnnnnnnnnnnnnnnnnnnnnnnnnnnnnnnnnnnnnnnnnnnnnnnnnnnnnnnnnnnnnnnnnnnnnnnnnnnnnnnnnnnnnnnnnnnnnnnnnnnnnnnnnnnnnnnnnnnnnnnnnnnnnnnnnnnnnnnnnnnnnnnnnnnnnnnnnnnnnnnnnnnnnnnnnnnnnnnnnnnnnnnnnnnnnnnnnnnnnnnnnnnnnnnnnnnnnnnnnnnnnnnnnnnnnnnnnnnnnnnnnnnnnnnnnnnnnnnnnnnnnnnnnnnnnnnnnnnnnnnnnnnnnnnnnnnnnnnnnnnnnnnnnnnnnnnnnnnnnnnnnnnnnnnnnnnnnnnnnnnnnnnnnnnnnnnnnnnnnnnnnnnnnnnnnnnnnnnnnnnnnnnnnnnnnnnnnnnnnnnnnnnnnnnnnnnnnnnnnnnnnnnnnnnnnnnnnnnnnnnnnnnnnnnnnnnnnnnnnnnnnnnnnnnnnnnnnnnnnnnnnnnnnnnnnnnnnnnnnnnnnnnnnnnnnnnnnnnnnnnnnnnnnnnnnnnnnnnnnnnnnnnnnnnnnnnnnnnnnnnnnnnnnnnnnnnnnnnnnnnnnnnnnnnnnnnnnnnnnnnnnnnnnnnnnnnnnnnnnnnnnnnnnnnnnnnnnnnnnnnnnnnnnnnnnnnnnnnnnnnnnnnnnnnnnnnnnnnnnnnnnnnnnnnnnnnnnnnnnnnnnnnnnnnnnnnnnnnnnnnnnnnnnnnnnnnnnnnnnnnnnnnnnnnnnnnnnnnnnnnnnnnnnnnnnnnnnnnnnnnnnnnnnnnnnnnnnnnnnnnnnnnnnnnnnnnnnnnnnnnnnnnnnnnnnnnnnnnnnnnnnnnnnnnnncaacatagcgagaccccatctctattaaaaaaaataaataggcagaactaaactagccccagtgtcacaaaactcaactggtcatataaatgagtgaaacaggcctctcaagcggtgtaaaacagctgggagtagtgggagctgtggcaaactgaagtgcccaagccccatttaaaaaaggcatctgttcagctccatctgcttgctgccatgcaagaatgctaaaccaggataaccagttcttcacattttttgaaatccagattttcatgagaaacattctcatttttaaatatcaagaactgattttaaaatgtttaaatagtgctggttaaacaaacacttctgcagctggatttagattgcaagctgccaagttgcaacctctttcattctagaaacttctgtcattttcatcatagcaaatctatgtggacaaaagcctccaaactttccaactgtgtaggccagtacagctggcaaggttcatagaatataatgactatccccctctgccaaataagactatccacaacccagctcagacacagtggttatatggattttgtgtccatacaggggaggccttggtgtcctcacatacattctcctagccaacatctatccagcagccctgacctcctgctataatttaagtctatttccttttagtctaataagagttgat

SEQ ID NO: 34188 - DNA, 866 bp, Macaca Mulatta
gcattttccaagccaccacagtgattcagccgcttcctctcctgcatctcctatggaaaagatggaccagacacagctaggacatctagctttaaaaccaaagcagccttggcacctcacagaatggccagctatgaaccttacctggatccacaccactccaatttgcaacccccctctcagctccccaggtactatctcctttagccatggtcctttaggcactggaaccggtattggcgtcattcttttcctacagcatggagtgcaacccttcacccactctgccccagccactccagtcccacctactacagcatctcctgtcatccctggtgaacctatgaaactatctggagaggggcctcgttgctacagtttgccagtaactctgccatcagactggagctataccctatcccctcccagtctacccaccttggccagggagatgaccaaaggacaccgggagcagcagagaagccatgctccagttgctcctgatgctcatcttctcaacctctagcctggggcatacagctgtccactgtgatttctaatttgtgtaaatattcatgtatatatgtatttttacttttaatgtgtgcatttgtgttgagggaagacaaatcctttctgattaaagaaatttttttatacctaaacagtttgctgattgggggaaattgaaaactttctgcctccaaaaccaatccgtatcctctgagctgcagtaaaagtagaaaagggatggggatgtttgtgaacatgagctctaccaagttagagtctggatgacaatataagacttgtgggagagaggggactctactgctattttcctagggaacatccttgaaacagtt

SEQ ID NO: 34189 - DNA, 461 bp, Macaca Mulatta
  misc_feature (1)...(461): n = A,T,C or G
ggagagatagtggggagtgggagccgtgggtttcgcaccgatgattcccccacaggaggcatccgcccgaaggcgggagatcgaggacaagctgaagcaggncaggaggaggagacgctgtccttcatccgagacagcctggagaagagcgaccagctcactaagaacatggtgnnnnnnnnnnnnnnnnnnnnnnnnnnnnnnnnnnnnnnnnnnnnnnnnnnnnnnnnnnnnnnnnnnnnnnnnnnnnnnnnnnnnnnnnnnnnnnnnnnnnnnnnnnnnnnnnnnnnnnnnnnnnnnnnnnnnnnnnnnnnnnnnnnnnnnnnnnnnnnnnnnnnnnnnnnnnnnnnnnnnngccccacaggtaggctggaagagtacctgggaagcatggccaagattcagaaggcagtggagtatttccaggacaacagcccagacagcccagaactcaacaaagt

SEQ ID NO: 34190 - DNA, 85 bp, Macaca Mulatta
ggctttctttacagaaaagtacttgcaggagcatcctgaagaccaggagaaggttgagctgctaaagcgactattagcattacag

SEQ ID NO: 34191 - DNA, 621 bp, Macaca Mulatta
  misc_feature (1)...(621): n = A,T,C or G
gggcctgtatagaggtgctggctgcttgtttaccttctcctctggggctctacctctccacacttccccagaagggaaaagggcaccctgggttactctttggaaatcactccttggtgggcagcatcctgaggcttccccagaaccaggcctctgctctggccctcttgcatctggaacgccaggtgggtttttctggcataggagcccacttgcattttcatagttttatttgataaaatcccatcttacattctgtgnnnnnnnnnnnnnnnnnnnnnnnnnnnnnnnnnnnnnnnnnnnnnnnnnnnnnnnnnnnnnnnnnnnnnnnnnnnnnnnnnnnnnnnnnnnnnnnnnnnnnnnnnnnnnnnnnnnnnnnnnnnnnnnnnnnnnnnnnnnnnnnnnnntnnncccccttccgccccccaaaannnnnnnnnnnnnnnnnnnngcccccggggcccnnnnnnnnnnnnnnnnnnncaaaatgttcttaaagattcccgggcaaaccggggttgaaannnnnnnnnnnnnnnnnnnnaagcccgggggtccaaaaatttaaaagaattaaggtttttgggtttttcggggttcaagggcccatactttttcccc

SEQ ID NO: 34192 - DNA, 849 bp, Macaca Mulatta
  misc_feature (1)...(849): n = A,T,C or G
cagattgcaccagagctgctgaacaattaaagaataatcctcgacacaagagttacctagaacaagtatccctgaggcagctagagaagctattcagttttttacgaggttacttgtcaggacagagtttggcagaaacaatggaacaaattcgaagggaaacaaccattgatcctgaggaagacctgaacaaactagatgacaaggagcttgccaaaaggaagagcatcatggatgaactttttgagaaaaatcagaagaagaaggatgatccaaattttgtttatgacattgaggttgaattcccacaggacgatcaactgcagtcctgtggctgggacacagagtcaaccgatgagttctgacaccaaccactcaaaacatgcatcaggccagcagaacatccatgtttattaccagactggttctggaaaaagctttaaagaatactaaatannnnnnnnnnnnnnnnnnnnnnnnnnnnnnnnnnnnnnnnnnnnnnnnnnnnnnnnnnnnnnnnnnnnnnnnnnnnnnnnnnnnnnnnnnnnnnnnnnnnnnnnnnnnnnnnnnnnnnnnnnnnnnnnnnnnnnnnnnnnnnnnnnnnnnnnnnnnnnnnnnnnnnnnnnnnnnnnnnnnnnnnnnnnnnnnnnnnaggtcaggagatcgagaccatcctggctaacacagtgaaaccccgtctctactgaaaatacaaaaaattagccaggcgtggtggcgggcgcttgtagtcccagctacacgggaggctgaggcaggagaatggcgtgaacccggtaggcagagcttgcagtgagtggagatcgcgccactgcactccagcctgggcga

SEQ ID NO: 34193 - DNA, 603 bp, Macaca Mulatta
gagtttgtaccagtttgagagtattaatgtcagtactaccagcactttgccaaaactgtgtcagagggacccctgtttctagagtgagtcccagttacatcaaagagtgacttccagttattccccagttaagtctgagtgggtccttcaagctgggtgtctttccagtctttgccagtctagtcctagtagggcaccgtgtgtgtgtgaatgcagtttggtgctgttttagagtatgcctgctccccagccccctgcctggaaccctctaatcaacttgctctgacctataatgtcttaggtgcaacaaggaccctatcagagctcttggatacccccctagatccatgtggctttacatgaggggactgaatgcagacataccatagcccccttctactactttccctctcgccctgccacctagttccacatggaaccaacaagttgagtgcatccctgttgggtgttttgagactggctgaaatgaggagattttgaccatgtgacgtgtcaacagactcaaggaaacaaccacctcaactgggtcatgtggcatgcctgtgtatgtgtgtaacagaattctgattgttagactgtaat

SEQ ID NO: 34194 - DNA, 137 bp, Macaca Mulatta
tcccggctgtccccgcggccggggaaggtcagcgcagtgatggccttatcggtgtcgggggtctacctgacccatcagcagaaggtgttgcggctttataagcgggcgctgcgccacctggagtcgtggtgcgtcca

SEQ ID NO: 34195 - DNA, 1649 bp, Macaca Mulatta
  misc_feature (1)...(1649): n = A,T,C or G
caggtctggaacagccgaaaattctgtgatcagttcttggggcaggttactctggatgctgaccccagcgactgccgtgatctgaagtctctgtacctgcgtaagaagggtggtccaactgcaaaagtcaagcaaggccacatcagtttcaaggttatttccagcgatgatctcactgagctctaaatctccaatcccagagaatcctgacaaagcttgccacccttttattttctgtcaggtgccaggtcttagttaagattcacaatctttagaaagaatgagattcacaataattaactttcctctcttctgataaattccccatacttcccaatccaagtagcatcagtagcaacataacctatatacctccagcagctggacatggggaggcgacagtcctatctagacatcatacacctttgccaagaaaggatctctgaggcttccgggggtgagattcaagcaggacaataacaagaggctgaacaccctacagatgtctgtgatgttttcagttgttcgatatatctcccctgtagggcatgttgaggaaggaggagggctgatcaaggccaagctggtctagcctgacatcctatctcctgactgaacactatagacttcccagcagcatttcacccagcagccagagccggctttaagtccccaacccttacannnnnnnnnnnnnnnnnnnnnnnnnnnnnnnnnnnnnnnnnnnnnnnnnnnnnnnnnnnnnnnnnnnnnnnnnnnnnnnnnnnnnnnnnnnnnnnnnnnnnnnnnnnnnnnnnnnnnnnnnnnnnnnnnnnnnnnnnnnnnnnnnnnnnnnnnnnnnnnnnnnnnnnnnnnnnnnnnnnnnnnnnnnnnnnnnnnnnnnnnnnnnnnnnnnnnnnnnnnnnnnnnnnnnnnnnnnnnnnnnnnnnnnnnnnnnnnnnnnnnnnnnnnnnnnnnnnnnnnnnnnnnnnnnnnnnnnnnnnnnnnnnnnnnnnnnnnnnnnnnnnnnnnnnnnnnnnnnnnnnnnnnnnnnnnnnnnnnnnnnnnnnnnnnnnnnnnnnnnnnnnnnnnnnnnnnnnnnnnnnnnnnnnnnnnnnnnnnnnnnnnnnnnnnnnnnnnnnngactgcaatgtgaaacctctcgctgctgctaggtttacaaacaagcccattgtcctgtgcctcctaatatcatttgtactgaagactccatctggggacttgagactttggtcccagcccagactcctcagacttttctctcagttgggatgcttcactcgctgggggtgtttgtttgccctctcatttttcagtacttctacagaattttctctagagtcagtcactatgaaatattcttccctctatcttaacctatcaacgttctgcccttccttcaaagcccagtataaatgccacctcctccatgaagccttccctaattccgccccaaacccccaccttcaacaatatttcaacgcttctgcaatgatgaaaaagaaacatagttgtagtacttagcctagtccagcaagcattcatttttagctcgctcattttttaccatgttttccagtctgtttaacttctgcagtgccttcactacactgccttacataaaccaaatcacaataaagttcatattc

SEQ ID NO: 34196 - DNA, 509 bp, Macaca Mulatta
  misc_feature (1)...(509): n = A,T,C or G
aggccagagccagacacgacaacttgagcctcacaggcttacaggagtcacctgctccatgtggggactggcctgtttcctggacacagacctctttcttgtgccttgttcacttctgttgaacccctcgtactgctgggcatttattatactacttcccgtgataaccttctaacttgtttcttgacaaccacctcatgtggccaataaatggactgggagcgttttagctgccattaannnnnnnnnnnnnnnnnnnnnnnnnnnnnnnnnnnnnnnnnnnnnnnnnnnnnnnnnnnnnnnnnnnnnnnnnnnnnnnnnnnnnnnnnnnnnnnnnnnnnnnnnnnnnnnnnnnnnnnnnnnnnnnnnnnnnnnnnnnnnnnnnnnnnnnnnnnnnnnnnnnnnnnnnnnnnnnnnnnnnnnnnnnnnnnnnnnnnnnnnnnnnnnnnnnnnnnnnnnnnnnnnnnnnnnnnnnnnnnnnnnnnnnnnnnnnnnnnnnnnnnnnnnnn

SEQ ID NO: 34197 - DNA, 650 bp, Macaca Mulatta
gggtacagcaaatgtgccacttgaatatctagtatgaagctggtaatgaaattgccatttctgaggcagatatgaaatatgatctgcttaattgttacggcaactgacctttcaaaagcgcagagtcttattaaaagaggggagaggtagaagcagctaatagtcacatgtctaacctgccccagttaactccttttgttaaattataagccaattatcttttttagatagtatttttgtcacttggataatcacaggaaatatataagaaaagagcttggactaacttaagaagttggacatggaaagcaagaccaagtttccagttggttttaattttccctcttggttattttcggacccaaagggaatgcttaaactgaatttagaattaaaagcattaaatctcttctgtaacttttaaaacccagggaggtttcatccctgccttttccttcataatccaaataaaaatctgtttttaaaaccttttaacttgaaaaaaaaagtttggaagggtccaaatccctaaaagaaaaggtaaccttaaaataggcccggttttttgccaaaattcaagcggttttcgggattttttaaagccatttttaaacgggtaacctaaaattggaatcttaaaatggcctgga

SEQ ID NO: 34198 - DNA, 325 bp, Macaca Mulatta
  misc_feature (1)...(325): n = A,T,C or G
ttcttccccaatggagaggccatctgtacgggttcggatgatgcttcctgccgcttgtttgacctgcgggcggaccaagagctgatctgcttctcccatgagagcatcatctgcggcatcacgtccgtggccttctccctcagtggccgcctgctgttcgctggctacgacgacttcaactgcaatgtctgggactccatgaagtccgagcgtgtggnggcatcctctctggccacgacaacagggtcagctgcctgggagtcacagctgatgggatggctgtggccacaggttcctgggacagcttcctcaaaatctggaactg

SEQ ID NO: 34199 - DNA, 244 bp, Macaca Mulatta
  misc_feature (1)...(244): n = A,T,C or G
agccctgcccattgtcaggttggcagatgggaggaggcagtgcaaagggcacattgaagtctaccacaatggcacatgggggactatctgcgacaacctcttgggcatcaacgctgcccacatggtgtgccagcagctgggctgtggggagggngggaatgtccactttgttgcagggtggggggtggaggcgtgggacacatcctcctggaagatgtgcagtgtcaaagcatggagaccacac

SEQ ID NO: 34200 - DNA, 417 bp, Macaca Mulatta
caagagtttccattaacttgatcccactatgagcagccaaattacacgatcgacttcaaccccaacagaagagagctgatcatattctgtgtcgttaactaaatgaattctctaggctaccccatgtatgtgctggtcactcaaatactgagaccctgttaccatgaatcctactgccataggccggactttataaatagatgtcactttttcaagtgtatttaattatttgactctgaaaaactgtgctgttcgaatgtgtctttgtcctccgtgcagagctctgcaggctggggcaactcaaatccatctgggaaactgaggcacgggcacatctttccagggcgggtgaaagggctcaggcctcatccttctcccaaaagccattttccttcccatcccatgaacctgcagtgt

SEQ ID NO: 34201 - DNA, 146 bp, Macaca Mulatta
  misc_feature (1)...(146): n = A,T,C or G
ccatccacgatgagggaaaaagtggcatttcatttttggggaatccatgangctcccttatttctggctcacagaagcagccatgaggcactataacaagtattatataaaagccattaaatctgaatgcccttggacaagctttt

SEQ ID NO: 34202 - DNA, 194 bp, Macaca Mulatta
aggagcctacagcaaacccaccctctcagccctgcccagccctgtggtggcctcaggacggaacgtgtatctccagtgtgactcacaggtggcatttgatggcttcattctgtgtaaggaaggagaagatgaacacccacaacgtctcaactgccagtcccacgcccgtggctggtcctgggccgtcttctccg

SEQ ID NO: 34203 - DNA, 272 bp, Macaca Mulatta
ccaaatccaaaatgtgttttggttacaggagttgagtatttggaaactaatttgttccactattttattgttgatatttattgtaaacgtggctacaactttctaataaagattgattgttctagaaaagaatataaaatacatggatgatacctgttgtttctcgtttctgttttactctccataattaaacatgtttctattataactgaatattgcataaccatgttgagccaaagtcttgtttttgttaaaataatgttttagctggt

SEQ ID NO: 34204 - DNA, 279 bp, Macaca Mulatta
  misc_feature (1)...(279): n = A,T,C or G
acgccagggagctgtgagggtgtgcagtcacgttcctgctatctggacactttttcctctactgagactcagctggtagatccacaggccagtcctcctgggggctgaagtnnnnnnnnnnnnnnnnnnnnnnnnnnnnnnnnnnnnnnnnnnnnnnnnnnnnnnnnnnnnnnnnnnnnnnnnagtccagtgatgagcaacctgaagaagtggaatcaccaactcaaagtcaggattctactcaagaggaagaggatgagggagcatctgaagctcaag

SEQ ID NO: 34205 - DNA, 1271 bp, Macaca Mulatta
  misc_feature (1)...(1271): n = A,T,C or G
caggtatatttcttaatagctaaccagcacaatggaaaactcagggaaagcaaataaaaaggatacacatgatgggccaccaaaagaagttaaattgcctaccagtgaagcacttctagactatcnnnnnnnnnnnnnnnnnnnnnnnnnnnnnnnnnnnnnnnnnnnnnnnnnnnnnnnnnnnnnnnnnnnnnnnnnnnnnnnnnnnnnnnnnnnnnnnnnnnnnnnnnnnnnnnnnnnnnnnnnnnnnnnnnnnnnnnnnnnnnnnnnnnnnnnnnnnnnnnnnnnnnnnnnnnnnnnnnnnnnnnnnnnnnnnnnnnnnnnnnnnnnnnnnnnnnnnnnnnnnnnnnnnnnnnnnnnnnnnnnnnnnnnnnnnnnnnnnnnnnnnnnnnnnnnnnnnnnnnnnnnnnnnnnnnnnnnnnnnnnnnnnnnnnnnnnnnnnnnnnnnnnnnnnnnnnnnnnnnnnnnnnnnnnnnnnnnnnnnnnnnnnnnnnnnnnnnnnnnnnnnnnnnnnnnnnnnnnnnnnnnnnnnnnnnnnnnnnnnnnnnnnnnnnnnnnnnnnnnnnnnnnnnnnnnnnnnnnnnnnnnnnnnnnnnnnnnnnnnnnnnnnnnnnnnnnnnnnnnnnnnnnnnnnnnnnnnnnnnnnnnnnnnnnnnnnnnnnnnnnnnnnnnnnnnnnnnnnnnnnnnnnnnnnnnnnnnnnnnnnnnnnnnnnnnnnnnnnnnnnnnnnnnnnnnnnnnnnnnnnnnnnnnnnnnnnnnnnnnnnnnnnnnnnnnnnnnnnnnnnnnnnnnnnnnnnnnnnnnnnnnnnnnnnnnnnnnnnnnnnnnnnnnnnnnnnnnnnnnnnnnnnnnnnnnnnnnnnnnnnnnnnnnnnnnnnnnnnnnnnnnnnnnnnnnnnnnnnnnnnnnnnnnnnnnnnnnnnnnnnnnnnnnnnnnnnnnnnnnnnnnnnnnnnnnnnnnnnnnnnnnnnnnnnnnnnnnnnnnnnnnnnnnnnnnnnnnnnnnnnnnnnnnnnnnnnnnnnnnnnnnnnnnnnnnnnnnnnnnnnnnnnnnnnnnnnnnnnnnnnnnnnnnnnnnnnnnnnnnnnnnnnnnnnnnnnnnnnnnnnnnggattatgtaaacttgggccccctgggagtgaagcttatgagtgtggagagcaagaaaatgcccattcattttcaagagaaggaaattccagtcaaactctataaagatgtcaggagcccggaaagtcgcatcacatataagatgatgaagtcttttctctaa

SEQ ID NO: 34206 - DNA, 452 bp, Macaca Mulatta
cgagccggagctaggcctggccctcgccgccctcgccgcgcccggcaccgcggggccacctggtaaccgaatgtgtggttctttgcaggcaccgaccgtcacgagctaacttcctggaagagcttcccgtctattttcaaattctttaccgaagcctcagaagccaagatcagctccctgaagccggctgtgacacgccgctcgcaccgcatcaagcacgaagagctgtaagaggagcaagcgcgactgggggggccgccctggcgcacgcacccgcaccctcctcactgcttgtgtcgtcgagcagactcccagcccctcattagattgttttcttcccagagcacagggtcgtgatatgtacatctaagtagcgttttgcattatttctagatgagtgcaactgtcaaagcaatatgggttcactggtcgtgcttcctgcgggctgagcg

SEQ ID NO: 34207 - DNA, 1578 bp, Macaca Mulatta
  misc_feature (1)...(1578): n = A,T,C or G
atagatatcagtgcagttgtggcatataccatcgctgtaaaggaggatggggagctcaacctaatgaagaaagcagccagcatcacttctgaagtcttcaacaaattcttcaaggaaagagtcatggaaatagttgatgcagatgagnnnnnnnnnnnnnnnnnnnnnnnnnnnnnnnnnnnnnnnnnnnnnnnnnnnnnnnnnnnnnnnnnnnnnnnnnnnnnnnnnnnnnnnnnnnnnnnnnnnnnnnnnnnnnnnnnnnnnnnnnnnnnnnnnnnnnnnnnnnnnnnnnnnnnnnnnnnnnnnnnnnnnnnnnnnnnnnnnnnnnnnnnnnnnnnnnnnnnnnnnnnnnnnnnnnnnnnnnnnnnnnnnnnnnnnnnnnnnnnnnnnnnnnnnnnnnnnnnnnnnnnnnnnnnnnnnnnnnnnnnnnnnnnnnnnnnnnnnnnnnnnnnnnnnnnnnnnnnnnnnnnnnnnnnnnnnnnnnnnnnnnnnnnnnnnnnnnnnnnnnnnnnnnnnnnnnnnnnnnnnnnnnnnnnnnnnnnnnnnnnnnnnnnnnnnnnnnnnnnnnnnnnnnnnnnnnnnnnnnnnnnnnnnnnnnnnnnnnnnnnnnnnnnnnnnnnnnnnnnnnnnnnnnnnnnnnnnnnnnnnnnnnnnnnnnnnnnnnnnnnnnnnnnnnnnnnnnnnnnnnnnnnnnnnnnnnnnnnnnnnnnnnnnnnnnnnnnnnnnnnnnnnnnnnnnnnnnnnnnnnnnnnnnnnnnnnnnnnnnnnnnnnnnnnnnnnnnnnnnnnnnnnnnnnnnnnnnnnnnnnnnnnnnnnnnnnnnnnnnnnnnnnnnnnnnnnnnnnnnnnnnnnnnnnnnnnnnnnnnnnnnnnnnnnnnnnnnnnnnnnnnnnnnnnnnnnnnnnnnnnnnnnnnnnnnnnnnnnnnnnnnnnnnnnnnnnnnnnnnnnnnnnnnnnnnnnnnnnnnnnnnnnnnnnnnnnnnnnnnnnnnnnnnnnnnnnnnnnnnnnnnnnnnnnnnnnnnnnnnnnnnnnnnnnnnnnnnnnnnnnnnnnnnnnnnnnnnnnnnnnnnnnnnnnnnnnnnnnnnnnnnnnnnnnnnnnnnnnnnnnnnnnnnnnnnnnnnnnnnnnnnnnnnnnnnnnnnnnnnnnnnnnnnnnnnnnnnnnnnnnnnnnnnnnnnnnnnnnnnnnnnnnnnnnnnnnnnnnnnnnnnnnnnnnnnnnnnnnnnnnnnnnnnnnnnnnnnnnnnnnnnnnnnnnnnnnnnnnnnnnnnnnnnnnnnnnnnnnnnnnnnnnnnnnnnnnnnnnnnnnnnnnnnnnnnnnnnnnnnnnnnnnnnnnnnnnnnnnnnnnnnnnnnnnnnnnnnnnnnnnnnnnnnnnnnnnnnnnnnnnnnnnnnnnnnnnnnnnnnnnnnnnnnnnnnnnnnnnnnnnnnnnnnnnnnnnnnnnnagggcattgtaaaacaagactcactggtgatcaatctaaaccggagtaatcccaaactgaaagatctatacattcgcccaaatattgcccaaaagaggatgcaaggctcactggaggcccatgtcaatggntt

SEQ ID NO: 34208 - DNA, 252 bp, Macaca Mulatta
gctccccctgccagcacggaggcacctgcgtggatgatgagggccgggcctcccatgcctcctgcctgtgcccccctggcttctcaggcaatttctgcgagatcgtggccaacagctgcacccccaacccatgcgagaacgatggcgtctgcaccgacatcgggggcgacttccgctgccggtgcccggccggcttcatcgacaagacctgcagccgcccggtgaccaactgcgccagcggcccatgccaga

SEQ ID NO: 34209 - DNA, 334 bp, Macaca Mulatta
  misc_feature (1)...(334): n = A,T,C or G
aaaattaattgtggctctgatgaaaccctctcggctttatgatgcttatgaactgaaacatgccttgaagnnnnnnnnnnnnnnnnnnnnnnnnnnnnnnnnnnnnnnnnnnnnnnnnnnnnnnnnnnnnnnnnnnnnnnnnnnnnnnnnnnnnnnnnnnnnnnnnnnnnnnnnnnnnnnnnnnnnnnnnnnnnnnnnnnnnnnnnnnnnnnnnnnnnnnnnnnnnnnnnnnnnnnnnnnnnnnnnnnnnnnnnngagaacttaaatgggggacagatgattgaaaaatttattaccatctttggaacacgaagtgtgtcccatttgagaaagg

SEQ ID NO: 34210 - DNA, 883 bp, Macaca Mulatta
cccccgcggtgctcatcctggcttcctacctctttatcatgcccactgtcttgaggatctcctcctcccagggccgcctcaaagccttctccacatgctcctcccacctgacctctgtcactttatactatggctccattctctacatctacgctctccccagatctagctattcttttgatacggacaaaatagtttctacattttacactgtggtattccccatgttgaatcccatgatctacagcctaaggaataaggatgtgaaagaggctctgaaaaaacttcttccataaatcaagattatctccaccagaggagaaacaaagatgactttagatggagtgttttgtatttcaaacagagttaccattgtgcttttgatgatcaatccccctcttgatatgtgacagttacagacatgtaaaataagaaaattggaaaatttagaagaaaaacttctgaatacacaagaatttgaattgaatttcctatctctcttactaaaaacaaacataaaacttaagcccaaaacctctcctatatcttcataaagtgatgaacagcctacctcattagcctaagatttggctgactgatatatatagaagtgtatctatatagttcctagaactaggaagaattgtgctcaatttttaatactttcctatggttagtaactagacgacattcatcactttccattccctgaacagaatatcttaaacattgttccacatgctttccccacccaagaagaattagcacaaagatccagaggaacccaagaaataactcagtacaaatgagacccagaaagtcatgaccgtgctatgcctcttatacaagtttcttgattaagaaaaaattcattaagatccca

SEQ ID NO: 34211 - DNA, 878 bp, Macaca Mulatta
ggggtttttcgttttattttctttgtttttttcccccctctcctgaatcagcagggatggaaggagggtagggaagttacgaattactccttccagtagtagctctgaagtgtcacatttaatatcagtttttttgaaacatgattctagttaaatgtagaagagagaaaaaagaggaagtgttcacttttttaatacactgatttagaaatttgatgtcttatatcagtagttctgaggtattgatagctttctttatttctgcctttacgttgacagtgttgaagcagggtgaattaactagggcatatgtttttgtttttaagtaagttgtttcatgatgttttctttggaatttctggataagttcaggaaaacattctgcatgttgtatctagtctgatgtacttatccatctcattacaaacaaaaacgcagactgcattttgtagctctgtaatccttgaatacagaagtaaattttcttctttcctgactttgacattgtagctatactgtttccatttttattttttacaaatcctttgggtctaattctgtgagcctacctatagcactggattaaaatgtctgcatcatttctttagttatccagtttacttttaaaactgttgtaaaagtgttaaacaagccccatgacagtttttttgtacatgttaaagaaacttcattggttcagtttttccatgatttattgtataaggaagactgatatagatgttctatgctgtcctggaccatgttaattacacttacgatgtattttggttccacatcacaatgatttgtccccagtgacccttttatcctttctaggcacatttttgttggtgttgttgttgcaattcccccttgct

SEQ ID NO: 34212 - DNA, 294 bp, Macaca Mulatta
ctgtgcagggccgtagcacctcccagcagagtgaagagtccaagaagccagcaccaccccatccgcatctcaagtaagtgctgtgggaatgggaaaaggtataggatcgagctggggtgtaggcagggcttggctgattcagggttagggacttggagacaaaggaagacccaacgaggccttgcctagacttcaaataggtaaaaacaagactagaggatggaatttgctggggaggcccaagaaggtgagagtatagattagacaccaccgtgaccctccatgtatacacat

SEQ ID NO: 34213 - DNA, 222 bp, Macaca Mulatta
tctgtacctttctaaacctctcttccctctgtgttggttttgtgtttaaacagtcatcttctttcaaataatatccacctctcctttttgccatttcacttactgattcataaagtgaattttatttaaagctatgccgcacatgcatgttcaaatggtttccactgattcgatttttcattcatttaatgcaaactcattctggatattgtgcttatttga

SEQ ID NO: 34214 - DNA, 842 bp, Macaca Mulatta
catcattgacaaaagctgccactactgataatggcatccaaatgaagattgctgagttcctgaatcgagaaactaaagccagtgctaatctatcagagactgtagcaaaaccatctcttccccagaaaaatactgctcaagtgggggcttcctcgcagaccagaaaacacaagctggcccctcatgctgcagtgcctacatttatgaagaacacttgtccctccagaccgcgtgaacggcagacacacttcataagacctcggccagaagacagaatggttgctctgaaacccatcgagattgttctgcctccagtctttatgccattttcaagtccccaagggatcagatctcggatgccaactcaacatttgtactgtcattgggttgcccccaagccacttgtgcccacctgccttcccacaccttcactatccagaaaaggggaaaagcctaaagatgacacacgttcctccctactcaggcctcctcggcgatggctttgattgtcttttttttttataggggccaaagagcggttgattttttttttcaaagtctagtatttctctgaaggttccacatctcgacacaaggtattcattcttttggtcacttagggatcttctaagtgtgatattagtttcagagaattcagacaagtgagaaacaataatgtaggagtcagcaaagcagaattcagagacttcaaccgatcagtgctgctctgagaggatccagttagagactcagtgtcagctgtcagaactgatctcactccgtgaactttcaggctggacttaaagctgcccagtttctcctgcggggaaggaacactgcct

SEQ ID NO: 34215 - DNA, 129 bp, Macaca Mulatta
gattctccacagtacagggctggagtttcaacatcaagtcgaggaagccaaggatttagatcagttgattaaaattcactataggtatctgtcaaccatccatgaccggtgtctgctgagagaaaaggt

SEQ ID NO: 34216 - DNA, 470 bp, Macaca Mulatta
gcagagcactgtggtctagactaggctttgggtggttctaactggtggagagaagctctgatgcatgtcatgctggtcaagagctttctttacaatagcaccagttaaggcgaatatatattgtaccacaaaacaaacccaatatccagatgaatatctgagatgttgaataaacttagccattttgtacacgcggtcttaatagttgtagtctgtttttcatacatatattgaattttgttttccttgagagcaatcgtgcagggtttgctgctcccgcatttgcagcaaactaccacacggtggcagcagcctgctgtgcgctctctctgggggtcatgtctcctctagagacagttttcttcctcagcagcaccagcatttatcagtcaaaattgatagacgagaccaaaccctgccaatttaaaatagctaaatggccagaggaggccagtgagtaaaagtccagg

SEQ ID NO: 34217 - DNA, 143 bp, Macaca Mulatta
ggaaccatgcacgccgcctgtgagctgctgggccacctgcaggccgaggtcctagagtgcgtgagcctggtggagctgacctcgcttaagggcagggagaagctggctcctgtacccttcttctctctcctgcagtatgagtg

SEQ ID NO: 34218 - DNA, 385 bp, Macaca Mulatta
catctcatgacaccaacccagggatgcaggacagacacacagacattcaatgagggtaaaagtcctccaaataaagtgttcgggacaataaatactgtacaaaaagagaacgcgtgtgagcgtccagatgagggatttcagcctcgtgactccaaggacatgcaaggagggtggagaagggacccgggatcaggggggctccgggtcatgagagaggcaggactggggttgcagagtcaagggcccggggaagtgggctgagggatcccagccacagtaggttccatatcttgggatggaaggaagctaaggggtccccaggggatttggccagaatagcctggggtgagaggctgggccaggggtcaagggtcagcatcccaga

SEQ ID NO: 34219 - DNA, 3666 bp, Macaca Mulatta
  misc_feature (1)...(3666): n = A,T,C or G
atttgctatgaatattctctataacaaagcaagacaaatttaccagcacttcattgtatctggatgggggagaaagctggaaaatttcttgctaagaagagatggttaanggttaactgccctcacttcagccgtgaattctgcacacctcgcatccggggcaacacctgcttctgctgtgacctctacaactgtggcaanccgggtggagatcactggtgggtactacgaatacatcgatgtcagcagttgccaagatatcatccacctctaccacctgctctggtctgccaccatcctcaacattgttggcctgttcctgggcatcatcactgccgctgtccttggaggctttaaggacatgnnnnnnnnnnnnnnnnnnnnnnnnnnnnnnnnnnnnnnnnnnnnnnnnnnnnnnnnnnnnnnnnnnnnnnnnnnnnnnnnnngaacccaactctcccagcactgaactgctctgttgaaaatacccatcccacagtttcttactatgctcatccccaagtgacatcctacaatacctactaccatagccctcctcacctgccaccatattctgcttatgactttcagncagcattccagtgtctttccatcctcccctccctctggactttctgatgagccccagtctgcctctccctcacccagctacatgtggtcctcaagtgcaccgccccgttactctccaccctactatccaccttttgaaaagccaccaccttacagtccctaaagaggaatgcctgctggctattgagattattgtggcttttgtatttctgcttcagtggaagtgtgtagggttcaaaatttaaagtgtgacttttatgcataaagttttacaatggcctgccaggctagggaaagatagggatgaagcttattcattattagtgcagagcaggggtggctaggctgaacccagcacagaagaagggcagctcacactctctaagcaaggctggggagccagcccagcaagaagcttgtcgtgtttggacctgcattaccctatgctccacctctgtattcagcagaagtgtggttgccgtctgtttcactttatgtaaagaagtgttgtcctcaggcccttggcagattgccaccccagcacctaggttgaagcacccagcttataggtcctatctttccctaccactaaagtcagtccctaaggacaatttcccagctgatggggctacacagtagttccaatacagaccatttctggctaagattttgtttgcttgtgtctggatgttgaaaaaggctgcccatatctcttactcctttcttctctgtattgtaaaaatggctgttgtgatcactcagctcagcttttgttattggtacctcctaaagggaaaagtgcaatattcttgcatcttgagtagtggggaataggatgtattgttccggaaacactgaaatacacagcaacatgtgagatgctttaagtagatcacttaggagacagtggttctactacatgttgcattattacaaaatacatttgctacaggagatataaatcttatggttgtaattaagagtttaaaaatgttataaattaggttcttgggtcgtgatatgaattgttactaatctttgtgactatttaatcttcaaatattgtgcttaaccccagcaatccgcacgtatcctgcaccccaccccaaaagactgtattttaataccactggtcttactggtccttttttctgttgagaccagtcatgacagcattcaagattatgaaagtgttacaatgccgcttcaagtctgcaaaacctcaaacatagccaacttgacaaatacttaagtgttatggtagatttaaaatccatctggcacaccgtggtagattatttgtacagttcttttaattacacatagctttaaaccatncacctgataagtttaaaacacttttgcacccatgccttcacttcagaatgaacaccnttcatgtgatcttatgttaacctgagaattgattnnnnnnnnnnnnnnnnnnnnnnnnnnnnnnnnnnnnnnnnnnnnnnnnnnnnnnnnnnnnnnnnnnnnnnnnnnnnnnnnnnnnnnnnnnnnnnnnnnnnnnnnnnnnnnnnnnnnnnnnnnnnnnnnnnnnnnnnnnnnnnnnnnnnnnnnnnnnnnnnnnnnnnnnnnnnnnnnnnnnnnnnnnnnnnnnnnnnnnnnnnnnnnnnnnnnnnnnnnnnnnnnnnnnnnnnnnnnnnnnnnnnnnnnnnnnnnnnnnnnnnnnnnnnnnnnnnnnnnnnnnnnnnnnnnnnnnnnnnnnnnnnnnnnnnnnnnnnnnnnnnnnnnnnnnnnnnnnnnnnnnnnnnnnnnnnnnnnnnnnnnnnnnnnnnnnnnnnnnnnnnnnnnnnnnnnnnnnnnnnnnnnnnnnnnnnnnnnnnnnnnnnnnnnnnnnnnnnnnnnnnnnnnnnnnnnnnnnnnnnnnnnnnnnnnnnnnnnnnnnnnnnnnnnnnnnnnnnnnnnnnnnnnnnnnnnnnnnnnnnnnnnnnnnnnnnnnnnnnnnnnnnnnnnnnnnnnnnnnnnnnnnnnnnnnnnnnnnnnnnnnnnnnnnnnnnnnnnnnnnnnnnnnnnnnnnnnnnnnnnnnnnnnnnnnnnnnnnnnnnnnnnnnnnnnnnnnnnnnnnnnnnnnnnnnnnnnnnnnnnnnnnnnnnnnnnnnnnnnnnnnnnnnnnnnnnnnnnnnnnnnnnnnnnnnnnnnnnnnnnnnnnnnnnnnnnnnnnnnnnnnnnnnnnnnnnnnnnnnnnnnnnnnnnnnnnnnnnnnnnnnnnnnnnnnnnnnnnnnnnnnnnnnnnnnnnnnnnnnnnnnnnnnnnnnnnnnnnnnnnnnnnnnnnnnnnnnnnnnnnnnnnnnnnnnnnnnnnnnnnnnnnnnnnnnnnnnnnnnnnnnnnnnnnnnnnnnnnnnnnnnnnnnnnnnnnnnnnnnnnnnnnnnnnnnnnnnnnnnnnnnnnnnnnnnnnnnnnnnnnnnnnnnnnnnnnnnnnnnnnnnnnnnnnnnnnnnnnnnnnnnnnnnnnnnnnnnnnnnnnnnnnnnnnnnnnnnnnnnnnnnnnnnnnnnnnnnnnnnnnnnnnnnnnnnnnnnnnnnnnnnnnnnnnnnnnnnnnnnnnnnnnnnnnnnnnnnnnnnnnnnnnnnnnnnnnnnnnnnnnnnnnnnnnnnnnnnnnnnnnnnnnnnnnnnnnnnnnnnnnnnnnnnnnnctacatttatcacattcttaaagtgttaagattttagggctcttttctatgtattttttttactttacaaaataacgtgaaacagtatagattttgtaacacttaatttgagcagcttttattacattgaattatataaagtgcatgttaccttggaaaaattatttgctgctttactcttttgcaaaacatttgctgtaatgaagggatttgtatttccagtatgtatcttgactgcattttgtaatatttactgctttattcctaattctgctttaaagtattgaactgggcatgaaacattaaaatattaatccagaacctgtataaactggatgttgcttaaaatctgtatcactgccatgttgaaaactcagactgcttttgtgatgtttcaaatgaataaaactatcctcc

SEQ ID NO: 34220 - DNA, 960 bp, Macaca Mulatta
gcgaattcggatccggccccgagagccctcattcctgctgtgatcctgccatggatacctggctcctatgctgggcaatttttagtctcttgaaagcaggacacacagaacctgaagtcacccagactcccagccatcaggtcacacagatgggacaggaagtgatcttgcggtgtgtccccatccctaatcacttatacttctattggtacagacaaatcttggggcagaaagtcgagtttctggtttccttctataatggtaagatctcagagaagtctgaaatatttgaagatcgattctcagttggaaggtctgatggagtacatttcactctgaagatcaagtccacaaagctggaggactcagccatgtacttctgtgccagcagtgacggaccagggcttaatcgtcgactacaccttcggttcagggaccaagttaactgttgtagaggacctgaaaaaggtgttcccacccaaggtcgctgtgtttgagccatcagaagcagagatctcccacacccaaaaggccacgctggtgtgcctggccacaggcttctaccccgaccacgtggagctgagctggtgggtgaacgggaaagaggtgcacagtggggtcagcacggacccacagcccctcaaggagcagcccgccctcgaggactccagatactgcctgagcagccgcctgagggtctcggccaccttctggcacaacccccgcaaccacttccgctgccaagtccagttctatgggctctcggaggatgacgagtggaccgaggacagggacaagcccatcacccaaaagatcagcgccgaggtctggggtagagcagactgtggcttcacctcagtgtcctaccagcaaggggtcctgtctgccaccatcctctatgagatcctgctggggaaggccaccctgtatgctgtgctggtcagtgccctcatgttgatg

SEQ ID NO: 34221 - DNA, 92 bp, Macaca Mulatta
gttgagagtgtgccagagaactgaccgagtcagaaaccaagtccttgatggctgctgcggataatgatggagatggaaaaattggagcagag

SEQ ID NO: 34222 - DNA, 148 bp, Macaca Mulatta
  misc_feature (1)...(148): n = A,T,C or G
gccaccatgctgtccctggagtctgagttgcagcggctacaggaggtcagtggacaccagcgaaaacgaattgctgaggtgctgaacgggctgatgaaggatctgagcgagttcagcgtcattgtgggcaacggggagattaagctgn

SEQ ID NO: 34223 - DNA, 704 bp, Macaca Mulatta
gatctgggaaggcaggcatccctgaacgggattagaggtgtcacagaggacccttacatgagaaatagccgaagaggacactcgcaaccttgggctggggaggcagaagagagtcccagagaagctcaccccccctgctgcccagtgcaaaccacttctccatgctgcagaggagaagcacagctcctgccagggcgagcagggtcaagcctcttattccaggagaggggggctctgccccaggccctactacccattgttcccttcctcctcctgcccttgaaccccctccctgtcccagggcctctcccagcccattgctgccaaggtggagggaaggataaagccacttctggctttagcccccaccaggggaaggaaggagtgcatattaactccctcttccagcctgctgacactaactttgtatctgttcaataagcatttcataaataaaggtgtcgaaaaggttaatgcgtcttccttggaggaactaagcgctcggtccagcctcccgtccctgcccacatggggcaccagtccccttcatcttatctccaccctcctcctttcttctttctcttctgtctacctctgttctacctatccatggcttcgggagttcggtcacctggctcctgagaggagaaggtgttgacacggtgctgcctgggtagaaggatgggcagcgcccagccagggca

SEQ ID NO: 34224 - DNA, 2414 bp, Macaca Mulatta
  misc_feature (1)...(2414): n = A,T,C or G
atgccagtactgaggttgatggagagcattacatgactccagaagactttgttcagcgctatcttggactgtataatgatccaaatagtaacccaaagatcgtgcagctcttggcaggagtagttgatcaaaccaaggatgggtnnnnnnnnnnnnnnnnnnnnnnnnnnnnnnnnnnnnnnnnnnnnnnnnnnnnnnnnnnnnnnnnnnnnnnnnnnnnnnnnnnnnnnnnnnnnnnnnnnnnnnnnnnnnnnnnnnnnnnnnnnnnnnnnnnnnnnnnnnnnnnnnnnnnnnnnnnnnnnnnnnnnnnnnnnnnnnnnnnnnnnnnnnnnnnnnnnnnnnnnnnnnnnnnnnnnnnnnnnnnnnnnnnnnnnnnnnnnnnnnnnnnnnnnnnnnnnnnnnnnnnnnnnnnnnnnnnnnnnnnnnnnnnnnnnnnnnnnnnnnnnnnnnnnnnnnnnnnnnnnnnnnnnnnnnnnnnnnnnnnnnnnnnnnnnnnnnnnnnnnnnnnnnnnnnnnnnnnnnnnnnnnnnnnnnnnnnnnnnnnnngcagctggatgaagtatctcacaccaggttagcttctcctacttcaatgcatttaactccttactgaataacatggagcttgttcgtaagatatatagcactctagctggcacaaggaaagatgttgaagtcacaaaggnnnnnnnnnnnnnnnnnnnnnnnnnnnnnnnnnnnnnnnnnnnnnnnnnnnnnnnnnnnnnnnnnnnnnnnnnnnnnnnnnnnnnnnnnnnnnnnnnnnnnnnnnnnnnnnnnnnnnnnnnnnnnnnnnnnnnnnnnnnnnnnnnnnnnnnnnnnnnnnnnnnnnnnnnnnnnnnnagcagtctcctggattaggtaggcttatccggctccagattgccgagtctgcttacagattcactctgggctcagttgctggagnagctgtgggagccactgcagtgtatcctatagatctggtgaagacccgaatgcaaaaccagcgtggctctggctctgttgttggggagctgatgtacaaaaacagctttgactgttttaagaaagtcttgcgttatgagggcttctttggactctaccggggtnnnnnnnnnnnnnnnnnnnnnnnnnnnnnnnnnnnnnnnnnnnnnnnnnnnnnnnnnnnnnnnnnnnnnnnnnnnnnnnnnnnnnnnnnnnnnnnnnnnnnnnnnnnnnnnnnnnnnnnnnnnnnnnnnnnnnnnnnnnnnnnnnnnnnnnnnnnnnnnnnnnnnnnnnnnnnnnnnnnnnnnnnnnnnnnnnnnnnnnnnnnnnnnnnnnnnnnnnnnnnnnnnnnnnnnnnnnnnnnnnnnnnnnnnnnnnnnnnnnnnnnnnnnnnnnnnnnnnnnnnnnnnnnnnnnnnnnnnnnnnnnnnnnnnnnnnnnnnnnnnnnnnnnnnnnnnnnnnnnnnnnnnnnnnnnnnnnnnnnnnnnnnnnnnnnnnnnnnnnnnnnnnnnnnnnnnnnnnnnnnnnnnnnnnnnnnnnnnnnnnnnnnnnnnnnnnnnnnnnnnnnnnnnnnnnnnnnnnnnnnnnnnnnnnnnnnnnnnnnnnnnnnnnnnnnnnnnnnnnnnnnnnnnnnnnnnnnnnnnnnnnnnnnnnnnnnnnnnnnnnnnnnnnnnnnnnnnnnnnnnnnnnnnnnnnnnnnnnnnnnnnnnnnnnnnnnnnnnnnnnnnnnnnnnnnnnnnnnnnnnnnnnnnnnnnnnnnnnnnnnnnnnnnnnnnnnnnnnnnnnnncaaacccgctggttcagaaccaacacctaagtcacgcattgcagaccttcctcctgccaaccctgatcacatcggtggatacagactcgccacagccacgtttgcaggcatcgaaaacaaatttggcctttatctccccaaatttaagtctcctagtgttgctgtggttcagccaaaggcagcagtggcagccactcagtgnnnnnnnnnnnnnnnnnnnnnnnnnnnnnnnnnnnnnnnnnnnnnnnnnnnnnnnnnnnnnnnnnnnnnnnnnnnnnnnnnnnnnnnnnnnnnnnnnnnnnnnnnnnnnnnnnnnnnnnnnnnnnnnnnnnnnnnnnnnnnnnnnnnnnnnnnnnnnnnnnnnnnnnnnnnnnnnnnnnnnnnnnnnnnnnnaagctttagtcttatgtgttgaaatgttttcgtaagccttggcatgaattagtgttctagactctgctttgcacagcttgcacttacagtgattgtacatattgtacatctttgtacagagacatcttggcacctcatcccaacaaatcacatttgtagaaatgtaatgcggttctgagtggcttgaaatgtacagaatgttttgaaagtgttttattaagaatcacacaaaaataaatgtattaaaat

SEQ ID NO: 34225 - DNA, 693 bp, Macaca Mulatta
  misc_feature (1)...(693): n = A,T,C or G
agagcccagngtgtaaaagcagtgtcactgatcaatgcaatagatataggaagatttccacgagttgctcactcggattcttcagaaacttcacctgaaggctgagagcagtttcagnnnnnnnnnnnnnnnnnnacttcaagtggcattttctctagagaaacaagatcttcacctagttcttgaaacaatatcatttattttagaacaggcagtatatcacaatgtgaagccagcagctttgcagcaccaattagagaacattcatcttagacaagacaaagctgaagcatttgtcaatacgtggtcttctatgggtcaagaaacagttgaaaagttcaggcagagaattctggctccctataagctagagacggttggatggcagcttaaccttcagatggctcactctgctcaagcaaaactaaaatctcctcaagctgtgttacaacttggagtgaacaatgaagattcaaagagcctggagaaagtccttgtggaattcagtcacaaggagtagtatgatttctataacaaagctagagactatacaagcacaactggactcccttacatgatgttttcgaagactgttatttcatcacgctcctgccacctcattatgttgcatcgaagatacattgccaggttgatgtaactgaaggattcagtggcttgctttctgtaaattat

SEQ ID NO: 34226 - DNA, 3385 bp, Macaca Mulatta
  misc_feature (1)...(3385): n = A,T,C or G
gtggctgacaaaacagcctatctgatgggcctgaactcttcggacctcctgaaagctttgtgctttcctagagtgaaagttgggaatgagtacgttaccaaaggtcaaactgtggatcaggtncaggttcaccatgctgttaatgctctttcgaaatcagtttatgaaaagttgttcttgtggatggtcactcgcattaaccagcaactggatacgaagcttccaagacaacacttcattggcgttttggacattgcaggctttgaaatctttgagnnnnnnnnnnnnnnnnnnnnnnnnnnnnnnnnnnnnnnnnnnnnnnnnnnnnnnnnnnnnnnnnnnnnnnnnnnnnnnnnnnnnnnnnnnnnnnnnnnnnnnnnnnnnnnnnnnnnnnnnnnnnnnnnnnnnnnnnnnnnnnnnnnnnnnnnnnnnnnnnnnnnnnnnnnnnnnnnnnnnnnnnnnnnnnnnnnnnnnnnnnnnnnnnnnnnnnnnnnnnnnnnnnnnnnnnnnnnnnnnnnnnnnnnnnnnnnnnnnnnnnnnnnnnnnnnnnnnnnnnnnnnnnnnnnnnnnnnnnnnnnnnnnnnnnnnnnnnnnnnnnnnnnnnnnnnnnnnnnnnnnnnnnnnnnnnnnnnnnnnnnnnnnnnnnnnnnnnnnnnnnnnnnnnnnnnnnnnnnnnnnnnnnnnnnnnnnnnnnnnnnnnnnnnnnnnnnnnnnnnnnnnnnnnnnnnnnnnnnnnnnnnnnnnnnnnnnnnnnnnnnnnnnnnnnnnnnnnnnnnnnnnnnnnnnnnnnnnnnnnnnnnnnnnnnnnnnnnnnnnnnnnnnnnnnnnnnnnnnnnnnnnnnnnnnnnnnnnnnnnnnnnnnnnnnnnnnnnnnnnnnnnnnnnnnnnnnnnnnnnnnnnnnnnnnnnnnnnnnnnnnnnnnnnnnnnnnnnnnnnnnnnnnnnnnnnnnnnnnnnnnnnnnnnnnnnnnnnnnnnnnnnnnnnnnnnnnnnnnnnnnnnnnnnnnnnnnnnnnnnnnnnnnnnnnnnngataccgagtgctcaatgccagtgcaatccctgagggacaattcattgacagcaagaaagcctgtgaaaagcttctggcatccatcgatattgaccacactcagtacaaatttggacataccaaggtnnnnnnnnnnnnnnnnnnnnnnnnnnnnnnnnnnnnnnnnnnnnnnnnnnnnnnnnnnnnnnnnnnnnnnnnnnnnnnnnnnnnnnnnnnnnnnnnnnnnnnnnnnnnnnnnnnnnnnnnnnnnnnnnnnnnnnagggagtccatcttctgcatccagtacaacattcgctcattcatgaacgtcaagcactggccctggatgaaactgttcttcaagattaagcccctcctcaagagtgcagagaccgagaaagagatggccaccatgaaggaagaattccagaaaaccaaggatgaactcgccaagtcggaggcaaaaaggaaggagctagaggaaaaactggtgactctggtccaagagaagaatgacctgcagctccaagtccaagctnnnnnnnnnnnnnnnnnnnnnnnnnnnnnnnnnnnnnnnnnnnnnnnnnnnnnnnnnnnnnnnnnnnnnnnnnnnnnnnnnnnnnnnnnnnnnnnnnnnnnnnnnnnnnnnnnnnnnnnnnnnnnnnnnnnnnnnnnnnnnnnnnnnnnnnnnnnnnnnnnnnnnnnnnnnnnnnnnnnnnnnnnnnnnnnnnnnnnnnnnnnnnnnnnnnnnnnnnnnnnnnnnnnnnnnnnnnnnnnnaggttaaaaaccttactgaggaactctccggattagatgaaacaattgcaaagttaaccagggagaagaaggccctccaagaggcccaccagcaggctttggatgacctccaagctgaagaagacaaagtcaattctttgaacaaaaccaagagcaaactggaacagcaagttgaagannnnnnnnnnnnnnnnnnnnnnnnnnnnnnnnnnnnnnnnnnnnnnnnnnnnnnnnnnnnnnnnnnnnnnnnnnnnnnnnnnnnnnnnnnnnnnnnnnnnnnnnnnnnnnnnnnnnnnnnnnnnnnnnnnnnnnnnnnnnnnnnnnnnnnnnnnnnnnnnnnnnnnnnnnnnnnnnnnnnnnnnnnnnnnnnnnnnnnnnnnnnnnnnnnnnnnnnnnnnnnnnnnnnnnnnnncaggctcgaattgaggagctggaggaggagatagaggcagagagggcgacccgcgcgaagacagaaaaacagcgcagcgactatgcccgggagctggaggagctgagcgagcggctggaggaggcgggaggagtcacctccacgcagatagagctcaataagaagcgggaggcagagttcctgaagctgcgcagggacctggaggaggccaccctgcagcacgaagccatggtggccacgctgaggaagaagcacgcggatagtgtggccgagcttggggagcagattgacaacctgcagcgggtcaagcagaagttagagaangagaagagcgagttcaagctggagattgatgacctctccagcagcatggagagtgtgtcgaaatctaannnnnnnnnnnnnnnnnnnnnnnnnnnnnnnnnnnnnnnnnnnnnnnnnnnnnnnnnnnnnnnnnnnnnnnnnnnnnnnnnnnnnnnnnnnnnnnnnnnnnnnnnnnnnnnnnnnnnnnnnnnnnnnnnnnnnnnnnnnnnnnnnnnnnnnnnnnnnnnnnnnnnnnnnnnnnnnnnnnnnnnnnnnnnnnnnnnnnnnnnnnnnnnnnnnnnnnnnnnnnnnnnnnnnnnnnnnnnnnnnnnnnnaggccaagaacgccctggcgcacgccctgcagtcctcccgccacgactgcgacctgctgcgggaacagtatgaggaggagcaggaaggcaaagccgagctgcagagggcgctgtccaaggccaacagtgaggttgctcagtggaggaccaaatacgagacggacgccatccagcgcacagaggagctggaggaggccaannnnnnnnnnnnnnnnnnnnnnnnnnnnnnnnnnnnnnnnnnnnnnnnnnnnnnnnnnnnnnnnnnnnnnnnnnnnnnnnnnnnnnnnnnnnnnnnnnnnnnnnnnnnnnnnnnnnnnnnnnnnnnnnnnnnnnnnnnnnnnnnnnnnnnnnnnnnnnnnnnnnnnnnnnnnnnnnnnnnnaggtgttggcagagtggaagacaaagtgtgaggagagccaagcagagctggaggcatccctgaaggagtcccgctccttgagcactgaactcttcaaactgaaaaatgcctacgaggaagccttagatcaacttgaaactgtgaaacgggaaaataagaacttagag

SEQ ID NO: 34227 - DNA, 1013 bp, Macaca Mulatta
  misc_feature (1)...(1013): n = A,T,C or G
ggtagcctttccagtaaatatatgactcagggaaaagcctcagcgaagaggacccagcaggaatcatgagggaaggaaaatgcagcactctaaatggccactcaggcgttcctattgactcggnnnnnnnnnnnnnnnnnnnnnnnnnnnnnnnnnnnnnnnnnnnnnnnnnnnnnnnnnnnnnnnnnnnnnnnnnnnnnnnnnnnnnnnnnnnnnnnnnnnnnnnnnnnnnnnnnnnnnnnnnnnnnnnnnnnnnnnnnnnnnnnnnnnnnnnnnnnnnnnnnnnnnnnnnnnnnnnnnnnnnnnnnnnnnnnnnnnnnnnnnnnnnnnnnnnnnnnnnnnnnnnnnnnnnnnnnnnnnnnnnnnnnnnnnnnnnnnnnnnnnnnnnnnnnnnnnnnnnnnnnnnnnnnnnnnnnnnnnnnnnnnnnnnnnnnnnnnnnnnnnnnnnnnnnnnnnnnnnnnnnnnnnnnnnnnnnnnnnnnnnnnnnnnnnnnnnnnnnnnnnnnnnnnnnnnnnnnnnnnnnnnnnnnnnnnnnnnnnnnnnnnnnnnnnnnnnnnnnnnnnnnnnnnttgctatttgtagacgcgataacatgaacatgagtacgtatttatgtgggccttcagtggatgagaagtgccactcaggtctctggggtctccctctctaattttaagtaaattgacatataactgctatgcttatcaaaatgaagtaaggaaaacaagtagtcctgtttgccactaaaaacattttcaaaggaaaaataaaatgaaagtactttttactttttatgatactcagaaattaggatgaagaacttttaaaaattcctgaagatcaaagaggttatctctgccagtcacaagtgtggttggtgtcattctgggtctgactggagccctcctggactgtttctttaatttcaaaagccctgcagacatagtacctggtcagaactatgcctcggtttatttatcattttgaaataaaatcaaaatttcaacctgta

SEQ ID NO: 34228 - DNA, 189 bp, Macaca Mulatta
tgggggaaagagcaagaagtccaggtactgatcaagaaagaaagtcaggcaaacaccattgttcttattcatctgattttgaaacgccacagtcttctggccgatcatcactggtcagttcttcacctgcaagtgttaagagaaaaaatcctaaaagacaaacttcagatggccaagtacatcaccaag

SEQ ID NO: 34229 - DNA, 682 bp, Macaca Mulatta
  misc_feature (1)...(682): n = A,T,C or G
gataattttgctcatcgagctgaagttcggaaagccttagccaactgtaaggaatggcaagaacaatccatcattccaaatttggctcacattgataaacaagagacggaaattacttacctcataccatggtccaaattagaaaagcctccaaaggaagnnnnnnnnnnnnnnnnnnnnnnnnnnnnnnnnnnnnnnnnnnnnnnnnnnnnnnnnnnnnnnnnnnnnnnnnnnnnnnnnnnnnnnnnnnnnnnnnnnnnnnnnnnnnnnnnnnnnnnnnnnnnnnnnnnnnnnnnnnnnnnnnnnnnnnnnnnnnnnnnnnnnnnnnnnnnnnnnnnnnnnnnnnnnnnnnnnnnnnnnnnnnnnnnnnnnnnnnnnnnnnnnnnnnnnnnnnngttcgggaaagtgtcaactacctagtatctcagcagaatatgcttctgattcctacatcgttttcaccgttgaaatagttttctactgaaatacaaaacatttcattaactgctctaagatgtgtctgctaatggtgcttaaattctcccaagtggttctcgcttttatttgaaggaggtggtaagttaattagttaatttgctatgcttcctgaatttttgaaagttacatcttctccactgctttaagaaatagttcagttcactttcaccttggcatttcagta

SEQ ID NO: 34230 - DNA, 587 bp, Macaca Mulatta
cacaacagacctaaaggaaaggataaactaaaggttgatgagctgatttcatctgctatattacattcaaaagcagccatggaacgagactctatgtttgcatttgcctacacagacctggccaacatgtatgctgaaggaggccagtatagcaatgctgaggacattttccggaaagctcttcgtctggagaacataaccgatgatcacaaacatcagatccattaccactatggccgctttcaggaatttcaccgtaaatcagaaaatactgccatccatcattatttagaagccttaaaggtcaaagacagatcaccccttcgcaccaaactgacaagtgctctgaagaaattggctaccaagaggctttgtcacaatgctttggatgtgcagagtttaagtgccctaggatttgtttacaaactggaaggagaaaagaggcaagctgctgagtactatgagaaggcacaaaagatagatccagaaaatgcagaattccttactgcgctctgtgatctccgactttccatttaaatacacactctaggaaattagctctaagtttttccctccgttttgggttc

SEQ ID NO: 34231 - DNA, 274 bp, Macaca Mulatta
  misc_feature (1)...(274): n = A,T,C or G
ggtggaatggatgagtgataaattgatgagatgttttgaagacaaaagaaataatccatttcagtttcgccatctctctttatgtcatggtctttctgacttggcccgagtacctagccctanagttgtacttgccagccaacctgacctggaatgtggattttcaagggatctctttattcagggntgtcaggatcctaagaactcaatcattctaacttccagaactactcctggggacttagcacgtttcctaattgataatccttctgaa

SEQ ID NO: 34232 - DNA, 695 bp, Macaca Mulatta
gacacagaactggatcgctagcagcaggccgagctcagattaaccttgacagcggtggacggtggctctccaccccgatctggcactgtccagatcctcatcttggtcttggacgtcaatgacaatgccccggagtttgcacaggcgctctatgaggtgcaggtctcagagaacagcccaataggctccctagttgtcaaggtctctgctagggatttagacactgggccgaatggagagatatcatactccatttcttacagctctcaggagataaacgaaccttttgagctaagcagcctttcaggagaaattcgactaattaaaaaactagattttgagacaatatcctcatatgatctagatatagaggcatctgatggcgggggactttctggaaaatgctctgtctctgttaaggtgctagatgttaacgataacttcccggaactaagtatttcatcacttaccagccctattcccgagaattctccagagacagaagtggccctgtttaggattcgagaccgagactctggggaaaatggaaaaatgatttgctcaattcaggatggtgttccttttaagctaaaaccgactgttgagaatttctacaggctggtaacagaaggggcgctggacagagagaacagagcccagtacaacatcaccatcaccatcacagacttggggac

SEQ ID NO: 34233 - DNA, 1744 bp, Macaca Mulatta
  misc_feature (1)...(1744): n = A,T,C or G
ggtcgttagctctgaacccggtgcagagacccgagatgtttatcatcggtgcccagcccgtgtgcagtcagcttcctgggctctcccctggccagaggaagctgtgccaactgtaccaggagcacatggcctacataggggagggagccaagacaggcatcaaggaatgccagcaccagttccggcagcggcgatggaactgcagcacggtggacaacgtgtctgtctttgggagagtcatgcagatagnagccgtgagaccgccttcacctacgcagtgagcgccgcaggggtggtcaacgccatcagccgggcctgccgcgagggcgaactctccacctgcggctgcagccggaccgcgcggcccaaggacctgccccgggactggctgtggggtggctgtggggacaatgtggattacggctaccgcttcgccaaggagtttgtggatgcccgggagcgagagaagaactttgccaaaggatcggaggagcagggccgggagatcaagaacctccagaacaacgaggctggccgcaggnnnnnnnnnnnnnnnnnnnnnnnnnnnnnnnnnnnnnnnnnnnnnnnnnnnnnnnnnnnnnnnnnnnnnnnnnnnnnnnnnnnnnnnnnnnnnnnnnnnnnnnnnnnnnnnnnnnnnnnnnnnnnnnnnnnnnnnnnnnnnnnnnnnnnnnnnnnnnnnnnnnnnnnnnnnnnnnnnnnnnnnnnnnnnnnnnnnnnnnnnnnnnnnnnnnnnnnnnnnnnnnnnnnnnnnnnnnnnnnnnnnnnnnnnnnnnnnnnnnnnnnnnnnnnnnnnnnnnnnnnnnnnnnnnnnnnnnnnnnnnnnnnnnnnnnnnnnnnnnnnnnnnnnnnnnnnnnnnnnnnnnnnnnnnnnnnnnnnnnnnnnnnnnnnnnnnnnnnnnnnnnnnnnnnnnnnnnnnnnnnnnnnnnnnnnnnnnnnnnnnnnnnnnnnnnnnnnnnnnnnnnnnnnnnnnnnnnnnnnnnnnnnnnnnnnnnnnnnnccccctgcactctgtctcacaaaggtctatattatataaatctatataaatctattttatatttgtataaataaatggatggatgctaaataatgaaaagatgaaaatggaaaggaaaagcttatttaagagatgctggagatctttgaggagtggactttgctggttctctcctcctggtgggtgggaaacggggctttttctctccctctggcgaggactctcaggatgtagggacttggaaatattttctgtctgtccaccatggcctggaggagggaggttgtggttggatggaggagacgagcttgtctggaagtctggagtctttgttggttagatgactgcctgtgaccctggccactaggccaagaggccctacgaaggtggcgggaactcagcttcaacctcgatgtcttcagggtcttgcccagaatgtagattggttccctaagaggcctggtgccctcttactctttcattcccgtgcatatgtgcagcatctacagtttacaggaacggctccttccctaaaatgagaagtccaaggtcctctctggcccagtgaccacaaagagctctgcacctcctggactttgggcctgcctttccagcgagaattcttcatcctccaccgttcactagctcctgcctgaagaggaatgggggccgtttgacctgacacgtcaggaaagccctgagctgaatgtttgcgcctgggctgc

SEQ ID NO: 34234 - DNA, 699 bp, Macaca Mulatta
ggggactgaacttggagcgtcaggcagcacaactcacatttgtgcagagagctacatgccacatgctgttctccagcttgctgtgcatatttgtggccttcagctactctggatccagcgtggcccagaaggttactcaagcccagtcatcagtatccatgccagtagggaaagcagtcaccctgaactgccagtatgaaacaagttcgtggtcatatgaccttttttggtacaagcaacttcccggcaaagagatgattttccttattcgccagggttcttctgaacagaatgcaagaaatggtcgctattctgtcaacttcaagaaagaagctagctccatcgccttaaccatttcagccttacagctagaagactcagcaacatacttctgtgctctccgggaattgcgttggtatctggtgggatgctgggaggggtataatgataaactcatctttggaaaaggaacccgtgtgactgtggaaccaaaaagacaacctcataccaaaccatccgttttcgtcatgaaaaatggaacaaatgttgcttgtctggtgaaggacttctaccccaaggatataagaataaatctcgagtcatccaagaagataacagagtttgatcctgctattgtcgtctctcccagtgggaagtacaatgctgtcaagcttggtcaatatgcagattccaattcag

SEQ ID NO: 34235 - DNA, 932 bp, Macaca Mulatta
  misc_feature (1)...(932): n = A,T,C or G
ccagcatcatcaagtacattgaagattctctcaacttgttcaatatgccttgtcattcaggactgacagtgctaaaagaggaattgatagcccttgaagggagactagggtatgctgaagcacaggtaacaaaatgtgagatgctcacctagaacaatgccatgctgctactgagaagttgctttacagaacaatggccacatgggaagggccccagcagccttnnnnnnnnnnnnnnnnnnnnnnnnnnnnnnnnnnnnnnnnnnnnnnnnnnnnnnnnaaaagtgtggcctttgggctctgccatnnnnnnnnnnnnnnnnnnnnnnnnnnnnnnnnnnnnnnnnnnnnnnnnnnnnnnnnnnncattttgccttttcaataacgtttcatggaactacttgtcaatgtatttgaggcattcagagccaacagcctggnnnnnnnnnnnnnnnnnnnnnnnnnnnnnnnnnnnnnnnnnnnnnnnnnnnnnnnnnnnnnnnnnnnnnnnnnnnnnnnnnnnnnnnnnnnnnnnnnnnnnngtctcctccccactcttggtaggaagtaggaagtagtcctggccaagatactcaagccctggcgatgcagctgccagagaacgttgctactaactcactagtttcttgttgtttgggggaggtcatggccaggccccaacttggcttgaaagaacagcttcagacttttctttctatcatgtggggtgtctatgcctctcatatttccataataaactcttcaactttatttgactgctatattattttggggagaggagctagagannnnnnnnnnnnnnnnnnnnnnnnnnnnnnnnnnnnntattattctaacatacgattttcagatgtagctctttgattcaaatcctaggtggcttaccagcccaagctcccatgcttgcactt

SEQ ID NO: 34236 - DNA, 939 bp, Macaca Mulatta
  misc_feature (1)...(939): n = A,T,C or G
ggctttatgaaaggcagctggattcacctctctgctgctgcaggcagtctgttgcaatatgttgttttggttgaagtctatgaagaaagtctgtctcgcacagatgtgtagctggacaagaggaccttacagaccctctgaaagggtcttggggaccccctgaccaagagtctttggactatattttgagaactactgaccttagcttcttagaggtgagttttgaagaacgattaagagttggctaggtgtaaaaaagaaagaatggcatccacagcaacctggatggaattggagactattactctaagtgaagttacccaggaatggaaaaccaaacatcatatgttctcacttatatgtggatgctaagctatgaggaaaccaaggcataagaatgatacactggtactttggggacttgggggaaagggtggggggtggtgtagggataaaaatatcacacattaaataaatttgtacacctaccttgggacgaaggagtgtcacctaaagtcttcaaaaaattccacccccgcttaaacaaacttattacatatttctcccaaaacaacaaatctggtttctcccatagaacccggatctggaaaatttaaaacatttataaaaattttgccctcagactgttgggtgggcctcaccagccctttacaaatccccaatcctcctttttctggaatagactctcaagggcctggagtatatacactatcttataagttccgtgtaaattattaatacaaaccttcccacaggagnacaattaatgtgagcgaagacagctcacgatactacaaatgaaaaaaagataatcatttaattctgttctgatgtagaactttattaaccatcatacagtctcgcgattaacaaacctatatgtatattataatgtggatatgagtttacataaaaatn

SEQ ID NO: 34237 - DNA, 94 bp, Macaca Mulatta
  misc_feature (1)...(94): n = A,T,C or G
nctatcttggctgacctagtgaaagatttaccactggagttcgacttcctcttttcacagtctcaggcagaagtgatctctgggaagcaggaag

SEQ ID NO: 34238 - DNA, 1729 bp, Macaca Mulatta
  misc_feature (1)...(1729): n = A,T,C or G
gccggaggaggcgggcttcccgccggccaagagatnnnnnnnnnnnnnnnnnnnnnnnnnnnnnnnnnnnnnnnnnnnnnnnnnnnnnnnnnnnnnnnnnnnnnnnnnnnnnnnnnnnnnnnnnnnnnnnnnnnnnnnnnnnnnnnnnnnnnnnnnnnnnnnnnnnnnnnnnnnnnnnnnnnnnnnnnnnnnnnnnnnnnnnnnnnnnnnnnnnnnnnnnnnnnnnnnnnnnnnnnnnnnnnnnnnnnnnnnnnnnnnnnnnnnnnnnnnnnnnnnnnnnnnnnnggggaaactggctctgggaagacaactcagatccctcagtacctgtatgaaggagggatcagccgccagggcatcattgctgtgacccagcctcgtcgagtagctgccatctctcttgctactagagtctcagacgagaagagaactgaactcgggaagctggnnnnnnnnnnnnnnnnnnnnnnnnnnnnnnnnnnnnnnnnnnnnnnnnnnnnnnnnnnnnnnnnnnnnnnnnnnnnnnnnnnnnnnnnnnnnnnnnnnnnnnnnnnnnnnnnnnnnnnnnnnnnnnnnnnnnnnnnnnnnnnnnnnnnnnnnnnnnnnnnnnnnnnnnnnnnnnnnnnnnnnnnnnnnnnnnnnnnnnnnnnnnnnnnnnnnnnnnnnnnnnnnnntgattgtgatgtcagctacgatggatgtggacctgttctctcagtatttcaatggcgcccccgtcctctacctagagggtcggcagcatccgatccaagtgttttacaccaaacaacctcagaatgattacctgcacgccgcgcttgtctcagtcttccagatccaccaggnnncaggaagcccctccttcacaggacatcctggtgttcctcaccgggcaggaggagatcgaagccatgagcaagacctgccgagacattgcaaagcacctcccagacggctgccctgcgttgctggtccttccgctgtacgcctccctgccctatgcgcagcagctgcgannnnnnnnnnnnnnnnnnnnnnnnnnnnnnnnnnnnnnnnnnnnnnnnnnnnnnnnnnnnnnnnnnnnnnnnnnnnnnnnnnnnnnnnnnnnnnnnnnnnnnnnnnnnnnnnnnnnnnnnnnnnnnnnnnnnnnnnnnnnnnnnnnnnnnnnnnnnnnnnnnnnnnnnnnnnnnnnnnnnnnnnnnnnnnnnnnnnnnnnnnnnnnnnnnnnnnnnnnnnnnnnnnnnnnnnnnnnnnnnnnnnnnnnnnnnnnnnnnnnnnnnnnnnnnnnnnnnnnnnnnnnnnnnnnnnnnnnnnnnnnnnnnnnnnnnnnnnnnnnnnnnnnnnnnnnnnnnnnnnnnnnnnnnnnnnnnnnnnnnnnnnnnnnnnnnnnnnnnnnnnnnnnnnnnnnnnnnnnnnnnnnnnnnnnnnnnnnnnnnnnnnnnnnnnnnnnnnnnnnnnnnnnnnnnnnnnnnnnnnnnnnnnnnnnnnnnnnnnnnnnnnnnnnnnnnnnnnnnnnnnnnnnnnnccatcctcatgtcccccaaattccactgtacagaggagatcctgaccattgtctccctgctgtctgtggacagcgtcctccacaaccctccttcccggcgagaggaagtgcaaggggtccgcaagaagttcgtatccagcgagggggatcacatgaccctgctcaatatatatcggaccttcaaaaacctgggtggaaataagg

SEQ ID NO: 34239 - DNA, 352 bp, Macaca Mulatta
aggctggagaggctccttcctgcagccctgctcttgggacacggtgccctccagctctagtaggccaggagttggcggggcaactggccttgttccctggccctggctccccctgctccctggggctgcccgaggtgaaggtgacaggtgggggaggcaggtggagaattgggccagtgagctcatggcaaaggcgcccagctgggcaggggtgggtgctctggcctataaagcccccgaggcgctgtggcctgcagaggcggttatggacggcaccatggaggactccgaagcggtgcagaaggcgacggcgctcatcgagcagcggctggcacaggaggaggagaatgag

SEQ ID NO: 34240 - DNA, 526 bp, Macaca Mulatta
tgatccagaacttaccctgatctgatactgcctcatgtcaatggtgagctgatggacacaagatcaaataaggctttgcttatttcatgctgccaaaaactgtagcaacctctgtgttcttagaggcacactgtctttgcaggccctcctgcctggttttcattctggctgtccctctaaggtgcaaggtgaagaagcttctgggtcaggaagaaaaaaaaaatgcccgcctacagctctggtgaagcttgggcctgctgtcctttctatgctctgaaaagccaacttggctcttacctggcaaatagtcataaagtcccctattctttaccccacccttatcacacgaggctttctcaggaagtggctctgccaggcaggactatgtgggaaagggttttttcttagcacatgaaaaagccccttcccctggactcgtgtttcttattttggagggagaagggaattgcacttcacactgccatcagggtttagttgacctcataatggtgcccagtttctcgac

SEQ ID NO: 34241 - DNA, 2141 bp, Macaca Mulatta
  misc_feature (1)...(2141): n = A,T,C or G
tcctgccagacccaccttttcctggcccaagccagcgcaccccgcgcactctttgcccagtccaaactccgaggctgggcgaggcnnnnnnnnnnnnnnnnnnnnnncggggcagtctctgggtgaacagcggcgtgtccaccggcagcgaaccgagaccagcgagccgaccatgcgactgcaccgacttcgcgcgcggctgagtgcggtggcctgtgggctcctgttgcttctcgtccagggccagggnggccaggactctgccagtcccatccggaccacacacatgggccaggtgctggggagtcttgtccatgtcaggggcgccgataccggggtccataccttcctgggaattccctttgccaagccacctctaggtccgctgcgatttgcaccccctgagccccctgaatcttggaatggtgtgagagatggaaccacccatccggccatgnnnnnnnnnnnnnnnnnnnnnnnnnnnnnnnnnnnnnnnnnnnnnnnnnnnnnnnnnnnnnnnnnnnnnnnnnnnnnnnnnnnnnnnnnnnnnnnnnnnnnnnnnnnnnnnnnnnnnnnnnnnnnnnnnnnnnnnnnnnnnggtgatggtgtggatccacggtggtgcgcttgttattggcatggcttccatgtatgatggttccatgctggccgcctttgaggacgtggtggtggtcaccatccagtaccgcctgggtgtcctgggcttcttcannnctcagcactggagacaagcatgcaactggcaactggggctacctggaccaggtggccgcactacgctgggtccggcagaatatcgcccactttggaggcaaccctgacggaatcaccatttttggcgagtctgcgggtggaacaagtgtnnnnnnnnnnnnnnnnnnnnnnnnnnnnnnnnnnnnnnnnnnnnnnnnnnnnnnnnnnnnnnnnnnnnnnnnnnnnnnnnnnnnnnnnnnnnnnnnnnnnnnnnnnnnnnnnnnnnnnnnnnnnnnnnnnnnnnnnnnnnnnnnnnnnnnnnnnnnnnnnnnnnnnnnnnnnngcggggcaagagtaaagaggagattcttgcaattaacaannnnnnnngatgatccctggtgtagtcgatggggtcttcctgcccaggcatccccaggagctgctggcctctgccgactttcaagctgtccccagcatcattggtatcaacaacgatgaattcggctggatcatccccannnnnnnnnnatctatgacacccagaaggaaatggacagagaggccttccaggctgttctgcagaaaatgttaacgctgnngatgttgccgcctacatttggtgacctgctgatggaagagtacaatggggacaatggggaaccccggagcctccaagcccagttgcaggagatgatggcagactccatgtttgtgatccctgcactccaagtannnnnnnnnnnnnnttcccgggcccctgtgtacttctatgagttctagcatcagcccagctgggtcaagaacatcaggccgccgcacgtgaaggcaaaccatggtgatgagcttccttttgttttcggaaatttcttctggggcaactacanttaaattcactgaggaggaggagcggctaagcaggaagaccatgaagtactgggccaactttgcnnnnnnnnggaaccccaacggcgagggtctgccacactggccgctgttccaccaggaggagcaatacctgcagctgnnnnnnnnnnnnnnnnnnnnnnnnnnnnnnnnnnnnnnnnnnnnnnnnnnnnnnnnnnnnnnnnnnnnnnnnnnnnnnnnnnnnnnnnnnnnnnnnnnnnnnnnnnnnnnnnnnnnnnnnnnnnnnnnnnnnnnnnnnnnnnnnnnnnnnnnnnncaggcgagtgtcagcttgctgtgcccacacacacccactgaggagaaagaagttgattccttcattcacatagccattcattcattattccgtccatccattcagaaagcatttattaagaatttattcaggcatgagggttcatatatgtaatcccagctattggggaggctgcgatgggaggatggcttgaggccagaggtttgagaccaaccagggcaatacagtgagacaccttctcaaaa

SEQ ID NO: 34242 - DNA, 935 bp, Macaca Mulatta
  misc_feature (1)...(935): n = A,T,C or G
gacatctgcatctcctgtgggagcctcaatgtnnnnnnnnnnnnnnnnnnnnnnnnnnnnnnnnnnnnnnnnnnnnnnnnnnnnnnnnnnnnnnnnnnnnnnnnnnnnnnnnnnnnnnnnnnnnnnnnnnnnnnnnnnnnnnnnnnnnnnnnnnnnnnnnnnnnnnnnnnnnnnnnnnnnnnnnnnnnnnnnnnnnnnnnnnnnnnnnnnnnnnnnnnnnnnnnnnnnnnnnnnnnnnnnnnnnnnnnnnnnnnnnnnnnnnnnnnnnnnnnnnnnnnnnnnnnnnnnnnnnnnnnnnnnnnnnnnnnnnnnnnnnnnnnnnnnnnnnnnnnnnnnnnnnnnnnnnnnnnnnnnnnnnnnnnnnnnnnnnnnnnnnnnnnnnnnnnnnnnnnnnnnacctgtccctgctcagaataggaagcccatccgggtgctgtctctcnnnnnnnnnnnnnnnnnnnnnnnnnnnnnnnnnnnnnnnnnnnnnnnnnnnnnnnnnnnnnnnnnnnnnnnnnnnnnnnnnnnnnnnnnnnnnnnnnnnnnnnnnnnnnnnnnnnnnnnnnnnnnnnnnnnnnnnnnnnnnnnnnnnnnnnnnnnnnnnnnnnnnnnnnnnnnnnnnnnnnnnnnnnnnnnnnnnnnnnnnnnnnnnnnnnnnnnnnnnnnnnnnnnnnnnnnnnnnnnnnnnnnnnnnnnnnnngagggcactggccggctcttctttgagttctaccgcctcctgcatgatgcgcggcccaaggagggagatgatcgccccttcttctggctctttgagaatgtggtggccatgggcgttagtgacaagagggacatctcacgatttctcgangtccaaccctgtgatgattgatgccaaagaagtgtcagctgcacacagggcccgctacttatggggtaaccttcccggtatgaacagg

SEQ ID NO: 34243 - DNA, 658 bp, Macaca Mulatta
tgaagatattatcaccaggttactcttgagattttcaagggtgttagaactctcaaccaagatctgaaaaccaagaatgcaaagtgtgaatctcgctggtagattaactgttgacaatgattttctgtatatttgttcaaaaatctcatgtcttctcaaaatatgaaatattgataaatggaagaacatacaggttccctacaccctgctttcagcaggcagtgactgtcacacacctgttaatccatcttgagcaggacagtactatacaaatagaatgcaagctgtaacgtaattttatattttcttatagcaacattgaagtaaaaacaaacagttacagtgttttttgccagctttatagaagtacagttgttacatatgtaatgaatacagtttgatgggttagactatatgtacacacctttgataccatcaccacaatcagggtaataaacatatctgtcatctccacaagtttcctcctgcccctttgttttttgctttttggttgctgttgagtttaagtatagttttctgtggtaagaacacgtaactcaagacctaccctcttaacaaatctttaagtgtacaatacactattgttaattataggcaccatgttgtacaacagatctttaaaccttgcttgtcttgc

SEQ ID NO: 34244 - DNA, 679 bp, Macaca Mulatta
  misc_feature (1)...(679): n = A,T,C or G
tggcagctctgacgtgacctgatggtgctgagccgtcccncncnnactggcnntntnntggctggngnnggggnaaaaacccccaaaaacccccgccgggaaancccnnancggntttntcntntgnngagntaccnttacctctgagtgtcatttcttcaacgggacggagcgggtgcggtcctggagagatactcctaacaggaggagtgtgcgcttcacnnnnnnnnnnnnnnnannnnnnnnnnnnngagcctggttgtggctgnacctntgaagccgagttccccnttgggnnaacnagccagaaggacatcctggagcagaagcgggcccaggtggacaactactgtagacacaactaccgggttggtgagagcttcacagtgcagcggcgagtccaacctaaggtgactgtgtatcncttcaaagacccaggccctgcagcaccacaacctcctggtctgctctgtgagtggtttctatccaggcagcattgaagtcaggtggttccggaacggccaggaagagaaggctggggtggtgtccacaggcctgatccagaatggagactggaccttccagaccctggtgatgctggaaacagttcctcagagtggagaggtttacacctgccaagtggagcacccaagcgtgaccagccctctcacagtggaat

SEQ ID NO: 34245 - DNA, 111 bp, Macaca Mulatta
tcgctctccatcgtctacacaattggacaagcagtcatctcagtaagctccattaatgacctcacagaccacaaccacgatggcactcctgacagccttcctgtgcacgtg

SEQ ID NO: 34246 - DNA, 742 bp, Macaca Mulatta
ttttataaactaataatgaatattaatgatttttcttcagtcacagtgagagcatttgctttgtggttgaaataggtagtgtatgtcagtctttgctttagtctgtttctcatctaagtgtttgaattaaagatgttaaatttttctaattgtggaaaatacattttatgtatcattgacacgttttattaaacatggcttgattgcttctttatagtagtccctgtaagtggacagaaatgtggctatttgatgttaatgcaactatgtcaaggctgcaatcacttttaagagttttttttagcaaatgttcattgatgaagtgcctgggtattttcccctcccatttgcagagctctactacatttccacagtaagcatttatatatataatgttcgcttctgggtttctttatcaccagtaacattgatacctattttgggatataaacatggtgtttttcagaaacaaaatttatttcattaaccttttctattactgtgataatacccaggcactcaatgtttatcctgaaattttttataatacatgtactttgtctagtcttaaagacatttggagcatggccagcaggaaagtcagcttcttactgatgtgtgtggattcttacagaatgttagtacaaatttttataaatatttggtgatccctggggggaaatatcattcttactatggttagaaagtgacttagaatttcagctcagtttctatttactat

SEQ ID NO: 34247 - DNA, 859 bp, Macaca Mulatta
tgggtatgcatacagtggaagagaaacactatattccaatggatccctgctgatccggaagtcaccaagcaggacacaggatccaaccgaaaaatcatgaatcgaatggaggagactaaaggagtaactgtacattcaccttgtaccatggtccacaagtccccaggattgtctctccatttaactattaccgttcaggatataccctcgtaattgtcttgcttcgcgaactctaacccaccggcagagtattcttggacgatgaatgggaagtttctgcaatcaggacaaaagctctctatcccccaaattactacaaagcatagtgggctctatggttgctctgctcgtaactcagccactggcagcgaacgttccacattcaagaggatcacagtcgtgactcgttcaacaataggacgtccataatggcgttagtccaatatagcagccatgatgtcatttctgtatttcgggaagactgacagatagttgctttgattcttccttgaagtatttataatcagctacagtccaaaattgctttttctttgaggagatatatggaaaacattctgacaacgactcttgaatacaagttttgataacttcaagatcataccactggactctctgagaactttcaaaattttaatgaacagtctgataccttcatgaaattcaagacaaagaagaaaaaaacctcagttttattgcactaaataatcaaaacgataatgttttcataatattttatttgagaatgtgttgattctttgaatgttttaatctccagatttgtgaactttctcttttaggctatttatactttacagcaatttggtaaaatatacttttg

SEQ ID NO: 34248 - DNA, 335 bp, Macaca Mulatta
agtggaccccgtggacatggagagcacccgcatggactccaactttggcctggcagggctccctggctcccctaagaagcgggtccgtattgagtgcaagtgtgggactgagtcctgccgcaaatacctcttctagcccttagaagtctgaggccagactgaccgagggggcctgaagctacacgcacctcccccaccgctgccctcctgtcgagaatgactgccagggcctcacctgcctccacctgcccccacctgcacctacctgctctacgatcagggctgtggccgtggtgaggactgactccaggagtcccctttccctgtcccagccc

SEQ ID NO: 34249 - DNA, 375 bp, Macaca Mulatta
ctgacacctgcactccagtgcgccctatgctatttttggcacctgatcaagccactgaacctgctctagctgctggaggttcttgctctgtgaccctggctgtttagacctgcccatgttcatcagcccaggtccccgccctcacccactcctaccttctcctcctgtcgcatcccaggaaggggtctttactccgttctggagactgtccctttatccagctgccttccagtctcccttttctttatttttaacatgatcgaccccttcccttcttcagccctgtaacagcagtataaaaacactcccagccatgttcagacatgctctgcctgtgtagataaggataatgaggcccaggtgatcatggggtgg

SEQ ID NO: 34250 - DNA, 1616 bp, Macaca Mulatta
  misc_feature (1)...(1616): n = A,T,C or G
tgctggtggatgaggggaaggaattataagagctggagaaagaacatcttctggaagggaagacaagacagtatannnnnnnnnnnnnnnnnnnnnnnnnnnnnnnnnnnnnnnnnnnnnnnnnnnnnnnnnnnnnnnnnnnnnnnnnnnnnnnnnnnnnnnnnnnnnnnnnnnnnnnnnnnnnnnnnnnnnnnnnnnnnnnnnnnnnnnnnnnnnnnnnnnnnnnnnnnnnnnnnnnnnnnnnnnnnnnnnnnnnnnnnnnnnnnnnnnnnnnnnnnnnnnnnnnnnnnnnnnnnnnnnnnnnnnnnnnnnnnnnnnnnnnnnnnnnnnnnnnnnnnnnnnnnnnnnnnnnnnnnnnnnnnnnnnnnnnnnnnnnnnnnnnnnnnnnnnnnnnnnnnnnnnnnnnnnnnnnnnnnnnnnnnnnnnnnnnnnnnnnnnnnnnnnnnnnnnnnnnnnnnnnnnnnnnnnnnnnnnnnnnnnnnnnnnnnnnnnnnnnnnnnnnnnnnnnnnnnnnnntcagatctcccctgccctcaggaaggtgtctctggaggggaacccactgccggagcagtcctatcataagctcatggccttggacagcacgnnnnnnnnnnnnnnnnnnnnnnnnnnnnnnnnnnnnnnnnnnnnnnnnnnnnnnnnnnnnnnnnnnnnnnnnnnnnnnnnnnnnnnnnnnnnnnnnnnnnnnnnnnnnnnnnnnnnnnnnnnnnnnnnnnnnnnnnnnnnnnnnnnnnnnnnnnnnnnnnnnnnnnnnnnnnnnnnnnnnnnnnnnnnnnnnnnnnnnnnnnnnnnnnnnnnnnnnnnnnnnnnnnnnnnnnnnnnnnnnnnnnnnnnnnnnnnnnnnnnnnnnnnnnnnnnnnnnnnnnnnnnnnnnnnnnnnnnnnnnnnnnnnnnnnnnnnnnnnnnnnnnnnnnnnnnnnnnnnnnnnnnnnnnnnnnnnnnnnnnnnnnnnnnnnnnnnnnnnnnnnnnnnnnnnnnnnnnnnnnnnnnnnnnnnnnnnnnnnnnnnnnnnnnnnnnnnnnnnnnnnnnnnnnnnnnnnnnnnnnnnnnnnnnnnnnnnnnnnnnnngaattggccaagaaagaggagaagacggggtctgggcagtcacccacacaaggaacccctaagaaagaagatgccacaaaggcaggcaaggggannnnnnnnnnnnnnnnnnnnnnnnnnnnnnnnnnnnnnnnnnnnngatcgggagcagagagaagcgcagcatcctcccggagtccgagnnnnnnnnnnnnnnnnnnnnnnnnnnnnnnnnnnnnnnnnnnnnnnnnnnnnnnnnnnnnnnnnnnnnnnnnnnnnnnnnnnnnnnnnnnnnnnnnnnnnnnnnnnnnnnnnnnnnggaaccgcatcacagaggtgggtctggagggcttcctcgccacagtgcagtatcagatgcagttctccaaggccaagagtgtgtccaagggtccagtggggctgctgtggctgtccctcgctgtgagtccctttcactctctcctgctgaagcagagcttgcccctatcaatcagctgtcacactagacagctgctgcaggcagcttctgtctccccatttccaaggaa

SEQ ID NO: 34251 - DNA, 688 bp, Macaca Mulatta
  misc_feature (1)...(688): n = A,T,C or G
nnnnnnnnnnnnnnnnnnnnnnnnnnnnnnnnnnnnnnnnnnnnnnnnnnnnnnnnnnnnnnnnnnnnnnnnnnnnnnnnnnnnnnnnnnnnnnnnnnnnnnnnnnnnnnnnnnnnnnnnnnnnnnnnnnnnnnnnnnnnnnnnnnnnnnnnnnnnnnnnnnnnnnnnnnnnnnnnnnnnnnnnnnnnnnnnnnnnnnnnnnnnnnnnnnnnnnnnnnnnnnnnnnnnnnnnnnnnnnnnnnnnnnnnnnnnnnnnnnnnnnnnnnnnnnnnnnnnnnnnnnnnnnnnnnnnnnnnnnnnnnnnnnnnnnnnnnnnnnnnnnnnnnnnnnnnnnnnnnnnnnnnnnnnnnnnnnnnnnnnnnnnnnnnnnnnnnnnnnnnnnnnnnnnnnnnacgatnnnnnnnnnnnnnnnnnnnnnnnnnnnnnnnnnnnnnnnnnnnnnnnnnnnnnnnnnnnnnnnnnnnnnnnnnnnnnnnnnnnnnnnnntattacttccaataagtacaatatttattaaacatatcttcagttgttttgttacatagtgtgcaacaaattacaatattctgcagccacaaattatatgcagagtatgaagcaactattaatcagatagtgtatctttccatttataactctatcaggaagaactagcaaatcagatattacataggacatctcactaact

SEQ ID NO: 34252 - DNA, 505 bp, Macaca Mulatta
aggttcttgatagtccacaatgggtgaaccacagcaagtaagtgcacttccaccacgtccaatgcaatatatcaaggaatatacagatgaaaatattcaagaaggcttagctcccaagcctccccctccaataaaagatagttacatgatgtttggcaatcagttccaatgcgatgatcttatcatccgccctttggaaagtcagggcatcgaacggcttcatcctatgcagtttgatcacaaaaaagaactgagaaaacttaatatgtctatccttattaatttcttggaccttttagatattttaataaggagccctgggagtataaaacgagaagagaaactagaagatcttaagctgctttttgtacacgtgcatcatcttataaatgaataccgaccccaccaagcaagagagaccttgagagtcatgatggaggtccagaaacgtcaacggcttgaaacagctgagaggtttcaaaagcacctagaacgagtaattgaa

SEQ ID NO: 34253 - DNA, 669 bp, Macaca Mulatta
  misc_feature (1)...(669): n = A,T,C or G
tctgtgacaggagaacatgacttaaagggttataggcaggctgcatacagcagtcccaggccctgtgagggctttcagactccagctacagcgagcctgcccctnttcttcaagggattgtcttgagggctccaaggtatagctaactagtcactaggatgctgtgctgaaagtcccatgggagaactcaaagcgtgcattatcacagcctgagaggaatgcggaaggaatgttttgtaaaaactatcaacagttttgcacgaacaatgtcttttaaattaaaataaaaccttgaaaaaagccagctttctttcctgagtcttccttggctacaaacactcaggagggggatggagctcagacccttgtcttctgggtagttttgttattactgttgcttttaagaagcaaatgtcacaaggctttcttcaatgggatattcaattgagtacttccagtcaacagtgcttcccaaagtgggtggtgtgaagaaagaggagatacattaagagctgttttatttgaggtactcatttttataacctcatttacttggatttataaaagcagactcacctaataaaatcaacattcattgtatgagtgtgtgaatcattctttcccaggtcagattctgtctatgactacagacttgacgttcttatacag

SEQ ID NO: 34254 - DNA, 184 bp, Macaca Mulatta
tggagataggcagaaggattcatttagcgctgcgcaacagggcgccctctgatgtgaaataacttgtcctggacagcagtcggtcgaatgcaggcaaactcgaaggcctcacagatgactttgaagaactggaatcttaagtacaatcaacgtaggcctcgcctcaatctcaaactaccaaagt

SEQ ID NO: 34255 - DNA, 99 bp, Macaca Mulatta
gatcctgagatggatacacagttcttcaacatcgagactaccacaacactttcatggcccttgagggagttcctgagctgctccagaaaattctcgagg

SEQ ID NO: 34256 - DNA, 632 bp, Macaca Mulatta
  misc_feature (1)...(632): n = A,T,C or G
cttcccctctccccaagccccttgcaaatgaggatgggccggaaggagttcagggcacattgccttgggcgtcccattcaggctcccattcagggcactgtggtctctctgcagatgttctgggcgtgctggtggccgggggctgtgcaggagtcctggcntgggctgtggccacccccatggacgtgatcaagtcgagactgcaggcagatggacagggccagaggcgctaccggggcctcctgcactgtatggtgaccagcgtgcgggaggagggaccccgggtccttttcaaggggctggtgctcaactgctgccgcgccttccctgtcaacatggtggtcttagtcgcctatgaggcggtgctgaggctcacccagggtctgctcacatagctggtccccacgcccagcggcccacccgccggcagctgtgggaggttgtggtggctggaggaggcaaggggtcgtgtggctggggttgggaccccacagggccgttgcccaggaaaacgaggagcctccctgcagtgagtcggccgaggcctgagcttgccctgcccagctactgacctcccgtttgtaggggcccaacggccatcagccagggttgtcctggggtggcaggagcca

SEQ ID NO: 34257 - DNA, 200 bp, Macaca Mulatta
  misc_feature (1)...(200): n = A,T,C or G
cagcctccccgaccacccgatcgcgcagctcctgaggcggctgcagtgcgccgtgtacagcgccctgtaccccgccgtgagcagagcagccgcgccagccccgggctgctnnnnnnnnnnnnnnnnnnnggaagccgacggctgcggccctcgcagagcctccattgcatgctgtccccgcccgagcccagcgcggcccc

SEQ ID NO: 34258 - DNA, 659 bp, Macaca Mulatta
cctttgagaactctcagttccctgactacattacagagaaattctggcgcaacgcacttgtggctggcactgtgccgctggtgctggggcccccacgggccacctacgaggccttcgcaccggccgacgccttcgtacatgtggatgactttggctcagcccaagagctggcggctttcctcactggcatgaatgagagccgataccgacgcttctttgcctggcgtgacaggctgcgcgtgcgactcttcaccgactggcgggagcgcttctgtgccatctgtgaccgctacccgcacctgccccgcaaccaggtctatgaggaccttgagggatggtttcaggcctgagctctgctggccgggggaggtgggtgtgggtggaagggctgggtgtcgaaatcaaaccaccaggcatccggcccttactggcaagcagcgggctaacaggaggctggggacagaggtcaggaagcaggggtggggggtgcaggtaggcactggagcaggcagaggaggtgagggcaggagggaggtaacgggtgcccactgtggcagacgggaggggaaaggctgaggaggaccctctccaccctgaacagatcttgggtgggtcaaggcctcgctggaagagggtaaaaggcagggcccttggggctg

SEQ ID NO: 34259 - DNA, 108 bp, Macaca Mulatta
cggcccggcactgtgtgctcagccacgaggaccaggaagagtcctgcccacagctcagtgtctacaccgcagtgccatccaggctgtgggccgctgcagagcacgggg

SEQ ID NO: 34260 - DNA, 1550 bp, Macaca Mulatta
  misc_feature (1)...(1550): n = A,T,C or G
atggtacagcctgnttccaaacgtcactgtgatctgtgggtctttgagtttcagtgagtttgctgaaatgtcgaagaaatatttccaaacttcaatgttcagtgaaatttttgttcaagtttgaaatggagagagcagctttaaaaggtactaagcctttacaaattggtgagtactggcacatgagatctagagcaggagcaacttctcacacatagtcagtgggaaaagaaagtgctttgaaagttcctccctcacctacacagtagtcgtcatgtcgagacctgccagagagagacacattctcaagtgaatcctggcttcttggaagcgcttgcctagacgagacacagtgcataaaaacaacttttgggggacaggtatgttttcttgcagctgcggttgtaaggtcttggcaagacaagcagtgtggccagaagtttgaacttctgatgaatgtgtaatgcaaaggaccttgtacatttttttgtttcaaggtcctcacaaatgagcacatgaagaggttgctgtgaaactttaagtggccctactgcgcagaagcattcagatgtcacttgatgatctgtaagggaacttgctgatttgggaatgtgctagggaatacacattccttttgacagggtcttgtcactgggtgggtgataacttatacagatgacatgtgcttccttttcttttttcaacctcaatggtattcctacagggaatggataaccattttaactgtattttttgcagcccgtaccttcttgggaatacaattgtctaactttttatttttggtctggctgttgtggtgtgacaaaactccgtacattgctattttgccacactggaacaccttacagatgtggaagatgtgaaatttgtcatcaattatgactaccctaactcctcagaggattatattcatcgaattggaagaactgctcgcagtaccaaaacaggcacagcatacactttctttacacctaataacataaagcaagtgagcgaccttatctctgtgcttcgtgaagctaatcaagcaattaatcccaagttgcttcagttggtcgaagacagaggttcaggtcgttccaggggtagaggaggcatgaaggatgaccgtcgggacagatactctgcgggcaaaaggggtggatttaatacctttagagacagggaaaattatgacagaggttactctagcctgctaaagagagattttggggcaaaaactcagaatggtgtttacagtgctgcaaattacactaatgggagctttggaagtaattttgtgtctgctggtatacagaccagttttaggactggtaatccaacagggacttaccagaatggttatgatagcactcagcaatacggaagtaatgttccaaatatgcacaatggtatgaaccaacaggcatatgcatatcctgctactgcagccgcacctatgattggttatccaatgccaacaggatattctcaataagactttagaagtatatgtaaaatgtctgttttttcataattgctcctttata

SEQ ID NO: 34261 - DNA, 621 bp, Macaca Mulatta
  misc_feature (1)...(621): n = A,T,C or G
gataagtagcattgccttgtcttggatcctcagtgctgccaaaaggccagtataaagaatttatatttgcactgtaaactctgcaaaaatatggtttaaagtgacatgattgcactgaaaagggatagtgcttttgtgaaatttttcaaatttgagtaatagatgcctttttaaggcagtgaatttacacaaatatgggaggggtatatggtgttactgatttttagacctctttgaccatcttctagtttttacttctagtttttacatctaggagaattgtgaataacaccaactgttcttaaactctttaattccatgtcttaaatgccggtatttgctgctgaagacaaaaatgaaaagtaggatgaaaataatagaatggcactgtaagtgtttattattttgtcaaaatgtaatcaaagactacataacccaatgatggaggtaaaaagggcatgtatctcattcagatgtgccttttgtttttgcagactatgatgtctttagctaatgaattgcctattgttatggaaaacagttaatatgccatgtatgtacagntttgtttatattgtatatttaaagatactgctaatctatataaatttaagtgacttg

SEQ ID NO: 34262 - DNA, 235 bp, Macaca Mulatta
agaggtgcagcagtctccccactgcacgattgcccccgtgggaggctccgtcaacatcacctgctccaccagcggggaactgcatgggatctacctgaggcagctcgggccacagccccaaaacatcatttactacgaggacagggtggtgcccactacggacaaacggttccagggccgcattgacttctcggggtcccaggacaacctgactattaccatgcaccacctgcag

SEQ ID NO: 34263 - DNA, 406 bp, Macaca Mulatta
  misc_feature (1)...(406): n = A,T,C or G
aggctctccttcggaaagatgtcggacacggcagtagctgacacccggcgccttaactcgaagccgcaggacctgaccgacgcttacgggccgccaagtaacttcctggagatcgacatctttaatcctcagacggtgggcgtgggacgcgcgcgcttcaccacctatgaggttcgcatgcgggacaaacctacctatcttcaagctgaaggagtcctgcgtacggcggcgctacagtgactttgagtggctgaaaaatgagctggagcgagatagcaangattgtagtaccaccactgcctgggaaagccttgaatttttttttccctttccgaggagatgaagggatctttgaatagtctttcatcgaagaaaggaggcagggcctcgagcagtttattaacaa

SEQ ID NO: 34264 - DNA, 1923 bp, Macaca Mulatta
  misc_feature (1)...(1923): n = A,T,C or G
cttcagcgtcgccgccatctttgttgatgtgtcagctccgcaggggcttggggaaaccgcggctgagggagtgaggcgtcggctgtttctcaccgcggtcttttcctcccactcttgactggtcggaccccgttatggaaaagttggcccctgagccacagctccagcagcctcgttagggtgtggcctgaggcttggagaagtgggatgtaaaacgaagatcaggagcagatttgaagaattacaaagtgaattggtgccagtcagcatgtcagagacagaccacatagcctctgcttcctctgataaaaatgttgggaaaacacgtgaattaaaggaagactcatgcaacttgttttctggcgatgaaagcagcaaattagaaaatgagtccaaactattgtcattaaacactgataaaactttatgtcaacctaatgagcataataatcgaattgaagcccaggaaaattatattccagatcatggtggaggtgaggattcttgtgccaaaacagacataggcctagaaaattctgaacaaacagctgattttcctagtggaaattttgctaaacagatttcaaaaacaaatgaaacagaacagaaagtaacacaaatattagtggaattaaggtcatctacatttccagaatcagctaatgaaaagacttattcagaaagcccctatgatacagactgcaccaagaaatttatttcaaaaataaagagcgtttcagcatcagaggatttgttggaagaaatagaatctgagctcttatctacggagtttgcagaacatcgagtaccaaatggaatgaataatctgagaacatgcgttacttctgtttgaaaagcgtgtgcgagataactatttgcagcaggaacatatcataaaaaagtaagttttttatacctttaggttannnnnnnnnnnnnnnnnncacagggattcgagatagaattctttaaaggaaaatatcattttgtccatttttacttccacattagaatcatgcacatagtagttgcacaataaatgtatagttactgaatgtgtgagcaaatgttgagtttttcaaatatctaatatgttaaatagtataaatgtattaacgtgctagaaatttttatagacaactcaaattcacttttgaaagagggtagaagtataatattgtcagaactaagagaaactcaaagggaaatgacaagtcataaaattccaaaactnnnnnnnnnnnnnnnnnnnnnnnnnnnnnnnnnnnnnnnnnnnnnnnnnnnnnnnnnnnnnnnnnnnnnnnnnnnnnnnnnnnnnnnnnnnnnnnnnnnnnnnnnnnnnnnnnnnnnnnnnnnnnnnnnaaaatttaccatcttaaccatttttatgtatacatttcagtagtgttattatatactcacactgttggacaaccagtctgcagaactttttcactttgcaaatctgaaacactgtattcgttaagcaacaacactatttccactttctcttagcccctggcaaccaccgttatactttctgttgctgagtttgactactcatgatacctcatgtaggtgaaatcatatacttgtcgtttcatgactggcttatttcacttagcctgatgtcctcatttatccatgttgtaacatgccagaatttcatttctttttaaagctgaataatattccattgtatgtatataccacattttgtttattcatccattaatggacatctgggttccttctgctttttgactgttgttaataatgctactgtgaacttgggtttgcaagtnnnnnnnnnnnnnnnnnnnnnnnnnnnnnnnnnnnnnnnnnnnnnnnnnnnnnnnnnnnnnnnnnnnnnnttactgaaatactatattatatgaataaactatatgcttttgtacttga

SEQ ID NO: 34265 - DNA, 150 bp, Macaca Mulatta
taggtactgttccagtcactaattctaaaactcattctctgcagttcaaaaactgatcttgtaccaccgcttccagtgactcgttcttcggatgctcagggttctggggacgctacagttcatcaggttagtaatagtaaggtttgaagg

SEQ ID NO: 34266 - DNA, 1938 bp, Macaca Mulatta
  misc_feature (1)...(1938): n = A,T,C or G
gcgcccatctttcggtccttttcctggggccgttggtctggtaccctaaatctctcagtattcttgcccttggggctgcgtaaggcccactcgggccctcaggggttactggcagcgcagaaggctcgaggtctgttcaagaacttcttcccggagacggggacgaaaatagaactcccagagctcttcgaccgtggcacggcgagttttccccaaaccatttactgtggcttcgaccccacggcagactcacttcatgtgggccatcttcttgcgctgctgggcctgtttcatttgcagcgagcgggccacaacgtgatcgcgctggtgggaggcgccacggcgcgcctgggagacccgagcggccgtaccaaggaacgcgaggcgctggagacagagcgcgtgcgagccaacgcgcgcgccctgcgcctagggcttgaggctctggcggctaatcaccagcagcttttcactgatgggcgctcctggggcagcttcactgtgctggacaactcggcctggtaccagaagcagcacctggtggactttctggcggcagttgggggtcacttccgcatggggannnnnnnnnnnnnnnnnnnnnnnnnnnnnnnnnnnnnnnnnnnnnnnnnnnnnnnnnnnnnnnnnnnnnnnnnnnnnnnnnnnnnnnnnnnnnnnnnnnnnnnnnnnnnnnnnnnnnnnnnnnnnnnnnnnnnnnnnnnnnnnnnnnnnnnnnnnnnnnnnnnnnnnnnnnnnnnnnnnnnnnnnnnnnngttgactggagaagatgtatttggaatcaccgttcctctaattacaagtacaactggagcaaagctgggaaagtctgctggcaacgctgtttggctaaacagagataagacatctccatttgaattgtatcaattcnnnnnnnnnnnnnnnnnnnnnnnnnnnaaggtacctgaagctgttcactttcctgccccttccagagattgatcatatcatgcagctgcatgtcaaagagccagaaaggcggggtgctcagaaacgactggcagcagaagtaacaaagcttgttcatggacgagnnnnnnnnnnnnnnnnnnnnnnnnnnnnnnnnnnnnnnnnnnnnnnnnnnnnnnnnnnnnnnnnnnnnnnnnnnnnnnnnnnnnnnnnnnnnnnnnnnnnnnnnnnnnnnnnnnnnnnnnnnnnnnnnnnnnnnnnnnnnnnnnnnnnnnnnnnnnnnnnnnnnnnnnnnnnnnnnnnnnnnnnnnnnnnnnnnnnnnnnnnnnnnnnnnnnnnnnnnnnnnnnnnnnnnnnnnnnnnnnnnnnnnnnnnnnnnnnnnnnnnnnnnnnnnnnnnnnnnnnnnnnnnnnnnnnnnnnnnnnnnnnnnnnnnnnnnnnnnnnnnnnnnnnnnnnnnnnnnnnnnnnnnnnnnnnnnnnnnnnnnnnnnnnnnnnnnnnnnnnnnnnnnnnnnnnnnnnnnnnnnnnnnnnnnnnnnnnnnnnnnnnnnnnnnnnnnnnnnnnnnnnnnnnnnnnnnnnnnnnnnnnnnnnnnnnnnnnnnnnnnnnnnnnnnnnnnnnnnnnnnnnnnnnnnnnnnnnnnnnnnnnnnnnnnnnnnnnnnnnnnnnnnnnnnnnnnnnnnnnnnnnnnnnnnnnnnnnnnnnnnnnnnnnnnnnnnnnnnnnnnnnnnnnnnnnnnnnnnnnnnnnnnnnnnnnnnnnnnnnnnnnnnnnnnnnnnnnnnnnnnnnnnnnnnnnnnnnnnnnnnnnnnnnnnnnnnnnnnnnnnnnnnnnnnnnnnnnnnnnnnnnnnnnngcctggtttaagtgctccactttagagagatgtaccttaattactactgtatttgcaaattaagggaaatttaggtcatcatttgattttctaaaacctaaaaggaactggccatcattaccaagtctttctagat

SEQ ID NO: 34267 - DNA, 933 bp, Macaca Mulatta
  misc_feature (1)...(933): n = A,T,C or G
tacaggaacgcacagggctgtgtagcatgataccagacccaggagatcagtaattacaaattaagggttaaatcagagattattcaacagagagggagaaaggaggagacggagagagggcctgttgtgttccagccattctggtattcctttatgtatctaatttcattcaaacctcacaacagtcttctgaggaccttatataattactcccattttgcagatgaagtaactgaggcttagaaaggtaatagcaccagggaacaatttctccgtgtgagaattaggactctgttactggtcttctcggttcatttcctgaggtggatttactgagagaaggtgaaataaagccatatttagtataccagagagggtagattttaagaatggtctcagtgttaatattgagaagaactcctgtcagctcagaaaaaatgtgaagtctactttactactcctgtaatactaaaccgttgtttctaaatatttatttattctaacaaaaagcagttactacaatggatgacacatttaatgaacaattttattttttttctataactgtgcctgttgaatgtcaatcatatttaaagggaatgacttttaagtaaaaccttttttcttgctactgaaaaaaatggaattgttttgggtggtaaagagttaaggaatagggaaggctggtcacataagcaaccctcaaaggccacatgtnnnnnnnnnnnnnnnnnnnagaggccagccccgctaaggtggccagagtgggctccaagcacaaattaccattgctatagatgggactgtgtccccgcaaaattcatgtgttggagccctaaccctcaatgtgatggtatttgagatggggactttggtaagggaagtttagatgaagtcacgagtgtgggatcctcatgatgggatgagtcccct

SEQ ID NO: 34268 - DNA, 153 bp, Macaca Mulatta
gggacccaccaccctctctcaggcaccttcaggatctggtactgttccggagtggcccgttgcagacactgaaccaccagccagctgcatttgttgtcctggatgtcagtgccaactttgccggtcacactggggtccccaaagaggtcaagg

SEQ ID NO: 34269 - DNA, 683 bp, Macaca Mulatta
agaggaagcgagtgccccgtgggccctgcaggtgtcacgccaactgccgcggggacagcttcgccacctatttccgccgggtgctgaagcaggttcaccagggcctcagcctttcccgggaggccgtgagtgtcatggattctttggtccatgacatactggaccgcatcgccaccgaggctggtcgcctggcccgctccaccaagcgccagaccatcaccgcctgggagacccggatcgctgtgcgcctgctgctgccgggggagatgggcaaactggcagagtccgaaggcacgaaggctgtcctcaggtacaccaggagcaagtgcattccctcaggagcccccgagcaccacgggaacccaaagggtcttttcagagccacccaacatggcctgaaagaccagtgccttgccaaggaggggaccccaccggaggttggggtgggtggtgcccttccgacttggggggcatgtggtgtgtggcatcctgcgatttttcaagcattttcccctcaatactaaacattgtcaactccaatatatctgtagtgcagtttgctccaaggaaaagtagtgggtgtttccgtgatcgcgtttcatttcctcagtttcctaagtggtcgtttttattagttatgtttctagattaccttaatggtgatattattattgcactgatct

SEQ ID NO: 34270 - DNA, 180 bp, Macaca Mulatta
aaaagccaaaccgagggcctcgaacctatgagtcacccagggggctcctgaccaacttaaacctgcatctgtgggggcaggacccaggccccagcatcctccgagtgagactgcaggtgtgggaggtgaggtgatgcgggagtcgcgtgggccgggggctcaccacccaagtaaagccag

SEQ ID NO: 34271 - DNA, 741 bp, Macaca Mulatta
  misc_feature (1)...(741): n = A,T,C or G
gggatgaannnnnnnnnnnnnnnnnnnnnnnnnnnnnnnnnnnnnnnnnnatnnnnnnnnnnnnnnnnnnnnnnnnnnnngtnnnnnnnnnnnnnnnnnnnnnnnnnnnntggggttcaggtnnnnnnnnnnnnnnnnnnnnnnnnngnnnnnnnnnnnnnnnnatgcaccactaaannnnnnnnnnnnnnnnnnnnnnnnngnnnnnnnnnnnnnnnnnnnnnnnnnaccagactggtcttgaactcctgaactcaggtgatccacccgcttcggcctgtcacagtgctgggattacaagcgtgagccaccacgcctggccttcttaatgtttttatggtgaagagaaatgcatctttaaaaaatccttctttttacttttgagagtctatgcaaattttactggacatccttacatatgcttcatactagttttgctctcctacccaggggagcactcttttttttcagactttatttttgcaacaaatctttcctgtttgtccggccggtggtaagtaatgaaacgtcccataacccttttgaatgaaaaatgtactttactgctctgttaaaaaatttagggccttaagcctgttggtcgaacggtttnnnnnnnnnnnnnnnnnnctttttccgaatttcccgggaaccaataaatatcttccctgtaaattctttcccctttcctaaggggtctttatataccctttgtggatacgaaattttccttttgtaaat

SEQ ID NO: 34272 - DNA, 156 bp, Macaca Mulatta
acgcagcaagccgtacacgcggcggcccaagcccccctactcgtacatcgcgctcatcgccatggccatccgcgactcggcgggcgggcgcttgacgctggcgtatatcaacgagtacctcatgggcaagttccccttttttccgcggtagctacc

SEQ ID NO: 34273 - DNA, 270 bp, Macaca Mulatta
  misc_feature (1)...(270): n = A,T,C or G
tctatgtatatgcgtcagctcagcgatctggaatctactgtttctcagctacgttctgaattaagggaggccaaaaggatgtatgaagacaannnnnnnnnnnnnnnnnnnnnnnnnnnnnnnnnnnnnnnnnnnnnnnnnnnnnnnnnnnnnnnnnnnnnnnnnnnnnnnnnnnnnnnnnnnnnnnnnnnnnnnnnnnnnnnnnnnnngaagcaacaactcgttgagggactccactgaaggaagcaaatcaagtgaaactcttagtag

SEQ ID NO: 34274 - DNA, 149 bp, Macaca Mulatta
  misc_feature (1)...(149): n = A,T,C or G
ggccaacatcaaagacctgtcccagatcctgaaaaagatgccgcagtaccagaaggagctgaataagnagtattctacgcacctgcatctagcagatgattgcatgaagcacttcaagggctcggtggagaagctgtgtagtgtggagc

SEQ ID NO: 34275 - DNA, 930 bp, Macaca Mulatta
  misc_feature (1)...(930): n = A,T,C or G
gtatgatctaaaaaccgaaacagctcctcttgttgttgtggtttctaccacgggcaccggagacccacccgacacagcccgcaagtttgttaaggaaatacagaaccaaacactgccggttgatttctttgctcacctgcggtatgggttactgggtnnnnnnnnnnnnnnnnnnnnnnnnnnnnnnnnnnnnnnnnnnnnnnnnnnnnnnnnnnnnnnnnnnnnnnnnnnnnnnnnnnnnnnnnnnnnnnnnnnnnnnnnnnnnnnnnnnnnnnnnnnnnnnnnnnnnnnnnnnnnnnnnnnnnnnnnnnnnnnnnnnnnnnnnnnnnnnnnnnnnnnnnnnnnnnnnnnnnnnnnnnnnnnnnnnnnnnnnnnnnnnnnnnnnnnnnnnnnnnnnnnnnnnnnnnnnnnnnnnnnnnnnnnnnnnnnnnnnnnnnnnnnnnnnnnnnnnnnnnnnnnnnnnnnnnnnnnnnnnnnnnnnnnnnnnnnnnnnnnnnnnnnnnnnnnnnnnnnnnnnnnnnnnnnnnnnnnnnnnnnnnnnnnnnnnnnnnnnnnnnnnnnnnnnnnnnnnnnnnnnnnnnnnnnnnnnnnnnnnnnnnnnnnnnnnnnnnnnnnnnnnnnnnnnnnnnnnnnnnnnnnnnnnnnnnnnnnnnnnnnnnnnnnnnnnnnnnnnnnnnnnnnnnnnnnnnnnnnnnnnnnnnnnnnnnnnnnnnnnnnnnnnnnnnnnnnnnnnnnnnnnnnnnnnnnnnnnnnnnnnnnnnnnnnnnnnnnnnnnnnnnacagatttttcctatcagcctggagatgccttcagcgtaatctgtcctaacagtgattctgaagtacaaagcctactccaaagattacagcttgaagataaaagagagcactatgtccttttgaaaataaagacagacacaaagaagaaag

SEQ ID NO: 34276 - DNA, 464 bp, Macaca Mulatta
  misc_feature (1)...(464): n = A,T,C or G
ggcgcccagtgcccgcttcgtaggacaccacttcacantcatttnccgctnntnttcagtggctctttagagagaacttcttcctcccttgccaagaatgggctagaatgaaaaggagatgccttgaggttcgtgcacaacatagtttctgtgaactctactttccaaatcaaaatcttttggtgaaacagactgtctgtcgcttgattttagaaaatccataaaaacgcatatttctgaaataatgctgattccttagataagaaagtggatttgatccccagtctcattgcttagtagaataaatcctgcaccagcaacaacacttgtaaatttgtgaaaatgaactttctctttccttaaaaaagaaattttttaatccatcacacttttcttccctaccctttagtttttgttaaatgataaaaatgagccagttatcaaagaagaactagttcttactt

SEQ ID NO: 34277 - DNA, 799 bp, Macaca Mulatta
  misc_feature (1)...(799): n = A,T,C or G
ggggatacttgggctatcagtccgcgaggagcaggttggctttttggagcaaaggtcacaaatgagtttgttcatatcaacaacttaaaactcatctgcagagcacatcaactagtgcacgaaggctataaatttatgtttgatgagaagctggtgacagtatggtctgctcctaattactgctatcgttgtggaaatattgcttcgatcatggtcttcaaagatgtaaatacaagagaaccaaagttattccgggcagttccagattcagaacgtgttattcctcccagaacgacaacgccgtatttcctttgaggccttcgcccatcctgctgacccatttttctgccctcttcttaccccaattttcttgtattaccttctacaatatactttttattgagcactttgctgctgaaatgctgcctcttnnnnnnnnnnnnnnnnnnnnnttttaaattatctaaatttattgtttgttgtggtgtctatagcaaagtttttctatcaatttttccgccatcccatccccaccctggtctcatttgagaagacttgagaaatgtctttctactcacactgctgcatgtaactcttgcttttttacgggcctgggaaacaggatgtggtttcccttttttaaaacccaattgaacgattacacccaaatactccccccttttttgttacaatccaccccttttgtttttaatttgggaaagttttaaaaaaatttcccccagcaaagtttgttttttaaggggggcaacaaagggaccccccaaaatgccctcaaaat

SEQ ID NO: 34278 - DNA, 828 bp, Macaca Mulatta
cttctggccattactacacaattgtcacattatcagtgacttttctgtttggctacaacacgggcctctatctgctgacggccattagtgtggagaggtgcctgtcagtcctttaccccatctggtaccgatgccatcgccccaagtaccagtcggcgttggtctgtgcccttctgtgggctctttcttgcttggtgaccaccatggagtatgtcatgtgcatcgacagagaagaagagagtcactctcgaagtgactgccgggcagtcatcatctttatagccgtcctgagcttcctggtcttcacacctctcatgctggtgtccagcacgatcttggtcatgaagatccggaagaacacgtgggcttcccattcctccaagctgtacatcgtcatcatggtcaccatcattatattcctcatcttcgccatgcccatgagactcctttacctgctgtactatgagtattggtcaacctttgggaacctacaccacatttccctgctcttttccacaatcaacagtagcgccaaccctttcatttacttctttgtgggaagcagtaagaagaaacgattcaaggagtccttaaaagttgttctgaccagggctttcaaagatgaaatgcaacctcggcgccaggaagacaattgtaatacggtcacagttgagactgttgtctaagaactgagagggaagttgtggataacaatggtggaacacaggtcatttttagcttgtgcttggaatataacttaagtatctcctaaatgtgatacagagggacatctcatctaatatgcatgagatactaattaatgatgaa

SEQ ID NO: 34279 - DNA, 1817 bp, Macaca Mulatta
catggcagtgcctacagtctcgagtctgccagtgacagaccctccttgcgtcctcaagctccagccagagagccaagtgacagcagcccttgttttgttttatggctagtcttatctggcctggttatttccttgcggggaggagagggtttgctaatctgctcccagcccaacctattaccaccccacctcgctgggacctactgctcgggaggcagcagacagggagccaccagcagtggcttcctggccctgtgctgggggtggggggaagctgggggcacatgtggcccttgccttctgagcagctcccagtgccagggctttgagactttcccacatgataaaagaaaagggaggtacagaagttccaattccctttttattttgctggttggtatctgtaaatgtttaataaatatctgagcatgtatctatcaacgccaagaatttcaaagtctccttcaacaatatgaggcttttaggatgtttatattccttcatccctcttgtttcccaggttttgcaggggaaaaaaagtctggaattatagatgcagcttattattaaatttgttcttgcataatgtctcttctattacaaaaattctttctttataaactgcattagaggtttgcaacaaccacatcatttccattaacttagatttaagttttactggattcatagctcaccgttattgcttgtatattacatcttttcctatctttatattctggtttaatttttgtttgactgagtgacttcttctactaatggtttcaaaaatggaataaggtcacgaggatttctgaatcctcacctgtccaaattatcattcacatttttcagaagaggaaactggctcagaaagcacaagtgagttccccaagatcacagaaaataaatgatggagccaaggttggatgtgaagaccttgtgggaactgaaggttttataatttgaggagccctctttaagaaaaatatacaaaattataaacataaaattaggtacaaagtacctatatttacctataatgagaaaagaatgcaaaacagatacatcacacaatcccccaaaaatgcataatacttttattaactgccctgcataacctctaaaacacattttctcccccgatgattagaagaattttccacagactagcttctggctctgtacatttcaagcctggtttctcctgtttcttctctactgaccatatacttcctgggctgggtgccatgagacacattcatatcacgatatggcaacttaatatcaccatgccaagtgagttgggcagtgggtagaattcctagaagctattctctacacagagattactagcaatgatttatctatacacagagaaccacataaatattaatacatcctgtgtttcagaggaccacataaacatgtcctaatgaacccaactcaaatcagttccccactcagcttccccttggtcagatcccagaagtgcccatggccactccaattatcccatataaaggaaaattgaaacacaaacgaagctggagtgggaagaaaatagtaatttctactatggttaaagtatcttacctttgcaaattttacaaaaatatgacaacatgaacacaccaccgaggccctcccgtggatctggggagactcctggacgctcaagctgtatccatatcacggtgagtccacctctttgttgagccaagatctgaaggaaaagacgaggtccttgtgcctaaagtcttccaaactggccatggtgaagagactcaggagttactcaagacagaaatgggtcgaga

SEQ ID NO: 34280 - DNA, 670 bp, Macaca Mulatta
cttttctcaaattaacctaaaatctaagtatccgagtggagaattttgaggcctacttcaagaagcagcaagccgactccaactgtgggttcgcagaggaatatgaagatctgaagctggttggaattagtcaacctaaatatgcagcaggactggctgagaatagaggaaagaatcgctataataatgttctgccctatgatatttcccgtgtcaaactttcggtccagacccattcaacggacgactacatcaatgccaactacatgcctggctaccactccaagaaagattttattgccacacaaggacctttaccgaacactttgaaagatttttggcgtatggtttgggagaaaaatgtatatgccatcattatgttgaccaaatgtgttgaacagggaagaaccaaatgtgaggagtattggccctccaagcaggctcaggactatggagacataactgtggcaatgacatcagaaattgttctcccggaatggaccatcagagatttcacagtgaaaaatgtaagtaagaagtcaggatcagtcgagctcatgtaattactatatgtcaattcgggggtgatatgtttaaggttgatattaactcatatgttttcctatgcagtgagaaatgttttgcttccttcctttcagaacagaacaat

SEQ ID NO: 34281 - DNA, 1523 bp, Macaca Mulatta
  misc_feature (1)...(1523): n = A,T,C or G
atgtacagatggctggttaggattctcggcaccattttccgtttctgcgaccggtcggtgccccctgcccgggccctcctgaagaggcggcgctcagacannnnnnnnnnnnnnnnnnnnnnnnnnnnnnnnnnnnnnnnnnnnnnnnnnnnnnnnnnnnnnnnnnnnnnnnnnnnnnnnnnnnnnnnnnnnnnnnnnnnnnnnnnnnnnnnnnnnnnnnnnnnnnnnnnnnnnnnnnnnnnnnnnnnnnnnnnnnnnnnnnnnnnnnnnnnnnnnnnnnnnnnnnnnnnnnnnnnnnnnnnnnnnnnnnnnnnnnnnnnnnnnnnnnnnnnnnnnnnnnnnnnnnnnnnnnnnnnnnnnnnnnnnnnnnnnnnnnnnnnnnnnnnnnnnnnnnnnnnnnnnnnnnnnnnnnnnnnnnnnnnnnnnnnnnnnnnnnnnnnnnnnnnnnnnnnnnnnnnnnnnnnnnnnnnnnnnnnnnnnnnnnnnnnnnnnnnnnnnnnnnnnnnnnnnnnnnnnnnnnnnnnnnnnnnnnnnnnnnnnnnnnnnnnnnnnnnnnnnnnnnnnnnnnnnnnnnnnnnnnnnnnnnnnnnnnnnnnnnnnnnnnnnnnnnnnnnngggtgttcaaaaagaggaaagggagaagtaccgaaggttattggaacgacttaaagaaagtggtcatggaaactctgtctgtcctgtaacttcaggttatcacagnnnnnnnnnnnnnnnnnnnnnnnnnnnnnnnnnnnnnnnnnnnnnnnnnnnnnnnnnnnnnnnnnnnnnnnnnnnnnnnnnnnnnnnnnnnnnnnnnnnnnnnnnnnnnnnnnnnnnnnnnnnnnnnnnnnnnnnnnnnnnnnnnnnnnnnnnnnnnnnnnnnnnnnnnnnnnnnnnnnnnnnnnnnnnnnnnnnnnnnnnnnnnnnnnnnnnnnnnnnnnnnnnnnnnnnnnnnnnnnnnnnnnnnnnnnnnnnnnnnnnnnnnnnnnnnnnnnnnnnnnnnnnnnnnnnnnnnnnnnnnnnnnnnnnnnnnnnnnnnnnnnnnnnnnnnnnnnnnnnnnnnnnnnnnnnnnnnnnnnnnnnnnnnnnnnnnnnnnnnnnnnnnnaggacatggaaaaggaaatcagtaatgccctaggccatggcccacaggatgaaatcctaagttgtgctttcaaattgcgaattactcgaggagatattcagacattaaagaactatcactggctcaatgatgaagtnnnnnnnnnnnnnnnnnnnnnnnnnnnnnnnnnnnnnnnnnnnnnnnnnnnnnnnnnnnnnnnnnnnnnnnnnnnnnnnnnnnnnnnnnnnnnnnnnnnnnnnnnnnnnnnnnnnnnnnnnnnnnnnnnnnnnnnnnnnnnnnnnnnnnnnnnnnnnnnnnnnnnnnnnnnnnnnnnnnnnnnnnnnnnnnnnnnnnnnnnggtgatagacttaagaaaaaagtgtcttaaatactnggatcctatgggacaaaagggccacaggatctgtgagattctcc

SEQ ID NO: 34282 - DNA, 284 bp, Macaca Mulatta
gcatcagttttttaaaaaatggggaatgtactattaaatagggatcttcctggtctactatcattaggacaagtaacaagctaaaaatgaagtctcttgaatctttccatccccaacttgcccacaaagctgtgggtggtttctggtacttaaagcactaatgttatgttgctgctctgcaaacagcccagtagtcccacttccttccacaccaaaaagtgttaaatcaagtatgcaaatggagtccttacaactggagtttatgttgtcttgccctttttttt

SEQ ID NO: 34283 - DNA, 843 bp, Macaca Mulatta
  misc_feature (1)...(843): n = A,T,C or G
aggttttctcactggagtacatagaggaactttatttacagtactttgatttggcaggttttcttctacttgtgctctgtctggagctgtttccatatgatataaaaagcaagtgtagtattccattactatgtggcttagggattnnnnnnnnnnnnnnnnnnnaccatgttagctgggactagactccctacagtccttcaatggaaaagtaacatttaaaaatccttttggtaattcaaattacagatttaaaagtgcttaagatctggtgttttgttaatgcttctgtttattccagaagcgttaaagtaacccattgccaagtatcattcttgcaaattattcttttatgtaactgaccagtgcttaataaaacaagcaggtacttacaaataattactggcagtaggttataattggtggtttaaaaataacattgaaatacgggacttgttgccaattgggtaattttcattagttgttttgtttgtttgttttgatttgaaacctggaagtacagttaaaatttgactgtttaaaatgttggccaaaaaaaaatcaagatttacagtttttcatttgcactgaaaaaactaatcataactgttaattctcagccatctttgaagctttgaaaagaagaattctttgggtatttttgttaaagtttaaccaaacttttcctggccagtggtcagaaaaatcctaattttatggaatccctggtcggtatttcccttgggtattcggaaaaaaataatccaaatagttaaccctaaaatggaatttcttttcctaagcttttgaaaaaattaaatagaaaattttcccttcccctcc

SEQ ID NO: 34284 - DNA, 1947 bp, Macaca Mulatta
  misc_feature (1)...(1947): n = A,T,C or G
tgaattcttgccgccaggatggggaaacagaacagcaagctgcgcccggaggtcatgcaggacttgctggaaagcacagactttacagagcatgagatccaggaatggtataaaggcttcttgagagactgccccagtggacatttgtcaatggaagagtttaagaaaatatatgggaactttttcccttatggggatgcttccaaatttgcagagcatgtcttccgcaccttcgatgcaaatggagatgggacaatagactttagagaattcatcatcgccctgagtgtaacttccagggggaagctggagcagaagctgaaatgggccttcagcatgtacgacctggatggaaatggctatatcagcaaggcagagatgctagagatcgtgcaggnnnnnnnnnnnnnnnnnnnnnnnnnnnnnnnnnnnnnnnnnnnnnnnnnnnnnnnnnnnnnnnnnnnnnnnnnnnnnnnnnnnnnnnnnnnnnnnnnnnnnnnnnnnnnnnnnnnnnnnnnnnnnnnnnnnnnnnnnnnnnnnnnnnnnnnnnnnnnnnnnnnnnnnnnnnnnnnnnnnnnnnnnnnnnnnnnnnnnnnnnnnnnnnnnnnnnnnnnnnnnnnnnnnnnnnnnnnnnnnnnnnnnnnnnnnnnnnnnnnnnnnnnnnnnnnnnnnnnnnnnnnnnnnnnnnnnnnnnnnnnnnnnnnnnnnnnnnnnnnnnnnnnnnnnnnnnnnnnnnnnnnnnncttcagcatcttttgtcgtggatgcttcgtgggaatgcccagagccccagtgnnnnnnnnnnnnnnnnnnnnnnnnnnnnnnnnnnnnnnnnnnnnnnnnnnnnnnnnnnnnnnnnnnnnnnnnnnnnnnnnnnnnnnnnnnnnnnnnnnnnnnnnnnnnnnnnnnnnnnnnnnnnnnnnnnnnnnnnnnnnnnnnnnnnnnnnnnnnnnnnnnnnnnnnnnnnnnnnnnnnnnnnnnnnnnnnnnnnnnnnnnnnnnnnnnnnnnnnnnnnnnnnnnnnnnnnnnnnnnnnnnnnnnnnnnnnnnnnnnnnnnnnnnnnnnnnnnnnnnnnnnnnnnnnnnnnnnnnnnnnnnnnnnnnnnnnnnnnnnnnnnnnnnnnnnnnnnnnnnnnnnnnnnnnnnntagtttctaagctgtgaacatttcaaggtaaattaatagaggagaggaaaaagatggctcagctattctttcacaggtttacactagttgagctaatatgcgtgtctttggaaattaaacacaaatggtaacctagttcaaaaccagacccatcttgttgcctattgtgataaaataaaaagactgctgtatataacatattgggtattgcagaccaaattaagtgttttgccttgtttaaatgaaatgcatgtttagtgagcactaatacaatcttattccagaagactgtttttagtagcttattgtgaagtaagacaactataatgaatgtctatgtcttgttttgaagtcatatctgtctttgcacaaatgtaccaatcgacaagtatattttatatattccataaaaatacaaagtaaccctgactagggcccaaccttaattttgaatgcgtttccagagtggccgtgcctagagggcagatgcagaacaggtggtagtgggacaggacagttggagcacagcaatgttaacatgtattacggggagccaggagtgtggtttgcctcccaggcccagcagcccattgacagcattagactggcggcaaggtgcttttctgagcagatcaatactctgcagactcgnnnnnnnnnnnatacattcttggaacttcccagtggtttaatctgtgtgcatggttagggagccaggtctggaatattcagtttccctgcccctgttaaaaagtcagaggttgggcagccatcaaattcatcataaagacaagggcaagt

SEQ ID NO: 34285 - DNA, 655 bp, Macaca Mulatta
cttcagtcctcagtgatccctgaaatttttagactttgatttttttcccactcttgtgtccctcctcccctttcctcatttcctctgccttgttcctgctttcttctcacattccccgagggggttgggagaggggtgcatgcacaatgctaaaggtgtgttgtggtgaaggcttccattaatgtgactgcacagctttatgttcttaaatgtgtaactctatattatacttttaatagcagtcagaaaagcggttgtgatcaagtacaagtactggaaagtttcttcctaaatttcagcaacaacatatgacccctatttgaagaatacaatttgataagctcttattaaaaatacattttttatgcctatgagatcaaatggcaaaaggaaagatatgggcacacaaaattatttctattttttgaaaattcgaacattggtgctttttatagtcaaacatggttgcaaatgataagaggtttttactttatttgtaattatttacctttttaagcatttgccaggattttttttcatttagttccagagaaataaatccattcataaactagtttcttctcctaaaatccaatcttactaggatcaattatggtaatatttttaatattataagtcataactactctttacc

SEQ ID NO: 34286 - DNA, 705 bp, Macaca Mulatta
ccttgcttttcatgtatgtccggccccaggccattgattcccggagctccaacaagctcatctctgttttgtacacagttctcacccccgtcttgaaccccttgatatactgcctgaggaataaggaatttaagaatgccttgaaaaaagcctccggcttggcttgagctgtgccatagagggcaagctttctacctttctggaactccatctcggaatacacaaccagcccctctgaggaggccatttgactgtctgcattatggtagtaccgccttcatttaaaaattacttccaaatccatttttctctttccagaaaaaaactgaggttgaggttaatatcataggtattgttgttggtgttgtaataccagtactttcttctttttatagatgcgcaaagccatacttagtaaagcttaataaattttcctcgcctttaaaatgaccacgcacatttcagaaagcagcaaaacatgccaggtcatctgagatcgtaaagtccccaataaattgcagtgtgttaaagcactgaaatgtttaaccatgtggcaaaatgagctccacatgtccccaaagcaaaatgtgtcttggaagagtaaggacacgtagctttctgttttatacccaaagaatgttctctgattgtcctggatggacgcccctctgcctttttcctacgtaaacccctactccgtgccca

SEQ ID NO: 34287 - DNA, 96 bp, Macaca Mulatta
agacactgatgtttttggttagagattggagtttcccttatgaatacagctacggactccaaggagggatggcatttttggataagcgtttacagg

SEQ ID NO: 34288 - DNA, 2397 bp, Macaca Mulatta
  misc_feature (1)...(2397): n = A,T,C or G
tctggcagtgcgccctcctcgtcttctcctctctatactggtctcggtttccatcaaagttcacttccggaagcctgtattttcctgcggtcaccatctgcaatatcaacccctacaagtannnnnnnnnnnnnnnnnnnnnnnnnnnnnnnnnnnnnnnnnnnnnnnnnnnnnnnnnnnnnnnnnnnnnnnnnnnnnnnnnnnnnnnnnnnnnnnnnnnnnnnnnnnnnnnnnnnnnnnnnnnnnnnnnnnnnnnnnnnnnnnnnnnnnnnnnnnnnnnnnnnnnnnnnnnnnnnnnnnnnnnnnnnnnnnnnnnnnnnnnnnnnnnnnnnnnnnnnnnnnnnnnnnnnnnnnnnnnnnnnnnnnnnnnnnnnnnnnnnnnnnnnnnnnnnnnnnnnnnnnnnnnnnnnnnnnnnnnnnnnnnnnnnnnnnnnnnnnnnnnnnnnnnnnnnnnnnnnnnnnnnnnnnnnnnnnnnnnnnnnnnnnnnnnnnnnnnnnnnnnnnnnnnnnnnnnnnnnnnnnnnnnnnnnnnnnnnnnnnnnnnnnnnnnnnnnnnnnnnnnnnnnnnnnnnnnnnnnnnnnnnnnnnnnnnnnnnnnnnnnnnnnnnnnnnnnnnnnnnnnnnnnnnnnnnnnnnnnnnnnnnnnnnnnnnnnnnnnnnnnnnnnnnnnnnnnnnnnnnnnnnnnnnnnnnnnnnnnnnnnnnnnnnnnnnnnnnnnnnnnnnnnnnnnnnnnnnnnnnnnnnnnnnnnnnnnnnnnnnnnnnnnnnnnnnnnnnnnnnnnnnnnnnnnnnnnnnnnnnnnnnnnnnnnnnnnnnnnnnnnnnnnnnnnnnnnnnnnnnnnnnnnnnnnnnnnnnnnnnnnnnnnnnnnnnnnnnnnnnnnnnnnnnnnnnnnnnnnnnnnnnnnnnnnnnnnnnnnnnnnnnnnnnnnnnnnnnnnnnnnnnnnnnnnnnnnnnnnnnnnnnnnnnnnnnnnagatctgccttcattcatgcttccagacaaagatggtggagaaatgtgggtgtgcccagtacagccagcctctacctcccgcagccaactactgcaactaccagcaacaccccaactggannnnnnnnnnnnnnnnnnnnnnnnnnnnnnnnnnnnnnnnnnnnnnnnnnnnnnnnnnnnnnnnnnnnnnnnnnnnnnnnnnnnnnnnnnnnnnnnnnnnnnnnnnnnnnnnnnnnnnnnnnnnnnnnnnnnnnnnnnnnnnnnnnnnnnnnnnnnnnnnnnnnnnnnnnnnnnnnnnnnnnnnnnnnnnnnnnnnnnnacagacttggcaaaactcttgatattctacaaagacctgaaccagagatccatcatggagagcccagccaacagtnattgagatgcttctgtccaacttcggtggccagctgggcctgtggatgagctgctctgttgtctgcgtcattgagatcattgaggtcttcttcatcgacttcttctnnnnnnnnnnnnnnnnnnnnnnnnnnnnnnnnnnnnnnnnnnnnnnnnnnnnnnnnnnnnnnnnnnnnnnnnnnnnnnnnnnnnnnnnnnnnnnnnnnnnnnnnnnnnnnnnnnnnnnnnnnnnnnnnnnnnnnnnnnnnnnnnnnnnnnnnnnnnnnnnnnnnnnnnnnnnnnnnnnnnnnnnnnnnnnnnnnnnnnnnnnnnnnnnnnnnnnnnnnnnnnnnnnnnnnnnnnnnnnnnnnnnnnnnnnnnnnnnnnnnnnnnnnnnnnnnnnnnnnnnnnnnnnnnnnnnnnnnnnnnnnnnnnnnnnnnnnnnnnnnnnnnnnnnnnnnnnnnnnnnnnnnnnnnnnnnnnnnnnnnnnnnnnnnnnnnnnnnnnnnnnnnnnnnnnnnnnnnnnnnnnnnnnnnnnnnnnnnnnnnnnnnnnnnnnnnnnnnnnnnnnnnnnnnnnnnnnnnnnnnnnnnnnnnnnnnnnnnnnnnnnnnnnnnnnnnnnnnnnnnnnnnnnnnnnnnnnnnnnnnnnnnnnnnnnnnnnnnnnnnnnnnnnnnnnnnnnnnnnnnnnnnnnnnnnnnnnnnnnnnnnnnnnnnnnnnnnnnnnnnnnnnnnnnnnnnnnnnnnnnnnnnnnnnnnnnnnnnnnnnnnnnnnnnnnnnnnnnnnnnnnnnnnnnnnnnnnnnnnnnnnnnnnnnnnnnnnnnnnnnnnnnnnnnnnnnnnnnnnnnnnnnnnnnnnnnnnnnnnnnnnnnnnnnnnnnnnnnnnnnnnnnnnnnnnnnnnnnnnnnnnnnnnnncattgacactggggaaaggtgtcctgcatgcccttaggcagcagagaactgacccatggcccttggagtgttggtggagatcagagtgccgtggtggaggtctgggactatgtcagagtgtcctcactttgggg

SEQ ID NO: 34289 - DNA, 596 bp, Macaca Mulatta
ttcccgggatggtaaaagtgttttttgaatattcccaattttcgaagtcagtaaaaaaacacaaaaactgtatgaatgactttgtaaattttgttctatatgaataaaaaggaaaattacttgtgatcattctgaagtgccaaaggagcctctttattcctgggcctttctgatggcaggaggggcgaccagataagaagcccctctctgctgggggagaagggaagacgaggagccccacatgccactagctgccttgtcccatagcttgctgccccatttctttgctcctggcccctcattccttttagtccttcagctggataaagagtgagtctggagcccgtattgggctcgcctactgggttgctgtgctgtagggtgatcggctgttctgggtagcctgggactgaggaggtgccctggactcagggccgtcctgtcctgtcctgtcctgtcctggatcatgcgggacgagatggtcactgctgtgtgtgccgcagtgtgcctctgccccgtgggcccaagagaagctgacagttacctgtaataaggtaattgaggactttgatactgagctgttctcatctcatcct

SEQ ID NO: 34290 - DNA, 1084 bp, Macaca Mulatta
  misc_feature (1)...(1084): n = A,T,C or G
gggtattagcattatcttgacttttaagggttacttgattagctgtgtttggaactgctaccgatacatcaatggcaggaactcctctgatgtcctcgtttatgttaccagcaatgacactacggtgctgctacccccgtatgatgatgccactgtgaatggtgctgccaaggagccgccgccaccttacgtgtctgcctaagccttcgagtgggcggagctgagggcagcagcttgactttgcagacatctgagcaatagttctgttatttcacttttgcgatgagctctctgagcttgtttgttgctgaaatgctactttttaaaatttagatgttaggttgaaaactgtagttttcaatatatgctttgctagaacactgtgatagattagctgtggaattcttcctgtaggatcggggatataacgggcttcactaaccttccctaggcactgaaacttcccccaaatctggtggacctagagtcagataagtctgcttttgtacctgctgggccccagttgggcagttagtcacattttttctctctgttccctctcatttgaaaatgtaaaataaaaccaaaaatagataacttcttcttcagccattccagcatagagaacaaaaccttatggaaacaggaatgtcaattgtgtaatgattgttctaattaggtaaatagaagtccttacatttgtgttacaagaattccccccacaacatcctttatgacttaagttcaatgacagtgtgtgtttggtggtaaaggattttctccatggcctgaaataagaccattagaaagcaccaggccgtgggagcagtgaccatctgctgactgttctcatggatcttgtgtccagggacatggggtgacgtgcctcgtatgtgttagagggtggaacagatgtgcttggcgctgcgtgggatctggtgcccctcttctggnatcgcatccccacccagggcctgcttttactaaacgttctgccctagcttggttcaaggcggtcatccnactgacttgattcagtggaattggggatgtattttgatccccttttggcctaacagcatgg

SEQ ID NO: 34291 - DNA, 1666 bp, Macaca Mulatta
  misc_feature (1)...(1666): n = A,T,C or G
acgagttatcggagcgtctgattcctgcaccgaagtcagaggtggccgaaagtccggagtcgctgtaaaacctgagacagtgagccatggtggggagatcccggcggcgcggagcagctaagtgggcagctgtgcgagccaaggcaggtcccacgctcaccgacgaaaacggagatgatttaggattgccaccctcaccaggggacaccagctactaccaagatcaggtagatgactttcaggaggcacgatcccgggccgccttagctaagggctggaatgaagaacagagtggagannnnnnnnnnnnnnnnnnnnnnnnnnnnnnntgctagccctagatgtggacgatgaggacgacgaagannnnnnnnnnnnnnnnnnnnnnnnnnnnnnnnnaatgccgatgatgatggtgggagctccgtgcagagtgatgctgaggcctctgtggatcccagtttgtcgtggggtcagaggaaaaaactttactatgacacggactatggttccaagtcccgaggccggcagggtcaannnnnnnnnnnnnnnnnnnnnnnnnnnnnnnnnnnnnnncacagatcattcagcggcgcctagcccaagcgctgcaagaggacgattttggtgtcgcctgggttgaggcctttgcaaaaccgagtgcctcaggtagatgagactgagacacgggtcgtgaaggatttggctaaagtttcagaggaggagaagctgaaaatgttgcgaaaggaatccccataaatggtggagctgatagaagacctgaaagtcnnnnnnnnnnnnnnnnnnnnnnnnnnnnnnnnnnnnnnnnnnnnnnnnnacaagggatcattccacctgaaaaggaagccaatatttgaggaccaagtacaacctctacttgaattattgttcgaacatcagtttttatttgatcctgaaagctaggagagtcccagcacatggacatcctgtcatagaaaggcttgttacctaccgaaatttgatcaacaagctgtcagttgtggatcagaagctgtccgcagaaattcgttatctgttgacacttaaggatgatgctgtaaagaaagaactgattccggaagcaaaatccaccaagcccaaaccaaagtctgtttcaaagacttctgctgctgcctgtgctgttacagatctttctgatgattctgattttgatgaagaagctaaactgaagtactannnnnnnnnnnnnnnnnnnnnnnnnnnnnnnnnnnnnnnnnnnnnnnatagcactgaagaacaggctgttgaagatcaaaatgcaaagagagccattacctatcaaattgctaaaaataggggacttactcctaggagaaagaagattgaccgcaatcccagagtgaaacacagggagaagttcagaagagccaaaattcgaagaagaggccaggttcgtgaagttcgtaaagaagagcaacgttatagtggtgaattatctggcattcgtgcaggagttaaaaagagcattaagcttaaatgaagtttttgcttagcataagtttttggcaattgtggatcaatacatttttacttttaactaaagtgattgtattaatatataatactttaaattttaaaaattcttgtccacagggaaatttgtctgggttattggacaatttat

SEQ ID NO: 34292 - DNA, 2915 bp, Macaca Mulatta
  misc_feature (1)...(2915): n = A,T,C or G
agtgggctctgcggataactcaggcgccattaagctgagaaatccaaannctaaaagaaggacgcattttaggtaagatctagtggctagatcttcagaatgtgcgtcgttcttgtggaaatcagttaagaaagatcggattcgaggttatttaagcaaatcatctgggtggattgtatacagagttaaagaaactgcgccttctggaccgggtctgaacaatggagactgcgctagcaaaaacgccacagaaaaggcaagttatgtttcttgctatactgttgcttttgtgggaggctggctctgaggcagttaggtattccataccagaagaaacagaaagtggctattctgtggccaacctggcaaaagaccttggtcttagggtgggggaactggccactcggagcgcgcgaatccattacaaaggagacaaagagctcttgcagcttgatataaagaccggcaatttgcttctatatgaaaaactagacagggaggtgatgtgcgggacgacagaaccctgtatattgcatttccaactcttactagaaaacccagtgcagttttttcaaactgatctgcagctcacagatataaatgaccattccccagagttcccagagagggaaatgctcctaaaaatcccagaaagcacccagccagggactgtgtttcctttaaaaatagcccaggactttgacataggtagcaacactgttcagaactacacaatcagcacaaattcccactttcatgttgctactcacaatcgcggagatggcagaaaatacccagagctggtgctgggacaagctctgggacggggaggagcggcctgagctcagcttacactcactgcactggannnnnnnnnnnnnnnnnnnnnnnnnnnnnnnnnnnnnnnnnnnnnnnnnnnnnnnnnnnnnnnnnnnnnnnnnnnnnnnnnnnnnnnnnnnnnnnnnnnnnnnnnnnnnnnnnnnnnnnnnnnnnnnnnnnnnnnnnnnnnnnnnnnnnnnnnnnnnnnnnnnnnnnnnnnnnnnnnnnnnnnnnnnnnnnnnnnnnnnnnnnnnnnnnnnnnnnnnnnnnnnnnnnnnnnnnnnnnnnnnnnnnnnnnnnnnnnnnnnnnnnnnnnnnnnnnnnnnnnnnnnnnnnnnnnnnnnnnnnnnnnnnnnnnnnnnnnnnnnnnnnnnnnnnnnnnnnnnnnnnnnnnnnnnnnnnnnnnnnnnnnnnnnnnnnnnnnnnnnnnnnnnnnnnnnnnnnnnnnnnnnnnnnnnnnnnnnnnnnnnnnnnnnnnnnnnnnnnnnnnnnnnnnnnnnnnnnnnnnnnnnnnnnnnnnnnnnnnnnnnnnnnnnnnnnnnnnnnnnnnnnnnnnnnnnnnnnnnnnnnnnnnnnnnnnnnnnnnnnnnnnnnnnnnnnnnnnnnnnnnnnnnnnnnnnnnnnnnnnnnnnnnnnnnnnnnnnnnnnnnnnnnnnnnnnnnnnnnnnnnnnnnnnnnnnnnnnnnnnnnnnnnnnnnnnnnnnnnnnnnnnnnnnnnnnnnnnnnnnnnnnnnnnnnnnnnnnnnnnnnnnnnnnnnnnnnnnnnnnnnnnnnnnnnnnnnnnnnnnnnnnnnnnnnnnnnnnnnnnnnnnnnnnnnnnnnnnnnnnnnnnnnnnnnnnnnnnnnnnnnnnnnnnnnnnnnnnnnnnnnnnnnnnnnnnnnnnnnnnnnnnnnnnnnnnnnnnnnnnnnnnnnnnnnnnnnnnnnnnnnnnnnnnnnnnnnnnnnnnnnnnnnnnnnnnnnnnnnnnnnnnnnnnnnnnnnnnnnnnnnnnnnnnnnnnnnnnnnnnnnnnnnnnnnnnnnnnnnnnnnnnnnnnnnnnnnnnnnnnnnnnnnnnnnnnnnnnnnnnnnnnnnnnnnnnnnnnnnnnnnnnnnnnnnnnnnnnnnnnnnnnnnnnnnnnnnnnnnnnnnnnnnnnnnnnnnnnnnnnnnnnnnnnnnnnnnnnnnnnnnnnnnnnnnnnnnnnnnnnnnnnnnnnnnnnnnnnnnnnnnnnnnnnnnnnnnnnnnnnnnnnnnnnnnnnnnnnnnnnnnnnnnnnnnnnnnnnnnnnnnnnnnnnnnnnnnnnnnnnnnnnnnnnnnnnnnnnnnnnnnnnnnnnnnnnnnnnnnnnnnnnnnnnnnnnnnnnnnnnnnnnnnnnnnnnnnnnnnnnnnnnnnnnnnnnnnnnnnnnnnnnnnnnnnnnnnnnnnnnnnnnnnnnnnnnnnnnnnnnnnnnnnnnnnnnnnnnnnnnnnnnnnnnnnnnnnnnnnnnnnnnnnnnnnnnnnnnnnnnnnnnnnnnnnnnnnnnnnnnnnnnnnnnnnnnnnnnnnnnnnnnnnnnnnnnnnnnnnnnnnnnnnnnnnnnnnnnnnnnnnnnnnnnnnnnnnnnnnnnnnnnnnnnnnnnnnnnnnnnnnnnnnnnnnnnnnnnnnnnnnnnnnnnnnnnnnnnnnnnnnnnnnnnnnnnnnnnnnnnnnnnnnnnnnnnnnggcgagttcaagttcttgaagcttatattcctaaccttttgccccagggcactggtgaagaaataggaaaactgccgccttccggaataactttgataaaaatagagatctcgttatgacacattgttttttgccatttatcccaaactttttcagatctagaattcgagagtgtcatggacaaaaatttcaccttgagatttagcttttatttccctttttaatggattcgtctgctgaactttattctgtctcaagtattgaaaactcaattttatttcattgcatttatttacatagggtcatttcaaatccatgcatgctgttgattttcctgagatatttttctcttcttgttggtacttgttgtgataaaccatcttaataaaatcaaatattaattttattttctat

SEQ ID NO: 34293 - DNA, 1509 bp, Macaca Mulatta
  misc_feature (1)...(1509): n = A,T,C or G
gggattccattttcaatgccaaagttgattcatcagttgcaacaaggagaagatccctgcttggaggaaagagaagtcccttcagacacctgtgtaggnnnnnnnnnnnnnnnnnnnnnnnnnnnnnnnnnnnnnnnnnnnnnnnnnnnnnnnnnnnnnnnnnnnnnnnnnnnnnnnnnnnnnnnnnnnnnnnnnnnnnnnnnnnnnnnnnnnnnnnnnnnnnnnnnnnnnnnnnnnnnnnnnnnnnnnnnnnnnnnnnnnnnnnnnnnnnnnnnnnnnnnnnnnnnnnnnnnnnnnnnnnnnnnnnnnnnnnnnnnnnnnnnnnnnnnnnnnnnnnnnnnnnnnnnnnnnnnnnnnnnnnnnnnnnnnnnnnnnnnnnnnnnnnnnnnnnnnnnnnnnnnnnnnnnnnnnnnnnnnnnnnnnnnnnnnnnnnnnnnnnnnnnnnnnnnnnnnnnnnnnnnnnnnnnnnnnnnnnnnnnnnnnnnnnnnnnnnnnnnnnnnnnnnnnnnnnnnnnnnnnnnnnnnnnnnnnnnnnnnnnnnnnnnnnnnnnnnnnnnnnnnnnnnnnnnnnnnnnnnnnnnnnnnnnnnnnnnnnnnnnnnnnnnnnnnnnnnnnnnnnnnnnnnnnnncatcagagaattcatactggagagaaactctataaatgtggtgaatgtgagaaggnnnnnnnnnnnnnnnnnnnnnnnnnnnnnnnnnnnnnnnnnnnnnnngagagaaaccgtatcgatgtagggagtgtggtaaagcctttagccagtgttcaaccctcactgtacatcagagaattcatactggagagaaactctataaatgtggtgaatgtgagaaggccttcaactgcagagcaaagcttcacaggcatcaaagaatccatacaggcgagaaaccctataaatgtagtgagtgtgggaagggttacagccagtttacctctctggctgaacatcagaggcttcatactggagaacagctgtataaatgcctggaatgtgggagaaccttcacacgtattgcaacccttattgaacatcagcgcattcacactggacaaaaaccttatcaatgcaatgaatgtgagaaagccttcaaccagtattcatcctttaatgaacatcggaaaattcatactggggaaaaactttatacatgtgaggaatgtgggaaagcctttggttgcaaatctaacctttacaggcatcagaggattcataccggagagaagccatatcagtgtaatcagtgtggaaaggcgttcagccagtattcatttttaacggaacacgagaggatccacactggggagaaactgtataaatgtatggaatgtgggaaagcctacagttacagatcaaacctttgtagacacaaaaaagttcacactaaagagaaactctataaatggaaggaatatgggaaaccattaatctgcagctcctcactcgctcagtatcagagatttcttagaggagataaggcctatgaggctta

SEQ ID NO: 34294 - DNA, 861 bp, Macaca Mulatta
  misc_feature (1)...(861): n = A,T,C or G
ggggctctcgggtgagctctgcccggcagcggggatggcggggagggggaagctcatcgcagtcatcggagacgaggacacggtgactggtttcctgctgggcggcataggggagcttaacaagaaccgccaccccaatttcctggtggtggagaaggatacaacaatcaatgaaatcgaagacactttccggcagtttctaaaccgggatgacattggcatcatcctcatcaaccagtacatcgcagagatggtgcggcatgccctggacgcccaccagcactccatccccgctgtcctggagatcccctccaaggagcacccatatgacgccgccaaggactccattctgcgcagggccaggggcatgttcactgctgaagacctgcgctaggggactcctcacagccctcagcccttccctcgtttccaggcctctccccaggcttgccatcagccttctttactttttgagcctctggattccaattccctccccctttcccctccattaagaggctaggggaagccccttctaggttgctggggctctgcctggtaaagcgcgtttagcgaaaaggaaaccccggaccattttccctccccttaccctgggtcccggggctgtttaccccgggcgcaattggttgatggttaaattaaaggccatattccttgtccttccctttcaaaacaggagacacaggatccgccccgcaaaccacaccattttccgggccggccctcttgctcctcggagaaactcttttctgaacacctcttcctttttggcgccgcgggccccccggttgggtagccgatgtacccgggggttccatagctggccttcccctgaggagn

SEQ ID NO: 34295 - DNA, 1221 bp, Macaca Mulatta
gggaggtgctgtgtaatcattaaggagaggaggcatttggagctgctaaaatgccggattacctcggtgccgatcagcggaagaccaaagaggatgagaaggacgacaagcccatccgagctctggatgagggggatattgccttgctaaaaacttatggtcagagcacttactctaggcagatcaagcaagttgaagatgacattcagcaacttctcaagaaaattaatgagctcactggtattaaagaatctgacactggcctggccccaccagcactctgggatttggctgcagataagcagacactccagagtgaacagcctttacaggttgccaggtgtacaaagataatcaatgctgattcggaggacccaaaatacattatcaacgtaaagcagtttgccaagtttgtggtggaccttagtgatcaagtggcacctactgacattgaagaagggatgagagtgggtgtggacagaaataaatatcaaattcacattccattgcctcctaagattgacccaacagttaccatgatgcaggtggaagagaaacctgatgtcacatacagtgatgttggtggctgtaaggaacagattgagaaattgcgagaagtagttgaaaccccattacttcatccagagaggtttgtaaaccttggcattgagcctcccaagggcgtgctgctctttggtccacccggtacaggcaagacactctgtgcgcgggcggttgctaatcggactgatgcgtgcttcattcgagttattggatctgagcttgtacagaaatacgtcggtgagggggctcgaatggttcgtgaactctttgaaatggccagaacaaaaaaagcctgccttatcttctttgatgaaattgatgctattggaggggctcggtttgatgatggtgctggaggtgacaatgaagtgcagagaaaaatgttggaactgatcaatcagctttgatggtttttgatccctcgaggcattatttaaagtgctgatgggccactaacagacctgaaacctttggatccagccccgaatgaagccaaggaagattgggaagaaaaaattgaattttaccccgccccatctaaaggggtcggacccccatattttaaaatttcaccctcccttccaatgaatgtttgaaaaaaatatcaaaatttgaaatggttaccccaaacgtggtccaaataaaccccgggggcta

SEQ ID NO: 34296 - DNA, 801 bp, Macaca Mulatta
  misc_feature (1)...(801): n = A,T,C or G
cggaggcggggccggcaaaggaaanncttcttaaacgtaatttttttanggggttgaaaataggcttttattcaatgggaggaaggatttttttatttggcaaaactagaggttttctctcaaatttttcggtccaaaatttttataaataaaatgctttatttgggctgnnnnnnnnnnnnnnnnnnnnncactagaagttggagcaatcttagattttaaataaattgttaagattcttgaaccagttatttagttaggttttaaaatatagctagattttgcaaatatttacattttaggaaacaaactgtatttagtcaacataattttaaaataactaggacgtggaaacacataattttctgcagtaattgacaacagatgaaactacatttataggttccccttttatagttaaggtaaaattcattttaaaaactttatgtgtagaaataaattgtgccaggtaatatacatgtaacatttacatttttaagaactgaaaagtacaaagttctgtgtcatttaaattggcgagtgtctctcttcagtcaataggcttgatcatcatctgaactgctcttaaggagtatgacccgcctctgtattcggcccagaaaattccatcttggtgcttgcttctgtaatggcctcctctgtaccatactccatttaggttagaatgtgcacaggcattgtaccaccagcctcctttatgaaagtgggcgcagtttcctgcatacatatctttatctctgtccagtgtggtgaattgtttaccattatgccacatcatcc

SEQ ID NO: 34297 - DNA, 656 bp, Macaca Mulatta
ctgcaagtctttgcgttcacttgcattttaacaacataaaccagcacgcagttcccaccgggggcctttaaggccacgcgcactcaggaaagtgaccagtgaccactggcattaggagggtggctccaataaaggatttttgctgcatttggggaatgctgcattttgttcatgcctgtaagattggtctgtgtcctgaccagctccaaaaatatacttcactgccctgaaaaacagatacagggaaagttggttgtctcttcacttggccaaatccaaggaacagaacagagtctttttcttcttcggattctattgtttgctgggattgtacatgttccttgggagatcatgttcaagtgactcctgttgcctgaacccaataacaggcaccaatggaggaaaatggcccttgggctggcaggggcagtgaccctcccagggtaccactgagggcagggcctgggttcaagcctccctgaacctcccctttggctaactgagcccctgaagtgcacagcactgccatttgacatgaaagtaccttcggcctcaagagatgtgaagaagtcacaaggtctaatttgtgcgtgtgtggactcactgtggaaataaaatgcaatagaaagagcatgtatcgcttccttcctcctcaa

SEQ ID NO: 34298 - DNA, 847 bp, Macaca Mulatta
  misc_feature (1)...(847): n = A,T,C or G
gagggacggagtctccaggttccagccatctcatggatagggacgcttccagaaaccccgctggatcctctcttctctaccaagcctttcacctgtgtgttctctccccagtcagcctaggcttctgcccaccacaaccctaccgggagccggagccctctgtggccgaacccccttcctgccccctggctttgaacatgagccttcgagactctagctacagtgtggcccctgggccctgtgtggtggcccagctgccctctgaagacatgggacccttgacagacccccagagcagagaccatggcttcctgcgcaccaagatgaaggtnaggtgacccttggggacagtcccagtggagatctgttcacctgccacatctgccagaaggccttcacctaccagcgcatgctgaaccgccacatgaagtgtcacaacgacgtcaagaggcacctctgcacgtactgcgggaagggcttcaatgacactttcgacctcaagagacacgtccgaactcacactggngcgtgcggccctacaagtgcagcctgtgcgacaaggccttcacgcagcgctgctctctggagtctcacctcaagaagatccacggcgtgcagcagaagtacgcgtacaaggagcggcgggccaagctgtacgtgtgtgaggagtgtggctgcttttctgagagccaggagggccacgtcctgcacctgaatgagcaccaccctgacagcccactgctgcgcaagacctccaagaaggtggccgtggcactacagaacactgtcacttccttgctgcagggcagcccccacctgtgagtagctcgagccctgggggtgctcc

SEQ ID NO: 34299 - DNA, 297 bp, Macaca Mulatta
gtgtagtcgccgccgccagccgccatgggcaagcagaacagcaagctgcggcccgaggtgctgcaggacctgcgggagaacacggagttcaccgaccacgagctgcaggagtggtacaagggcttcctcaaggactgccccaccggccacctgaccgtggacgagttcaagaagatctacgccaacttcttcccctacggcgacgcttccaagttcgccgagcacgtcttccgcaccttcgacaccaacggcgacggcaccatcgacttccgggagttcatcattgcgctgagcgtg

SEQ ID NO: 34300 - DNA, 738 bp, Macaca Mulatta
ggggacagaagaaaggtgaaataaggttactataaggaatatatgacatgccaaattttatttttaaacagttcttcaagtcagattaataatagcaaattatgtgattatccatttcccagcccctctccaaaaaaatggtaaacaagatgccttcttcttttcccaaagatacacatacacacgtacaaattttttatcagataataatagctaatattttatgagtacttaccttattttgtcccctttcaacagatttacatacgtgtgattgatacaattcattttcccattttataactgagaaaactggtgcacagagaggataagtaacttgccaaaggtcacacagttaataagtggaaatgctgggacatgaaccaggtagtctgcccccatagttctgcccctgagatctgtactgtctcccatgagggtacttctccatggagcaggctgaggcgaaccctttattctgggcttctctcagaaatggattcccacacagtactcaaagcaaatttccccagaggaaatcctatttgaagaacttaaaaactcagaatctttttctttgtccagagagttgaggaagcttaagctaaataatacatgaattttttaaaaaatcagattataaatttagtttttttggtgattccatttaaatttctttttaccaatttattagtttatttttttctaagccctaatttccatccttttttaaagcca

SEQ ID NO: 34301 - DNA, 678 bp, Macaca Mulatta
  misc_feature (1)...(678): n = A,T,C or G
gcatttgcaagtaaaatcactggcatgctgttggaattatccccagctcaactgcttctccttctagcaagtgaagattctctgagagcaagagtggatgaggccatggaactcattattgcacatggacggnggaaaaccgaaagcgtcatggctctagtcgaagtgtagtagatatggacttagatgatacagacgatggtgatgacaatgcccctttgttttaccaacctgggaaaagaggattttacactccaaggcctggcaagaacacagaagcaaggttgaattgtttcagaaacattggcaggnaggattcttggactatgtctgttacgagaatgaactatgtcctnnnnnnnnnnnnnnnnnnnnnnnnnnnnnnnnnnnnnnnnnnnnngtcaattggcatgattttgctttttttgaccctgtaatgtatgagagtttgcggcaactaatcctcgcttctcagagttcagatgctgatgctgttttctcagcaatggatttggcatttgcaattgacctatgtaaagaagaaggtggaggacaggtnacaggtcgaactcattcctaatggtgtaaatataccagtcactccacagaatgtatatgagtatgtgcggaaatatgcagaacacagaatgttggtagttgcagaacagcccttacatg

SEQ ID NO: 34302 - DNA, 544 bp, Macaca Mulatta
  misc_feature (1)...(544): n = A,T,C or G
cgcggggctcagtcggggnnnnnnnnnnnnnnnnnnnccggggatggcggcggctccnnnnnnnnnnnnnnnnnnnnnngtgcctgtgccgctgctgccgctgctggcccaagggcccggaggggcgctgggaaaccggcatgcggtgtactggaacagctccaaccagcacctgcggcgagagggctacaccgtgcaggtgaatgtgaacgactatctggatatttactgcccgcactataacagctcgggggtgggccccggggcgggtccggggcccggaggcggggcagagcagtacgtgctgtacatggtgagccgcaacggctaccgcacctgcaacgccagccagggcttcaagcgctgggagtgcaaccggccgcacgccccgcacagccccatctagttctcggagaagttccagcgctacagcgccttctcgctaggttacgagttccacgccggccacgagtactactacatctccacgcccactcacaacctgcattggaagtgtctgaggatgaaggtgttcgtctgctgc

SEQ ID NO: 34303 - DNA, 1354 bp, Macaca Mulatta
  misc_feature (1)...(1354): n = A,T,C or G
gtgtgcaaccacaagcaggagtgccactgccacgcgggctgggccccgccctactgcgcgaagctgctgactgaggtgcacgcagcatccgggagcctccctgtcatcgtggcggtggttctggtgctcctggcagttgtggtcaccctggcaggcatcatcgtctaccgcaaagcctggagccgcatcctgagcaggnnnnnnnnnnnnnnnnnnnnnnnnnnnnnnnnnnnnnnnnnnnnnnnnnnnnnnnnnnnnnnnnnnnnnnnnnnnnnnnnnnnnnnnnnnnnnnnnnnnnnnnnnnnnnnnnnnnnnnnnnnnnnnnnnnnnnnnnnnnnnnnnnnnnnnnnnnnnnnnnnnnnnnnnnnnnnnnnnnnnnnnnnnnnnnnnnnnnnnnnnnnnnnnnnnnnnnnnnnnnnnnnnnnnnnnnnnnnnnnnnnnnnnnnnnnnnnnnnnnnnnnnnnnnnnnnnnnnnnnnnnnnnnnnnnnnnnnnnnnnnnnnnnnnnnnnnnnnnnnnnnnnnnnnnnnnnntgctgttggcccaaaggttgccctgaagccccccatccagaggaagaaaggggccggagctcccactgcaccctagggaggcacctgtgcctgtgtggaaatttggagaagttgcagcggaaaaaccatgccttccagcattccagggtccagctagcgccgctcggctccagaccctgactttgcaggctcagctgctgttctgacctcaggaatgcatccacctgagaggctcctgctctcaggccctcagccactcccttctccccgccttggccccgcgtagccccagctgtctgcaggcaccaggctgggatgagnnnnnnnnnnnnnnnnnnnnnnnnnnnnnnnnnnnnnnnnnnnnnnnnnnnnnnnnnnnnnnnnnnnnnnnnnnnnnnnnnnnnnnnnnnnnnnnnnnnnnnnnnnnnnnnnnnnnnnnnnnnnnnnnnnnnnnnnnnnnnnnnnnnnnnnnnnnnnnnnnnnnnnnnnnnnnnnnnnnnnnnnnnnnnnnnnnnnnnnnnnnnnnnnnnnnnnnnnnnnnnnnnnnnnnnnnnnnnnnnnnnnnnnnnnnnnnnnnnnnnnnnnnncccctgatcgtggggcctgtttcccacgggattcaagagggacagccccagcttcgtgtgtgtttaagcttaggaagcgcctttagggaaagggctgcttgggagtcagctgtcttgtctggttttcttgagaccgcagatgtgtgttcagcagggctgaaagcttttattctttaataatgagaaatgtatattttactaataaattattgaccgagttctgcagatgcttgtt

SEQ ID NO: 34304 - DNA, 150 bp, Macaca Mulatta
tgggtttagaatgtctcttgagtccaaaccgaaggagcagaataggttgaaggaaagttcacaggacctgttagttccagattattctacctggcctctctctttaaaaagttcattttcataatttgagtaatatttccttttgtggaa

SEQ ID NO: 34305 - DNA, 351 bp, Macaca Mulatta
caaattcacaaatgttaacatggataagtgatcatggtgtgcaagtggtcaattgagtagtacagtggaacctgttaaatgcataacctaattttcctggaactgccatgttttcttttaactggaaatttttatgtgagttttccttttggtgcatggaactgtggttgccaaggtatttaaaagggctttcctgcctccttctctttgatttatttaatttgatttggactataaaatatcatttttcaggtttattcttttagcaggtgtagttaaacgacctccactgaactgggtttgacctctgttgtactgatgtgtcgtgactaaataaaaaagaaagaacaa

SEQ ID NO: 34306 - DNA, 3885 bp, Macaca Mulatta
  misc_feature (1)...(3885): n = A,T,C or G
ggccgaagatcaagctcgcgactctccaagagggaggtgtccagtctgctaagctacacgcaggnnnnnnnnnnnnnnnnnnnnnnnnnnnnnnnnnnnnnnnnnnnnnnnnnnnnnnnnnnnnnnnnnnnnnnnnnnnnnnnnnnnnnnnnnnnnnnnnnnnnnnnnnnnnnnnnnnnnnnnnnnnnnnnnnnnnnnnnnnnnnnnnnnnnnnnnnnnnnnnnnnnnnnnnnnnnnnnnnnnnnnnnnnnnnnnnnnnnnnnnnnnnnnnnnnnnnnnnnnnnnnnnnnnnnnnnnnnnnnnnnnnnnnnnnnnnnnnnnnnnnnnnnnnnnnnnnnnnnnnnnnnnnnnnnnnnnnnnnnnnnnnnnnnnnnnnnnnnnnnnnnnnnnnnnnnnnnnnnnnnnnnnnnnnnnnnnnnnnnnnnnnnnnnnnnnnnnnnnnnnnnnnnnnnnnnnnnnnnnnnnnnnnnnnnnnnnnnnnnnnnnnnnnnnnnnnnnnnnnnnnnnnnnnnnnnnnnnnnnnnnnnnnnnnnnnnnnnnnnnnnnnnnnnnnnnnnnnnnnnnnnnnnnnnnnnnnnnnnnnnnnnnnnnnnnnnnnnnnnnnnnnnnnnnnnnnnnnnnnnnnnnnnnnnnnnnnnnnnnnnnnnnnnnnnnnnnnnnnnnnnnnnnnggtctctgcagacaaactggtggcactggggctgttcagccagcactttaatttggccaccttcaataagctcgtctcctatcgaaaagccatgtaccatgctctggagaagctagggtgcgagctggcaagaccttccccagcagccctgtagactcattgcaggaccagctgaagcccatgttggagtgggcccacggcggcttcaagcccactgggatcgagggcctcagacccaacaacacgcagccagnnnnnnnnnnnnnnnnnnnnnnnnnnnnnnnnnnnnnnnnnnnnnnnnnnnnnnnnnnnnnnnnnnnnnnnnnnnnnnnnnnnnnnnnnnnnnnnnnnnnnnnnnnnnnnnnnnnnnnnnnnnnnnnnnnnnnnnnnnnnnnnnnnnnnnnnnnnnnnnnnnnnnnnnnnnnnnnnnnnnnnnnnnnnnnnnnnnnnnnnnnnnnnnnnnnnnnnnnnnnnnnnnnnnnnnnnnnnnnnnnnnnnnnnnnnnnnnnnnnnnnnnnnnnnnnnnnnnnnnnnnnnnnnnnnnnnnnnnnnnnnnnnnnnnnnnnnnnnnnnnnnnnnnnnnnnnnnnnnnnnnnnnnnnnnnnnnnnnnnnnnnnnnnnnnnnnnnnnnnnnnnnnnnnnnnnnnnnnnnnnnnnnnnnnnnnnnnnnnnnnnnnnnnnnnnnnnnnnnnnnnnnnnnnnnnnnnnnnnnnnnnnnnnnnnnnnnnnnnnnnnnnnnnnnnnnnnnnnnnnnnnnnnnnnnnnnnnnnnnnnnnnnnnnnnnnnnnnnnnnnnnnnnnnnnnnnnnnnnnnnnnnnnnnnnnnnnnnnnnnnnnnnnnnnnnnnnnnnnnnnnnnnnnnaagcccccaagctgtaccctgccattcccgcagcccgaaggcggcccattcgagtcctgtcattgtttgatggcatcgcaacaggnnnncaggctacctagtcctcaaagagctgggcataaaggtaggaaagtacgtcgcctctgaagtgtgtgaagagtccatcgctgttggaaccgtgaagcacgaggggaatatcaaatacgtgatcttcgtgaggaacatcacaaagaaaaatattgaagaatggggcccatttgacttggtgattggcggaagcccatgcaacgatctctcaaatgtgaatccagccaggaaaggcctgtatgagggtacaggccggctcttctttgaattttaccacctgctgaattactcacgccccaaggagggtgatgaccggccgttcttctggatgtttgagaatgttgtagccatgaaggttggcgacaagagggacatctcacggttcctggannnnnnnnnnnnnnnnnnnnnnnnnnnnnnnnnnnnnnnnnnnnnnnnnnnnnnnnnnnnnnnnnnnnnnnnnnnnnnnnnnnnnnnnnnnnnnnnnnnnnnnnnnnnnnnnnnnnnnnnnnnnnnnnnnnnnnnnnnnnnnnnnnnnnnnnnnnnnnnnnnnnnnnnnnnnnnnnnnnnnnnnnnnnnnnnnnnnnnnnnnnnnnnnnnnnnnnnnnnnnnnnnnnnnnnnnnnnnnnnnnnnnnnnnnnnnnnnnnnnnnnnnnnnnnnnnnnnnnnncttggctttcctgtgcactacacagacgtgtccaacatgggccgcggtgcccgccagaagctgctgggaaggtcctggagcgtgcctgtcatccgacacctcttcgcccctctgaaggactactttgcatgtgaatannnnnnnnnnnnnnnnnnnnnnnnnnnnnnnnnnnnnnnnnnnnnnnnnnnnnnnnnnnnnnnnnnnnnnnnnnnnnnnnnnnnnnnnnnnnnnnnnnnnnnnnnnnnnnnnnnnnnnnnnnnnnnnnnnnnnnnnnnnnnnnnnnnnnnnnnnnnnnnnnnnnnnnnnnnnnnnnnnnnnnnnnnnnnnnnnnnnnnnnnnnnnnnnnnnnnnnnnnnnnnnnnnnnnnnnnnnnnnnnnnnnnnnnnnntaaaactttaaaacttgaagcaggtagcaacgtggcnnnnnnnnnnnncttcatgggcctaccactcagagaaacaatggctatgataccaaaaccacagtgccgacagctctccaatactcaggttaatgctgaaaaatcatccaagacagttattgcaagagtttaatttttgaaaactggctgctgctctgtgtttacagacgtgtgcagttgtaggcatgtagctacgggacatttttaagggcccaggatcgtttttttcccagggcaagtggaagagaaaatgttgtatatgtcttttccccggcacattccccttgcctaaatacaagggctggagtctgcacgggacctattagagtattttccacaacgatgatgatttcagcagggatgacatcatcatcacattcagggctatcttttccccccacaaacccaagggcaggggccactcttagctcaatccctcccagtgactgcaatagaaccctctggggagctcaggaaggggtgtgctgagttctataacataagctgccatatattttgtagacaagtatggctcctccgtgtctccctcttccttaggagaggagtgtgaagnnnnnnnnnnnnnnnnnnnnnnnnnnnnnnnnnnnnnnnnnnnnnnnnnnnnnnnnnnnnnnnnnnnnnnnnnnnnnnnnnnnnnnnnnnnnnnnnnnnnnnntcatctttttactaaactcagaagcagtgacagcagtcagggacagacgtacatttctcacaccttcccctcatcttaagagatgacagagaaaactgcagtcaaagctcggtgctccctctggagatttttaaatccttttttattccatgataagtcatttttagggagaatgggagttcagacaagctgcatttcagaaatgctgtcgtaatggtttttaacacctcttactcttcttactggtgctattttgtagaataaggaacaacgttgacaagttttgtggggctttttatacannnnnnnnnnnnnnnnnnnnnnnnnnnnnnnnnnnnnnnnnnnnnnnnnnnnnnnnnnnnnctggagccacgacgtaacaaatatggggaaaaaaactgtgccttgtttcaacagtttttgctaatttttaggctgaaagatgacggatgcctagagtttaccttatgtttaattaaaatcagtatttgtctata

SEQ ID NO: 34307 - DNA, 422 bp, Macaca Mulatta
aggtggaggtgcggcccatgatgtatgtggcactgacctacgaccaccggctgattgacggcagagaggctgtgactttcctccgcaaaatcaaggcagcggtagaggatcccagagtcctcctcctggatctttaggaggaacccacacaccctataaattgatcatgcaggaactgaaaatcagtcttctccctgtcccgtcatgggtcccgggttagcctggtgacaggcaggcacatgctgttggcctcaagcaaggaagcagagcactatgtaaccagcagtaacaggtcttttcttggtgttcctgccaggctctctccctctctgcacctgtctcataccctcgaatatcttaagtccttaggcttgagagagagcgccttaatggatgctcaacggtattcctgcctttcttcc

SEQ ID NO: 34308 - DNA, 321 bp, Macaca Mulatta
  misc_feature (1)...(321): n = A,T,C or G
gacgaggacgcacgcttaatcacttggagctagcagccaccgcggtcgtaacgacagacctttacccacaaccctcgtcctacaacctggtaaataataaccctcccaatatccctnnnnnnnnnnnnnnnnnnnnaccaaagtcaaagtatccctggcgcgacacgcttggctgacttacgttccgtgcgcattctggcaggaactctgtctcttcaaagactcatcctcaaaacaagacttgacactgtgatccttgcctcagtcctaggaactgtggcacacagagcatgtcattttaaaaacaatttcacgaaacac

SEQ ID NO: 34309 - DNA, 674 bp, Macaca Mulatta
aactgccattcaaacaactgttgcaatataaaaagctcatttactctaatattatgatacagtgaatatgaaaatgcactggtcagaaggcattctcaaaaagccgcactgctcccgacatcgtccttaccagtgaaatcgcaaagacaggcaaagcagtcctgcttcttgggaatccgaagctgcctttatcacataaagccaaacagtagggcataactgtgtcacctgagcatgtcatcaggcttctgaggacttgttctttataagagagaccttcacaaaatatcttggctcagagatagcagtctttattaacaaaggccatgcgcgctgacacctgcagataatcacctccttttctttgtctgtgttgtacattttcatgacataacttttaactatgtctagagaaggcaggctctgcaacagagatgccctttcaacccgctcagtgccctggacaggagatactgtgttacactgttaatggatttctatttgagaagctcatttttgtatgcaatcgctgcagttttttttctaacaggctcatgtttgagaataaacaagtctgtgatgtcagagacaaaagtgtgttcttcagtctgcaggtgtgtggcacctcccttcttccctgaagccccccacatccagagccttcctgaggggtg

SEQ ID NO: 34310 - DNA, 442 bp, Macaca Mulatta
cgtagagtggcagctctccaagaaattgttcgactcctgagaccaggtgggaaggcactcatttatgtctgggcaatggaacaagaatataataagcagaagtccaagtatcttaaaggaaatagaaatagccaaggaaagaaagaggagatgaacagcgatacctcagtgcagaggtcacttgtggagcaaatgcctgacatgggcagtcgagactcagcatcttctgtcccccacattaatgactctcaggaaggaggatgtaattcaaggcaagtttctaattccaagctgcctattcatgttaacaggacttctttttattctcaagatgtgctggttccctggcaccttaagggaaatcctgataaaggcaaacctgttgagccatttggtcccataggatcccaggacccaagtcgtgatttcatcgttactacca

SEQ ID NO: 34311 - DNA, 542 bp, Macaca Mulatta
agggcagggtgagagaaagaagcatgatgaagaggaacacacgtaatcctctctttttttcttctgggcagaaatcccaatgatggaaatctgccctgctggccacgctacaacaaggatgaaaagtacctgcagctggattttaccacgagcgtgggcatgaagctcaaggagaagaagatggctttttgcgtgagtctgtaccagtctcagagacctgagaagcagaggcaattctaagggtggctatgcaggaaggagccaaagaggggtttgccccaccacccaggccctggggagactggccatggacatacctggggacaagagttctacccaccccaatttagaactgcaggagctccctgctgcctccaggccagagctagagcttttgcctgttgtgtgggacctgcactgccctctccagcctgacatcccatgatgccccctacctcaatgttgacatccagttaggccaggccctgtcaacaccatactgtgcccagctctccagcctcgggacaacctctctttttcct

SEQ ID NO: 34312 - DNA, 763 bp, Macaca Mulatta
gggagaaccgcctgggaacagacgagtccaagttcaatgcggttctgtgctcccggagccgggcccacctggtggcagttttcaatgagtaccagagaatgacaggccgggacattgagaagagcatctgccgcgagatgtccggggatctggagcagggcatgctggctgtggtgaaatgtctcaagaacaccccagccttctttgcggagaggctcaacaaagccatgaggggggcaggaacaaaggaccggaccctgattcgcatcatggtgtctcgcagtgagaccgacctcctggacatcagatcggagtataagcggatgtacggcaagtcgctgtaccacgacatctcgggagatacttcatgggattaccggaagattctgctgaagatctgtggtggcaatgactgaacagtgactggtggctcacttctgcccacctgcaagccacagtggtgccagggaaaggccaaaagaatgtctgtttctaacaaatccataaatagccccgagatgcaccgtccctagagcctaagcctggcctccaccccttctgacctaagtatttgatgccacaaggacctggggtcaagatctagaaactttcatccaggaatgcctttttccaaaccccaggcccataaaaagaacatctttagcctgcgctgaaaaataaaatgtcttttcctttttattcactagaaaacactggacacaatccatttctccccccatttatgccctctgggtggggaata

SEQ ID NO: 34313 - DNA, 762 bp, Macaca Mulatta
  misc_feature (1)...(762): n = A,T,C or G
gggatcacaccactgtnnnnnnnnnnnnnnnnnnntgcaagaccctgtctcannnnnnnnnnnnnnnnnnnnaggcaaaaaatgacattttaagtcagtgctcaaacacggggccaattcctggaaaattttggagaagtagattttaggtcatataatctattacataccagaggcaggatctaaacctaacttaaaaacccatgtttccaaatgtaccatagtttggaagtgctgtcaggtcagagtgctcaataaacttttggcaatactgaagacagcatgatgcgaccatctttacaatctctgcagcacctgataaatgcctattaagtatttactaaattaatatggtgcgaccacttaaagattcaggccagacactagattttcaagcctacagtgttcaagaaataagaccatccaagtgaggaagccatttccaacaggctggacctataaggcaagaagagttcctggtaagacttaagacagaaatcagggattataaatctatagttttattaagacaaaaactgacagtggagtatgaagtttacattttaacaaagtgtacagagaaatctagcaccgtgcctagaaaggattttggcatgtaggctctaggatgcaagtcgagaacggatatcaagaaactggaggggatctccgtgaactccagaacggaaaccatttttgggggaatccggtgtacctgccttaaggaatttcgcttaagaaaagatcgcggcggccggggcg

SEQ ID NO: 34314 - DNA, 518 bp, Macaca Mulatta
  misc_feature (1)...(518): n = A,T,C or G
ttttccttcggtatgnataagattttttaaattgtcataattatattttaaataccttatcttcattaaagtatattaactcataattttgcagaaaatatgctctatattaggaaagaataaaagctaaaggtttcccaagactgtgtatgcgtttctacccattttgcccattttcctggaatacatcagtcccatcatcttgcgcttactgaaaaactgactacattcactcaccttgaagtatggcaaagctagcattgttactcaagggtgagaacattgaaggttagtatcacctgctacacgtgagggaatttctgacctttaaacagaggtattccttcagcttgtccaattaacaatgtggatggcagtgatctaagtatgggaccaaggcaaaagttaagttcctgtaccgtattttctaactataaagtattccatgtctccaagcccctgatctttcatcagtaaattaggaatcataatacccacttcattagactgcaccaccc

SEQ ID NO: 34315 - DNA, 759 bp, Macaca Mulatta
  misc_feature (1)...(759): n = A,T,C or G
gggagcaccatggcggttggcaagaacaagcgccttacgaaaggcggcaaaaagggagccaagaagaaagtggttgatccattttctaagaaagattggtatgatgtgaaagcacctgctatgttcaatataagaaatattggaaagacgctcgtcaccaggacccaaggaaccaaaattgcatctgatggtctcaagggtcgtgtgtttgaagtgagtcttgctgatttgcagaatgatgaagttgcatttagaaaattcaagctgattactgangatgttcaggncaaaaactgcctgactaacttccatggcatggatcctacccgtgacaaaatgtgttccaatggtcaaaaaagtggcagaaaatgaatgaaacctccaggtgaggtcaaaactccccaagggtacttggcctccccgggtcccggggttgggttttacaaaaaaaaccccccacatccaaatacgggaaaaaccctctttttgttccccccacccaaaagggggccccttcaaaacccnnnnnnnnnnnnnnnnnnnnngaaactctctggccccccccaaggggggggnnnnnnnnnnnnnnnnnnnnnnnnnnnnnnnnnnnnnnnnnnnnnnnnnnnnnnnnnttttcccccaaaaacccattttttttggaaaaaaaacaccttcttataaaaaggggggtgtgtcgcccacccactaacatttttttctcccccccccccccccgcacaaaaggagttcctctccctc

SEQ ID NO: 34316 - DNA, 2363 bp, Macaca Mulatta
  misc_feature (1)...(2363): n = A,T,C or G
gggaggaagaaagnggaagattttgatactagcactgagagcaaagacacagagcaaaaggaattagatcaagatatggtcacagaagatgaagatgacccaggatcacataaaagaggcagaagggnnnnnnnnnnnnnnnnnnnnnnnnnnnnnnnnnnnnnnnnnnnnnnnnnnnnnnnnnnnnnnnnnnnnnnnnnnnnnnnnnnnnnnnnnnnnnnnnnnnnnnnnnnnnnnnnnnnnnnnnnnnnnnnnnnnnnnnnnnnnnnnnnnnnnnnnnnnnnnnnnnnnnnnnnnnnnnnnnnnnnnnnnnnnnnnnnnnnnnnnnnnnnnnnnnnnnnnnnnnnnnnnnnnnnnnnnnnnnnnnnnnnnnnnnnnnnnnnnnnnnnnnnnnnnnnnnnnnnnnnnnnnnnnnnnnnnnnnnnnnnnnnnnnnnnnnnnnnnnnnnnnnnnnnnnnnnnnnnnnnnnnnnnnnnnnnnnnnnnnnnnnnnnnnnnnnnnnnnnnnnnnnnnnnnnnnnnnnnnnnnnnnnnnnnnnnnnnnnnnnnnnnnnnnnnnnnnnnnnnnnnnnnnnnnnnnnnnnnnnnnnnnnnnnnnnnnnnnnnnnnnnnnnnnnnnnnnnnnnnnnnnnnnnnnnnnnnnnnnnnnnnnnnnnnnnnnnnnnnnnnnnnnnnnnnnnnnnnnnnnnnnnnnnnnnnnnnnnnnnnnnnnnnnnnnnnnnnnnnnnnnnnnnnnnnnnnnnnnnnnnnnnnnnnnnnnnnnnnnnnnnnnnnnnnnnnnnnnnnnnnnnnnnnnnnnnnnnnnnnnnnnnnnnnnnnnnnnnnnnnnnnnnnnnnnnnnnnnnnnnnnnnnnnnnnnnnnnnnnnnnnnnnnnnnnnnnnnnnnnnnnnnnnnnnnnnnnnnnnnnnnnnnnnnnnnnnnnnnnnnnnnnnnnnnnnnnnnnnnnnnnnnnnnnnnnnnnnnnnnnnnnnnnnnnnnnnnnnnnnnnnnnnnnnnnnnnnnnnnnnnnnnnnnnnnnnnnnnnnnnnnnnnnnnnnnnnnnnnnnnnnnnnnnnnnnnnnnnnnnnnnnnnnnnnnnnnnnnnnnnnnnnnnnnnnnnnnnnnnnnnnnnnnnnnnnnnnnnnnnnnnnnnnnnnnnnnnnnnnnnnnnnnnnnnnnnnnnnnnnnnnnnnnnnnnnnnnnnnnnnnnnnnnnnnnnnnnnnnnnnnnnnnnnnnnnnnnnnnnnnnnnnnnnnnnnnnnnnnnnnnnnnnnnnnnnnnnnnnnnnnnnnnnnnnnnnnnnnnnnnnnnnnnnnnnnnnnnnnnnnnnnnnnnnnnnnnnnnnnnnnnnnnnnnnnnnnnnnnnnnnnnnnnnnnnnnnnnnnnnnnnnnnnnnnnnnnnnnnnnnnnnnnnnnnnnnnnnnnnnnnnnnnnnnnnnnnnnnnnnnnnnnnnnnnnnnnnnnnnnnnnnnnnnnnnnnnnnnnnnnnnnnnnnnnnnnnnnnnnnnnnnnnnnnnnnnnnnnnnnnnnnnnnnnnnnnnnnnnnnnnnnnnnnnnnnnnnnnnnnnnnnnnnnnnnnnnnnnnnnnnnnnnnnnnnnnnnnnnnnnnnnnnnnnnnnnnnnnnnnnnnnnnnnnnnnnnnnnnnnnnnnnnnnnnnnnnnnnnnnnnnnnnnnnnnnnnnnnnnnnnnnnnnnnnnnnnnnnnnnnnnnnnnnnnnnnnnnnnnnnnnnnnnnnnnnnnnnnnnnnnnnnnnnnnnnnnnnnnnnnnnnnnnnnnnnnnnnnnnnnnnnnnnnnnnnnnnnnnnnnnnnnnnnnnnnnnnnnnnnnnnnnnnnnnnnnnnnnnnnnnnnnnnnnnnnnnnnnnnnnnnnnnnnnnnnnnnnnnnnnnnnnnnnnnnnnnnnnnnnnnnnnnnnnnnnnnnnnnnnnnnnnnnnnnnnnnnnnnnnnnnnnnnnnnnnnnnnnnnnnnnnnnnnnnnnnnnnnnnnnnnnnnnnnnnnnnnnnnnnnnnnnnnnnnnnnnnnnnnnnnnnnnnnnnnnnnnnnnnnnnnnnnnnnnnnnnnnnnnnnnnnnnnnnnnnnnnnnnnnnnnnnnnnnnnnnnnnnnnnnnnnnnnnnnnnnnnnnnnnnnnnnnnnnnnnnnnnnnnnnnnnnnnnnnnnnnnnnnnnnnnnnnnnnnnnnnnnnnnnnnnnnnnnnnnnnnnnnnnnnnnnnnnnnnnnnnnnnnnnnnnnnnnnnnnnnnnnnnnnnnnnnnnnnnnnnnnnnnnnnnnnnnnnnnnnnnnnnnnnnnnnnnnaggtcccagactactatgacatcatcaaaaagcccattgccttaaatataattcgtgaaaaagtgaataaatgtgaatataaaatagcat

SEQ ID NO: 34317 - DNA, 411 bp, Macaca Mulatta
accttatacccaccctaccacagccctgagctcaccactcccccagggcatgggactcttgataattccaagtccatgaaaccctacaattattgcagtgcgtatgaatccttctatgaaagtacttcccctgagtgtgccagcccccagtttgaaggtcccttaagtcctcccccaattaactataatgggatattttccctgaagcaagaagaaaccttggactatggcaaaaattacaattacggcatgcattactgtgcagtgccacccaggggtccccttgggcagggtgccatgttcaggttgcccaccgacagccacttcccttgcgacttacatctgcgcagccaatctctcaccatgcaagatgggttaaatgcagtttttcataattaatgaggaaaatga

SEQ ID NO: 34318 - DNA, 834 bp, Macaca Mulatta
  misc_feature (1)...(834): n = A,T,C or G
tggcgagcggccgggaggagcggccgccctggcggctggggcggctcccgttgctcctgtgcctgctgctgctgaggagctcggcccgggcggctcacatcaagaaggcggaggcgacgacgacaacgacgagcgcgggcgccgnnnnnnnnnnnnnnnnnnnnnnnnnnnnnnnnnnnnnnnnnnnnnnnnnnnnnnnnnnnnnnnnnnnnnnnnnnnnnnnnnnnnnnnnnnnnnnnnnnnnnnnnnnnnnnnnnnnnnnnnnnnnnnnnnnnnnnnnnnnnnnnnnnnnnnnnnnnnnnnnnnnnnnnnnnnnnnnnnnnnnnnnnnnnnnnnnnnnnnnnnnnnnnnnnnnnnnnnnnnnnnnnnnnnnnnnnnnnnnnnnnnnnnnnnnnnnnnnnnnnnnnnnnnnnnnnnnnnnnnnnnnnnnnnnnnnnnnnnnnnnnnnnnnnnnnnnnnnnnnnnnnnnnnnnnnnnnnnnnnnnnnnnnnnnnnnnnnnnnnnnnnnnnnnnnnnnnnnnnnnnnnnnnnnnnnnnnnnnnnnnnnnnnnnnnnnnnnnnnnnnnnnnnnnnnnnnnnnnnnnnnnnnnnnnnnnnnnnnnnnnnnnnnnnnnnnnnnnnnnnnnnnnnnnnnnnnnnnnnnnnnnnnnnnnnnnnnnnnnnnnnnnnnnnnnnnnnnnnnnnnnnnnnnnnnnnnnnnnnnnnnnnnnnnnnnnnnnnnnnnnnnnnnnnnnnnnnnnnnnnngtttgtgctttctggaaatctgcatggtggctcagtggtagcaagctatcatgttgatgattctccagaacataaggccactggaatct

SEQ ID NO: 34319 - DNA, 593 bp, Macaca Mulatta
  misc_feature (1)...(593): n = A,T,C or G
gaaaaagatcttactctccagacggcaaagaatctccaagtgataagaagtccaaaactgatggttcccagaagactgaaagttcaaccgaaggtaaagaacaagaagagaagtccggtgaagatggtgagaaagacacaaaggatgaccagacagagcaggaacctaatatgctgcttgaatctgaagatgagctacttgtagatgaagaagaagcagcagccctgctagaaagtggcagttcagtgggagatgagaccgatcttgctaatttaggtgatgtggcttctgatgggaaaaaggaaccttcagataaagctgtgaaaaaagatgcaagtgctcagcagcannnnnnnnnnnnnnnnnaggtggacaagatcgaggaacttgatcaagaaaacgaagcagcgttggaaaatggaattaaaaatgaggaaaacacagaaccaggtgctgaatctgctgagaacgctgatgatcccaacaaagatacaagtgaaaacgcagatggtcaaagtgatgagaacaaggaggactatacaatcccagatgagtatagaattggaccatatcagcccaatgttcctgttggt

SEQ ID NO: 34320 - DNA, 8711 bp, Macaca Mulatta
  misc_feature (1)...(8711): n = A,T,C or G
agcctcagcgccctggagcagctggaagatggtggctgctacttctgctctgataagaaaccccccaagacccccagtgggccaggccggccacaggggagaagtcccactgctcagcagctgcgggatatccaaggccggcgtgaagccccaggaagctcctcctcccggaagagtcttaaaaccccccggaggatgctgctggttaagaacatggacccacgcctccagcagacagtggttctcagtcacaggaatactaggaacctggccgcctttctcagcaaagcctcagatctcctgcgctttcctgtgaagcagctgtacacgaccagcgggaaaaaggtnaggtggactcgctgcaggctctgctgcacagcccttctgtgctggtgtgtgccgggcatgaggccttcagacccccagccatggaaaatgccaggagaagtgaagctgaaactttatctgggctgacttcaagaaacaaaaacnnnnnnnnnnnnnnnnnnnnnnnnnnnnnnnnnnnnnnnnnnnnnnnnnnnnnnnnnngcacgccgcagccgccagagaggcctgttcctagcaaccccccggtgggccctgctcctgacaggcaccctcaggacacgccagcgcagccgggcccgctggtggccggtgatgacatgaagaagaaggtccgcatgaatgaggacggcagcctgtccgtggagatgaaagtccgcttccacctggtcggcgaggacacactcctgtggtcccggaggatgggcagggccagcgccctcacggcggccagcggggaagaccccattctgggggaggtggaccccctctgctgtgtgtgggagggctacccttggggcttctctgaccctggggtgtggggaccccggccctgcagggtgggatgtggggaagcctttggccgaggcgggcagccagggcccaagtatgaaatctggacgaatcccctgcatgcctcccagggagagagagtggcgactcggaagagggtggggggctggcccagcacgtccgctgcagtggcctgtggggccacggggctgccgggaggcagagatgcagcttggacagtgccagcccagcctccagcaccggccaccccgagggctcagagccagactcctcctgctgccccaggaccccggaagacagggaggacagcggcagcccctctgcccagagaggggctgagcgggaagctggagggagcctgggtgaggaccccagcctatgcacagatggagccgggctgggcagcccagagcaaggcggccgcctgacacccagggcccggagtgaggagggggcttcttccgactcgttggccagcaccgggtctcacgagggatccagcgaaatggggcgggcagccccggggctgcccaggcaaggcaagggctgagacctctcagcaggaggccaccaagggaggcaaccctggttctccagctcaagtctttcatctttaaagagtgaggacctgcaggcagagatgcaaggacggggcaccgagcaggccannnnnnnnnnnnnnnnnnnnnnnnnnnnnnnnnnnnnnnnnnnnnnnnnnnnnnnnnnnnnnnnnnnnnnnnnnnnnnnnnnnnnnnnnnnnnnnnnnnnnnnnnnnnnnnnnnnnnnnnnnnnnnnnnnnnnnnnnnnnnnnnnnnnnnnnnnnnnnnnnnnnnnnnnnnnnnnnnnnnnnnnnnnnnnnnnnnnnnnnnnnnnnnnnnnnnnnnnnnnnnnnnnnnnnnnnnnnnnnnnnnnnnnnnnnnnnnnnnnnnnnnnnnnnnnnnnnnnnnnnnnnnnnnnnnnnnnnnnnnnnnnnnnnnnnnnnnnnnnnnnnnnnnnnnnnnnnnnnnnnnnnnnnnnnnnnnnnnnnnnnnnnnnnnnnnnnnnnnnnnnnnnnnnnnnnnnnnnnnnnnnnnnnnnnnnnnnnnnnnnnnnnnnnnnnnnnnnnnnnnnnnnnnnnnnnnnnnnnnnnnnnnnnnnnnnnnnnnnnnnnnnnnnnnnnnnnnnnnnnnnnnnnnnnnnnnnnnnnnnnnnnnnnnnnnnnnnnnnnnnnnnnnnnnnnnnnnnnnnnnnnnnnnnnnnnnnnnnnnnnnnnnnnnnnnnnnnnnnnnnnnnnnnnnnnnnnnnnnnnnnnnnnnnnnnnnnnnnnnnnnnnnnnnnnnnnnnnnnnnnnnnnnnnnnnnnnnnnnnnnnnnnnnnnnnnnnnnnnnnnnnnnnnnnnnnnnnnnnnnnnnnnnnnnnnnnnnnnnnnnnnnnnnnnnnnnnnnnnnnnnnnnnnnnnnnnnnnnnnnnnnnnnnnnnnnnnnnnnnnnnnnnnnnnnnnnnnnnnnnnnnnnnnnnnnnnnnnnnnnnnnnnnnnnnnnnnnnnnnnnnnnnnnnnnnnnnnnnnnnnnnnnnnnnnnnnnnnnnnnnnnnnnnnnnnnnnnnnnnnnnnnnnnnnnnnnnnnnnnnnnnnnnnnnnnnnnnnnnnnnnnnnnnnnnnnnnnnnnnnnnnnnnnnnnnnnnnnnnnnnnnnnnnnnnnnnnnnnnnnnnnnnnnnnnnnnnnnnnnnnnnnnnnnnnnnnnnnnnnnnnnnnnnnnnnnnnnnnnnnnnnnnnnnnnnnnnnnnnnnnnnnnnnnnnnnnnnnnnnnnnnnnnnnnnnnnnnnnnnnnnnnnnnnnnnnnnnnnnnnnnnnnnnnnnnnnnnnnnnnnnnnnnnnnnnnnnnnnnnnnnnnnnnnnnnnnnnnnnnnnnnnnnnnnnnnnnnnnnnnnnnnnnnnnnnnnnnnnnnnnnnnnnnnnnnnnnnnnnnnnnnnnnnnnnnnnnnnnnnnnnnnnnnnnnnnnnnnnnnnnnnnnnnnnnnnnnnnnnnnnnnnnnnnnnnnnnnnnnnnnnnnnnnnnnnnnnnnnnnnnnnnnnnnnnnnnnnnnnnnnnnnnnnnnnnnnnnnnnnnnnnnnnnnnnnnnnnnnnnnnnnnnnnnnnnnnnnnnnnnnnnnnnnnnnnnnnnnnnnnnnnnnnnnnnnnnnnnnnnnnnnnnnnnnnnnnnnnnnnnnnnnnnnnnnnnnnnnnnnnnnnnnnnnnnnnnnnnnnnnnnnnnnnnnnnnnnnnnnnnnnnnnnnnnnnnnnnnnnnnnnnnnnnnnnnnnnnnnnnnnnnnnnnnnnnnnnnnnnnnnnnnnnnnnnnnnnnnnnnnnnnnnnnnnnnnnnnnnnnnnnnnnnnnnnnnnnnnnnnnnnnnnnnnnnnnnnnnnnnnnnnnnnnnnnnnnnnnnnnnnnnnnnnnnnnnnnnnnnnnnnnnnnnnnnnnnnnnnnnnnnnnnnnnnnnnnnnnnnnnnnnnnnnnnnnnnnnnnnnnnnnnnnnnnnnnnnnnnnnnnnnnnnnnnnnnnnnnnnnnnnnnnnnnnnnnnnnnnnnnnnnnnnnnnnnnnnnnnnnnnnnnnnnnnnnnnnnnnnnnnnnnnnnnnnnnnnnnnnnnnnnnnnnnnnnnnnnnnnnnnnnnnnnnnnnnnnnnnnnnnnnnnnnnnnnnnnnnnnnnnnnnnnnnnnnnnnnnnnnnnnnnnnnnnnnnnnnnnnnnnnnnnnnnnnnnnnnnnnnnnnnnnnnnnnnnnnnnnnnnnnnnnnnnagaagggctgcaagaagagggggtgcagttagaggaaactaagggaacagaaggagaaggacagcaagaagaagaggcgcagttagaggaaatcaaagaagaaacaggaggagaagggctgcaagaagagggtgtgcagttagaagaaactaacggaacaaaaggagaaggacagcaagaagaagaggcgcagttagaggaaattaaagaagaaacaggaggagaagggctgcaagaagagggggcgcagttagaggaaactaaaggaacagaagaaggacagcaagaagaagaggcgcagttagaggaaattaaagaagaaacagaaggagaaggaccacaagaagagggggcgcagttagagggaactaaagaaacagaagggctgcaagaagaggggttgcagttagaggggactaaaggaacagaagaggaagggcatcaagaagagggggcgcagtcagaggaaactaaaggaacagaaggaggacagcaagaagaagaggcgcagttagaggaaattaaagaagaaacaggaggagaagggctgcaagaagagggggcgcagttagaggaagttaaagaaggaccagaaggaggactgcaagaagaggctcttgaagagggtctcaaagaggaagggcttccagaaggaggaagcgtcggccggcaggaattgtcagacgccggctctccgggtggggaaggctcctgggaagatgacccaatacaggaggaggaagggggaagagcctctgcagagccgtgccccccagagggcacagaggaacccacagaacccgctagtcatctcagcgagacggacccaagtgtcagcgagagtcaaagtggctcccagcttgagcctggcttggaaaagccgcccggagccgccatgatgggccannnnnnnnnnnnnnnnnnnnnnnnnnnnnnnnnnnnnnnnnnnnnnnnnnnnnnnnnnnnnnnnnnnnnnnnnnnnnnnnnnnnnnnnnnnnnnnnnnnnnnnnnnnnnnnnnnnnnnnnnnnnnnnnnnnnnnnnnnnnnnnnnnnnnnnnnnnnnnnnnnnnnnnnnnnnnnnnnnnnnnnnnnnnnnnnnnnnnnnnnnnnnnnnnnnnnnnnnnnnnnnnnnnnnnnnnnnnnnnnnnnnnnnnnnnnnnnnnnnnnnnnnnnnnnnnnnnnnnnnnnnnnnnnnnnnnnnnnnnnnnnnnnnnnnnnnnnnnnnnnnnnnnnnnnnnnnnnnnnnnnnnnnnnnnnnnnnnnnnnnnnnnnnnnnnnnnnnnnnnnnnnnnnnnnnnnnnnnnnnnnnnnnnnnnnnnnnnnnnnnnnnnnnnnnnnnnnnnnnnnnnnnnnnnnnnnnnnnnnnnnnnnnnnnnnnnnnnnnnnnnnnnnnnnnnnnnnnnnnnnnnnnnnnnnnnnnnnnnnnnnnnnnnnnnnnnnnnnnnnnnnnnnnnnnnnnnnnnnnnnnnnnnnnnnnnnnnnnnnnnnnnnnnnnnnnnnnnnnnnnnnnnnnnnnnnnnnnnnnnnnnnnnnnnnnnnnnnnnnnnnnnnnnnnnnnnnnnnnnnnnnnnnnnnnnnnnnnnnnnnnnnnnnnnnnnnnnnnnnnnnnnnnnnnnnnnnnnnnnnnnnnnnnnnnnnnnnnnnnnnnnnnnnnnnnnnnnnnnnnnnnnnnnnnnnnnnnnnnnnnnnnnnnnnnnnnnnnnnnnnnnnnnnnnnnnnnnnnnnnnnnnnnnnnnnnnnnnnnnnnnnnnnnnnnnnnnnnnnnnnnnnnnnnnnnnnnnnnnnnnnnnnnnnnnnnnnnnnnnnnnnnnnnnnnnnnnnnnnnnnnnnnnnnnnnnnnnnnnnnnnnnnnnnnnnnnnnnnnnnnnnnnnnnnnnnnnnnnnnnnnnnnnnnnnnnnnnnnnnnnnnnnnnnnnnnnnnnnnnnnnnnnnnnnnnnnnnnnnnnnnnnnnnnnnnnnnnnnnnnnnnnnnnnnnnnnnnnnnnnnnnnnnnnnnnnnnnnnnnnnnnnnnnnnnnnnnnnnnnnnnnnnnnnnnnnnnnnnnnnnnnnnnnnnnnnnnnnnnnnnnnnnnnnnnnnnnnnnnnnnnnnnnnnnnnnnnnnnnnnnnnnnnnnnnnnnnnnnnnnnnnnnnnnnnnnnnnnnnnnnnnnnnnnnnnnnnnnnnnnnnnnnnnnnnnnnnnnnnnnnnnnnnnnnnnnnnnnnnnnnnnnnnnnnnnnnnnnnnnnnnnnnnnnnnnnnnnnnnnnnnnnnnnnnnnnnnnnnnnnnnnnnnnnnnnnnnnnnnngaggcaggagaggaggcccaggaggctgaaggggaggcccagtcagagtcagaaagtgtagaggccctggaggctgaaggggaggcccagccagagtcagaaagtgtagaggcccaggaggcagaaggggaggcccagccagagtcagaaggtgtcgaggccccggaggctgaaggggaggcccagccagagtcagaaggtgtagaggccccagaggcagaaagtgtagaggcccaggaggcagaaggggaggcccagccagagtcagaaggtgtcgaggccccagaggcagaaggggaggcccaggaggcagaagaggaggtccagccaaagtcggaaggtgtagagaccccagaggcagaagaggagggccaaccagagtcagaaggtgtagaggccctggaggctgaggaggaggccccagccagagtcagaaggtgtagaggccctggaggctgaaggggagacccaaccagagtcagaagttgtagaggccctggaggctgaaggggaggcccagccagagtcagaaggtgtcgaggccctggaggctgaaggggaggcccagccagagtcagaaggtgtagaggccccagaggcagaaggggaggcccaggaggcagaaggggaggtccagccagagtcggaaggtgtagagactccagaggcagaagaggagggccaaccagagtcagaaggtgtagaggccctggaggncaggaggcagaaggggaggcccagccagagtcagaaggtgtagaggccccggaggctgaaggggaggcccaggaggctgaaggggaggcccaggaggctgaaggggaggaccagccagagtcagaagttgtaggggccccagagattgaaggggagatgcaggaggcagaaggggaggcccagccagagtcagaaggtgtagaggcccaggaggcagaagagaaagcccaggaggcaggagaggaggcccaggaggctgaaggggaggcccagtcagagtcagaaagtgtagaggccctggaggctgaaggggaggcccagccagagtcagaaagtgtagaggcccaggaggcagaaggggaggcccagccagagtcagaaggtgtcgaggccccggaggctgaaggggaggcccagccagagtcagaaggtgtagaggccccagaggcagaaagtgtagaggcccaggaggcagaaggggaggcccagccagagtcagaaggtgtcgaggccccagaggcagaaggggaggcccaggaggcagaagaggaggtccagccaaagtcggaaggtgtagagaccccagaggcagaagaggagggccaaccagagtcagaaggtgtagaggccctggaggctgaggaggaggccccagccagagtcagaaggtgtagaggccctggaggctgaaggggagacccaaccagagtcagaagttgtagaggccctggaggctgaaggggaggcccagccagagtcagaaggtgtcgaggccctggaggctgaaggggaggcccagnnnnngaggcccagccagagtcagaaggtgtagaggccccagaggcagaaagtgtagaggcccaggaggcagaaggggaggcccagccagagtcagaaggtgtcgaggccccagaggcagaaggggaggcccaggaggcagaagaggaggtccagccagagtcggaaggtgtagagactccagaggcagaagaggaggnnnncaggaggcagaaggggaggcccagccagagtcagaaggtgtagaggcccaggaggcagaagagaaagcccaggaggcaggagaggaggcccaggaggctgaaggggaggcccagtcagagtcagaaagtgtagaggccctggaggctgaaggggaggcccagccagagtcagaaagtgtagaggcccaggaggcagaaggggaggcccagccagagtcagaaggtgtcgaggccccggaggctgaaggggagacccaaccagagtcagaagttgtagaggccctggaggctgaaggggaggcccagccagagtcagaaggtgtagaggccccagaggcagaaagtgtagaggcccaggaggcagaaggggaggcccagccagagtcagaaggtgtcgaggccccagaggcagaaggggaggcccaggaggctgaaggggaggcccaggaggctgaaggggaggaccagccagagtcggaaggtgtagagactccagaggcagaagaggagggccaaccagagtcagaaggtgtagaggccctggaggctgatgaggaggccccagcagagtcagaaggtgtaaaggccctggaggcnnnnnnnnnnnnnnnnnnnnnnnnnnnnnnnnnnnnnnnnnnnnnnnnnnnnnnnnnnnnnnnnnnnnnnnnnnnnnnnnnnnnnnnnnnnnnngacaggccccctccccccccctttccccagggggggacactccccacccaaaaccagcctcccagacgggcccttcttcctccagagcctcctttcagggcaacagctggcggaaagactcaggagacggccatgtatgtggagacacaaggagccctgacgccaagtccgtggggccccctcatgcagagaggaaggccaccaggatgtatccagaaagttccacttctgagcaagaagaggccccttcagacacaaggtctccagagcagggggccagtgaaggctgtgaccctcaagaggaccagacactcggaaatcctgcccccaccaaggcagtgggcagggcagacggctttgaccaagatgacttagatttctag

SEQ ID NO: 34321 - DNA, 674 bp, Macaca Mulatta
  misc_feature (1)...(674): n = A,T,C or G
tagtagacaatgtctccgtncnatgattaggtgcctaactggcaaatgtcttagcttcttaaagctaggtatatctgatgcggcttacttgtcaaagttaacttgattcacctgagaaaacctgataaaaaatagttaaaaattacttaaatttgccagcagggaagtaaaataattatgagaagaacgtcttaagcctaatattaaatcagttttgttacggggaaaactcaataattgttacttcagctgttgaatatatggttagatccaagttgatttttgtgtctacaattaaattttgtatacaattagattattttttaatataggatttagaaaccaagggtatgtgttttaaaattatactttttcttgacctgtctagctgtcagaaaacgtaacagaagatggacctagaaatcctagtgaaaaaccttcccagcaaagaagcatagcttttagttctcaatcattctgtagcaaaaccaatacaaaaatcagctaaagctgacacagaagagacatcttcaagatcaccaaaaatcgataagaaaaaaagtccatatggactgtggatacctgtctgaagggacgaaaactaatggctaagtttgcatgaaaactgaactttatcgccagtcagggttactagcattatcttatcctttgag

SEQ ID NO: 34322 - DNA, 721 bp, Macaca Mulatta
gtgtctgcctttccctggccagagtctcttggctgacattctgacccttccttttctttaggcccatcttgacgattccaagaccacccccttgagcaaaaatgccatcccctctgggtcccccatgcctgcccctcatggacccagagactgccctcgaggagcctgagactgcccgcctccgcttccgagggttccgctaccaggaggtggcaggtccccgagaagccctggcccggctgcgtgagctgtgtcgccagtggctgcagcctgaggcacactccaaggagcagatgctggagatgctggtgctggagcagtttctgggcacactgcctcccgagatccaggcctgggtgcgcggtcagcggccaggcagtcctgaggaggccgctgccctagtcgaaggactacagcatgaccctgggcaactgttgggctgggtgagtgtggctggcatcagcttcttggagggatagaccctggctagaacccttttgacttatttcttctcctcagatcacagcccacatcctgaagcaggaggtactccctgcagctcagaaaacagaggaaccattggggagcccccacccctcagggacagtggagtcccctggagagggtccccaggacaccagaatagaggggtctgtccagctcagctgcagtgtgaaggaggagcccaatgtcgatggacaggaaatgggtgagattgggc

SEQ ID NO: 34323 - DNA, 733 bp, Macaca Mulatta
  misc_feature (1)...(733): n = A,T,C or G
gaggcggaagacaacgagtcatctgtttgagaagatgctgagtggctcagacatcaaatctacggacaagcccatgctgtaaaactgtgtctgaacatattttttgggttgctggagttcatctgtaagtcatttttgaggaataagatttatattaagactatcaaacacggtgttgcttacaatagcnnnnnnnnnnnnntnnnnnnnnnnnnnnnnnnnnccagcagaagaattgttatgtattttggagtctatctatatgatgcctatttttaggctttaaaaagtcttcaaaatctttaacggctgatttatctagttaaatgcttaatccttagcaggctcttattctttaattaaacatgccttaagtagatgtgaataaaatgaaaacaagnnnnnnnnnnnnnnnnnnnnnnnnnnnnnnnnnnnnnnnnnnnnnnnnnnnnnnnnnnnnnnnnnnnnnnnnnnnnnnnnnnnnnnnnnnnnnnnnnnnnnnnnnnnnnnnnnnnnnnnnnnnnnnnnnnnnnnnnnnnnnnnnnnnnnnnnnnnnnnnnnnnnnnnnnnnnnnnnnnnnnnnnnnnnnnnnnnnnnnnnnnnnnnnnnnnnnnnnnnnnnnnnnnnnnnnnnnnnnnnnnnnnnnnnnnnnnnnnnnnnnnnnnnnnnnnnnnnnnnnnnnnnnnnnnnnnnnnnnnnnnnnnnnnnnnnnnnnnnnnnnnnnnnnnnnnnn

SEQ ID NO: 34324 - DNA, 691 bp, Macaca Mulatta
ggggagaagactttggcttctgatagtcatggactcactaggctgctgaggaagatcaataatatctactggaatcagtcatcagaagtcaagcatggaaattgtgaattgagaagtgtgtggccagaccagtacctccaagtgtccagaagatgtgtgaccagccaaaacacagtcaatgctgcccagcaaaagacaatcaatgctgcccgtcaaaacagaaccagtgcagccagccaaaaggcaatcaatgctgcccaccaaaacagaaccagtgctgccagccaaaaggcaatcaatgctgcccgccaaaacacaatcactgctgccagccaaaacccccttgctgcattaaggccaggtgctgtagtttggagaccaagcccgaatgctcaccgcttaatgtggagtctgagcccaactcaccacaaactcaggacaagggctctcaaacccagcagcagccctatagcccacaaaataagtccagtcccagcaaatgggagcagaagtcaaacaaatagattgtccctggggccatgcctttcaccttgtagggtggggtattactgagagtcaggctagactatgtttagagagcattttcacatgacacatttcaccaacgagagcttcattccatcatgctcctcccaagaggctcatcgaatggagatagaactgatctctc

SEQ ID NO: 34325 - DNA, 1907 bp, Macaca Mulatta
  misc_feature (1)...(1907): n = A,T,C or G
ggccgtggctcgcatcaagaagatttatgaggagaagnnnnnnnnnnnnnnnnnnnnnnnnnnnnnnnnnnnnnnnnnnnnnnnnnnnnnnnnnnnnnnnnnnnnnnnnnnnnnnnnnnnnnnnnnnnnnnnnnnnnnnnnnnnnnnnnnnnnnnnnnnnnnnnnnnnnnnnnnnnnnnnnnnnnnnnnnnnnnnnnnnnnnnnnnnnnnnnnnnnnnnnnnnnnnnnnnnnnnnnnnnnnnnnnnnnnnnnnnnnnnnnnnnnnnnnnnnnnnnnnnnnnnnnnnnnnnnnnnnnnnnnnnnnnnnnnnnnnnnnnnnnnnnnnnnnnnnnnnnnnnnnnnnnnnnnnnnaggttcacatcgagttcacagagggcgaagacaagatcaccttggagggccctacagaggatgtcaatgtggcccaggaacagatagaaggcatggtcaaagatttnnnnnnnnnnnnnnnnnnnnnnnnnnnnnnnnnnnnnnnnnnnnnnnnnnnnnnnnnnnnnnnnnnnnnnnnnnnnnnnnnnnnnnnnnnnnnnnnnnnnnnnnnnnnnnnnnnnnnnnnnnnnnnnnnnnnnnnnnnnnnnnnnnnnnnnnnnnnnnnnnnnnnnnnnnnnnnnnnnnnnnnnnnnnnnnnnnnnnnnnnnnnnnnnnnnnnnnnnnnnnnnnnnnnnnnnnnnnnnnnnnnnnnnnnnnnnnnnnnnnnnnnnnnnnnnnnnnnnnnnnnnnnnnnnnnnnnnnnnnnnnnnnnnnnnnnnnnnnnnnnnnnnnnnnnnnnnnnnnnnnnnnnnnnnnnnnnnnnnnnnnnnnnnnnnnnnnnnnnnnnnnnnnnnnnnnnnnnnnnnnnnnnnnnnnnnnnnnnnnnnnnnnnnnnnnnnnnnnnnnnnnnnnnnnnnnnnnnnnnnnnnnnnnnnnnnnnnnnnnnnnnnnnnnnnnnnnnnnnnnnnnnnnnnnnnnnnnnnnnnnnnnnnnnnnnnnnnnnnnnnnnnnnnnnnnnnnnnnnnnnnnnnnnnnnnnnnnnnnnnnnnnnnnnnnnnnnnnnnnnnnnnnnnnnnnnnnnnnnnnnnnnnnnnnnnnnnnnnnnnnnnnnnnnnnnnnnnnggccaacatagccgaggtagaggtctccatccctgccaagctgcacaactccctcatcggcaccaannnnnnnnnnnnnnnnnnnnnnnnnnnnnnnnnnnnnnnnnnnnnnnnnnnnnnnnnnnnnnnnnnnnnnnnnnnnnnnnnnnnnnnnnnnnnnnnnnnnnnnnnnnnnnnnnnnnnnnnnnnnnnnnnnnnnnnnnnnnnnnnnnnnnnnnnnnnnnnnnnnnnnnnnnnnnnnnnnnnnnnnnnnnnnnnnnnnnnnnnnnnnnnnnnnnnnnnnnnnnnnnnnnnnnnnnnnnnnnnnnnnnnnnnnnnnnnnnnnnnnnnnnnnnnnnnnnnnnnnnnnnnnnnnnnnnnnnnnnnnnnnnnnnnnnnnnnnnnnnnnnnnnnnnnnnnnnnnnnnnnnnnnnnnnnnnnnnnnnnnnnnnnnnnnnnnnnnnnnnnnnnnnnnnnnnnnnnnnnnnnnnnnnnnnnnnnnnnnnnnnnnnnnnnnnnnnnnnnnnnnnnnnnnnnnnnnnnnnnnnnnnnnnnnnnnnnnnnnnnnnnnnnnnnnnnnnnnnnnnnnnnnnnnnnnnnnnnnnnnnnnnnnnnnnnnnnnnnnnnnnnnnnnnnnnnnnnnnnnnnnnnnnnnnnnnnnnnnnnnnnnnnnnnnnnnngaagctcaggtgacattagaatgtgctataccccagaaattccatcgatctgtcatgggccccaaaggttccagaatccagcagattactcgggatttcagtgttcaaattaaattcccagacagagaggagaac

SEQ ID NO: 34326 - DNA, 340 bp, Macaca Mulatta
gagcccggctgcggatctgggaagcggctctgcacggcactgggatctgcatattcctgggatcacgaagccccagaagctgggtttctttaaattagggctgccgttttctgtttctccctgggctgcggaaagccagaagatttttatctagcttatacaaggctgctggtgttccctctttttttccacgagggtgtttttggctgcaattgcatgaaatcccaatggtgtagaccagtggcgatggatctaggagtttaccaactgagacatttttcaatttctttcttgtcatccttgctggggactgaaaacgcttctgtgagacttgataata

SEQ ID NO: 34327 - DNA, 210 bp, Macaca Mulatta
tcacagacaccagcgaagcaaggcgctcctgaccaagtagattttttaaaaattagagtgaattacttttaatcaaaaatttatgttacgtttcaagaatatagtactaagattatactcaatacactcagaaaagtttcaaacctactaatccagtgacaatttgaattggttttatacctagaggaataaaatgaaatactaaatctt

SEQ ID NO: 34328 - DNA, 2329 bp, Macaca Mulatta
  misc_feature (1)...(2329): n = A,T,C or G
aggagggagcccagccccgcgttcggctgctctcgaggaggccggagccccggacaggatgcgccccgcggagccgcctgcgcctgcggcagccgnnnnnnnnnnnnnnnnnnnnnnnnnnnnnnnnnnnnnnnnnnnnnnnnnnnnnnnnnnnnnnnnnnnnnnnnnnnnnnnnnnnnnnnnnnnnnnnnnnnnnnnnnnnnnnnnnnnnnnnnnnnnnnnnnnnnnnnnnnnnnnnnnnnnnnnnnnnnnnnnnnnnnnnnnnnnnnnnnnnnnnnnnnnnnnnnnnnnnnnnnnnnnnnnnnnnnnnnnnnnnnnnnnnnnnnnnnnnnnnnnnnnnnnnnnnnnnnnnnnnnnnnnnnnnnnnnnnnnnnnnnnnnnnnnnnnnnnnnnnnnnnnnnnnnnnnnnnnnnnnnnnnnnnnnnnnnnnnnnnnnnnnnnnnnnnnnnnnnnnnnnnnnnnnnnnnnnnnnnnnnnnnnnnnnnnnnnnnnnnnnnnnnnnnnnnnnnnnnnnnnnnnnnnnnnnnnnnnnnnnnnnnnnnnnnnnnnnnnnnnnnnnnnnnnnnnnnnnnnnnnnnnnnnnnnnnnnnnnnnnnnnnnnnnnnnnnnnnnnnnnnnnnnnnnnnnnnnnnnnnnnnnnnnnnnnnnnnnnnnnnnnnnnnnnnnnnnnnnnnnnnnnnnnnnnnnnnnnnnnnnnnnnnnnnnnnnnnnnnnnnnnnnnnnnnnnnnnnnnnnnnnnnnnnnnnnnnnnnnnnnnnnnnnnnnnnnnnnnnnnnnnnnnnnnnnnnnnnnnnnnnnnnnnnnnnnnnnnnnnnnnnnnnnnnnnnnnnnnnnnnnnnnnnnnnnnnnnnnnnnnnnnnnnnnnnnnnnnnnnnnnnnnnnnnnnnnnnnnnnnnnnnnnnnnnnnnnnnnnnnnnnnnnnnnnnnnnnnnnnnnnnnnnnnnnnnnnnnnnnnnnnnnnnnnnnnnnnnnnnnnnnnnnnnnnnnnnnnnnnnnnnnnnnnnnnnnnnnnnnnnnnnnnnnnnnnnnnnnnnnnnnnnnnnnnnnnnnnnnnnnnnnnnnnnnnnnnnnnnnnnnnnnnnnnnnnnnnnnnnnnnnnnnnnnnnnnnnnnnnnnnnnnnnnnnnnnnnnnnnnnnnnnnnnnnnnnnnnnnnnnnnnnnnnnnnnnnnnnnnnnnnnnnnnnnnnnnnnnnnnnnnnnnnnnnnnnnnnnnnnnnnnnnnnnnnnnnnnnnnnnnnnnnnnnnnnnnnnnnnnnnnnnnnnnnnnnnnnnnnnnnnnnnnnnnnnnnnnnnnnnnnnnnnnnnnnnnnnnnnnnnnnnnnnnnnnnnnnnnnnnnnnnnnnnnnnnnnnnnnnnnnnnnnnnnnnnnnnnnnnnnnnnnnnnnnnnnnnnnnnnnnnnnnnnnnnnnnnnnnnnnnnnnnnnnnnnnnnnnnnnnnnnnnnnnnnnnnnnnnnnnnnnnnnnnnnnnnnnnnnnnnnnnnnnnnnnnnnnnnnnnnnnnnnnnnnnnnnnnnnnnnnnnnnnnnnnnnnnnnnnnnnnnnnnnnnnnnnnnnnnnnnnnnnnnnnnnnnnnnnnnnnnnnnnnnnnnnnnnnnnnnnnnnnnnnnnnnnnnnnnnnnnnnnnnnnnnnnnnnnnnnnnnnnnnnnnnnnnnnnnnnnnnnnnnnnnnnnnnnnnnnnnnnnnnnnnnnnnnnnnnnnnnnnnnnnnnnnnnnnnnnnnnnngacttagacctgtcgggaattgcttgaccaccttcccaggtttgggggcagcctggccctggagaccctggatctccgtagaaactcgctcacagcccttccccagaaggctgtgtctgagcagctctcgagaggtctgcggaccatctacctcagtcagaatccgtatgactgctgtggggtggacggctggggggccctgcagcaggggcagacggtggccgactgggccacggtcacttgtaacctctcctccaagatcatccgcctggcggagctgcccgggggtgtgcctcgggactgtaagtgggagcggctggacctgggcctgctctacctggtgctcatcctccccagctgcctcaccctgctggtggcctgcaccctcatcgtcctcacttttaagaagcctctgcttcaggtcatcaagagccgctgccactggtcctctgtttactgacctgcctgtgtgccaagactcgaaacttggtccgcacacaacaggacattttctcttttctctgccagctttcaagatgggatgcagaggccaagtctgacgaattgaagtttcaattaanatttanaatgtttccattcctcatc

SEQ ID NO: 34329 - DNA, 589 bp, Macaca Mulatta
  misc_feature (1)...(589): n = A,T,C or G
ggggctttttcgttcttttactaggtcgctgttggctgtcccggtccgcgccagctccctgcgcgccttgtcgccatgcctcggaaaattgaggaaatcaaggactttctgctcacagcccgacgaaaggatgccaaatctgtgaagatcaagaaaaataaggacaatgtgaagtttaaagttcgatgcagcagatacctttacaccctggtcatcactgacaaagagaaggcagagaaactgaagcagtccctgccccctggtttggcagtgaaggaactgaaatgaaccagacacactgattttgaagtgtattaaaatactaaaaatcctaanaaacatttacactctctttatagcttcaatcttccttatttcctcacaacccgtaaaaatctactctccaccccccaccgccctcttaaattatcccaactattttaaatttggtgccccacattcatccaagaatttcttaatttttttttgcgcgcgcccccaagagagttaaacgggttaatgttttcccagaaaaccggcttatgccaattgggcgtaataccgaagaggcccgggaaacaagttttaa

SEQ ID NO: 34330 - DNA, 840 bp, Macaca Mulatta
tttctcccccagtccaaggcactgggtcttggctggggtgcaggttccaagctgttctcctgctgtgtcggtgagttctggtcaacctgcaacctcctgatgtggtcactgcagttcgagtcttcagggactccccatggcctggagtgctttgccttgcttacatgggagaggataatggatttatagagaacatcatctaaatccaacttggccattttctgaccacacttgccagattactgtagtctaaatctaccattgtagaaagacgggggagcttagggctgcacaaacccgggtctggaactggctccttaccttggaaggtgaataatcctggcaggactcttagcctccctgggcctcagtttatgtttcatgggaatgaggatctctgctgggtggttgggtaatgtgggggctgtgtggaagcagtctatcaatgcaagctgaaatagaaatatttctccacagagtatgaaggtcaaatgagagaatacacttaaattaaatggaaaattaaaatggcaaaaaagacaaagctgtactgaaagttccaaacttctctataaggagctttttgactatgaaggaatcctgtactcattccccctaaatataaaacaaagagttgaaggaggcagaagggagagtgatgtatgacgggcgaggacttcgcctgctgttgctggctttgaggatggagaaaagaggccacaaatctagatgctggagcccctagaagctggaggcggcagggacctgattcttcccttgaacctccagaagggacacagccctaccagcaccttgactttagccgggtgagatcctctt

SEQ ID NO: 34331 - DNA, 820 bp, Macaca Mulatta
gggcgttagacccggtccaattgctgaggctgcagcgctgcctccgagtctgcaagacatctacgcagcgaaatcgagcctggccttgagggtccacaccgcgagagaagatgcgtgcgctcgttccggagcctaagcctggagacctgattgagatttttcgccctttctacagacactgggccatctatgttggcgatggatatgtggttcacctggcccctccaagtgaggttgcaggagcgggtgcagccagtgtcatgtctgccctgactgacaaggccatcgtgaagaaggaattgctgtatgatgtggccgggagtgacaagtaccaggtcaacaacaaacatgatgacaagtactcaccgctgccctatagcaaaatcatccagcgggcggaggagctggtggggcaggaggtgctctacaagctgaccagtgagaactgcgagcactttgtgaacgagctgcgctatggagtcgccccgcagtgaccaggttcagaagttgtcgttcatcgcttcaagccgtcgcaggaatggggcttgggagcccatggggcccttattggaagtcagtgtctctcaagaaacaagccgaacaaaaggcccattaactggaaaaaagcactgctcctgttacccggcatgaccctttgataccatcgaggggggagtcttgttttttgctaaagttttgggggtttgggttttgtggaatttcctttgtgaatttataaataaaggccttattttttcaccgggaataaaaattaaagttaccaacgaaggggaaaggaatttttaattggggggggaat

SEQ ID NO: 34332 - DNA, 863 bp, Macaca Mulatta
ggctgaatgaaattgtttgtatacataaaggatatttgtgtacaatgaccttttttcccccacacttgttttcttttctttgttttttatggcaactggaaattatttactatatttcatttatgtttgtctttctatcataaagaattgatcagtatgtaaatatgtgatttgaaccatggttaacttacaagtgttaactacagctttttagaaaacatagccctaagatatgttaagcagggcccgggggagccagtgggcttgtgctttctgtagagctggaagaaggccttccatcccgcctcttgggcggagagtgtactttcctaataaggaagggaatcacaatggaaacacccctgaaccattttattgcagtaatttttttcatatctgaaactattatttaatattttgaataagattttaaaacataaatggcaaagatatcaaaccccacaggggcaccgggggcggcggcaaaaccccaccccccacgccacctttaatcccccccccgccaaaacccagctacgaggtggcgccccttttgggggccctctccgcccccaagaaaacttttcaaaaacccttctttttgggcgccggggggcccccgagaggtgagaggaaacaggggcccaaagggttttctcccaagaaaaaccccgggaccaaaaaacaaaagcgttggggcttcctccccccaaaaaaaaccaccccgcggggggccaacgcaaaggttccccgaaaacatctccaaagagggggttctccggggaagccttgtaggggcgcctttcccaaagggggagccccaaagccgggcgccgacaataacaaatatatcgccccgcccc

SEQ ID NO: 34333 - DNA, 787 bp, Macaca Mulatta
  misc_feature (1)...(787): n = A,T,C or G
gggggctattcatttgtcagattttcaacccatgaaagtgcagcccatgccattgtttcggtgaacggtactacgattgaaggacatgtggttaaatgctattggggtaaagaatctcctgatatgactaaacttccgacaggtaattcgatttttcatagcactttttaaggtttccatcttacatatcacataaaaagctttggaaactctgtaaaataaacaataaaataaagcatatagctactttcagttgattgtatttcaaaattgattatttgcggtattaactgaatcttaatactttcttttcacaggtgtcaccaccccaataaacttagacaatgataaataacagagtcctattcacataagggtgcttacttagtttttctcttccttgtctcccactctttcttcatatacggtgtttcttacgtgttccctaagacaataatttgctttttcctaggtcgactatagtcagtgggggccgatgggagccaagtgtatggaaacccacaacagtatggacagtgtatggccaagtggggggggagtaccgcccttatagaggaatcgcgggcgcgcatgggaatcgacccaggtgtttgggagtaggaatgagatccaccttcctgcgtggccgtgggaatgggagagggaggtgtcggaaactccagagcccccccggagagggagaaagagcagccgcagaccccgctgggaaggaaaaccacccgtaggcgggancacaaggccctcagaagaagatggaaacgagagg

SEQ ID NO: 34334 - DNA, 208 bp, Macaca Mulatta
ctttatgcagttggtggtcgtgatggaagctcttgtctcaaatcagtagaatgttttgatcctcatactaataagtggacactgtgtgcacagatgtcaaaaaggagaggtggcgtaggagtgacgacctggaacggactgctgtatgctataggggggcacgacgctcccgcatccaacttgacttccagactctcagactgtgtgg

SEQ ID NO: 34335 - DNA, 777 bp, Macaca Mulatta
  misc_feature (1)...(777): n = A,T,C or G
ggatcaannnnnnnnnnnnnnnnnnnnagatggagtcacgctnnnnnnnnnnnnnnnnnnnnnnnnnnnnnnnnnaagattgtgccactgcactccaacctgggtgacagtnnnnnnnnnnnnnnnnnnnnnnnnnnnnnnaatcttgagacctatgttaatcacagaaaagccctaacaaattctctgccagtgagttcgcgcttctattgatttgcttccaatgatctgttctacaatttctctatgaattttgtttggatattgccggagaaatataagttctcgtcttccttttataattctatgaggattatctttatatttcttacatttatcactttgaaattatttattttcattccagtggaatttacatacattatactttccaaactgttgatttttgtctgtctgtccctctgccatttgtcattgattctcagtgttggctggccactttctgcctcaatatgggaatgcctgtatctgtgtctgtgtccaggccgtatgtgtaggatggtgtttgttctggaagaggcttccgtgcacagttcttcctacttttgttctcggacccaggagctcagccctctgtggggcttcctttatctcccttctccttctgagtgtacttgtgggtcctttaaaccatagtttttgggctctgattaccgggtaagggaagaagaaccccaaattgccctttttaaaatggttttaataggacaccaccgggaaaaattccctaattaggttttaaactcctttttgggg

SEQ ID NO: 34336 - DNA, 835 bp, Macaca Mulatta
ggggggctgcagcggcgctggcgttaggtgaacgacgtgaacacaccaagtatatgaccagccttcatgaaagtgaacagagagacgaagcgcctttatgtgggtggccttagccagaacatttctgaggcagacctacaaaatcagttcagcagatttggagaagtttcggatgtggagatcatcacacggaaagatgaccaaggaaacccacagaaagtctttgcatatatcaacatcagtgtagcagaagcagacctgaaaaaatgtatgtctgttttaaataaaacaaaatggaaaggtggaacattacaaattcaactagcaaaagaaagctttttgcacagattggcccaagagagagaggaagcaaaagctaagaaagaaaaatcaacaacagataacaccaacttgttagaaaagataggaggagtggatttccatatgaaagctgtgccagggacagaagtgccagggcataagaattgggttgtgagcaaatttggaagagtcttacctgttcttcaccttaaaaatcaacataaacgtaaagtcataaaatatgatccctcaaaatactgccacaacctaaagaagataggggaaggatttcacgaacacccattcctatatcccagcctgacctgggggatttaagaaggagggaaatgaccctattgagtaagaaaacagcgaaggagaaatccttctgacttttcatgggcccctccccaagaaggttgataaaaagtgcaaaaaaggatgaagaagttcccatttggggtctccttgggcaatgaagtaaccaagggccccaaggaaagggtaaaataaa

SEQ ID NO: 34337 - DNA, 405 bp, Macaca Mulatta
aaagcaaaaacagggggtgctgtagaccggctgacggacaccagcaggtacacaggctcccacaaggagcgcttcgatgagagcggcaagggcaagggcattgcgggacggcaggacatcctggacgacagtggctacgtgagcgcctacaagaatgcaggcacttatgacaccaaggtgaagaagtgaggcttgggaagactgccccgccaagtgcggctgcccctgccagaggctcaggcctggatctaaggggcatgtggagcaagagatcctggtcccctccctgctggacctgccacccagagcttcctgcctagtcccatggggccggcccaccaggcctctgacccaggctgctctgcggccccttcctcctcctcttccccctccgacttctgtcca

SEQ ID NO: 34338 - DNA, 124 bp, Macaca Mulatta
ttccctatgttcaaaagaggacgctgtctttgcataggccctggagtaaaagcagtgaaagtggcagatattgagaaagcctccataatttacccaagtaacaactgtgacaaaatagaagtga

SEQ ID NO: 34339 - DNA, 1320 bp, Macaca Mulatta
  misc_feature (1)...(1320): n = A,T,C or G
gtactgagcattctccataacccactgggaaatgtgctaggaaaaccccccttgagcttcctgcctctggatccccttgggtctgacttggtggacaagtttccggcaccctcagttagaggatcacgcctggacacccggcccatcctggactctcgatctagcagcccctctgactcagacaccagtggcttcagctctggatcagatcatctctcagatttgatnnnnnnnnnnnnnnnnnnnnnnnnnnnnnnnnnnnnnnnnnnnnnnnnnnnnnnnnnnnnnnnnnnnnnnnnnnnnnnnnnnnnnnnnnnnnnnnnnnnnnnnnnnnnnnnnnnnnnnnnnnnnnnnnnnnnnnnnnnnnnnnnnnnnnnnnnnnnnnnnnnnnnnnnnnnnnnnnnnnnnnnnnnnnnnnnnnnnnnnnnnnnnnnnnnnnnnnnnnnnnnnnnnnnnnnnnnnnnnnnnnnnnnnnnnnnnnnnnnnnnnnnnnnnnnnnnnnnnnnnnnnnnnnnnnnnnnnnnnnnnnnnnnnnnnnnnnnnnnnnnnnnnnnnnnnnnnnnnnnnnnnnnnnnnnnnnnnnnnnnnnnnngctggattagttaacaccttccgtgtttttggctctttgagtgtgctgtggcctggtaaggatggcaagcacccccggtgtcctcccaaaggtaatatgcctaaaggnnnnnnnnnnnnnnnnnnnnnnnnnnnnnnnnnnnnnnnnnnnnnnnnnnnnnnnnnnnnnnnnnnnnnnnnnnnnnnnnnnnnnnnnnnnnnnnnnnnnnnnnnnnnnnnnnnnnnnnnnnnnnnnnnnnnnnnnnnnnnnnnnnnnnnnnnnnnnnnnnnnnnnnnnnnnnnnnnnnnnnnnnnnnnnnnnnnnnnnnnnnnnnnnnnnnnnnnnnnnnnnnnnnnnnnnnnnnnnnnnnnnnnnnnnnnnnnnnnnnnnnnnnnnnnnnnnnnnnnnnnnnnnnnnnnnnnnnnnnnnnnnnnnnnnnnnnnnnnnnnnnnnnnnnnnnnnnnntctggtcgtgtgactttcaataaccaacggagttacctgaaagcagtcagcgctgcttttgtggagatcaaaaccaccaaattcacaaagaaggnnnnnnnnnnnnnnnnnnnnnnnnnnnnnnnnnnnnnnnnnnnnnnnnnnnnnnnnnnnnnnnnnnnnnnnnnnnnnnnnnnnnnnnnnnnnnnnnnttgccggagctgctggcactggcggcacagcatggagggcttgcgccaccacagccccctgatgcggaatcagaagaaccgagattccagcta

SEQ ID NO: 34340 - DNA, 146 bp, Macaca Mulatta
caggtgctcgggagctgggagagttccatgccttcattgtctcggacctgcgggagctgcaggatcaggcgggccagagcatcctgctgctgcggatccagaacccctggggccggcggtgctggcaggggctctggagagagggg

SEQ ID NO: 34341 - DNA, 105 bp, Macaca Mulatta
gctgacaagccagagacgaccgaggagcaactgggtgagttctacgaagctctcgactgcttgcgcattcccaggtcagacgtcgtgtacaccgatcagaaaaag

SEQ ID NO: 34342 - DNA, 124 bp, Macaca Mulatta
gtgaggaaaggaaagcaatcaggagagacaggagaggtggacactaatggcgatgtccctaagtagacagcatagggcagtgttgtctataagacatggacagaagtggaagaagctgacaccc

SEQ ID NO: 34343 - DNA, 628 bp, Macaca Mulatta
  misc_feature (1)...(628): n = A,T,C or G
tctccctccctacggcaaggggcaagtttcaagctttcttcctttccagtattttccctgtgaccccaagctgagaagagagcggtcagggtcctctcccacacatcaaaccctgncagggcagaaagaggagccacaagactcgccttcctgccaccgaatccttccctacctcttcaccccattaaaccaatggcttcttcacttcctggcttgtctccgttcctcttccttcggccccactgccttcaaactctgagcttgggacagggaagaggatgagggagggtcctggggagccaattccattctccctcggtggggtggaatgggtctgggagaccttagcaggggtagaggagagcttaagagtcgttcgatctagagccgtccctggaacctggtcccaccaagagacacaacctgggaaccgtttcagagtgggtgtcatggctaaaagggagagggagctttcagttagccccttgaaacatcccaaactcctccgtggcttgctagggcctggggaccactagtcctggatttcgcactgaacccgcagtaacctccctgtgctaagctgggtgttgtggccaacactaattccaggccagacctctgcactccc

SEQ ID NO: 34344 - DNA, 829 bp, Macaca Mulatta
  misc_feature (1)...(829): n = A,T,C or G
gctctaagtaagctcaggatcccctccatgtatccaacaagccaggtggagattgtccagtccaatgtggtgtttgatattagcagcctcatgctctatgggactcaggccatccccgttcgcctaaaaatcctactggaccggctcttcagtgtgttgaagcaagatgaggttctccagatcctccatgccttggactggacacttcaggattacatccgtggatacgtgctgcagnnaggatgcatcaggaaaggtgttggatcactggagcatcatgaccagtgaggaagaagtggccaccttgcagcagttccttcgttttggagagactaaatctatagttgaactcatggcaattcaagagaaagaagagcaatccattatcataccaccttccacagcaaacgtagatatcagggctttcattgagagctgcagccacaggaattctagcctccccactcctgtggacaaaggaaaccccagcagtatacacccctttgagaacctcataagcaacatgactttcatgctgcctttccagttcttcaaccctctgcctcctgcactgatagggtcactgcccgaacaatatatgttggagcagggtcatgaccaaagtcaggaccccagacaggaagtccatgggcccttccctaacagcagcttcttaacttccagttccacaccatttcaggttgaaaaagatcagtgtttaaactgtccagatgctattactaaaaaagaagacagcacccatttaagtgactccagatcanntataacataagtcactnaagtttgaaaggacacagttataccctga

SEQ ID NO: 34345 - DNA, 480 bp, Macaca Mulatta
tcacatagtcctaggctttttctcttccctcttcaggtttggctccttccggtctgtgctcctacgtgaaacccgagcaacattaaggctttcagggcttttcttggtctttccttaaaaagacttggtaaatttgcatgtcttgtaaatcactttcttcttttgttttcttttaaattaaaaatgatgctattaaatacatctgtttctatcttccgcacttttcagtctccttttgacattaaatttgacagcttaatgcaagaaaattatttacaaatgcccatgagcctcattctggttaccacagtttggtttcctttattaattagtgattttgccatatcctaaactatatcaatccataataattagtgagcttcttgggccaggtaatttggttcaactttataacttgtaagttctaattgggctttactaatagagaatttacagagcatatattatctcactaattat

SEQ ID NO: 34346 - DNA, 1027 bp, Macaca Mulatta
  misc_feature (1)...(1027): n = A,T,C or G
tctctatggtggacgtagtgatgcttctccatgggcattttcagccactacaacggctgcaaccccagctgcgatccttcttccaccaacactacctgggtggtcaggagcccacccccagtaacatccggngatggcaacccacacattgatcacgggtctagaagagtatgtgcgggagagttttntccttggtgcaggttcagccaggtgtggacatcatccggacaaacctggaatttctccaagagcagtttaatagcattgctgctcatgtgctgcattgcacagncacagatagtggatttggggcccggttgctggagttgtgtaaccaaggcctgtttgaatgcctggccctgaacctgcattgcttggggggacagcagatggagcttgctgctgttatcaatggccgaattnnnnnnnnnnnnnnnnnnnnnnnnnnnnnnnnnnnnnnnnnnnnnnnnnnnnnnnnnnnnnnnnnnnnnnnnnnnnnnnnnnnnnnnnnnnnnnnnnnnnnnnnnnnnnnnnnnnnnnnnnnnnnnnnnnnnnnnnnnnnnnnnnnnnnnnnnnnnnnnnnnnnnnnnnnnnnnnnnnnnnnnnnnnnnnnnnnnnnnnnnnnnncagcgggagaatgcttccccagcccctggaacaacagcagaagaggccatgtcccgaggtccacctcctgctcctgaggggggctcccgggatgaacaggatggagcttcagctgagacagaaccttgggcagctgcagtccccccannnnnnnnnnnnnnnnnnnnnnnnnnnnnnnnnnnnnnnnnnnnnnnnnnnnnnnnnnnnnnnnnnnnnnnnnnnnnnnnnnnnnnnnnnnnnnnnnnnnnnnnngacgatgcagggtgagggcccccagctgcttctctcagaggctgtgagccgggcagctaaggcagccggagctaggcccctgacgagccccgagagcctgagccgggacctggaggcaccagaggttcaggagagctacaggcagcag

SEQ ID NO: 34347 - DNA, 814 bp, Macaca Mulatta
ctacaaacttcactccattctgcacatcaacacagactccaacatggatacaaagacatttttactacccaaaatgagctcctagtatataacaagaatcaacaccagacaaaaaatctcaatcaagatcaagagcatggccagaaggcacataaaggatcataccaatcttcaagcacagaagaaagacaacctaaccatgaagaaaatagtgtacagaaaggtgtacccaaaggcagcatttctatccaaactgaagagaaaatatatggcaagtctcaaaaccaggtaacaattcctagtcaagatcaagagcatggccataaggaaaataaaatatcataccaatcttcaagtgcagaagaaagacgactcaacagtggagaaaagggcatacagaaaggtgtacccaaaggcagcatttctatccaaactgaagagaaaatatatggcaagtctcaaaaccaggtaacaattcctagtcaagatcaagagcatggccataaggaaaataaaatatcataccaatcttcaagtgcagaagaaagacgactcaacagtggagaaaagggcatacagaaaggtgtacccaaaggcagcatttctatccaaactgaagagaaaatatatggcaagtctcaaaaccaggtaacaattcctagtcaagatcaagagcatggccataaggaaaataaaatagcataccaatcttcaagtacagaagaaagacaactcaactatggaggaaagagcattcagaaagacgtatcccaaagcagtctttctttccagaacagaaaagctagtagaaggc

SEQ ID NO: 34348 - DNA, 795 bp, Macaca Mulatta
tacacggcgttctgagcagagacacgcagaccagctgaggaggacaaagataaggtggcgttcactcccaggctctgactttcaacatcatgcaggggcttgtctgtctggaggcagtttgctcataataaactataaaatatggtcattttgggaatgggatttggcataaatgtggttggctgccttctgtctgctgtgtccttggggtacaatgactttgatctcagccatgacacaacaagaaaaccctcccggttgacctggctgggctgcgcgttgtttgcagagcagaatggggaggaaacagtgttggcagcttaactgatgtgtgtggttggagtctctaccatggcaaagggacaccacagggtagtgaacattcaggaactgaagggcatatggcctgatcacacagttccaagcttttcaaaacttcaggttatcagagaccttcctgtgggcctctcttgatggctaagaaccagtttaggggagtagttctctctggatgagtgtcacttgcttacagtttctgtgactcaagtaccagcagtggggttgagacctgggttgatgttatttacaagcctgcccagagatgggaataaacagagatccacggcatgactatatgtttgtcattttccttttatttccttgggaatcgaaaggtgtcccagtacatttccctgcacttgcagaggtgcatgactaaatacattgtccctcaatgcccctgaagatcacagagacagtcagccaattgcctggcaggcagtagatgttattttc

SEQ ID NO: 34349 - DNA, 3357 bp, Macaca Mulatta
  misc_feature (1)...(3357): n = A,T,C or G
cgaggaggaagcagcaggcgccccggcgcgcagcannnnnnnnnnnnnnnnnnnnnnnnnnnnnnnnnnnnnnnnnnnnnnnnnnnnnnnnnnnnnnnnnnnnnnnnnnnnnnnnnnnnnnnnnnnnnnnnnnnnnnnnnnnnnnnnnnnnnnnnnnnnnnnnnnnnnnnnnnnnnnnnnnnnnnnnnnnnnnnnnnnnnnnnnnnnnnnnnnnnnnnnnnnnnnnnnnnnnnnnnnnnnnnnnnnnnnnnnnnnnnnnnnnnnnnnnnnnnnnnnnnnnnnnnnnnnnnnnnnnnnnnnnnnnnnnnnnnnnnnnnnnnnnnnnnnnnnnnnnnnnnnnnnnnnnnnnnnnnnnnnnnnnnnnnnnnnnnnnnnnnnnnnnnnnnnnnnnnnnnnnnnnnnnnnnnnnnnnnnnnnnnnnnnnnnnnnnnnnnnnnnnnnnnnnnnnnnnnnnnnnnnnnnnnnnnnnnnnnnnnnnnnnnnnnnnnnnnnnnnnnnnnnnnnnnnnnnnnnnnnnnnnnnnnnnnnnnnnnnnnnnnnnnnnnnnnnnnnnnnnnnnnnnnnnnnnnnnnnnnnnnnnnnnnnnnnnnnnnnnnnnnnnnnnnnnnnnnnnnnnnnnnnnnnnnnnnnnnnnnnnnnnnnnnnnnnnnnnnnnnnnnnnnnnnnnnnnnnnnnnnnnnnnnnnnnnnnnnnnnnnnnnnnnnnnnnnnnnnnnnnnnnnnnnnnnnnnnnnnnnnnnnnnnnnnnnnnnnnnnnnnnnnnnnnnnnnnnnnnnnnnnnnnnnnnnnnnnnnnnnnnnnnnnnnnnnnnnnnnnnnnnnnnnnnnnnnnnnnnnnnnnnnnnnnnnnnnnnnnnnnnnnnnnnnnnnnnnnnnnnnnnnnnnnnnnnnnnnnnnnnnnnnnnnnnnnnnnnnnnnnnnnnnnnnnnnnnnnnnnnnnnnnnnnnnnnnnnnnnnnnnnnnnnnnnnnnnnnnnnnnnnnnnnnnnnnnnnnnnnnnnnnnnnnnnnnnnnnnnnnnnnnnnnnnnnnnnnnnnnnnnnnnnnnnnnnnnnnnnnnnnnnnnnnnnnnnnnnnnnnnnnnnnnnnnnnnnnnnnnnnnnnnnnnnnnnnnnnnnnnnnnnnnnnnnnnnnnnnnnnnnnnnnnnnnnnnnnnnnnnnnnnnnnnnnnnnnnnnnnnnnnnnnnnnnnnnnnnnnnnnnnnnnnnnnnnnnnnnnnnnnnnnnnnnnnnnnnnnnnnnnnnnnnnnnnnnnnnnnnnnnnnnnnnnnnnnnnnnnnnnnnnnnnnnnnnnnnnnnnnnnnnnnnnnnnnnnnnnnnnnnnnnnnnnnnnnnnnnnnnnnnnnnnnnnnnnnnnnnnnnnnnnnnnnnnnnnnnnnnnnnnnnnnnnnnnnnnnnnnnnnnnnnnnnnnnnnnnnnnnnnnnnnnnnnnnnnnnnnnnnnnnnnnnnnnnnnnnnnnnnnnnnnnnnnnnnnnnnnnnnnnnnnnnnnnnnnnnnnnnnnnnnnnnnnnnnnnnnnnnnnnnnnnnnnnnnnnnnnnnnnnnnnnnnnnnnnnnnnnatatcctcaaatccctggaaaacacagtgacatccgcaatcaacaaggcccagaacggcactcctagctgggggggctaccccagcatccatgccgcctaccaacttcccaacatgatgaagttgtccctgggctcgtcggggaagagcacgcccctgaaacccatgtttggcaacagtgagattgtctccccgacgaaaaaccagaccctggtgtctccacccagcagccagacgtcccccatgcccaagactaactttcatgccatggaggagctggtgaaaaaggtcactgagaaagttgccaaagtggaggagaagatgaaggagccggatgggaagctttccccgcccaagcgggccactccctccccctgtagcagcgaagtcggggagcccatcaagatggaggcgtccagcgacgggggcttccgaagccaggagaacagccccagccccccacgggatgggtgcaaggatgggagccccctggcggagccggtggagaacgggaaggagctggtgaagcccctgtccagcagtttgagtggcagcacggccatcatcaccgaccacccgcccgaacagccttttgttaaccctttgagcgccctgcagtcagtcatgaacattcacctgggcaaggccgccaagccctccctgcctgccctggaccccatgagcatgcttttcaagatgagcaacagcctggcggagaaggccgctgtggccaccccgccgcccctgcagtccaagaaggcagaccacctcgaccgctatttctaccacgtcaacaacgaccagcccatagactggacaaaagggaagagtgacaaaggctgctccttgggttcagtgcttctgtcannnnnnnnnnnnnnnnnnnnnnnnnnnnnnnnnnnnnnnnnnnnncaaagacatctgccgtcgtatcattcatgtcaaactcgccgctacgcgagaatgccttgtcagatatatccgatatgctgaagaacttgacagagagccacacgtcaaaatcctccactccttccagcatctccgagaagtctgacattgatggggccactctggaggaggctgaggagtcgacgcctgcccagaagaggaagggccgccagtcaaactggaacccccagcacctcctgatcctccaggcccagtttgccgccagcctccggcagacctcggaagggaagtacatcatgtcagacctgagcccccaggagcggatgcatatctccaggttcactgggctgtccatgaccaccatcagccactggctggccaacgtgaaataccagcttcgaaggacaggtggaacaaagttcctcaaaaacttggacactggccaccccgtcttcttttgtaacgattgtgcgtctcaaatcaggactccttccacgtacatcagtcacctagaatcacacttaggcttccggctacgggacttatccaaactgtccaccgaacagattaacagtcagatagcacaaaccaagtcaccgtcagaaaaaatggtgacgtcctcccccgaggaggacctagggacctcctatcagtgcaaactttgcaatcggacctttgccagcaagcatgctgttaaacttcaccttagcaaaacacacgggaaatctccggaagaccaccttctgtatgtctctgagttagagaagcagtagcatttgcttttgatagaagggactgcagtttgctttgagggaaactgtggaaggcaccttcaggccccccctctgacttgttgttcttggcacatgttcttattttaactgcagagaa

SEQ ID NO: 34350 - DNA, 656 bp, Macaca Mulatta
actggaagacccaagatagaaacattttaatttatgtctcgaggaaagggactggttaccagggcagccagttctggaaaacctttcccagagcatacagcttagcaaaaagacagtgtttgtgatgacagacaagtatgcaaagaccgaaaattttaagatagcattttacttgtcccatcagaggctcatggatgaaaaagttgatgtgattatcttgatatttcttgagaagccctttcagaagtccaagttcctccagctccggaaaagactctgtgggagttctgtccttgagtggccaacaaacccgcaggctcacccatacttctggcagtgtctaaagaacgccctggccacagacaatcacgtggcctatagtcaggtgttcaaggaaacggtctagcccttctttgcaaaacacgactgcctagcttaccaaggagatgcctggtggtttaaattgttttcatgtatgtcacaccaaaagcgtgttttgaaattcttcaagaaatgagattggcccatatttcgggggagtcaccaacatctgtcacaggagttggaaagatggaatttatataatgcattgagtcttctttcctatgtctctgtgtctctatttgcacttgagtctctcccctcagctcttgtat

SEQ ID NO: 34351 - DNA, 1039 bp, Macaca Mulatta
  misc_feature (1)...(1039): n = A,T,C or G
ccagccacccctccccgacgtgctggtctggatgctcagtgggcggcgccgcgtggcctgggcccgaatccgtgcccaggatgtgctgttctctgtggtcgaggaggaacggggccgggactgtgggaagatccagagtctaatgctcacgnggcacccggggcagcccctggtgaggtctgtgccaagctggagctcttcctgtggctcggcctgggcaagcaagccaaggcctgcacctctgagttgcccccggatttgctgcccgagcccttggtcggactgccctccagcctacaccgggacgngactttagctacttccaactccgggctcacttgtaccaggcccgaggtgtgctggcagcagatgacagtggcctctcggacccctttgctcgagtcctcatctctacccagtgccagaccacacgggtnggtcctggagcagacgttgagccctctgtgggatgaactcctggtatttgagcagttgattgtggacgggaggagggagcatctgcaggaggagcctccattagtgatcatcaatgtctttgaccacaataagtttgnggcccccctgtgttcctgggcagggcactggctgccccgagggtaaagctgatggaggacccataccaacgcccagagcttcagttcttccccctgaggaagggaccacgggcagccggagagctcattgctgtctttgagctcattgaactggactacagtggccgacttgagnnagccctcagtgcccagtgatgtggagccccaggatctggcacccctggtcgagccccactctggacgcctgtcccttccacccaatgtgtgcccagtgctcagggagttccgtgttgaggnnnaggtgctgttctggggtcttaggggccttggtcgtgtgcatctgttcgaggtggagcagccccaggttgtactggaggtggctgggcaacgtgtggagtctgaggtcctggccagctaccgtgagagccccaatttcactgagcttgtcaggcatctgacagtgg

SEQ ID NO: 34352 - DNA, 657 bp, Macaca Mulatta
gggacaaataatctgaccaagtataaggctaaagcttattttttgaaacaaatccatcctaccatgatttgtctttagtaaaaatgtgagactggagagagaaaaattatgtttcaaaaactatggtacacttgttattagattctagtctcatcagttgttttggggctgtttttcaccataatgatgctttctgactcagctcctctctaccctggatatgagatgccctaatagttaggtgggaatatcattgcccctattcagcctgaagaagttgaagaggatagatttcatctgcttacagcctttaggattaagggttcccttgtaaaagggaggggggaaatatgccagaggtgtttgaaccagagcaactcaatcttgaataggggctgggtaaaataaggctgagatccactgagctgcatcccaggaggttaggcattctaagttacagaatgagattagaggttggcaccacaggtttaacaacaccttgctgataaaagaatgcagtaaagaagctgggcaaaagcccatccaaaccaagatggcatggaaatggactcctgggccattttaccctaattttaatgcctttaccaaaaaaacatccccccaacccccaaccgtttttaaagccctgaaacctcc

SEQ ID NO: 34353 - DNA, 6278 bp, Macaca Mulatta
  misc_feature (1)...(6278): n = A,T,C or G
agacgcacaaggtggcagcccctgacggcgtcgtgccgacactggacacagtccgccacgaagccctcttgtacacttggctggccgagcacaagcccctggtcttgtgtggccctccggggtctggcaagaccatgacactcttcagcgccctccggttcttgtctgacatgcaggtnnnnnnnnnnnnnnnnnnnnnnnnnnnnnnnnnnnnnnnnnnnnnnnnnnnnnnnnnnnnnnnnnnnnnnnnnnnnnnnnnnnnnnnnnnnnnnnnnnnnnnnnnnnnnnnnnnnnnnnnnnnnnnnnnnnnnnnnnnnnnnnnnnnnnnnnnnnnnnnnnnnnnnnnnnnnnnnnnnnnnnnnnnnnnnnnnnnnnnnnnnnnnnnnnnnnnnnnnnnnnnnnnnnnnnnnnnnnnnnnnnnnnnnnnnnnnnnnnnnnnnnnnnnnnnnnnnnnnnnnnnnnnnnnnnnnnnnnnnnnnnnnnnnnnnnnnnnnnnnnnncacaggttcctgcgtcacgtgcctgtcgtgtatgtggattacccgggcgccgcctccctcacacagttctgcggctccttcatccgctccatgctgaggctccttccatccctgcggncctnctcggaggcgctcaatgctgccgtggtggagttcnnnnnnnnnnnnnnnnnnnnnnnnnnnnnnnnnnnnnnnnnnnnnnnnnnnnnnnnnnnnnnnnnnnnnnnnnnnnnnnnnnnnnnnnnnnnnnnnnnnnnnnnnnnnnnnnnnnnnnnnnnnnnnnnnnnnnnnnnnnnnnnnnnnnnnnnnnnnnnnnnnnnnnnnnnnnnnnnnnnnnnnnnnnnnnnnnnnnnnnnnnnnnnnnnnnnnnnnnnnnnnnnnnnnnnnnnnnnnnnnnnnnnnnnnnnnnnnnnnnnnnnnnnnnnnnnnnnnnnnnnnnnnnnnnnnnnnnnnnnnnnnnnnnnnnnnnnnnnnnnnnnnnnnnnnnnnnnnnnnnnnnnnnnnnnnnnnnnnnnnnnnnnnnnnnnnnnnnnnnnnnnnnnnnnnnnnnnnnnnnnnnnnnnnnnnnnnnnnnnnnnnnnnnnnnnnnnnnnnnagaatattccgtcaacctcaaggccacttgcttctgattggtgttagtggagcaggaaaaactaccctgtctcgttttgtcgcctggatgaacggtttgagtgtgtaccagattaaggtnaggtccacaggaagtacacaggggaagacttcgatgaagatctgcggacagtattgagacgctctggctgtaaaaatgaaaagatagcatttataatggatgaatctaatgtattagattctggattcctggagcgaatgaatacccttctggccaatggagaggtnaggtgcctggtctctttgaaggagatgagtatgccactttgatgacgcagtgcaaagagggggcacagaaggaaggcctgatgctggactcgcacgaggagctctacaagtggttcaccagccaggttatccgtaacctccacgtcgtgttnnnnnnnnnnnnnnnnnnnnnnnnnnnnnnnnnnnnnnnnnnnnnnnnnnnnnnnnnnnnnnnnnnnnnnnnnnnnnnnnnnnnnnnnnnnnnnnnnnnnnnnnnnnnnnnnnnnnnnnnnnnnnnnnnnnnnnnnnnnnnnnnnnnnnnnnnnnnnnnnnnnnnnnnnnnnnnnnnnnnnnnnnnnnnnnnnnnnnnnnnnnnnnnnnnnnnnnnnnnnnnnnnnnnnnnnnnnnnnnnnnnnnnnnnnnnnnnnnnnnnnnnnnnnnnnnnnnnnnnnnnnnnnnnnnnnnnnnnnnnnnnnnnnnnnnnnnnnnnnnnnnnnnnnnnnnnnnnnnnnnnnnnnnnnnnnnnnnnnnnnnnnnnnnnnnnnnnnnnnnnnnnnnnnnnnnnnnnnnnnnnnnnnnnnnnnnnnnnnnnnnnnnnnnnnnnnnnnnnnnnnnnnnnnnnnnnnnnnnnnnnnnnnnnnnnnnnnnnnnnnnnnnnnnnnnnnnnnnnnnnnnnnnnnnnnnnnnnnnnnnnnnnnnnnnnnnnnnnnnnnnnnnnnnnnnnnnnnnnnnnnnnnnnnnnnnnnnnnnnnnnnnnnnnnnnnnnnnnnnnnnnnnnnnnnnnnnnnnnnnnnnnnnnnnnnnnnnnnnnnnnnnnnnnnnnnnnnnnnnnnnnnnnnnnnnnnnnnnnnnnnnnnnnnnnnnnnnnnnnnnnnnnnnnnnnnnnnnnnnnnnnnnnnnnnnnnnnnnnnnnnnnnnnnnnnnnnnnnnnnnnnnnnnnnnnnnnnnnnnnnnnnnnnnnnnnnnnnnnnnnnnnnnnnnnnnnnnnnnnnnnnnnnnnnnnnnnnnnnnnnnnnnnnnnnnnnnnnnnnnnnnnnnnnnnnnnnnnnnnnnnnnnnnnnnnnnnnnnnnnnnnnnnnnnnnnnnnnnnnnnnnnnnnnnnnnnnnnnnnnnnnnnnnnnnnnnnnnnnnnnnnnnnnnnnnnnnnnnnnnnnnnnnnnnnnnnnnnnagcttaactatgcagacatgttaaagagagtggagcccctacgcaatgagctgcagaagctggaagatgacgccaaggacaaccagcagaaggccaacgaggtggagcagatgatccgagacctggaagccagcatcgcccgctacaaggaggaatacgccgtcctgatctcagaggcccaggctatcaaggcagatctggctgctgtcgaggcaaaagtaannnnnnnnnnnnnnnnnnnnnnnnnnnnnnnnnnnnnnnnnnnnnnnnnnnnnnnnnnnnnnnnnnnnnnnnnnnnnnnnnnnnnnnnnnnnnnnnnnnnnnnnnnnnnnnnnnnnnnnnnnnnnnnnnnnnnnnnnnnnnnnnnnnnnnnnnnnnnnnnnnnnnnnnnnnnnnnnnnnnnnnnnnnnnnnnnnnnnnnnnnnnnnnnnnnnnnnnnnnnnnnnnnnnnnnnnnnnnnnnnnnnnnnnnnnnnnnnnnnnnnnnnnnnnnnnnnnnnnnnnnnnnnnnnnnnnnnnnnnnnnnnnnnnnnnnnnnnnnnnnnnnnnnnnnnnnnnnnnnnnnnnnnnnnnnnnnnnnnnnnnnnnnnnnnnnnnnnnnnnnnnnnnnnnnnnnnnnnnnnnnnnnnnnnnnnnnnnnnnnnnnnnnnnnnnnnnnnnnnnnnnnnnnnnnnnnnnnnnnnnnnnnnnnnnnnnnnnnnnnnnnnnnnnnnnnnnnnnnnnnnnnnnnnnnnnnnnnnnnnnnnnnnnnnnnnnnnnnnnnnnnnnnnnnnnnnnnnnnnnnnnnnnnnnnnnnnnnnnnnnnnnnnnnnnnnnnnnnnnnnnnnnnnnnnnnnnnnnnnnnnnnnnnnnnnnnnnnnnnnnnnnnnnnnnnnnnnnnnnnnnnnnnnnnnnnnnnnnnnnnnnnnnnnnnnnnnnnnnnnnnnnnnnnnnnnnnnnnnnnnnnnnnnnnnnnnnnnnnnnnnnnnnnnnnnnnnnnnnnnnnnnnnnnnnnnnnnnnnnnnnnnnnnnnnnnnnnnnnnnnnnnnnnnnnnnnnnnnnnnnnnnnnnnnnnnnnnnnnnnnnnnnnnnnnnnnnnnnnnnnnnnnnnnnnnnnnnnnnnnnnnnnnnnnnnnnnnnnnnnnnnnnnnnnnnnnnnnnnnnnnnnnnnnnnnnnnnnnnnnnnnnnnnnnnnnnnnnnnnnnnnnnnnnnnnnnnnnnnnnnnnnnnnnnnnnnnnnnnnnnnnnnnnnnnnnnnnnnnnnnnnnnnnnnnnnnnnnnnnnnnnnnnnnnnnnnnnnnnnnnnnnnnnnnnnnnnnnnnnnnnnnnnnnnnnnnnnnnnnnnnnnnnnnnnnnnnnnnnnnnnnnnnnnnnnnnnnnnnnnnnnnnnnnnnnnnnnnnnnnnnnnnnnnnnnnnnnnnnnnnnnnnnnnnnnnnnnnnnnnnnnnnnnnnnnnnnnnnnnnnnnnnnnnnnnnnnnnnnnnnnnnnnnnnnnnnnnnnnnnnnnnnnnnnnnnnnnnnnnnnnnnnnnnnnnnnnnnnnnnnnnnnnnnnnnnnnnnnnnnnnnnnnnnnnnnnnnnnnnnnnnnnnnnnnnnnnnnnnnnnnnnnnnnnnnnnnnnnnnnnnnnnnnnnnnnnnnnnnnnnnnnnnnnnnnnnnnnnnnnnnnnnnnnnnnnnnnnnnnnnnnnnnnnnnnnnnnnnnnnnnnnnnnnnnnnnnnnnnnnnnnnnnnnnnnnnnnnnnnnnnnnnnnnnnnnnnnnnnnnnnnnnnnnnnnnnnnnnnnnnnnnnnnnnnnnnnnnnnnnnnnnnnnnnnnnnnnnnnnnnnnnnnnnnnnnnnnnnnnnnnnnnnnnnnnnnnnnnnnnnnnnnnnnnnnnnnnnnnnnnnnnnnnnnnnnnnnnnnnnnnnnnnnnnnnnnnnnnnnnnnnnnnnnnnnnnnnnnnnnnnnnnnnnnnnnnnnnnnnnnnnnnnnnnnnnnnnnnnnnnnnnnnnnnnnnnnnnnnnnnnnnnnnnnnnnnnnnnnnnnnnnnnnnnnnnnnnnnnnnnnnnnnnnnnnnnnnnnnnnnnnnnnnnnnnnnnnnnnnnnnnnnnnnnnnnnnnnnnnnnnnnnnnnnnnnnnnnnnnnnnnnnnnnnnnnnnnnnnnnnnnnnnnnnnnnnnnnnnnnnnnnnnnnnnnnnnnnnnnnnnnnnnnnnnnnnnnnnnnnnnnnnnnnnnnnnnnnnnnnggtgccggtgaatctgctccgtgcgggccgcatctttgtgttcgagccaccgccaggggtgaaggccaacatgctgaggacattcagcagcattcccgtctcacggatatgcaagnnnnnnnnnnnnnnnnnnnnnnnnnnnnnnnnnnnnnnnnnnnnnnnnnnnnnnnnnnnnnnnnnnnnnnnnnnnnnnnnnnnnnnnnnnnnnnnnnnnnnnnnnnnnnnnnnnnnnnnnnnnnnnnnnnnnnnnnnnnnnnnnnnnnnnnnnnnnnnnnnnnnnnnnnnnnnnnnnnnnnnnnnnnnnnnnnnnnnnnnnnnnnnnnnnnnnnnnnnnnnnnnnnnnnnnnnnnnnnnnnnnnnnnnnnnnnnnnnnnnnnnnnnnnnnnnnnnnnnnnnnnnnnnnnnnnnnnnnnnnnnnnnnnnnnnnnnnnnnnnnnnnnnnnnnnnnnnnnnnnnnnnnnnnnnnnnnnnnnnnnnnnnnnnnnnnnnnnnnnnnnnnnnnnnnnnnnnnnnnnnnnnnnnnnnnnnnnnnnnnnnnnnnnnnnnnnnnnnnnnnnnnnnnnnnnnnnnnnnnnnnnnnnnnnnnnnnnnnnnnnnnnnnnnnnnnnnnnnnnnnnnnnnnnnnnnnnnnnnnnnnnnnnnnnnnnnnnnnnnnnnnnnnnnnnnnnnnnnnnnnnnnnnnnnnnnnnnnnnnnnnnnnnnnnnnnnnnnnnnnnnnnnnnnnnnnnnnnnnnnnnnnnnnnnnnnnnnnnnnnnnnnnnnnnnnnnnnnnnnnnnnnnnnnnnnnnnnnnnnnnnnnnnnnnnnnnnnnnnnnnnnnnnnnnggatcctttgttcaggttctttgagagagaagtgaagatgggcgcgaagctgcttcaggacgttcgccaggacctcgcggatgtggtccaggtgtgcgaaggaaagaagaagcagaccaactacttgcgcacgctgatcaatgagctggtgaaaggnnnnnnnnnnnnnnnnnnnnnnnnnnnnnnnnnnnnnnnnnnnnnnnnnnnnnnnnnnnnnnnnnnnnnnnnnnnnnnnnnnnnnnnnnnnnnnnnnnnnnnnnnnnnnnnnnnnnnnnnnnnnnnnnnnnnnnnnnnnnnnnnnnnnnnnnnnnnnnnnnnnnnnnnnnnnnnnnnnnnnnnnnnnnnnnnnnnnnnnnnnnnnnnnnnnnnnnnnnnnnnnnnnnnnnnnnnnnnnnnnnnnnnnnnnnnnnnnnnnnnnnnnnnnnnnnnnnnnnnnnnnnnnnnnnnnnnnnnnnnnnnnnnnnnnnnnnnnnnnnnnnnnnnnnnnnnnnnnnnnnnnnnnnnnnnnnnnnnnnnnnnnnnnnnnnnnnnnnnnnnnnnnnnnnnnnnnnnnnnnnnnnnnnnnnnnnnnnnnnnnnnnnnnnnnnnnnnnnnnnnnccttacctgtgtacctgaacttcacccgtgcagacctgattttcaccgtcgactttgaaattgctacaaaggaggatcctcgcagcttctacgagcggggtgtcgcggtcttgtgcacagagta

SEQ ID NO: 34354 - DNA, 2369 bp, Macaca Mulatta
  misc_feature (1)...(2369): n = A,T,C or G
cctcgagagctggagagagaaagagactacccgttctatgagagagtgcgccatgcatacagtcttgagccaagggtgggagctggagcaggtgctgctcctttcagagaagtggatgagatttcacccgaggatgatcagcgagctaaccggacgcttttcttgggcaacctagacatcactgtaacggagaatgatctaagaagggcgtttgatcgctttggagtcatcacagaagtagnnnnnnnnnnnnnnnnnnnnnnnnnnnnnnnnnnnnnnnnnnnnnnnnnnnnnnnnnnnnnnnnnnnnnnnnnnnnnnnnnnnnnnnnnnnnnnnnnnnnnnnnnnnnnnnnnnnnnnnnnnnnnnnnnnnnnnnnnnnnnnnnnnnnnnnnnnnnnnnnnnnnnnnnnnnnnnnnnnnnnnnnnnnnnnnnnnnnnnnnnnnnnnnnnnnnnnnnnnnnnnnnnnnnnnnnnnnnnnnnnnnnnnnnnnnnnnnnnnnnnnnnnnnnnnnnnnnnnnnnnnnnnnnnnnnnnnnnnnnnnnnnnnnnnnnnnnnnnnnnnnnnnnnnnnnnnnnnnnnnnnnnnnnnnnnnnnnnnnnnnnnnnnnnnnnnnnnnnnnnnnnnnnnnnnnnnnnnnnnnnnnnnnnnnnnnncttgactcattatcatttggtgacagatgcttttggacatcgggcacctgaccccttgaggggtgctcgggataggacaccacccttactatacagagatcgtgatagggacctttatcctgactctgattgggtgccacccccacccccagtccgagaacgcagcactcggactgcagctacttctgtgcctgcttacgagccactggatagccttgatcgcaggcgggatggttggtccttggaccgggacagaggtgatcgagatctgcccagcagcagagaccagcctaggaagcgaaggctgcctgaggagagtggaggacgtcatctggataggtctcctgagagtgaccgcccacgaaaacgtcactgcgctccttctcctgaccgtagtccagaattgagcagtagccgggatcgttacaacagcgacaatgatcgatcttcccgtcttctcttggaaaggccctctccaatcagagacagacgaggtagtttggagaagagccagggtgacaagcgagaccgtaaaaactctgcatcagctgaacgagataggaagcaccggacaactgctcccactgagggaaaaagccctctgaaaaaagaagaccgctctgatgggagtgcacctagcaccagcactgcttcctgcaagctgaagtccccttcccagaaacaggatggggggacagcccctgcggcagcagcctctcccaaactctgtttggcctggcagggcatgcttctactgaagaacagcaactttccttccaacatgcatctgttgcagggtgacctccaagtggctagtagtcttcttgtggagggttcaactggaggcaaagtggcccagctcaagatcactcagcgtcttcgtttggaccagcccaagttggatgaagtaactcgacgcatcaaagtannnnnnnnnnnnnnnnnnnnnnnnnnnnnnnnnnnnnnnnnnnnnnnnnnnnnnnnnnnnnnnnnnnnnnnnnnnnnnnnnnnnnnnnnnnnnnnnnnnnnnnnnnnnnnnnnnnnnnnnnnnnnnnnnnnnnnnnnnnnnnnnnnnnnnnnnnnnnnnnnnnnnnnnnnnnnnnnnnnnnnnnnnnnnnnnnnnnnnnnnnnnnnnnnnnnnnnnnnnnnnnnnnnnnnnnnnnnnnnnnnnnnnnnnnnnnnnnnnnnnnnnnnnnnnnnnnnnnnnnnnnnnnnnnnnnnnnnnnnnnnnnnnnnnnnnnnnnnnnnnnnnnnnnnnnnnnnnnnnnnnnnnnnnnnnnnnnnnnnnnnnnnnnnnnnnnnnnnnnnnnnnnnnnnnnnnnnnnnnnnnnnnnnnnnnnnnnnnnnagcaaaactggttgaacagcggatgaagatatggaattcaaagctctaatggacctttttgaagagaagttgtggcttatgtggagtttacatgggcctctgatggaagaaagctaatctgtttagtatttgtgcattttactaaaatggcagcttaaagttgtgtatctgctattgtgatgccaatgccggtgttttaagtggaaaaaaaaatgacctctttgctttgtgctgtgtacacaagatttctggaaaagtaaagaaaaaccctttttatggctcacacagcttaagagtagctgtctctcaaacgtgcgctcacagttgagctgcttttgttttattctaaataaattgtttcttttgag

SEQ ID NO: 34355 - DNA, 2410 bp, Macaca Mulatta
  misc_feature (1)...(2410): n = A,T,C or G
agcgcgagccccgccgccgccgagcatggacgaccccnnnnnnnnnnnnnnnnnnnnnnnnnnnnnnnnnnnnnnnnnnnnnnnnnnnnnnnnnnnnnnnnnnnnnnnnnnnnnnnnnnnnnnnnnnnnnnnnnnnnnnnnnnnnnnnnnnnnnnnnnnnnnnnnnnnnnnnnnnnnnnnnnnnnnnnnnnnnnnnnnnnnnnnnnnnnnnnnnnnnnnnnnnnnnnnnnnnnnnnnnnnnnnnnnnnnnnnnnnnnnnnnnnnnnnnnnnnnnnnnnnnnnnnnnnnnnnnnnnnnnnnnnnnnnnnnnnnnnnnnnnnnnnnnnnnnnnnnnnnnnnnnnnnnnnnnnnnnnnnnnnnnnnnnnnnnnnnnnnnnnnnnnnnnnnnnnnnnnnnnnnnnnnnnnnnnnnnnnnnnnnnnnnnnnnnnnnnnnnnnnnnnnnnnnnnnnnnnnnnnnnnnnnnnnnnnnnnnnnnnnnnnnnnnnnnnnnnnnnnnnnnnnnnnnnnnnnnnnnnnnnnnnnnnnnnnnnnnnnnnnnnnnnnnnnnnnnnnnnnnnnnnnnnnnnnnnnnnnnnnnnnnnnnnnnnnnnnnnnnnnnnnnnnnnnnnnnnnnnnnnnnnnnnnnnnnnnnnnnnnnnnnnnnnnnnnnnnnnnnnnnnnnnnnnnnnnnnnnnnnnnnnnnnnnnnnnnnnnnnnnnnnnnnnnnnnnnnnnnnnnnnnnnnnnnnnnnnnnnnnnnnnnnnnnnnnnnnnnnnnnnnnnnnnnnnnnnnnnnnnnnnnnnnnnnnnnnnnnnnnnnnnnnnnnnnnnnnnnnnnnnnnnnnnnnnnnnnnnnnnnnnnnnnnnnnnnnnnnnnnnnnnnnnnnnnnnnnnnnnnnnnnnnnnnnnnnnnnnnnnnnnnnnnnnnnnnnnnnnnnnnnnnnnnnnnnnnnnnnnnnnnnnnnnnnnnnnnnnnnnnnnnnnnnnnnnnnnnnnnnnnnnnnnnnnnnnnnnnnnnnnnnnnnnnnnnnnnnnnnnnnnnnnnnnnnnnnnnnnnnnnnnnnnnnnnnnnnnnnnnnnnnnnnnnnnnnnnnnnnnnnnnnnnnnnnnnnnnnnnnnnnnnnnnnnnnnnnnnnnnnnnnnnnnnnnnnnnnnnnnnnnnnnnnnnnnnnnnnnnnnnnnnnnnnnnnnnnnnnnnnnnnnnnnnnnnnnnnnnnnnnnnnnnnnnnnnnnnnnnnnnnnnnnnnnnnnnnnnnnnnnnnnnnnnnnnnnnnnnnnnnnnnnnnnnnnnnnnnnnnnnnnnnnnnnnnnnnnnnnnnnnnnnnnnnnnnnnnnnnnnnnnnnnnnnnnnnnnnnnnnnnnnnnnnnnnnnnnnnnnnnnnnnnnnnnnnnnnnnnnnnnnnnnnnnnnnnnnnnnnnnnnnnnnnnnnnnnnnnnnnnnnnnnnnnnnnnnnnnnnnnnnnnnnnnnnnnnnnnnnnnnnnnnnnnnnnnnnnnnnnnnnnnnnnnnnnnnnnnnnnnnnnnnnnnnnnnnnnnnnnnnnnnnnnnnnnnnnnnnnnnnnnnnnnnnnnnnnnnnnnnnnnnnnnnnnnnnnnnnnnnnnnnnnnnnnnnnnnnnnnnnnnnnnnnnnnnnnnnnnnnnnnnnnnnnnnnnnnnnnnnnnnnnnnnnnnnnnnnnnnnnnnnnnnnnnnnnnnnnnnnnnnnnnnnnnnnnnnnnnnnnnnnnnnnnnnnnnnnnnnnnnnnnnnnnnnnnnnnnnnnnnnnnnnnnnnnnnnnnnnnnnnnnnnnnnnnnnnnnnnnnnnnnnnnnnnnnnnnnnnnnnnnnnnnnnnnnnnnnnnnnnnnnnnnnnnnnnnnnnnnnnnnnnnnnnnnnnnnnnnnnnnnnnnnnnnnnnnnnnnnnnnnnnnnnnnnnnnnnnnnnnnnnnnnnnnnnnnnnnnnnnnnnnnnnnnnnnnnnnnnnnnnnnnnnnnnnnnnnnnnnnnnnnnnnnnnnnnnnnnnnnnnnnnnnnnnnnnnnnnnnnnnnnnnnnnnnnnnnnnnnnnnnnnnnnnnnnnnnnnnnnnnnnnnnnnnnnnnnnnnnnnnnnnnnnnnnnnnnnnnnnnnnnnnnnnnnnnnnnnnnnnnnnnnnnnnnnnnnnnnnnnnnnnnnnnnnnnnnnnnnnnnnnnnnnnnnnnnnnnnnngacccatgacctgcagcgctggcctcccgtggtggccactgtagcggccaccggaaactgcgaggccctcagggaaggccaaggcctgcagaagcctcctggcctggctgcgtcttccccacccagctctcccccgcacccctgtctttgtaaattgacctttctcgggtggagagggtggggggcagggctgcttttcttagtctggtgccaagcaaggccttttctgaataaactcgtttgactttg

SEQ ID NO: 34356 - DNA, 737 bp, Macaca Mulatta
  misc_feature (1)...(737): n = A,T,C or G
aggaacaaaagaagctaatattaagtcaactagtatttcaaatggtatttcagcttgtctgcggtgtgagannnnnnnnnnnnnnnnnnnnnnnnnnnnnnnnnnnnnnnnnnnnnnnnnnnnnnnnnnnnnnnnnnnnnnnnnnnnnnnnnnnnnnnnnnnnnnnnnnnnnnnnnnnnnnnnnnnnnnnnnnnnnnnnnnnnnnnnnnnnnnnnnnnnnnnnnnnnnnnnnnnnnnnnnnnnnnnnnnnnnnnnnnnnnnnnnnnnnnnnnnntcagggagtggtaaaaccgtctcaaatgtgattgtagagtcgcacaattctgacaatgaagaggatgatcaatttgtggtggaagctgcccctcagctctctgaaatgtcagaaattgaaatggtnggtaacagcagtggaactagaagaagaggagaagcatggtgnnnnnnnnnnnnnnnnnnnnnnnnnnnnnnnnnnnnnnnnnnnnnnnnnnnnnnnnnnnnnnnnnnnnnnnnaggagcgatctctctttgagtcggcgtggaagaaggagaaggacatcgtttccaaggagatagagaagctccgcacgtccatccagaccctgtgcaagagtgcacttcccctggggaagatcatggactacatccaggaagacgtggatgccatgcagaatgagctgcagctgtggcacagcgagaacaggcagcacgccgaggccctgcagcaggagcagagg

SEQ ID NO: 34357 - DNA, 347 bp, Macaca Mulatta
tgagcctcagcaagataaattaaccctatacctctgacccaggtggatttttgtttccagttctgcacaaactttactacttagacagtttgagtctttttctgtctatgctgtttatttctatagcgttcaatacatgttattgttggggatatttgccttgagaaatataatcagaaaatattcatcagctgtgggtggaattaatcgtatctctggcatagatttttcatgacagtgttgttaaatgtacttatatacagaggcgatggcttgcagaggatgacatagtaaggataggcagaaagaagtgtcttcctttattttttcagaagcccaaagcaaaa

SEQ ID NO: 34358 - DNA, 624 bp, Macaca Mulatta
  misc_feature (1)...(624): n = A,T,C or G
ccataatttcagcttctatatatnnnnnnnnnnnnnnnnnnnnnnnnntatattttgggaaaaaaaacatacacaatgtgtctttctttgtggatatttacctttttgaaaaagaaaacacttaaaatgatcattaggacataacggactaggccagacatagcatcatgcggctttgcaacattttcatttgtttgtgttccttttatttcttaaacagatttaaataactggaggaattttctccaattttgtttccttctctagcaggtatccccagcagtcagttaacaataagccagtataaaacgcctaaattaaccagtctacaatcttcctttacaagttttttttactgtttttagatgaatgtacgatgagaaattcaacattaataattttggattttcttatcacaaaaaagaaaatgaaggacctcaaagcaccagaacagtttatcgaccagtttgaatctatttatcttcatttgaatgtcttctagaatatgttcaaaggcataacatgtatcttccatggcacatgtaccataagaacttctataattgtatatatgcctttgatgtattttcccctcaagatgatccactgtgtgtttgacagtga

SEQ ID NO: 34359 - DNA, 557 bp, Macaca Mulatta
  misc_feature (1)...(557): n = A,T,C or G
cagtgatgccacgctttgctgaacaagtagaggttgccattgaagccctgagtgccaacgttcctcaaccatttgaggagaatgagttcatcgatgcctctcgcctggtgtatgacggcgttcgggacatcagaaaggctgtgctgatgatcaggnnnnnnnnnnnnnnnnnnnnnnnnnnnnnnnnnnnnnnnnnnnnnnnnnnnnnnnnnnnnnnnnnnnnnnnnnnnnnnnnnnnnnnnnnnnnnnnnnnnnnnnnnnnnnnnnnnnnnnnnnnnnnnnnnnnnnnnnnnnnnnnnnnnnnnnnnnnnnnnnnnnnnnnnnnnnnnnnnnnnnnnnnnnnnnnnnnnnnnnnnnnnnnnnnnnnnnnnnnnnnnnnnnnnnnnnnnnnnnnnnnnnnnnnnnnnnnnnnnnnnnnnnnnnnnnnnnnnnnnnnnnnnnnnnnnnnnagaggcaaaggcccattgaaaaatacatctgatgtcattaatgctgccaagaaaattgccgaagcaggttctcgaatggacaaattagcccgcgctgtggctgatcag

SEQ ID NO: 34360 - DNA, 214 bp, Macaca Mulatta
gtggaccttcggcgagctgctctgcaagaacagtgctctccatcgactactacaatatgttcaccagcatcttcacgctcaccatgatgagtgtcgaccgctacatcgctgtctgccaccctgtcaaggccctggacttccgcacgcctgccaaggccaagcagatcaacatctgtatctgggtcctggcctcaggcattggcgtgcctatcat

SEQ ID NO: 34361 - DNA, 291 bp, Macaca Mulatta
  misc_feature (1)...(291): n = A,T,C or G
gaatcggcacgaggattgcagagaggggtaagactggttggaagctgactgcggactggttccccttagtgtgtgctgtgttgtaaatttttctcctccctcctcctacaaggttttgagttggctgctggttagcaaactccgttttacccatataagttatttaatataataatgaagctcaacactgtggtaggaaaatagccactnnnnnnnnnnnnnnnnnnnnnnnngagtttgtcattggactgcttaacatactagaagnnnnnnnnnnnnnnnnnnnnnnnn

SEQ ID NO: 34362 - DNA, 4256 bp, Macaca Mulatta
  misc_feature (1)...(4256): n = A,T,C or G
tcctccacccccacctcccaaggctgagctggctgagcgggagtgggagcggccccccatggccaaagagggcaatgaggcagggccttcctcacccccccacccattgcccaacgaggctgcccgcactgcagccaaagcccttctagaaaactttggctttgagctggtgatccagtacaatgaagggaagcaagctnnnnnnnnnnnnnnnnnnnnnnnnnacctgaggccctcgggggtggggacaagctggcctgtggggcctgtgggaaactcttctccaatatgcttatcctcaagacacatgaggaacatgtccaccgccgctttctgccctttgaagctctgagccgttatgctgctcagtttcgaaagagctatgacagcctatacccgccccttgcagagccccccaaacctcctgatgggtctctggattcacctgctccccatctgggcccacccttcctggtcccagagcctgaggcaggggggacccatgcccctgaagagcgaagtcaagcagggggacactggcccatagaggaggaagaaagctccagagggannnnnnnnnnnnnnnnnnnnnnnnnnnnnnnnnnnnnnnnnnnnnnnnnnnnnnnnnnnnnnnnnnnnnnnnnnnnnnnnnnnnnnnnnnnnnnnnnnnnnnnnnnnnnnnnnnnnnnnnnnnnnnnnnnnnnnnnnnnnnnnnnnnnnnnnnnnnnnnnnnnnnnnnnnnnnnnnnnnnnnnnnnnnnnnnnnnnnnnnnnnnnnnnnnnnnnnnnnnnnnnnnnnnnnnnnnnnnnnnnnnnnnnnnnnnnnnnnnnnnnnnnnnnnnnnnnnnnnnnnnnnnnnnnnnnnnnnnnnnnnnnnnnnnnnnnnnnnnnnnnnnnnnnnnnnnnnnnnnnnnnnnnnnnnnnnnnnnnnnnnnnnnnnnnnnnnnnnnnnnnnnnnnnnnnnnnnnnnnnnnnnnnnnnnnnnnnnnnnnnnnnnnnnnnnnnnnnnnnnnnnnnnnnnnnnnnnnnnnnnnnnnnnnnnnnnnnnnnnnnnnnnnnnnnnnnnnnnnnnnnnnnnnnnnnnnnnnnnnnnnnnnnnnnnnnnnnnnnnnnnnnnnnnnnnnnnnnnnnnnnnnnnnnnnnnnnnnnnnnnnnnnnnnnnnnnnnnnnnnnnnnnnnnnnnnnnnnnnnnnnnnnnnnnnnnnnnnnnnnnnnnnnnnnnnnnnnnnnnnnnnnnnnnnnnnnnnnnnnnnnnnnnnnnnnnnnnnnnnnnnnnnnnnnnnnnnnnnnnnnnnnnnnnnnnnnnnnnnnnnnnnnnnnnnnnnnnnnnnnnnnnnnnnnnnnnnnnnnnnnnnnnnnnnnnnnnnnnnnnnnnnnnnnnnnnnnnnnnnnnnnnnnnnnnnnnnnnnnnnnnnnnnnnnnnnnnnnnnnnnnnnnnnnnnnnnnnnnnnnnnnnnnnnnnnnnnnnnnnnnnnnnnnnnnnnnnnnnnnnnnnnnnnnnnnnnnnnnnnnnnnnnnnnnnnnnnnnnnnnnnnnnnnnnnnnnnnnnnnnnnnnnnnnnnnnnnnnnnnnnnnnnnnnnnnnnnnnnnnnnnnnnnnnnnnnnnnnnnnnnnnnnnnnnnnnnnnnnnnnnnnnnnnnnnnnnnnnnnnnnnnnnnnnnnnnnnnnnnnnnnnnnnnnnnnnnnnnnnnnnnnnnnnnnnnnnnnnnnnnnnnnnnnnnnnnnnnnnnnnnnnnnnnnnnnnnnnnnnnnnnnnnnnnnnnnnnnnnnnnnnnnnnnnnnnnnnnnnnnnnnnnnnnnnnnnnnnnnnnnnnnnnnnnnnnnnnnnnnnnnnnnnnnnnnnnnnnnnnnnnnnnnnnnnnnnnnnnnnnnnnnnnnnnnnnnnnnnnnnnnnnnnnnnnnnnnnnnnnnnnnnnnnnnnnnnnnnnnnnnnnnnnnnnnnnnnnnnnnnnnnnnnnnnnnnnnnnnnnnnnnnnnnnnnnnnnnnnnnnnnnnnnnnnnnnnnnnnnnnnnnnnnnnnnnnnnnnnnnnnnnnnnnnnnnnnnnnnnnnnnnnnnnnnnnnnnnnnnnnnnnnnnnnnnnnnnnnnnnnnnnnnnnnnnnnnnnnnnnnnnnnnnnnnnnnnnnnnnnnnnnnnnnnnnnnnnnnnnnnnnnnnnnnnnnnnnnnnnnnnnnnnnnnnnnnnnnnnnnnnnnnnnnnnnnnnnnnnnnnnnnnnnnnnnnnnnnnnnnnnnnnnnnnnnnnnnnnnnnnnnnnnnnnnnnnnnnnnnnnnnnnnnnnnnnnnnnnnnnnnnnnnnnnnnnnnnnnnnnnnnnnnnnnnnnnnnnnnnnnnnnnnnnnnnnnnnnnnnnnnnnnnnnnnnnnnnnnnnnnnnnnnnnnnnnnnnnnnnnnnnnnnnnnnnnnnnnnnnnnnnnnnnnnnnnnnnnnnnnnnnnnnnnnnnnnnnnnnnnnnnnnnnnnnnnnnnnnnnnnnnnnnnnnnnnnnnnnnnnnnnnnnnnnnnnnnnnnnnnnnnnnnnnnnnnnnnnnnnnnnnnnnnnnnnnnnnnnnnnnnnnnnnnnnnnnnnnnnnnnnnnnnnnnnnnnnnnnnnnnnnnnnnnnnnnnnnnnnnnnnnnnnnnnnnnnnnnnnnnnnnnnnnnnnnnnnnnnnnnnnnnnnnnnnnnnnnnnnnnnnnnnnnnnnnnnnnnnnnnnnnnnnnnnnnnnnnnnnnnnnnnnnnnnnnnnnnnnnnnnnnnnnnnnnnnnnnnnnnnnnnnnnnnnnnnnnnnnnnnnnnnnnnnnnnnnnnnnnnnnnnnnnnnnnnnnnnnnnnnnnnnnnnnnnnnnnnnnnnnnnnnnnnnnnnnnnnnnnnnnnnnnnnnnnnnnnnnnnnnnnnnnnnnnnnnnnnnnnnnnnnnnnnnnnnnnnnnnnnnnnnnnnnnnnnnnnnnnnnnnnnnnnnnnnnnnnnnnnnnnnnnnnnnnnnnnnnnnnnnnnnnnnnnnnnnnnnnnnnnnnnnnnnnnnnnnnnnnnnnnnnnnnnnnnnnnnnnnnnnnnnnnnnnnnnnnnnnnnnnnnnnnnnnnnnnnnnnnnnnnnnnnnnnnnnnnnnnnnnnnnnnnnnnnnnnnnnnnnnnnnnnnnnnnnnnnnnnnnnnnnnnnnnnnnnnnnnnnnnnnnnnnnnnnnnnnnnnnnnnnnnnnnnnnnnnnnnnnnnnnnnnnnnnnnnnnnnnnnnnnnnnnnnnnnnnnnnnnnnnnnnnnnnnnnnnnnnnnnnnnnnnnnnnnnnnnnnnnnnnnnnnnnnnnnnnnnnnnnnnnnnnnnnnnnnnnnnnnnnnnnnnnnnnnnnnnnnnnnnnnnnnnnnnnnnnnnnnnnnnnnnnnnnnnnnnnnnnnnnnnnnnnnnnnnnnnnnnnnnnnnnnnnnnnnnnnnnnnnnnnnnnnnnnnnnnnnnnnnnnnnnnnnnnnnnnnnnnnnnnnnnnnnnnnnnnnggaagcaagattacctcacacggactccaacccaacatctactactacctctacacttctagctttataaacagataaaccaagatggggaagaggggagggcctcaggtttccctcttgtaccccaaggggtgtttggtgggagctcaaatccctcaccccaccccctggccccgcccacctcacgggaactattcagttcccaccctcagtgggcaccacacaccccacctccagcagagtcctgcctcctcccaatccccacagacacacacactgatcctcatcctcagctccttgcagatgtagcccttgcccatcttcacagacacatacacccatcttggcaccctgattattcatacatgtctgcctaccacacacaaaatatatccttggttctatcttccttttcctcactgaattcccagctcctcatccccataaatgcatacacatacatgcacacacacacgttatcccatgatgttccactnnnnnnnnnnnnnnnnnnnnnnnnnnnnnnnnnnnnnnnnnnnnnnnnnnnnnnnnnccaaggccaagaagggggaaggaaaacaaacttgccaccccctcttctccttcctaaccctttgtctagagcaccatactgctcacaaactctttccaaatgctcagttggctcccaaagttggagcctgggatgggcagggagcccacaaaactctaaccaaactggaggctggcatgggagaagtgcttctggttcactctccctaccctctccctcctacccttttcttgcctgacag

SEQ ID NO: 34363 - DNA, 192 bp, Macaca Mulatta
gcctgctccgtgcatgcgccttgcgcggtgggcgctccacgtgcttttcccacatggctgatactggggtgcttgaggaagcctcctccacgcacaggtaggcgatcccagctcactctcacctcgtaataatgaggcctctgtctcacgcacacctattaaaaattagggctgtaggctgtaatgggcttc

SEQ ID NO: 34364 - DNA, 373 bp, Macaca Mulatta
aacagttctgcatgttcagtcctgggtataaatgttgaaagggaaatcacgtggttttggccttggccatggactctgtctcctgctcatattctatttccacataggctcgttttctccgcagtggtcctctcaagggcgttttgcctttgtgttttgcactaagggccttttcttcctcctcctcactggaggatttaccatcctgatcttcatcactgctggcatccagtttatccatatcctaatacggagagaaaagataaaggaggagggaaaacactagatttctccaaactcccttcattgtcccctctatttagaatagactagggaattgatttgtctatgtctatgttcagtaattgtcccg

SEQ ID NO: 34365 - DNA, 461 bp, Macaca Mulatta
atggagtttgggctgagctggggtttttttgttgctattttaaaagatgattcctggagatctgaagatatttattgtggatgtatatgagtgagagaaacagtagatatgtgtgtcagcttctgatcgctgtgtctctgtgtttccaggtgtccggcgtgaggtgcagctggtggagatttctggaggcttggtaaagccttgggtgtccctgagactctcctgtggtgcctctgggttcagtttcagtagctgctacatggactcggtccaccaggcttcagggaaggggctagagtgggtctcatgaattagtagtgatggaactagcacatactatgcagatgccatgaagggttgattcaccatctccagagacaattccaagaagtccctttatctgcaaataaactgtgagatctgaggatgttgctgtgtattaatgtcttagagacaaagtg

SEQ ID NO: 34366 - DNA, 179 bp, Macaca Mulatta
ggtgaaccttctcatccccgtggcatacttggtcttctgggccttcctgctggtcttcagcttcatctccgagcctatggtctgtggggtcggcatcatcatcattcttacgggggtgcccattttctttctgggagtgtattggagaagcaaaccaaagtgtgtgcacagactcacag

SEQ ID NO: 34367 - DNA, 869 bp, Macaca Mulatta
  misc_feature (1)...(869): n = A,T,C or G
gccccacagaggaggtgttgccaatgctgcggttcgtgcagaagcggggaaactcaacggtgtatgagtggaggacagggacagagccctctgtggtggagcgaccccacctcgaggaacttcctgagcagnnnnnnnnnnnnnnnnnnnnnnnnnnnnnnnnnnnnnnnnnnnnnnnnnnnnnnnnnnnnnnnnnnnnnnnnnnnnnnnnnnnnnnnnnnnnnnnnnnnnnnnnnnnnnnnnnnnnnnnnnnnnnnnnnnnnnnnnnnnnnnnnnnnnnnnnnnnnnnnnnnnnnnnnnnnnnnnnnnnnnnnnnnnnnnnnnnnnnnnnnnnngctccagaaggtgttgccaggggcccagatgctctgacacttcttgagtacactgagacccggaatcagttccttgatgagctcatggannnnnnnnnnnnnnnnnnnnnnnnnnnnnnnnnnnnnnnnnnnnnnnnnnnnnnnnnnnnnnnnnnnnnnnnnnnnnnnnnnnnnnnnnnnnnnnnnnnnnnnnnnnnnnnnnnnnnnnnnnnnnnnnnnnnnnnnnnnnnnnnnnnnnnnnnnnnnnnnnnnnnnnnnnnnnnnnnnnnnnnnnnnnnnnnnnnnnnnnnnnnnnnnnnnnnnnnnnnnnnnnnnattcctccagcaaaagctgaagcagtcccagctgctggctttgaagaaagagctgatggtgcagaagcagcaggaggcacttggggagcaggcggctctggagcccaagctggacctgctgctggagaagagcaaggagctgcagaagctgngattgaagctgacatctccaagaggtacagcgggcgccctgtgaacctgatgggaacctctctgtga

SEQ ID NO: 34368 - DNA, 747 bp, Macaca Mulatta
  misc_feature (1)...(747): n = A,T,C or G
atagcttccaaaccatcgctgaacannnnnnnnnnnnnnnnnnnnnnnnnnnnnnnnnnnnnnnnnnnnnnnnnnnnnnnnnnnnnnnnnnnnnnnnnnnnnnnnnnnnnnnnnnnnnnnnnnnnnnnnnnnnnnnnnnnnnnnnnnnnnnnnnnnnnnnnnnnnnngcaaaaaacgggatccaggaaatggattgttgttctctagaatctgactggatctatttccatcctgatgcttctggtagaataatacatgttggcccaaatcaagtcaannnnnnnnnnnnnnnnnnnnnnnnnnnnnnnnnnnnnnnnnnnnnnnnnnnnnnnnnnnnnnnnnnnnnnnnnnnnnnnnnnnnnnnnnnnnnnnnnnnnnnnnnnnnnnnnnnnnnnnnnnnnnnnnnnnnnnnnnnnnnnnnnnnnnnnnnnnnnnnnnnnnnnnnnnnnnnnnnnnnnnnnnnnnnnnnnnnnnnnnnnnnnnnnnnnnnnnnnnnnnnnnnnnnnnnnnnnnnnnnnnnnnnnnnnnnnnnnnnnnnnnnnnnnnnnnnnnnnnnnnnnnnnnnnnnnnnnnnnnnnnnnnnnnnnnnnnnnnnnnnnnnnnnnnnacatatagccatgaagtctactttgacagagacttagtgctacacatagagcagaaacccaacagagtcttcagctgctatgtttaccagatggtatgtaacactggcggaagatgaagaatccataaacggaagctgtt

SEQ ID NO: 34369 - DNA, 317 bp, Macaca Mulatta
  misc_feature (1)...(317): n = A,T,C or G
aggaaatggacaggctactagcatggtccaactgccaggtgggagattcctgatgggaacaaattctccagacagcagagatggtgaaggccctgtgcgggaggcaacagtgaaaccctttgccattgacatatttcctgtcaccaacaaagatttcagnnnnnnnnnnnnnnnnnnnnnnnnnnnnnnnnnnnnnnnnnnnnnnnnnnnnnnnnnnnnnnnnnnnnnnnnnnnnnnnnnnnnnnnnnnnnnnnnnnnnnnnnnnnnnnnnnnntgtactctggtggcttccagtggaaaaggcattttggaggcag

SEQ ID NO: 34370 - DNA, 372 bp, Macaca Mulatta
  misc_feature (1)...(372): n = A,T,C or G
cagagtaagcaggaaattcacaggaggtctgctcggctcagaaacactaaatacaaatctgctccggctgctgagaagaaagtttccaccaaaggaaaagggagaagacatatatttaaattgaaaaannnnnnnnnnnnnnnnnnnnnnnnnnnnnnnnnnnnnnnnnnnnnnnnnnnnnnnnnnnnnnnnnnnnnnnnnnnnnnnnnnnnnnnnnnnnnnnnnnnnnnnnnnnnnnnnnnnnnnnnnnnnnnnnnnnnnnnnnnnnnnntatccaggaccagtattgcgagaagagtgcagcactgacgtggctcattcctaccctctctagccccagagaccaatttgatcccgcctcctatatcatag

SEQ ID NO: 34371 - DNA, 185 bp, Macaca Mulatta
agagatgaaaataaagatgacagctccagtgacaagctatgtggagcctggttcaggtccttttagtgagtctactattaccatttccctgtatattccctctgaacagcaatttgatccgcccaggcctttagagtcagatgtcttcattgaagatagagccgaaatgactgtgtttgtacggt

SEQ ID NO: 34372 - DNA, 742 bp, Macaca Mulatta
ctactgagatcccaggggccacttcccccagcaaagaatagagttcccagcccacaagagtcccaggaagcaggaaagcacgaaggagcagcctgcctcttctccacaggcagtcatctagctttttaccaaaggggaagtgccattgctccccaagtccagagttgcagaagccctgccccaaccccctgtccagaatctccctttgcagtgttctaatccccagagcccctatgcggtatgtatagagatgttaaaaacattcagaaacctagtgaagcccatttcattttcaacccctcccgtcactgtgactctgaaattctgccaagtacaaatattagcgactgactctaataaggtatgagaaaatgtttcagtcttcttggctacccaaaattgagatcagtgtttctaaccaaggaaggcctgggttacagacaggctcctctgaagcccacttgccctaagtgttttcacctcgcattcctcttgcccaccttcagatgtgaatgaaggggcagctggatgatgtggcagagctgcagggactgagggtcagctgagcagtggccctggctacgaaaccaagtctcctccttggcttcctcacctgagcccagccttagccttcccccagcagaacacttgagcagcggcccctagggtatcccagggatggagtagtcccctcactctaggtactgatctaaccctcaagtgcccctcttcgtttgaggac

SEQ ID NO: 34373 - DNA, 737 bp, Macaca Mulatta
cagaattagaacctggcttcccaaacaatttaattgtttaaagatgttgctgtcaaagtgattagatagcccggctattctgtcatttgttcacaatggtttcactgggtaccccctaggaccagccctgtagtggaccggctggagcctggagtagaggttctgtcaaagctgagcccctctaccttcagtttcatcctggacctgctagtcctaattttacctaccaaattgtatttcacataaccaaagctcaaaatctactttcacttgagatttttaacacattaatgataaattttagttatcttcatttacttaataaatgttaatttacttgatgaaaagtccgtatcatcatgttcatgactgaaggtcaaagaaaaagaaacagcacctgattccaattctggactaatttcaacccatggctggttctggctaagtttaaataaattccaacttatactaaagcctgcttcagtgaactttttaaagctacctgaatgagtcttcagtttctgagaattttagcagctttccaatgactttcaatagtctgatatggggggaaaaagtactttaaaaatgccctctcttcacttccagaatgtgggacagttatttttctataagcagaaatgtgttcctcttaatatctcctttctcccaagataaaccatggttaatgatataggtatagattactcctcaaatataaatagaagatggagatg

SEQ ID NO: 34374 - DNA, 556 bp, Macaca Mulatta
aagcaacagcaccgtattcatgcaggttgagtctttccaatcctgcaagtttgagttctgaagaggccgccctccattccccaaggatccactcccccagctcctttagagaatagctaatgatgagtcctctggggttgagggacatgggagctagggggaggggagggagatgtcttgttgtggggacttgggctgggctaagtgggaggggttgtccctccccgtcatccattcctgagaggggtctcaaaccaaagttaacagagagaggatgggggaggggaaaaattagaataagatagcataaaatgcctgagaaccctctcctagcactgtcaaatgctggtattgaatggggactgaggatgggtctcagagagcaacctcctccctcgtagagggagattatatccccaactccagggacctctttatctcaatctatttatttggcatcccgggaaggatttccaatagtaatttatgtgacctgggttcatgtgagctgtaagtgaggtgcccagagctgcatccttttctccatttcccatcc

SEQ ID NO: 34375 - DNA, 804 bp, Macaca Mulatta
  misc_feature (1)...(804): n = A,T,C or G
gggaaacaatatggagctcaaattgctagctctcaaggttaatccttgtagaatcagaggagtgattgaagtttctgttctcaacatcctaaaataatagtttcagagccacaggaaaagtctgtatgtaggttacatattctcttgggggaaaattatgtaagacaccctaaacaaataagaaatgagttaaaagaaagactcggtcaatagatattatagtaagtactacagatggtaaatatttaagcctgtaagtaagtaattatgactaagtagcctttcttgaacacctcctttaaagtgggagaagctggactttggactttgcaaaaacagggatgcttaattggttagctgacaaaacatgagctctcccaagtatagtgtaactttcatgaatgaactgtgcatctgggaaaaaaaggcagaaagaatatttttaatgcaaaataattttatgtatttcatgaatcaagccattgtcttcattttccatggtgatgtaaaccaggatttagggaaagactttaaaaatcaacttcttacttacactctcagaaagcaaagcccagttaaaatatttaaccaataaattggacaatttaaaccatattttttaaatagctgaacggaaggtacatatcctgacagaataatttacacctaaaaaggccggaaagttggaattctttcggggaatccaaaaaattggggaatgttttttaccttaaccattcccccgaaaatggttatttttgcactccnnnnnnnnnnnnnnnnnnnnncgggttttttaagggt

SEQ ID NO: 34376 - DNA, 778 bp, Macaca Mulatta
  misc_feature (1)...(778): n = A,T,C or G
gggacatggcttacgaaaattatatgaaaccaaaagaattgcagtatactatttcccagcttttagaaagtgaaggatggaacagaagaaatgttgatcctttccatatttatttctgcaatctaaaaacagatagtgcttatcacagagagttggttaaacggtatgaagaaaaatgggacaaactgcttttaacagcaacagaaaagtctcatgtagatttatttccaaaggacagtattatctatttaactgcagattctcccaatgttatgactactttcaggcatgacaaagtttatataattgggtcttttgttgataagatgatgcagccaggcacatccctagccaaggcaaaacggctgaagctggcaactgaatgccttccattagataaatatttacaatgggatactggtaacaaaaatctcaccttagatcaaatgatgcgtattttgttatgtctgaaaaacactggtaattgggaagaggctctganatttgttccccagagaaaacatactggttttctggagatttctcagcactctcaagagtttatcaacagattgaagaaggcaaagacttttaattcattttcaaaaggttctctaaatgtgtgtgcacagaagaagtggctcanatgagaacatttcatggcctaaaaagtaaatgggttggaaatacagttctgttaatatatttcttcccaaataattcattttttctcttcaaaaagtaagtttttccaactgaactggcaggtttgtgtctt

SEQ ID NO: 34377 - DNA, 811 bp, Macaca Mulatta
caggccattgtgctgggctgcgtagggggcatcgtggcagtggggctggggctggtcctggcttaccggctctcggtggaaatctatgaccgccgggaatacagtcgctttgagaaggagcagcaacaactcaactggaagcaggtgaaacttcctggttaggcccccttttagctgtctccccaccacaagcccatccctgattcctcccactgggttcccccagcgcctggcacatgtaaccaatccctctgctaacttccatcagctcctaggattcggctcaagactggcctcttaggtctagaaaggggacaaggaatcctgggatttttgctcataatctgcaacatctttcctcaggacagtaatcctctctacaaaagtgccatcacgaccaccatcaatcctcgctttcaagaggcagacagtcccattctctgaaggagggagggaccctcacccaaggctcctctccttggaggacagtgggaactgaagggtgaaaggaagggtgggtctgtaagaccttggtaggggactaattcactgaagaggagcggccaccaccctacttcattttcagagtgacacccaagagggctgcttcccatccctgcaaccttgcatccacctgggctaccccacccaagtatataataaagagtcttacctcagaccacagctgtcacttttctttacctcatcaaggccaaagcaggctgtttatagcctggcctcgggaaagttcttgtccatcttcctcctgccacctgagggcagggagagggcccaggcgtgaatgtgcagg

SEQ ID NO: 34378 - DNA, 167 bp, Macaca Mulatta
tatgacagatacggagagcaaggtcttcgggaaggcagcgacggaggtgggggcatggatgatattttctctcacatttttggtgggggatagttcgggttcatgggcaatcagagtcgaagtcgagaatggcagaagaagaggagaggacatgatgcatcgactca

SEQ ID NO: 34379 - DNA, 789 bp, Macaca Mulatta
gccggttcggcaacaacacccaggggccagtgcggtgagttccgtggcccccatggctcccgaggccccccaaggctcccacggctcccattacccccctgtcctgccccagggcgggtggctggaccaggctgaggctgaggctgtgtgtaaacacccacgggcctgctgtgggcctcttgcctctctgcttgggggtgctgtgaccatcacccgggttcagtccctgtgaggagccaacaggaaggggcctggtctctgcccttgaccccggctggccggtcctgggcatctgggctggagaagggcagggcttgccctgtctgcaacatggcctctctcactgatacaggcacctgcaccaacaccacctctgacgactgcattctgcccactggggagatcgtctccaactgtgaggctgcggccgaccagtggatagtgaacgacccctccaagccacactgcccccacagcagctccacgaccaagcgcccaacagtcactgtgcccgggggcaacaaaacgaccccacacaagggctgcaccccatctcccctctgccagctcatcaaggacaggtgaccctgcctgggcctgcctgcggccgtgataccaaaaagctgagggcctctgtgccccaacccccagctcttgcaaagaggaaggaagcagtgcatggggcctggcactggggctgggaaggcaggaggccacggaaccagggccaggagctaggtcgccgtggtgtccggaacctgggtcgttgggttccacaggtctgagctg

SEQ ID NO: 34380 - DNA, 141 bp, Macaca Mulatta
agcaccatatgtaaaggtgtatctgttagataacggagtctgcatagccaagaagaaaacaaaagtggcaagaaaaacgctggaacccctttaccagcagctattatctttcgaagagagtccacaaggaaaagttttaca

SEQ ID NO: 34381 - DNA, 2431 bp, Macaca Mulatta
  misc_feature (1)...(2431): n = A,T,C or G
aattccgtcttccaaaccaaagctcattgctcagctggagcgaggggaagagccctggagagaggagagaaaatgttcgctggacctctgtccagnncagaatcaaagccagaaattcgactttgcccctcctgccctctgatattctccaatcagcaagctctcagccaacatgtgtggctgagtcatctctctcagctgttttcaagtttatgggcaggaaatcctctccagctgggtaaacactatctggaagatcagaaagaacagcaagatccattctgcttgagtggcaaaacggaatggattcaagagggagaagactccacactcctgtttgggagagtaagcaaaagtggcacttcaaaggcactctccagcccacgtgaagaacagccagcacggtccgagaaagacaacacagtggtggatataggacccagccctgaaaggaaggcagaccttgaggaaacagacaaagtattgcatggtttagaaatctcaggatttggagaaatcaaatatgaagagtttgggccaggctttatcaaggagtcaaacctccttagcctccagaagacacaaactggggagacagcttacatgtacactgagtggggagacagctttggcagtatgtcaatccttatcaaaaacccaaggacgcactctgggggaaagccttatgtgtgcagggaatgtgggcgaggctttacctggaagtcaaacctgatcacacatcagaggacacactcaggggagaaaccttatgtgtgcaaggattgtggacgaggctttacttggaagtcgaacctctttacacatcagcggacacactcagggctcaagccttatgtgtgcaaagaatgtgggcagagctttagcctgaagtcaaacctcatcacccaccagagggcgcacactggggaaaagccttatgtttgcagggaatgtgggcgtggctttcgccagcattcacacctggacagacacaagaggacgcattcaggagagaagccttacattagcagggagtgtgagcaaggctnnnnnnnnnnnnnnnnnnnnnnnnnnnnnnnnnnnnnnnnnnnnnnnnnnnnnnnnnnnnnnnnnnnnnnnnnnnnnnnnnnnnnnnnnnnnnnnnnnnnnnnnnnnnnnnnnnnnnnnnnnnnnnnnnnnnnnnnnnnnnnnnnnnnnnnnnnnnnnnnnnnnnnnnnnnnnnnnnnnnnnnnnnnnnnnnnnnnnnnnnnnnnnnnnnnnnnnnnnnnnnnnnnnnnnnnnnnnnnnnnnnnnnnnnnnnnnnnnnnnnnnnnnnnnnnnnnnnnnnnnnnnnnnnnnnnnnnnnnnnnnnnnnnnnnnnnnnnnnnnnnnnnnnnnnnnnnnnnnnnnnnnnnnnnnnnnnnnnnnnnnnnnnnnnnnnnnnnnnnnnnnnnnnnnnnnnnnnnnnnnnnnnnnnnnnnnnnnnnnnnnnnnnnnnnnnnnnnnnnnnnnnnnnnnnnnnnnnnnnnnnnnnnnnnnnnnnnnnnnnnnnnnnnnnnnnnnnnnnnnnnnnnnnnnnnnnnnnnnnnnnnnnnnnnnnnnnnnnnnnnnnnnnnnnnnnnnnnnnnnnnnnnnnnnnnnnnnnnnnnnnnnnnnnnnnnnnnnnnnnnnnnnnnnnnnnnnnnnnnnnnnnnnnnnnnnnnnnnnnnnnnnnnnnnnnnnnnnnnnnnnnnnnnnnnnnnnnnnnnnnnnnnnnnnnnnnnnnnnnnnnnnnnnnnnnnnnnnnnnnnnnnnnnnnnnnnnnnnnnnnnnnnnnnnnnnnnnnnnnnnnnnnnnnnnnnnnnnnnnnnnnnnnnnnnnnnnnnnnnnnnnnnnnnnnnnnnnnnnnnnnnnnnnnnnnnnnnnnnnnnnnnnnnnnnnnnnnnnnnnnnngtactggtaagacttgtatctccatccacctgaaggagaattgatggctcattttcaggagccctgcccttcctcactggggatggtggattgtgaaagcctggtcaggtaatgatagtggccagaggcagtcaaatgcccagacagataggggtaggtacccggtgaaacacaaccttaaagctgaagacagtctcagctaaatcctcatactgaattgagaacctgtcttcccatttggtgtgctttcatccgattgatcccaacccttcacctattttgcatattcctgtccttttctaattggtttttacactgctgtgcccacctttgagtgatgcctttgcatacttgcaaaccaatcaacatgtactcccctattctgagcccataaaagacccagtctcagccacagtgggagagaaatcaccctgctgtgggagttggggaccactccctgcatctcctctccactgagagctgttctttcactcaataaaattcttttctacccatcctc

SEQ ID NO: 34382 - DNA, 365 bp, Macaca Mulatta
agagtgaacggggttggaattctttctagtccagctcctaaactttctcagtgagcttttggagctctctgcaatgagatttgctttacacaatctgattttcacagctgtgctgaggagcagacctgtctgctcgttgtcttgtaaggaagcaccgagtcttcgaaggagacacagaggcgaggccccaggtgcagcagggaaataggcctgttcccaggaacctctcgtctaatggggctgatctgggtcccaactctaaatcctgtgctgttgagggtctccttccctgttcttgccccagagttaggcaccccaaagattccaccaattcctgtatgggcaacgtatactttaaaaaattt

SEQ ID NO: 34383 - DNA, 414 bp, Macaca Mulatta
gggctggcagcgccgcggagcgggtaggactgaaccaccggcctcgggctgcagggggaacatttcaggctgacttacgctcgtggctgagactcccagagaaaaccctgctcagagggccattagggtcccagatgggtggctacgttcctctgcagaggacctggggatcttcgagcccgaaacgcggcaccggcaccgagaaaggtgaaacacaccttcccgcctcggccgcaagtccagtcccgggcccacctccgcactggagtcttaaagggccagcgggcctaggggcggagccagcagaggcgctgagccggggccgcgcctgggcgaacggccggagagggctgggctgggctgggcccgggatggcggtgtccctggcgcgggtcccggtggcgccccgcgcga

SEQ ID NO: 34384 - DNA, 2150 bp, Macaca Mulatta
  misc_feature (1)...(2150): n = A,T,C or G
caacccctacttcttcctcctgctcagccgccacggagccctctgtggcttcctgcgccaggagcccttgccagcctggagctacgaggtcatcctggagtccttccgggccttgactgagttcttccgaatggaggagaggatgaaagggctgagcaggcacagagcttccttccttgggggccgtcgtcgcgggggagccttgcagaggcgagaggtcgcttcctcttccaacctggaggagatctttagctggaagcgatcatacacaagatgagagacctggcccaagaacccccaagtcctgcaaagaaaaacagagctgggcaagggagagtcctggaaagatggggtggactgaacggagggagctccggctctgtgctcctcattcagtccctctctcttaaactggtgccttgaaggagatggaatgccctgcgagcctgcgctcacttcatcctcagcagatctcctgcctggcctctgctcagcatatccctactcatccggtcagcagcggagtgttccagtcactgtctcctatcactgacatcacaagccaaaggatggcactttttcaacccatggacacaggagaaagtgccctcttactggcagtgactagagggatgagacgtttgtgtatgtcatagggcagtgaccccgattctcaagctggagccacttgatgtcattaggacaggatgtttgtgtctcggccccacttccctcatttgctctgtggttgtggcgccctgcttnnnnnnnnnnnnnnnnnnnnnnnnnnnnnnnnnnnnnnnnnnnnnnnnnnnnnnnnnnnnnnnnnnnnnnnnnnnnnnnnnnnnnnnnnnnnnnnnnnnnnnnnnnnnnnnnnnnnnnnnnnnnnnnnnnnnnnnnnnnnnnnnnnnnnnnnnnnnnnnnnnnnnnnnnnnnnnnnnnnnnnnnnnnnnnnnnnnnnnnnnnnnnnnnnnnnnnnnnnnnnnnnnnnnnnnnnnnnnnnnnnnnnnnnnnnnnnnnnnnnnnnnnnnnnnnnnnnnnnnnnnnnnnnnnnnnnnnnnnnnnnnnnnnnnnnnnnnnnnnnnnnnnnnnnnnnnnnnnnnnnnnnnnnnnnnnnnnnnnnnnnnnnnnnnnnnnnnnnnnnnnnnnnnnnnnnnnnnnnnnnnnnnnnnnnnnnnnnnnnnnnnnnnnnnnnnnnnnnnnnnnnnnnnnnnnnnnnnnnnnnnnnnnnnnnnnnnnnnnnnnnnnnnnnnnnnnnnnnnnnnnnnnnnnnnnnnnnnnnnnnnnnnnnnnnnnnnnnnnnnnnnnnnnnnnnnnnnnnnnnnnnnnnnnnnnnnnnnnnnnnnnnnnnnnnnnnnnnnnnnnnnnnnnnnnnnnnnnnnnnnnnnnnnnnnnnnnnnnnnnnnnnnnnnnnnnnnnnnnnnnnnnnnnnnnnnnnnnnnnnnnnnnnnnnnnnnnnnnnnnnnnnnnnnnnnnnnnnnnnnnnnnnnnnnnnnnnnnnnnnnnnnnnnnnnnnnnnnnnnnnnnnnnnttttggcaacaggacatatgtttccatgtgttgctaagattcaaaaactttaccctgaagttttatnttaatcatcattgagaaagagggctcctgttctgacctcacaaacagcaaagcagttgtaaagaaaagagctgcttataccaaaacccacatcccaagacttggcataaaggtattcctgaggccatgatttcaggtttggataatcttgccccagccttgttcttctagatcaaatcagaagaaactttgaaataactccaagaatctgcactgaaatgtagacaacactcgattgtctaaggcacattatcctgttgtgaaaaattatctccctcctggcagggagctgtggtgcacacctgtaatcccagcactttgggaggccgaggtgggtggatcacaaggtcaggagatcgagaccatcctggctaacacggtgaaaccctacctctactaaaaatacaaaaaattagctgggcgtggtggtgggcacctgtaatcccagctactcaggaggctgaggcaggagaatggtgtgaacctgggaggcagagcttgcagtgagccgagatcgcaccactgcactccagcctgggtgacagagtgagac

SEQ ID NO: 34385 - DNA, 131 bp, Macaca Mulatta
aggcatttttctggccttcccttttactgctggctgggaaggaggagcatcagaccacagatcctggaaggcacttttcctgactgctgctggcactgccgtgagaacctgcttatatccaggaccaagga

SEQ ID NO: 34386 - DNA, 1080 bp, Macaca Mulatta
gctgtctttctttggtaacctctctggattgtgaatttaaaatgtgttttacagtaaatttgctgccaagacaagaggtgaatttctccagcaatgaattcctcgtttcacctgcatttcttggatctcaacctgaatgccacagagggcaacctttcaggacccagtgtcagaaacaagtcttcgccctgtgaaaacatgggcatggctgtggaggtgtttctcactctgggtgccatcagcctcgtggagaacatcttggttataggggccatagtgaagaacaaaaacctgcactgccccatgtacttcttcgtatgcagcctggcggtggccgacatgctggtgagcatgtccaacgcctgggagaccatcaccatctacctgctcaacaacaagcacctagtgatagcagacgcctttgtgcgccacattgacaacgtgtttgactccatgatctgcatttccgtggtggcgtccatgtgcagcttgctggccattgcggtggataggtacgtcaccgtcttctatgccctgcgctaccaccacatcatgacggcgaggcgctcgggggccatcatcgccggcatctgggctttctgcaccgggtgcggcatcgtcttcatcctgtactccgagtccacctacgtcatcctgtgcctcatctccatgttcttcacgatgctcttcctcctggtgtgtctgtacatacacatgttcctcctggcgcggactcacgccaagcggatggcggctctgcccggggccagctctgcgcggcagaggaccagcgtgcagggcgcggtcaccctcaccatgctgctgggcgtgttcatcgtgtgctgggccccgttcttcctgcatctcattttaatgctttcttgccctcagaacctctactgctcttgcttcatgtctcacttcaatatgtacctcatcctcatcatgtgtaactccgtggtggaccctctcatatatgccttccgcagccgggagatgcgcaagacgtttaaggagattatttgctgccgaggcttccgaatcgcctgcagctgtcccggaagggattaagtacaaagt

SEQ ID NO: 34387 - DNA, 653 bp, Macaca Mulatta
gaaaatctgtggcctagatcctacatctacacttggcatctattttgaagttgtcaatcagcacaacgccccgatcccccaaggaggcagaggagcgatccaatttgtcacgcattatcagcactccagcacccagagacgcatccgcgtgaccaccatcgcccgaaattgggcagatgtacagagtcagctcaggcacatagaagcagcatttgaccaggaggctgcagcagtcttgatggcacggcttggggtgttccgagcggagtcagaggagggacctgatgtgctccggtggctggaccgacaactcatccgactgtgtcaaaagtttggacagtataacaaagaagaccccacttcttttaggttatcagattccttttctctgtatcctcagttcatgttccatctgagaagatctccatttcttcaagtgtttaacaatagtcctgatgagtcgtcatattacagacatcattttgcccggcaggacctgacccagtccctcatcatgatccagcccattctctactcttattcctttcatgggccaccagagccagtactcttggatagcagcagcattctagctgacagaattttgctgatggatactttctttcacattgtcattaatcttggtgagacca

SEQ ID NO: 34388 - DNA, 1189 bp, Macaca Mulatta
  misc_feature (1)...(1189): n = A,T,C or G
cctagtcaacctgtctctcaatgacaacgatggctccagtggggcttcggaccaggacaccctggctcctctgcctggggccaccccctggcccttgctgcccactttctcctaccaatacccggccccacacccctacagcccgcagcccccaccgtaccatgaactttcatcttatacctttggtgggggcagtgccagcagccagcacagtgaggnnnnnnnnnnnnnnnnnnnnnnnnnnnnnnnnnnnnnnnnnnnnnnnnnnnnnnnnnnnnnnnnnnnnnnnnnnnnnnnnnnnnnnnnnnnnnnnnnnnnnnnnnnnnnnnnnnnnnnnnnnnnnnnnnnnnnnnnnnnnnnnnnnnnnnnnnnnnnnnnnnnnnnnnnnnnnnnnnnnnnnnnnnnnnnnnnnnnnnnnnnnnnnnnnnnnnnnnnnnnnnnnnnnnnnnnnnnnnnnnnnnnnnnnnnnnnnnnnnnnnnnnnnnnnnnnnnnnnnnnnnnnnnnnnnnnnnnnnnnnnnnnnnnnnnnnnnnnnnnnnnnnnnnnnnnnnnnnnnnnnnnnnnnnnnnnnnnnnnnnnnnnnnnnnnnnnnnnnnnnnnnnnnnnnnnnnnnnnnnnnnnnnnnnnnnnnnnnnnnnnnnnnnnnnnnnnnnnnnnnnnnnnnnnnnnnnnnnnnnnnnnnnnnnnnnnnnnnnnnnnnnnnnnnnnnnnnnnnnnnnnnnnnnnnnnnnnnnnnnnnnnnnnnnnnnnnnnnnnnnnnnnnnnnnnnnnnnnnnnnnnnnnnnnnnnnnnnnnnnnnnnnnnnnnnnnnnnnnnnnnnnnnnnnnnnnnnnnnnnnnnnnnnnnnnnnnnnnnnnnnnnnnnnnnnnnnnnnnnnnnnnnnnnnnnnnnnnnnnnnnnnnnnnnnnnnnnnnnnnnnnnnnnnnnnnnnnnnnnnnnnnnnnnnnnnnnnnnnnnnnnnnnnnnnnnnnnnnnnnnnnnnnnnctaaccccagaatgtgacctcctcctccagttacccatagccttgccctgtgcaggtttgggggtggtcagtggtaccctggggttaggcaccctagacagcagcctgaggaagctgggagatttgggccatgtagctgcctttgttactctatttattttagtcacttgtataaaacaccaaataaagcaatagaggcaaact

SEQ ID NO: 34389 - DNA, 888 bp, Macaca Mulatta
  misc_feature (1)...(888): n = A,T,C or G
ggaagcagtgcnnnnnnnnnnnnnnnnnnnnnnnnngggggctctctcctcccgccgcccaagatgccgaaaggaaagaaggccaagggaaagaaggtggctccggcccctgctgtcgtgaaaaagcaggaggccaagaaagtggtgaatcccctgtttgagaaaagacctaagaattttggcattggacaggacatccagcccaaaagagacctcacccgctttgtgaaatggcctcgctatatcaggttgcagcggcagagagccatcctctataagcggctgaaagtgcctcctgctattaaccagttcacccaggccctggaccgccaaacagctactcagctgcttaagctggcccacaagtacagaccagagacaaaacaagagaagaagcagaggctgttggcccgggccgagaagaaagctgctggcaaaggggatgtccccactaaaagaccacctgtccttcgagcaggagttaacaccgtcaccaccttggtggagaacaagaaggctcagctggtggtgattgcacatgacgtagatcccatcgagctggttgtcttcttgcctgccctgtgtcgtaaaatgggggtcccttactgcattatcaaggggaaggccagactggggccgtctagtccacagggaagacctgcaccactgtcgcccttcacacaggtgagaactcgggaagacaaaggcgcttttgggctaaagctggtgtggaaagctattccggaccccatttccaccgacagaatacctatgcaagatcccgcccctcaccctgggcgccgggagcatgccccccggcgcccccgggcccctgcgggggtgccgacactgacccaggcttcccaacacgggggcccgtcgccttac

SEQ ID NO: 34390 - DNA, 354 bp, Macaca Mulatta
taccgcgcccccctgggttctcgggtctcctacctcggtcccccaagcctcgcgcccctcacctaccttgtctgtgcaccctgacctgggtctcgcggtgcccccaccagaccttttgttccagatgctccagtcgctccagtcagaggcgcctccaacccaccagtgcctcctcccagtccatcgcgccttgacctcccactccaccaccagttctcaggtctcttaactctgcgatctcgggactcttaacttgagtctcacactcccatgctccaatccttagagacagtgaccctttccacacacactcaggatctccctcccaaacatacccctctgggcttcacatat

SEQ ID NO: 34391 - DNA, 739 bp, Macaca Mulatta
  misc_feature (1)...(739): n = A,T,C or G
ggcgaaaacccttttgctgtcatttttgtgggatttggtgaagaactagtggtaaatgcatgttttattctgtcatctaagtgtccactgttagctcttctcataagtgcgatgctaggcctcagctgctttctcagtgaaatgagagaatcatactagctggataatttgtaaaatccctttcctcacagacttatgattctgtagtacttactgttaagtcaaaagcagttcttcctttcttctgaaataatttccctttgtcttaaatccttatagctgctagcagaagaaagtcttcccacaaccccattttatttcatattgggaaaacacaggcaactgcaggatgaaaaattaaatgaaactttagagaatgagctggtacaactacccttaacagaaaacatacctgcagttagtgagcttcttcacactccagcccatgtcctgccatctgctgctttcctgtgctccatgtttgtaaattcattgctgctgtcntaagagactaagagtgctaaagaaattcctgaagatgtagatatnnnnnnnnnnnnnnnnnntgaagattcagacgaagaaaatgattttatcgaaaaggtccaggatacaaataacacaggtttaggagaagacattatacatcagttngtcaaaatctggagaaaaaagaactgaagaaaatttaggaaaaatagactacaggctgggaatagctgcccctttaagcccttgg

SEQ ID NO: 34392 - DNA, 218 bp, Macaca Mulatta
tacaacttaattttattaggacaaggttggtgggcactggagtggcaccttccggggccaggacaggcactggggaggggtcacaggatgccacgcgggcacttagaagccacagctgccctccacagtgcggcactgcaccatgcgcaggaatgtctcgaccatatccatgtccttctgaagcagtggtaagcctcgggttcttgagcagtgagtca

SEQ ID NO: 34393 - DNA, 200 bp, Macaca Mulatta
agattatgtttaatgaagaacttggggatccttttatcataattcacagtatctcattgctaaatgctgaagaacattctatagctaccctccttcttcgaatagagaaagaggaattggatatgaaaggaagtggtttctatgtttctctggagtgggtcactatcagtaagaaaaataaaggtaaaacaaaatctgaa

SEQ ID NO: 34394 - DNA, 440 bp, Macaca Mulatta
agatcgctgccaaaatcgatgccccacttaccaaagtcgatgagattgtggtcctcagtggagacaacagcaaggtcacatcagaagtgaaccgactactggccgagctgcctgcctctgtgcatgccctcacgggcgtggacctgtctaaggtgtgtgcctgcctagctgcggtggggttgcctgggcagcctattggactggccaggcagagtggtcctgggtcctggagccaaggcctcatggcatgtcccatccttgcagatacccctgatcaagaaggccaccggtgtgcaggtgtgaggctcctgcaggcccactctcttcagcagccacccagccctccctccagcacccgttttaatcccacagaacaacgggaatgttactgactctggtgccttatcttgaagggaccagaagtgctgcgtgttcaggcc

SEQ ID NO: 34395 - DNA, 95 bp, Macaca Mulatta
ggtttaattcacagtgccaatgtaaggactgtgaacttggagaaatcctgtgtttcagtggaatgggcagaaggaggtgccacaaagggcaaaga

SEQ ID NO: 34396 - DNA, 844 bp, Macaca Mulatta
ggggtggactgcccactggattgttgtgaaaaatggggttctctttctggagtacctggcaggttgcttggcatccagaagactgcccactgggccttgcccgagatggacagccggattccttatgatgactacccggtggttttcttgcctgcctatgagaatcctccagcatggattcctcctcatgagagggtgcaccacccagactacaacaatgagttgacccagtttctgccccgaaccatcacactgaagaagcctcctggagctcagttgggatttaacatccgaggaggaaaggcctcccagctaggcatcttcatctccaaggtaattcctgactctgatgcacatagagcaggacttcaggaaggggaccaagttctagctgtgaatgatgtggatttccaagatattgagcacagcaaggctgttgagatcctgaagacagctcgtgaaatcagcatgcgtgtccgcttctttccctataattaccatcgccaaaaagagaggactgtgcactagaaagttgcagcccacagcccttcatgtgaactctgccatgacatgctaactagactttaggagagccacttctattttcagcccctccctggaatagtgagttggggaggatggggagacagctaaccaactgaattacccaaactgtattgcactttttagttccctagttttctaaggtgagcttcattcccctgaaaaggaggatgatatctaggcattaacctagccctgtggaggaacctagtttaggaaagacaggctgagttttattggaatacccatgtaactaagtccccctacattattgtccatt

SEQ ID NO: 34397 - DNA, 103 bp, Macaca Mulatta
ggtggtggatgtggccaagctcatgaaagcctacatcagcatgatcgtgaagaagcgctacagcacgacacgctccgccagcagccagggcagctccaggtga

SEQ ID NO: 34398 - DNA, 593 bp, Macaca Mulatta
  misc_feature (1)...(593): n = A,T,C or G
acagaacattcagaagattctcggccttgccccttcacgagccgccaccaagcaggcaggtggatttcttggcccaccacctccttctgggaagttctcctgaactcaagcagaactctttagtttctatcattctttctagacacacgcacatcagacaggcaaatgtttttcagcaagagccacaggtagccttaatacgtgggcctctttctagttnnnnnnnnnnnnnnnnnnnnnnnnnnnnnnnnnnnnnnnnnnnnnnnnnnnnnnnnnnnnnnnnnnnnnnnnnnnnnnnnnnnnnnnnnnnnnnnnnnnnnnnnnnnnnnnnnnnnnnnnnnnnnnnnnnnnnnnnnnnnnnnnnnnnnnnnnnnnnnnnnnnnnnnnnnnnnnnnnnnnnnnnnnnnnnnnnnnnnnnnnnnnnnnnnnnnnnnnnnnnnnnnnnnnnnnnnnngcatttagagatttagaagaaaaatttagtttgtataacccttaattgtaactgtttgttttgnnnnnnnnnnnnnnnnaagccaaatatatgacataagatcaataaagaggccaaattnttagctattttatgtaca

SEQ ID NO: 34399 - DNA, 1322 bp, Macaca Mulatta
  misc_feature (1)...(1322): n = A,T,C or G
gtatctccagggcagcttactaaaaagtatagctcatgctcaacaatatttctagatgacagcacagtcagccagcctaatcttagaaccacagtaaaatgnnnnnnnnnnnnnnnnnnnnnnnnnnnnnnnnnnnnnnnnnnnnnnnnnnnnnnnnnnnnnnnnnnnnnnnnnnnnnnnnnnnnnnnnnnnnnnnnnnnnnnnnnnnnnnnnnnnnnnnnnnnnnnnnnnnnnnnnnnnnnnnnnnnnnnnnnnnnnnnnnnnnnnnnnnnnnnnnnnnnnnnnnnnnnnnnnnnnnnnnnnnnnnnnnnnnnnnnnnnnnnnnnnnnnnnnnnnnnnnnnnnnnnnnnnnnnnnnnnnnnnnnnnnnnnnnnnnnnnnnnnnnnnnnnnnnnnnnnnnnnnnnnnnnnnnnnnnnnnnnnnnnnnnnnnnnnnnnnnnnnnnnnnnnnnnnnnnnnnnnnnnnnnnnnnnnnnnnnnnnnnnnnnnnnnnnnnnnnnnnnnnnnnnnnnnnnnnnnnnnnnnnnnnnnnnnnnnnnnnnnnnnnnnnnnnnnnnnnnnnnnnnnnnnnnnnnnnnnnnnnnnnnnnnnnnnnnnnnnnnnnnnnnnnnnnnnnnnnnnnnnnnnnnnnnnnnnnnaggctatttctagattgtgtgaagacaaagacttgtgtagagccgctatgagaaggtctttcagcgctgataacttcattggtattcagcgctccaaagccatcctctcttaaagggagaaatgaggggatataacgtcacgcgaccttctacaaagactggagaaatatcacctttcctgctcaaaaaccagcaaaattagtattttcatcaaaaggaaagatctcaaattcaagagactcatggacaacaaggattatactccataggaaagaatgggaccttgtcaatgcaacagaacacacttctgatctttttaatgtaaacagagttacaaaaaccactccaaagtgaaggctcccatcccacacacagatatttacttactgtgtgggcccgatagctgtgaactatgtaaggttttttaaacaatagtttaaatttttaaagacactaaccatataacttttatgtttcttcccgtttttcttcctcccccccattttgctgcatatgcctttcaaatcaatgcagtattaccattaaaacatgggactcttcactaaagccacttaggagcagactgcagcattgttaggtattgaagggttctttctcccttctgttaccattgaagctgcttgtcattggcaatcatttaaaccaaaaagctgctggataacat

SEQ ID NO: 34400 - DNA, 211 bp, Macaca Mulatta
gctccccatgccgcaatggcgggcagtgccaggatgaccagggctttgccctcaacttcacatgccgctgcttggtgggctttgtgggtgcccgctgtgaggtgaacgtggatgactgcctgatgcggccttgtgctaatggtgccacctgccttgatggcataaaccgcttctcctgcctctgtcctgagggctttgctggacgcttctg

SEQ ID NO: 34401 - DNA, 187 bp, Macaca Mulatta
tcagctacagcctgggcgccatttgcccgaagcactgcaaggtgccccatggcctcttccagttcttcttctggatcggctactgcaacagttcgctgaaccctgtcatttacaccattttcaaccaggacttccgccgtgccttccggaggatcctgtgccgcccatggacccagacagcctggtg

SEQ ID NO: 34402 - DNA, 2202 bp, Macaca Mulatta
  misc_feature (1)...(2202): n = A,T,C or G
tgatcagagttactctgatctgaagattttggcgtttaaggcattaatatactagcctgagttgttcatggnggagtttttcatcagtatgtctgaaaccattaaatataatgacgatgatcataaaactctgtttctgaaaacactaaatgaacagcgcctggaaggagaattttgtgatattgctattgtggttgaggatgtgaaattcagagctcacagatgtgttcttgctgcctgcagcacctactttaaaaagcttttcaagaagcttgaggttgatagttcttcagtcatagaaatagattttcttcgttctgatatatttgaagaggtcctgaactacatgtacccagcaaagatttccgtgaaaaaagaagatgttaacttaatgatgtcatcgggtcagattcttggtatccgatttttggataaactgtgttctcagaagcgtgatgtgtccagtcccgatgaaaacaatggtcagtccaaaagtaagtattgcctcaaaataaatcgccccattggagatgctgctgacaccnnnnnnnnnnnnnnnnnnnnnnnnnnnnnnnnnnnnnnnnnnnnnnnnnnnnnnnnnnnnnnnnnnnnnnnnnnnnnnnnnnnnnnnnnnnnnnnnnnnnnnnnnnnnnnnnnnnnnnnnnnnnnnnnnnnnnnnnnnnnnnnnnnnnnnnnnnnnnnnnnnnnnnnnnnnnnnnnnnnnnnnnnnnnnnnnnnnnnnnnnnnnnnnnnnnnnnnnnnnnnnnnnnnnnnnnnnnnnnnnnnnnnnnnnnnnnnnnnnnnnnnnnnnnnnnnnnnnnnnnnnnnnnnnnnnnnnnnnnnnnnnnnnnnnnnnnnnnnnnnnnnnnnnnnnnnnnnnnnnnnnnnnnnnnnnnnnnnnnnnnnnnnnnnnnnnnnnnnnnnnnnnnnnnnnnnnnnnnnnnnnnnnnnnnnnnnnnnnnnnnnnnnnnnnnnnnnnnnnnnnnnnnnnnnnnnnnnnnnnnnnnnnnnnnnnnnnnnnnnnnnnnnnnnnnnnnnnnnnnnnnnnnnnnnnnnnnnnnnnnnnnnnnnnnnnnnnnnnnnnnnnnnnnnnnnnnnnnnnnnnnnnnnnnnnnnnnnnnnnnnnnnnnnnnnnnnnnnnnnnnnnnnnnnnnnnnnnnnnnnnnnnnnnnnnnnnnnnnnnnnnnnnnnnnnnnnnnnnnnnnnnnnnnnnnnnnnnnnnnnnnnnnnnnnnnnnnnnnnnnnnnnnnnnnnnnnnnnnnnnnnnnnnnnnnnnnnnnnnnnnnnnnnnnnnnnnnatatgcacagtgaaaggaagcaggttacccccagtgccatccagagcgagacagaacagttgcaggcggcagcgatggctgcagaagcagagcagcagctggaaacgatagcctgtagctagaggcagtgggacagggacactntgctgggaagtggagactgagatgacgtggatcataatgagtgaatgccagttactatatttttgtggaaacgtatggaacattgtactcactggacttcaggcagtgcttggttaggtatttttaagactttcaaggaaatggtgttcctcagttctgaccaaactgtttcactgtcttgtctggtgtctagtattaatgttgccagtaagcacccctctcccnnnnnnnnnnnnnnnnnnnaatttgagaactcctgtgtccagtttagaagtgagagacttccatttttaattcctttacactcaccagcctggcaggtgccctgcacagagtaataagtaaattgatttcctaatcatcacaattctgtgtgacttagggtcaaacgagcagttttaataacttaataaaagtacttcagatagacgcagaaaattggtgagtggttgaccaagaacactgcgcaaatacaaaaaaaaagttctggaaatgcagaatggcattagatttatatttgatttgttcattttatatcactgtttttcactgtttttgtggacaaataatggttgctttgctgaagtgtttcttcctcaatcttgattgccctgtacctaccccagaagctatagtcacatgtcctaaaggccaagcaaacccaccaggatggtgggggatcttggggccaagctgaaggtttctcttattggggcaatgccactccacaccagatgggatttgtgagtggacccgtggt

SEQ ID NO: 34403 - DNA, 684 bp, Macaca Mulatta
ggattcctctaaagaaacattttaagcaagacagtttagagaatcctaatgtctacactggtaaagcgcgagccatgtaagcttctttttttttctatgcaagagtattgatgtatgtgctgaatcttcacagacttgtcaatacacaggcactattctaaaatagcactgaactggggatcagtagactattgtctcctaaacccaggactagagttcccttgtactctcactcctttggtcattaaatgcactgggcttgccctcgctttggccttcctagaacgctgcttcataacctgtctgtctgacttctgcatctccgtccatgtcagctcattcacaagagctgctcccaagcctggatgagtcgcaccttgcatcttgagcatgcatttctcacaataattattaagctgtgtgataatttctgctttcaggacattgtcatccattatcttggctgtgagctccttgggtacgggtaccttgtatgtttacttttatatccctagcaccaagcaagtgcctggcacatggtcagtgccctaagtatttgtagagtgaagaatgccagcctctcttgtccctggttttccttatgtgttaaatgtggttgaagtttgtccatcgctaggggagaaacttcccagtaataaaatttactatttctagggttattct

SEQ ID NO: 34404 - DNA, 433 bp, Macaca Mulatta
taacacagaaagtgaaatgagttaacatttggccatactgatgtttgtgttacccaaaaatactactggatgcaaactgttatgtaaatctgagatttcactgacaactttaagataccaaccaaaacatttttattaaatgttcaaatgaaagcaagaaaataaaaattgttcttaaaatgatttggtataaagttcagtgtaagaggaagattagcttcttttaaatgtagctaattttaaaaagtgtatctctgttcttaatgcaaatattcctggaagaagagagttctggttgctcaccttatggaactggaagtaatgactaggtccctttccatgattcagcagattcgttttcatattataacttgtatgtcacatacttgcatgtcacatcataatgacattagcaatgtatcacatgtaaaag

SEQ ID NO: 34405 - DNA, 964 bp, Macaca Mulatta
gggctctttccttgcctaacgcagccatggctcgtggtcccaagaagcatctgaagcgggtagcagctccaaagcattggatgctggataaattgaccggtgtgtttgctcctcgtccatccaccggtccccacaagttgagagagtgtctccccctcatcatcttcctaaggaacagacttaagtatgccctgacaggagatgaagtaaagaagatttgcatgcagcggttcattaagatcgatggcaaggtccgaactgatataacctaccctgctggattcatggatgtcatcagcattgacaagacgggagagaatttccgtctgatctatgacacctagggtcgctttgctgtacatcgtattacccctgacgaggcccagctccacttatgcacagtgagaaagactcttgcgggcacaaaaaggcatccctcaccctggtgacccctcgatccccccctccatctacccactcgcgaatcccccccactcagggctgagctggaccccgaccttcagagttgcacttcgagaacgacctggggcacagcatttaacttgaatcctccccataccttgctctcctctaccagttctagaagtctacacttagcggcttgggcgttagcacgtcgcgcccctgtaacataccacctctcgggggcaatggcaaatgtgcgccgtggccgaccttgtctctccttcccgctaagcagcgacggccccttcacctgtacccatttctccccttctccccatcgcgcccttattgctcgcgcatatcactacggcgctggtgcgccccgatagccagagcgccacggatctcgcatgtcccgcccttcttcgcgctcccttaccttccccccccgttctgtcacagagcgcccgtgccctcacttccgccccccctacacgtgcgatttctgccctgcaccctgcgcccctcaccgcgaaac

SEQ ID NO: 34406 - DNA, 662 bp, Macaca Mulatta
tctgaagggatatatcctttcaaacaggccatctaaggcagctaattatgcattgcattggggtctctactgagaaaaattctgtgacttgaactaaatatttttaaatgtggattttttttgaaactaatatttaatattgcttctcctgcatggcaaaactgcctattctgctatttaaaaaccctcaatgactttattttctactgccgcctttttcatgtgcaaccaaaatgaaaatgtttaaattaactgtgttgtacaaatggtacccaacacaaactttttttaaattagtaatacttttgtttaaagttttaagtttgcattttgactttttttgtaaggatgtatgttgtgtgtttaacctttattaactaacgttaaaaactgtgatgtgtgcgtagaatattacgtatgcatgttcatgtctaaagaatggctgttgatgataaaataaaaatcagctttcatttttctaagtgtggctatggtttactgaatgcttttgtcttttagagctttctgaaagttttcccccatgtatgtttttatggaatgcatatatacattacatgattttttcttttaggggagagccgggtcttttcattagaatttttatcattgtctatgtatataattttaattgcctttaaaat

SEQ ID NO: 34407 - DNA, 162 bp, Macaca Mulatta
catcacgtggctgtcacatgccgctacgtctacactaagcacccagtgctgtggatgtgcactgccataatctttatggcgtggacctgtgaccatggccattccagccaatatgacgagggcacccacaagtcactacttggaggacagtgcctctttgag

SEQ ID NO: 34408 - DNA, 557 bp, Macaca Mulatta
ttctccatacgtaattctggagaagatgaggaatcttgccctccaggaaccttccttcctcccccagtgaggaaatcagtcactgcactggtgcaaagccaagccgattggaatttgtgctcttcaccaattttctcagggaaagaccccttccgcttgccagcagaggaacctgtagttttttccatttctttcttcagaaccaaagtgtgtatcactcctcatgctcacagggatgggcaggtgagaattcaccaggctcttagctcaaaagacacagcctcagaatggccagatggatagcacgaaacccgacttggattcactatcttcctcctgccataaggctgtgctcccacataacaagctccagggaagctttctaagagccaaggcttggaaattgagtgttaagaaaattatggcataaattacatataaatagtatatatgattaaatattgtccagttacatttacacacacattttttctcatccacaatggggacagatgagatggaggacttgaaggatgggtgagaataccaagacatgt

SEQ ID NO: 34409 - DNA, 539 bp, Macaca Mulatta
aaagctttcgctaactcttcacatcttacagtacatatgagaactcacactggtgagaagccttatcaatgtaaggaatgtggaaaagcctttattaattcctcttgctttaaaagtcacatgcagactcaccctggtgtaaaaccctataactgtcaacattgtgggaaagcctttattcgatcctcatttcttattcgacatttaagaagtcacagtgcggaaaggccttttgaatgtgaggaatgtgggaaagcctttagatactcctcgcaccttagtcaacataaaagaacacacacaggggagaagccatataaatgtcaaaagtgtgggcgagccttcgctatctcatcaggccttacagtacacatgagaactcacactggcgaacggccctttgaatgtcaggaatgtgggaaagcctttactcggtccacgtatcttattcgacatctaagaagtcacagtgtgaagaaaccatataaggaatgtgggcagacctttagtaattcctcatgccttactgaatgtgtgtg

SEQ ID NO: 34410 - DNA, 1514 bp, Macaca Mulatta
  misc_feature (1)...(1514): n = A,T,C or G
ccctcgaatggcggtgtgaagagtgttcgcctgagccagatcccaagcaggtnnnnnnnnnnnnnnnnnnnnnnnnnnnnnnnnnnnnnnnnnnnnnnnnnnnnnnnnnnnnnnnnnnnnnnnnnnnnnnnnnnnnnnnnnnnnnnnnnnnnnnnnnnnnnnnnnnnnnnnnnnnnnnnnnnnnnnnnnnnnnnnnnnnnnnnnnnnnnnnnnnnnnnnnnnnnnnnnnnnnnnnnnnnnnnnnnnnnnnnnnnnnnnnnnnnnnnnnnnnnnnnnnnnnnnnnnnnnnnnnnnnnnnnnnnnnnnnnnnnnnnnnnnnnnnnnnnnnnnnnnnnnnnnnnnnnnnnnnnnnnnnnnnnnnnnnnnnnnnnnnnnnnnnnnnnnnnnnnnnnnnnngatgagcagttccagagaagtactgctccttcagttaacagtgatcaaagtgatgacaagccggatattgtctgtcaaaactgagttccatgcaaaggagaaatacagagatataattaaaattctcttagaatcagctaaagttgattctaaattnnnnnnnnnnnnnnnnnnnnnnnnnnnnnnnnnnnnnnnnnnnnnnnnnnnnnnnnnnnnnnnnnnnnnnnnnnnnnnnnnnnnnnnngataaccttaagtaattcctggattgctttttgccagaaaaatctttctgaatactctgagagtaataaagcaatatactgcctctggactcttacagcaataataaaagaaatctttaaagattcatgttcacaaaaaacagnncagaaattctaaagcagttcctgactcatttcgacactatttttgaagtgttttacaattccttattctctcagcattttgaaaactgccaggatacttctaaaatagtaaacatcctgatatgtttcctggagttgcttgagcttctcatagcctccagaatctacctgaagttacatttcacttgccagaggattttatttttgaaaccatcttgcatgctagaagttattacctggcctattcaggcttttgtcaaaaggaaggtcatcatattcctcaaaaaatgccttctctttaaagtgggtgaagacctttgtcgtggatctgtacctcccctaatgccgccagaccgtcatgtagcaatggacatgctggctttagctaatgccgttttgcaagctgtgaattcgggattgttgaagacattgtctgttgatggaaaacattccttttttggaggtgatgaagttcaacctggatgtgaacatatcgctagtccagatcatgtgatccttagagcagcaagcttagttataatgaaatccttggaaatcaagtttcagaattgttcgtcagcaagtgaaatgaaaggtaattccccgaactccttttgtatgcagcgtgaaattattaagtatagtaattcataattatcaaatctcaggactaatataaattccactaatttcagctgtatgttatcctatttataacttgctacatttt

SEQ ID NO: 34411 - DNA, 535 bp, Macaca Mulatta
  misc_feature (1)...(535): n = A,T,C or G
acttgggctaggatcagtgttcaacgggttcagaaatcaccgtgtccttggcatcacctccctccnccacctcctctcccaccacacagcaggagacacagtgactggaaggttttcaaggaggactgcattgcccctattgaaacaaactgtccgacaaaccctttctcggacgtgtgacagagagacggtcatgatgtgacatatgagtagacatgcgtttaatgggcgctgtgattgctgcattcgtgcgcaatgaatggtccaggccatttgtgtccagtagccgcacaagctgcagggtctcatgtttggagaaggagggcctctccgccgtccaccttgctggagtacaggcgaccctgggcggtaaccctctgcgccatcagaaatgtggtgctctgagtagccacagatttccatctgcatctccgataccatttccctctactgacatatccctgttggaagcgttggatttgtgcgtgggtgtgagggtagtttggtgtgtgggtcgcaaaaggaaaagcgaatg

SEQ ID NO: 34412 - DNA, 90 bp, Macaca Mulatta
gtggttttcacctggattccaatgaggtcgttcaggagccagggagggctttctgtgactgtgggccaaagactacccgctggaatgtct

SEQ ID NO: 34413 - DNA, 294 bp, Macaca Mulatta
  misc_feature (1)...(294): n = A,T,C or G
caggcacctatggaggatctattatgatatcacggatgttgagtttgaattaattgcttcattctggccatctctgccagctgatctgcaagctgcatatgagaaccccagagataagattctggttttcaaannnnnnnnnnnnggatgatcagaggatatgctgtcttgccagattatcccaaatccattcatacattaggttttccaggacgtgtgaagaaagtagatgcagccgtctgtgataagaccacaagaaaaacctacttctttgtgggcatttggtgctggagg

SEQ ID NO: 34414 - DNA, 1163 bp, Macaca Mulatta
  misc_feature (1)...(1163): n = A,T,C or G
atgatccacagtctatttctcataaactgttccggtgacatatttctagagaagcactggaaagagcgttgtgagccagtctgtctgtgattatttctttgaaactgaagagaaagctgctgatgtgaaaatgtaccacctgtcatnnnnnnnnnnnnnnnnnnnnnnnnnnnnnnnnnnnnnnnnnnnnnnnnnnnnnnnnnnnnnnnnnnnnnnnnnnnnnnnnnnnnnnnnnnnnnnnnnnnnnnnnnnnnnnnnnnnnnnnnnnnnnnnnnnnnnnnnnnnnnnnnnnnnnnnnnnnnnnnnnnnnnnnnnnnnnnnnnnnnnnnnnnnnnnnnnnnnnnnnnnnnnnnnnnnnnnnnnnnnnnnnnnnnnnnnnnnnnnnnnnnnnnnnnnnnnnnnnnnnnnnnnnnnnnnnnnnnnnnnnnnnnnnnnnnnnnnnnnnnnnnnnnnnnnnnnnnnnnnnnnnnnnnnnnnnnnnnnnnnnnnnnnnnnnnnnnnnnnnnnnnnnnnnnnnnnnnnnnnnnnnnnnnnnnnnnnnnnnnnnnnnnnnnnnnnnnnnnnnnnnnnnnnnnnnnnnnnnnnnnnnnnnnnnnnnnnnnnnnnnnnnnnnnnnnnnnnnnnnnnnnnnnnnnnnnnnnnnnnnnnnnnnnnnnnnnnnnnnnnnnnnnnnnnnnnnnnnnnnnnnnnnnnnnnnnnnnnnnnnnnnnnnnnnnnnnnnnnnnnnnnnnnnnnnnnnnnnnnnnnnnnnnnnnnnnnnnnnnnnnnnnnnnnnnnnnnnnnnnnnnnnnnnnnnnnnnnnctagtggcaataccagtgtatgtgaaacatagtatcagctttaaagagaacagttcttgtggcagatttgatataacaattggaccaaagcagaatatggggaaaactattgaaggaattacagtgacagttcacatgccaaaagttgtgctgaacatgaacctgacaaccacacaaggcagctatacatttgatccagtcaccaaggtacnaaggtactaacatgggatgtgggaaaaattactccacaaaagctcccaagtcttaaaggactggtaaatttacagtctggagcccccaaaccagaagagaatccgagcctcaatatacagtttaagatccagcagcttgctatttcagg

SEQ ID NO: 34415 - DNA, 6387 bp, Macaca Mulatta
  misc_feature (1)...(6387): n = A,T,C or G
tggttgcactttcgctgaagatcagcattgggaatgtggtgaagacgatgcagtttgagccgtctaccatggtgtacgacgcctgccgcatcattcgtgagcggatcccagaggccccggctggtcctcnccagcgactttgggctctttctgtcagatgatgaccccaaaaagggtatatggctggaggctggcaaagctttggactactacatgctccgaaatggggnnnnnnnnnnnnnnnnnnnnnnnnnnnnnnnnnnnnnnnnnnnnnnnnnnnnnnnnnnnnnnnnnnnnnnnnnnnnnnnnnnnnnnnnnnnnnnnnnnnnnnnnnnnnnnnnnnnnnnnnnnnnnnnnnnnnnnnnnnnnnnnnnnnnnnnnnnnnnnnnnnnnnnnnnnnnnnnnnnnnnnnnnnnnnnnnnnnnnnnnnnnnnnnnnnnnnnnnnnnnnnnnnnnnnnnnnnnnnnnnnnnnnnnnnnnnnnnnnnnnnnnnnnnnnnnnnnnnnnnnnnnnnnnnnnnnnnnnnnnnnnnnnnnnnnnnnnnnnnnnnnnnnnnnnnnnnnnnnnnnnnnnnnnnnnnnnnnnnnnnnnnnnnnnnnnnnnnnnnnnnnnnnnnnnnnnnnnnnnnnnnnnnnnnnnnnnnnnnnnnnncaggcacgagatgacatcctgaatggctcccaccctgtctcctttgacaaggcctgtgagtttgctggcttccaatgccagatccagtttgggccccacaatgagcagaaacacaaggctggcttccnnnnnnnnnnnnnnnnnnnnnnnnnnnnnnnnnnnnnnnnnnnnnnnnnnnnnnnnnnnnnnnnnnnnnnnnnnnnnnnnnnnnnnnnnnnnnnnnnnnnnnnnnnnnnnnnnnnnnnnnnnnnnnnnnnnnnnnnnnnnnnnnnnnnnnnnnnnnnnnnnnnnnnnnnnnnnnnnnnnnnnnnnnnnnnnnnnnnnnnnnnnnnnnnnnnnnnnnnnnnnnnnnnnnnnnnnnnnnnnnnnnnnnnnnnnnnnnnnnnnnnnnnnnnnnnnnnnnnnnnnnnnnnnnnnnnnnnnnnnnnnnnnnnnnnnnnnnnnnnnnnnnnnnnnnnnnnnnnnnnnnnnnnnnnnnnnnnnnnnnnnnnnnnnnnnnnnnnnnnnnnnnnnnnnnnnnnnnnnnnnnnnnnnnnnnnnnnnnnnnnnnnnnnnnnnnnnnnnnnnnnnnnnnnnnnnnnnnnnnnnnnnnnnnnnnnnnnnnnnnnnnnnnnnnnnnnnnnnnnnnnnnnnnnnnnnnnnnnnnnnnnnnnnnnnnnnnnnnnnnnnnnnnnnnnnnnnnnnnnnnnnnnnnnnnnnnnnnnnnnnnnnnnnnnnnnnnnnnnnnnnnnnnnnnnnnnnnnnnnnnnnnnnnnnnnnnnnnnnnnnnnnnnnnnnnnnnnnnnnnnnnnnnnnnnnnnnnnnnnnnnnnnnnnnnnnnnnnnnnnnnnnnnnnnnnnnnnnnnnnnnnnnnnnnnnnnnnnnnnnnnnnnnnnnnnnnnnnnnnnnnnnnnnnnnnnnnnnnnnnnnnnnnnnnnnnnnnnnnnnnnnnnnnnnnnnnnnnnnnnnnnnnnnnnnnnnnnnnnnnnnnnnnnnnnnnnnnnnnnnnnnnnnnnnnnnnnnnnnnnnnnnnnnnnnnnnnnnnnnnnnnnnnnnnnnnnnnnnnnnnnnnnnnnnnnnnnnnnnnnnnnnnnnnnnnnnnnnnnnnnnnnnnnnnnnnnnnnnnnnnnnnnnnnnnnnnnnnnnnnnnnnnnnnnnnnnnnnnnnnnnnnnnnnnnnnnnnnnnnnnnnnnnnnnnnnnnnnnnnnnnnnnnnnnnnnnnnnnnnnnnnnnnnnnnnnnnnnnnnnnnnnnnnnnnnnnnnnnnnnnnnnnnnnnnnnnnnnnnnnnnnnnnnnnnnnnnnnnnnnnnnnnnnnnnnnnnnnnnnnnnnnnnnnnnnnnnnnnnnnnnnnnnnnnnnnnnnnnnnnnnnnnnnnnnnnnnnnnnnnnnnnnnnnnnnnnnnnnnnnnnnnnnnnnnnnnnnnnnnnnnnnnnnnnnnnnnnnnnnnnnnnnnnnnnnnnnnnnnnnnnnnnnnnnnnnnnnnnnnnnnnnnnnnnnnnnnnnnnnnnnnnnnnnnnnnnnnnnnnnnnnnnnnnnnnnnnnnnnnnnnnnnnnnnnnnnnnnnnnnnnnnnnnnnnnnnnnnnnnnnnnnnnnnnnnnnnnnnnnnnnnnnnnnnnnnnnnnnnnnnnnnnnnnnnnnnnnnnnnnnnnnnnnnnnnnnnnnnnnnnnnnnnnnnnnnnnnnnnnnnnnnnnnnnnnnnnnnnnnnnnnnnnnnnnnnnnnnnnnnnnnnnnnnnnnnnnnnnnnnnnnnnnnnnnnnnnnnnnnnnnnnnnnnnnnnnnnnnnnnnnnnnnnnnnnnnnnnnnnnnnnnnnnnnnnnnnnnnnnnnnnnnnnnnnnnnnnnnnnnnnnnnnnnnnnnnnnnnnnnnnnnnnnnnnnnnnnnnnnnnnnnnnnnnnnnnnnnnnnnnnnnnnnnnnnnnnnnnnnnnnnnnnnnnnnnnnnnnnnnnnnnnnnnnnnnnnnnnnnnnnnnnnnnnnnnnnnnnnnnnnnnnnnnnnnnnnnnnnnnnnnnnnnnnnnnnnnnnnnnnnnnnnnnnnnnnnnnnnnnnnnnnnnnnnnnnnnnnnnnnnnnnnnnnnnnnnnnnnnnnnnnnnnnnnnnnnnnnnnnnnnnnnnnnnnnnnnnnnnnnnnnnnnnnnnnnnnnnnnnnnnnnnnnnnnnnnnnnnnnnnnnnnnnnnnnnnnnnnnnnnnnnnnnnnnnnnnnnnnnnnnnnnnnnnnnnnnnnnnnnnnnnnnnnnnnnnnnnnnnnnnnnnnnnnnnnnnnnnnnnnnnnnnnnnnnnnnnnnnnnnnnnnnnnnnnnnnnnnnnnnnnnnnnnnnnnnnnnnnnnnnnnnnnnnnnnnnnnnnnnnnnnnnnnnnnnnnnnnnnnnnnnnnnnnnnnnnnnnnnnnnnnnnnnnnnnnnnnnnnnnnnnnnnnnnnnnnnnnnnnnnnnnnnnnnnnnnnnnnnnnnnnnnnnnnnnnnnnnnnnnnnnnnnnnnnnnnnnnnnnnnnnnnnnnnnnnnnnnnnnnnnnnnnnnnnnnnnnnnnnnnnnnnnnnnnnnnnnnnnnnnnnnnnnnnnnnnnnnnnnnnnnnnnnnnnnnnnnnnnnnnnnnnnnnnnnnnnnnnnnnnnnnnnnnnnnnnnnnnnnnnnnnnnnnnnnnnnnnnnnnnnnnnnnnnnnnnnnnnnnnnnnnnnnnnnnnnnnnnnnnnnnnnnnnnnnnnnnnnnnnnnnnnnnnnnnnnnnnnnnnnnnnnnnnnnnnnnnnnnnnnnnnnnnnnnnnnnnnnnnnnnnnnnnnnnnnnnnnnnnnnnnnnnnnnnnnnnnnnnnnnnnnnnnnnnnnnnnnnnnnnnnnnnnnnnnnnnnnnnnnnnnnnnnnnnnnnnnnnnnnnnnnnnnnnnnnnnnnnnnnnnnnnnnnnnnnnnnnnnnnnnnnnnnnnnnnnnnnnnnnnnnnnnnnnnnnnnnnnnnnnnnnnnnnnnnnnnnnnnnnnnnnnnnnnnnnnnnnnnnnnnnnnnnnnnnnnnnnnnnnnnnnnnnnnnnnnnnnnnnnnnnnnnnnnnnnnnnnnnnnnnnnnnnnnnnnnnnnnnnnnnnnnnnnnnnnnnnnnnnnnnnnnnnnnnnnnnnnnnnnnnnnnnnnnnnnnnnnnnnnnnnnnnnnnnnnnnnnnnnnnnnnnnnnnnnnnnnnnnnnnnnnnnnnnnnnnnnnnnnnnnnnnnnnnnnnnnnnnnnnnnnnnnnnnnnnnnnnnnnnnnnnnnnnnnnnnnnnnnnnnnnnnnnnnnnnnnnnnnnnnnnnnnnnnnnnnnnnnnnnnnnnnnnnnnnnnnnnnnnnnnnnnnnnnnnnnnnnnnnnnnnnnnnnnnnnnnnnnnnnnnnnnnnnnnnnnnnnnnnnnnnnnnnnnnnnnnnnnnnnnnnnnnnnnnnnnnnnnnnnnnnnnnnnnnnnnnnnnnnnnnnnnnnnnnnnnnnnnnnnnnnnnnnnnnnnnnnnnnnnnnnnnnnnnnnnnnnnnnnnnnnnnnnnnnnnnnnnnnnnnnnnnnnnnnnnnnnnnnnnnnnnnnnnnnnnnnnnnnnnnnnnnnnnnnnnnnnnnnnnaggtgctgggcgaggctatgactggcatctcccaaaatgccaagaatggaaatctgccagagtttggagaggccatttccacagcctcaaaggcactttgtggcttcacagaggcagctgcacagnnnnnnnnnnnnnnnnnnnnnnnnnnnnnnnnnnnnnnnnnnnnnnnnnnnnnnnnnnnnnnnnnnnnnnnnnnnnnnnnnnnnnnnnnnnnnnnnnnnnnnnnnnnnnnnnnnnnnnnnnnnnnnnnnnnnnnnnnnnnnnnnnnnnnnnnnnnnnnnnnnnnnnnnnnnnnnnnnnnnnnnnnnnnnnnnnnnnnnnnnnnnnnnnnnnnnnnnnnnnnnnnnnnnnnnnnnnnnnnnnnnnnnnnnnnnnnnnnnnnnnnnnnnnnnnnnnnnnnnnnnnnnnnnnnnnnnnnnnnnnnnnnnnnnnnnnnnnnnnnnnnnnnnnnnnnnnnnnnnnnnnnnnnnnnnnnnnnnnnnnnnnnnnnnnnnnnnnnnnnnnnnnnnnnnnnnnnnnnnnnnnnnnnnnnnnnnnnnnnnnnnnnnnnnnnnnnnnnnnnnnnnnnnnnnnnnnnnnnnnnnnnnnnnnnnnnnnnnnnnnnnnnnnnnnnnnnnnnnnnnnnnnnnnnnnnnnnnnnnnnnnnnnnnnnnnnnnnnnnnnnnnnnnnnnnnnnnnnnnnnnnnnnnnnnnnnnnnnnnnnnnnnnnnnnnnnnnnnnnnnnnnnnnnnnnnnnnnnnnnnnnnnnnnnnnnnnnnnnnnnnnnnnnnnnnnnnnnnnnnnnnnnnnnnnnnnnnnnnnnnnnnnnnnnnnnnnnnnnnnnnnnnnnnnnnnnnnnnnnnnnnnnnnnnnnnnnnnnnnnnnnnnnnnnnnnnnnnnnnnnnnnnnnnnnnnnnnnnnnnnnnnnnnnnnnnnnnnnnnnnnnnnnnnnnnnnnnnnnnnnnnnnnnnnnnnnnnnnnnnnnnnnnnnnnnnnnnnnnnnnaggtgtcccagatggcccagtactttgagccgctcaccctggctgcagtgggtgctgcctccaagaccctgagccacccgcagcagatggcgctcctggaccagactaaaacattggcagaatctgccctgcagttgctatacactgccaatgaggatggtggtaacccaaannnnnnnnnnnnnnnnnnnnnnnnnnnnnnnnnnnnnnnnnnnnnnnnnnnnnnnnnnnnnnnnnnnnnnnnnnnnnnnnnnnnnnnnnnnnnnnnnnnnnnnnnnnnnnnnnnnnnnnnnnnnnnnnnnnnnnnnnnnnnnnnnnnnnnnnnnnnnnnnnnnnnnnnnnnnnnnnnnnnnnnnnnnnnnnnnnnnnnnnnnnnnnnnnnnnnnnnnnnnnnnnnnnnnnnnnnnnnnnnnnnnnnnnnnnnnnnnnnnnnnnnnnnnnnnnnnnnnnnnnnnnnnnnnnnnnnnnnnnnnnnnnnnnnnnnnnnnnnnnnnnnnnnnnnnnnnnnnnnnnnnnnnnnnnnnnnnnnnnnnnnnnnnnnngataggttcccatatcaaacaccgggtacaggagctgggccatggctgtgccgctctggtcaccaaggcaggcgccctgcagtgcagccccagtgatgcctacaccaagaaggagctcatagaatgtgcccggagagtttctgagaaggtnnnnnnnnnnnnnnnnnnnnnnnnnnnnnnnnnnnnnnnnnnnnnnnnnnnnnnnnnnnnnnnnnnnnnnnnnnnnnnnnnnnnnnnnnnnnnnnnnnnnnnnnnnnnnnnnnnnnnnnnnnnnnnnnnnnnnnnnnnnnnnnnnnnnnnnnnnnnnnnnnnnnnnnnnnnnnnnnnnnnnnnnnnnnngtgctggtggaggacaccaaggtcctggtgcaaaacgcagccgggagccaggagaagttggcgcaggctgcccagtcctccgtggcgaccatcacccgcctcactgatgtggtcaagctgggtgcagccagcctgggagctgaggaccctgagacccaggtncaggtggtactaatcaacgcagtgaaagatgtagccaaggccctgggagacctcatcagtgcaacgaaggctgcagctggcaaagttggagatgaccctgctgtgtggcagctaaagaactctgccaaggtnaggtgatggtgaccaatgtgacatca

SEQ ID NO: 34416 - DNA, 1084 bp, Macaca Mulatta
  misc_feature (1)...(1084): n = A,T,C or G
gctgaccactgatcaggacttgctgctgatgcaggaaggcatgccgatgcgcaaggtgaggtccaaaagctggaagaagctaagatacttcagacttcagaatgacggcatgacagtctggcatgcacggcaggccaggggcagtgccaagcccagcnnnnnnnnnnnnnnnnnnnnnnnnnnnnnnnnnnnnnnnnnnnnnnnnnnnnnnnnnnnnnnnnnnnnnnnnnnnnnnnnnnnnnnnnnnnnnnnnnnnnnnnnnnnnnnnnnnnnnnnnnnnnnnnnnnnnnnnnnnnnnnnnnnnnnnnnnnnnnnnnnnnnnnnnnnnnnnnnnnnnnnnnnnnnnnnnnnnnnnnnnnnnnnnnnnnnnnnnnnnnnnnnnnnnnnnnnnnnnnnnnnnnnnnnnnnnnnnnnnnnnnnnnnnnnnnnnnnnnnnnnnnnnnnnnnnnnnnnnnnnnnnnnnnnnnnnnnnnnnnnnnnnnnnnnnnnnnnnnnnnnnnnnnnnnnnnnnnnnnnnnnnnnnnnnnnnnnnnnnnnnnnnnnnnnnnnnnnnnnnnnnnnnnnnnnnnnnnnnnnnnnnnnnnnnnnnnnnnnnnnnnnnnnnnnnnnnnnnnnnnnnnnnnnnnnnnnnnnnnnnnnnnnnnnnnnnnnnnnnnnnnnnnnnnnnnnnnnnnnnnnnnnnnnnnnnnnnnnnnnnnnnnnnnnnnnnnnnnnnnnnnnnnnnnnnnnnnnnnnnnnggcaaactgcggcatgtgctgagcatggatggcttcctcagctacctctgctctaaggatggagacatcttcaacccagcctgcctccccatctatcaggatatgactcaacccctgaaccactacttcatctgctcctctcatnnnnnnnnnnnnnnnnnnnnnnnnnnnnnnnnnnnnnnnnnnnnnnnnnnnnnnnnnggccctgaagcgggggtgccgctgcatgtaggtggatgtatgggatggacctagtggggaacctgtcgtttaccatggacacaccctgacctcccgcatcctgttcaaagatgtcgtggccacagtagcacagtatgccttccag

SEQ ID NO: 34417 - DNA, 303 bp, Macaca Mulatta
atcaagaccattgtttcatgttaatgcagctgctgagaagaatattatttaatgactgagaaaacttgtttacagctccagcatataaggaaagtgttcaaggccagatatgcctcagatatttaaccagtaagccttagttgtacataaatacttttgtgtcaacaaaaaccttcagcactcacagaagacagttactcaacattataagatgtgccacagtatcccagttaaacgatatttaaatttatcttggcttttcatctaagttcagggttaagtaatttataccttctaaactct

SEQ ID NO: 34418 - DNA, 2634 bp, Macaca Mulatta
  misc_feature (1)...(2634): n = A,T,C or G
gcactgaagatgctggccatcgccagctcctcggagatccccacttttgttactggccgannnnnnnnnnnnnnnnnnnnnnnnnnnnnnnnnnnnnnnnnnnnnnnnnnnnnnnnnnnnnnnnnnnnnnnnnnnnnnnnnnnnnnnnnnnnnnnnnnnnnnnnnnnnnnnnnnnnnnnnnnnnnnnnnnnnnnnnnnnnnnnnnnnnnnnnnnnnnnnnnnnnnnnnnnnnnnnnnnnnnnnnnnnnnnnnnnnnnnnnnnnnnnnnnnnnnnnnnnnnnnnnnnnnnnnnnnnnnnnnnnnnnnnnnnnnnnnnnnnnnnnnnnnnnnnnnnnnnnnnnnnnnnnnnnnnnnnnnnnnnnnnnnnnnnnnnnnnnnnnnnnnnnnnnnnnnnnnnnnnnnnnnnnnnnnnnnnnnnnnnnnnnnnnnnnnnnnnnnnnnnnnnnnnnnnnnnnnnnnnnnnnnnnnnnnnnnnnnnnnnnnnnnnnnnnnnnnnnnnnnnnnnnnnnnnnnnnnnnnnnnnnnnnnnnnnnnnnnnnnnnnnnnnnnnnnnnnnnnnnnnnnnnnnnnnnnnnnnnnnnnnnnnnnnnnnnnnnnnnnnnnnnnnnnnnnnnnnnnnnnnnnnnnnnnnnnnnnnnnnnnnnnnnnnnnnnnnnnnnnnnnnnnnnnnnnnnnnnnnnnnnnnnnnnnnnnnnnnnnnnnnnnnnnnnnnnnnnnnnnnnnnnnnnnnnnnnnnnnnnnnnnnnnnnnnnnnnnnnnnnnnnnnnnnnnnnnnnnnnnnnnnnnnnnnnnnnnnnnnnnnnnnnnnnnnnnnnnnnnnnnnnnnnnnnnnnnnnnnnnnnnnnnnnnnnnnnnnnnnnnnnnnnnnnnnnnnnnnnnnnnnnnnnnnnnnnnnnnnnnnnnnnnnnnnnnnnnnnnnnnnnnnnnnnnnnnnnnnnnnnnnnnnnnnnnnnnnnnnnnnnnnnnnnnnnnnnnnnnnnnnnnnnnnnnnnnagatggtgctgggccagatcgaagaccacagacgaacccaccaacccatcaatatccccttctttgatgtgttcctcaggcatctctgccagggnggctccagtgtggaagtgaaggaggacaagtgctgggagaaggtggatttgtcctccaacccacaccgggccagcaagctgacggaccacaaccccaagacctactgggagtccaacggcagcaccggctcccactacatcaccctgcacatgcaccgtggtgttcttgttaggnnnnnnnnnnnnnnnnnnnnnnnnnnnnnnnnnnnnnnnnnnnnnnnnnnnnnnnnnnnnnnnnnnnnnnnnnnnnnnnnnnnnnnnnnnnnnnnnnnnnnnnnnnnnnnnnnnnnnnnnnnnnnnnnnnnnnnnnnnnnnnnnnnnnnnnnnnnnnnnnnnnnnnnnnnnnnnnnnnnnnnnnnnnnnnnnnnnnnncagggcggcattgacacccgggttcggggtgtggaggtcctgggccctaagcccacattctggccactgttccgggagcagctgtgtcgccgaacatgtctcttctacacaattcgggcacaagcctggagccgggacatagcagaggaccgccggcgcctcctccagctctgtcccannnnnnnnnnnnnnnnnnnnnnnnnnnnnnnnnnnnnnnnnnnnnnnnnnnnnnnnnnnnnnnnnnnnnnnnnnnnnnnnnnnnnnnnnnnnnnnnnnnnnnnnnnnnnnnnnnnnnnnnnnnnnnnnnnnnngatgcggaaggtgtgagtgccctgggatggctgctggatcagtacttagagcagagagagagctctcagaaccccctgagtcgagcagcgtcctttgcttctcgagttcgtcgcctttgccacttgctggtgcatatggagcctcctnnnnnnnnnnnnnnnnnnnnnnnnnnnnnnnnnnnnnnnnnnnnnnnnnnnnnnnnnnnnnnnnnnnnnnnnnnnnnnnnnnnnnnnnnnnnnnnnnnnnnnnnnnnnnnnnnnnnnnnnnnnnnnnnnnnnnnnnnnnncaggtcggcagattcctggctgcagcttggggggccccagactttgtgcctcgttactgtaaactctatgagcacttgcagagagcaggctccgagctgtttgggcctcgggcagcattcacgctggctctgcgcagtggcttctctggaaaaaaaaaagcagcagtccttcctcactgctgctcacgtgagnnnnnnnnnnnnnnnnnnnnnnnnnnnnnnnnnnnnnnnnnnnnnnnnnnnnnnnnnnnnnnnnnnnnnnnnnnnnnnnnnnnnnnnnnnnnnnnnnnnnnnnnnnnnnnnnnnnnnnnnnnnnnnnnnnnnnnnnnnnnnnnnnnnnnnnnnnncattatatggcgtaccgtctcctgagctttggctcgagctggctggagggggccgtgctggaggagattggcctctgttttcccaaccgcctcccccagctgatgctgcagagcctgagtacctctgaggagctgcagcgccagttccacctcttccagctccagcggcttgacaagttgttcttggagcaggaagacgaggaggaaaagagactagaggaagaggagg

SEQ ID NO: 34419 - DNA, 798 bp, Macaca Mulatta
  misc_feature (1)...(798): n = A,T,C or G
gggtgcatggtgcggaacctgctgttttatctatttattgtgccgtgtttacagttttttgtacactgtaccttcattggttcctgtgctgtagtaaatgtgttaggtagctgtggactccttggtattttgtaaatggtataacataacttggttcccctctgggtccttgagttttctgtgtatcatgtgaaaaaaatggtgacatacatacagaatttnnnnnnnnnnnnnnnnnnnnnnatcannnnnnnnnnnnnnnnnnnntgtactattaaatagggatcttcctggtctactatcattaggacaagtaacaagctaaaaatgaagtctcttgaatctttccatccccaacttgcccacaaagctgtgggtggtttctggtacttaaagcactaatgttatgttgctgctctgcaaacagcccagtagtcccacttccttccacaccaaaaagtgttaaatcaagtatgcaaatggagtccttacaactggagtttatgttgtcttgnnnnnnnnnnnnnnnnnnnnnnnnnnnnnnnnactttttttattgtcgaattgtttaaaagacttcatttctttacttgtttcttaccaaaaaagatataaggggaaaaaaaatgccataaattgctgtaacgggatatcatcatttccagnnnnnnnnnnnnnnnnnngcccagctttttttcccttttaaagatccccccaaaaaggcttcaaggggccgaaaccccaaaatattcgggtggcctcccctttgaaaaaaatttgaacctctccttcttgtga

SEQ ID NO: 34420 - DNA, 789 bp, Macaca Mulatta
  misc_feature (1)...(789): n = A,T,C or G
ggatcatgccaccacactctagcctgggtaacagagtgagactttgtnnnnnnnnnnnnnnnnnnnnnnnnaccgagttgggagtgtgacatacccaacagaagttgagaaatgataccttgctagagaacacaatgctattttggggagcagtgggaagtaaagttgggtgaacaggctggaaccagactattatactctttgaatggaagtataaatttagacttgactttcatggtaacaggagtttagaaacttttgagccaaataagtcatatgattacatcagtattctgaaagatgattttggctgtaatacccaagacagatgggaagagcttggggttaagaaaaaaataggttggttattaccatacatcacatatgaaagggaaaggaaatctgaatgagggtgacgaggggaaatatgggagccaaacttgttgagagggaataaagaagattaagtgtcaaaaataatttatgtttaagggaataggagaaaggtggtaccttcaaacaggattaaggagattagagggaaaattgagttaggacagatgattttagattcaaaaaaaaatttgaagtgatagtgggttatccacatggagacagagtagtataatactctgaacaaaatctgggcttcattactagttntgtcactttacatttaagttaagattatgccatgttatatccacccatatattgtcaaagaaatctgcaaaataaaaaaataggaaggaattggaccttactaaaagggtggtttaaaggaagttt

SEQ ID NO: 34421 - DNA, 4879 bp, Macaca Mulatta
  misc_feature (1)...(4879): n = A,T,C or G
ttcaccaggatccccagtctatttttgttacaaatccagttactttaacaccacctcaaggcccaccagctacagtgcagctttcttcagctgtgaacattatgaatggttctcagatgcacataaacccagcaaataaatctttgccacctacatttggcccagccacacttttcaatcacttcagcagtctttttgatagtagtcaggtgccatctaaccagggctggggagatggtccactgtcctcacgagtggctgcagatgcctctttcactgttcagtcagcgttcctgggtaactcagtgcttggacacttggaaaacatgcatcctgataactcaaaggcacctggcttcagaccaccttcccagcgagtttctactagtccagttggngggttaccatccattgacccatcaggcagctccccatcttcctcttctgctcctctgacaagtttttccggcataccaggaacaagggttttcctgcaagggccagctcctgttgggactcctagtttcaacagacaacatttttctccccatccttggacaagcgcctcaaactcatgtnnnnnnnnnnnnnnnnnnnnnnnnnnnnnnnnnnnnnnnnnnnnnnnnnnnnnnnnnnnnnnnnnnnnnnnnnnnnnnnnnnnnnnnnnnnnnnnnnnnnnnnnnnnnnnnnnnnnnnnnnnnnnnnnnnnnnnnnnnnnnnnnnnnnnnnnnnnnnnnnnnnnnnnnnnnnnnnnnnnnnnnnnnnnnnnnnnnnnnnnnnnnnnnnnnnnnnnnnnnnnnnnnnnnnnnnnnnnnnnnnnnnnnnnnnnnnnnnnnnnnnnnnnnnnnnnnnnnnnnnnnnnnnnnnnnnnnnnnnnnnnnnnnnnnnnnnnnnnnnnnnnnnnnnnnnnnnnnnnnnnnnnnnnnnnnnnnnnnnnnnnnnnnnnnnnnnnnnnnnnnnnnnnnnnnnnnnnnnnnnnnnnnnnnnnnnnnnnnnnnnnnnnnnnnnnnnnnnnnnnnnnnnnnnnnnnnnnnnnnnnnnnnnnnnnnnnnnnnnnnnnnnnnnnnnnnnnnnnnnnnnnnnnnnnnnnnnnnnnnnnnnnnnnnnnnnnnnnnnnnnnnnnnnnnnnnnnnnnnnnnnnnnnnnnnnnnnnnnnnnnnnnnnnnnnnnnnnnnnnnnnnnnnnnnnnnnnnnnnnnnnnnnnnnnnnnnnnnnnntttttgttttgtgagaagtataagtattgaatatcaaaagtcataattgaccatttcgatctggattgctttttcaatatcaagatgatgctactgaacactttatttcatatatgtgtattcttcctaggcagaaacagtgaattgccattgcatttatatattcattttgtaactgtctaaagattcctaattagaaattccaatttttcctcccccttttcagatttggcctggcacgtgggcacctcatattggaaacatgcatctcaaatatgtcaactaagttagaaggtctttactctttagccttgtttaagaaacctatgaccttggaagaaccatggggatttttttttaatgtgcctaagaaattttctctgaggctttagcaatggaaatttgattgcccattgtataagaacaaattgatttcctatccacctggttatgttctctggttagtttagccattttgaacttaagatcatatgaccttagtgcttttggctaaacatactgaatactacttgtatgcagaagagaattagttgattacatgtttcaaccttttagggtgataaatacatgtataattgtttacatacttaaaaggaaaaagttgagtaaatttcttgtcatatagtggctctacgtaatgtagcctgtattaatgtgaaatatttaccagaatattcaataaaaagatgaacagtctttagaagtggggtgtgatcctttcagtggtcatgcaggtaccacccaatccacattatattgaaccagatggttaatactatatttgtaacaggcttctcacatttaacacttgagtcccttcttagactgccttgaaaaagcacttttaagactatttacctatttattctgtgttaaacattcnnnnnnnnnnnnnnnnnnnnnnnnnnnnnnnnnnnnnnnnnnnnnnnnnnnnnnnnnnnnnnnnnnnnnnnnnnnnnnnnnnnnnnnnnnnnnnnnnnnnnnnnnnnnnnnnnnnnnnnnnnnnnnnnnnnnnnnnnnnnnnnnnnnnnnnnnnnnnnnnnnnnnnnnnnnnnnnnnnnnnnnnnnnnnnnnnnnnnnnnnnnnnnnnnnnnnnnnnnnnnnnnnnnnnnnnnnnnnnnnnnnnnnnnnnnnnnnnnnnnnnnnnnnnnnnnnnnnnnnnnnnnnnnnnnnnnnnnnnnnnnnnnnnnnnnnnnnnnnnnnnnnnnnnnnnnnnnnnnnnnnnnnnnnnnnnnnnnnnnnnnnnnnnnnnnnnnnnnnnnnnnnnnnnnnnnnnnnnnnnnnnnnnnnnnnnnnnnnnnnnnnnnnnnnnnnnnnnnnnnnnnnnnnnnnnnnnnnnnnnnnnnnnnnnnnnnnnnnnnnnnnnnnnnnnnnnnnnnnnnnnnnnnnnnnnnnnnnnnnnnnnnnnnnnnnnnnnnnnnnnnnnnnnnnnnnnnnnnnnnnnnnnnnnnnnnnnnnnnnnnnnnnnnnnnnnnnnnnnnnnnnnnnnnnnnnnnnnnnnnnnnnnnnnnnnnnnnnnnnnnnnnnnnnnnnnnnnnnnnnnnnnnnnnnnnnnnnnnnnnnnnnnnnnnnnnnnnnnnnnnnnnnnnnnnnnnnnnnnnnnnnnnnnnnnnnnnnnnnnnnnnnnnnnnnnnnnnnnnnnnnnnnnnnnnnnnnnnnnnnnnnnnnnnnnnnnnnnnnnnnnnnnnnnnnnnnnnnnnnnnnnnnnnnnnnnnnnnnnnnnnnnnnnnnnnnnnnnnnnnnnnnnnnnnnnnnnnnnnnnnnnnnnnnnnnnnnnnnnnnnnnnnnnnnnnnnnnnnnnnnnnnnnnnnnnnnnnnnnnnnnnnnnnnnnnnnnnnnnnnnnnnnnnnnnnnnnnnnnnnnnnnnnnnnnnnnnnnnnnnnnnnnnnnnnnnnnnnnnnnnnnnnnnnnnnnnnnnnnnnnnnnnnnnnnnnnnnnnnnnnnnnnnnnnnnnnnnnnnnnnnnnnnnnnnnnnnnnnnnnnnnnnnnnnnnnnnnnnnnnnnnnnnnnnnnnnnnnnnnnnnnnnnnnnnnnnnnnnnnnnnnnnnnnnnnnnnnnnnnnnnnnnnnnnnnnnnnnnnnnnnnnnnnnnnnnnnnnnnnnnnnnnnnnnnnnnnnnnnnnnnnnnnnnnnnnnnnnnnnnnnnnnnnnnnnnnnnnnnnnnnnnnnnnnnnnnnnnnnnnnnnnnnnnnnnnnnnnnnnnnnnnnnnnnnnnnnnnnnnnnnnnnnnnnnnnnnnnnnnnnnnnnnnnnnnnnnnnnnnnnnnnnnnnnnnnnnnnnnnnnnnnnnnnnnnnnnnnnnnnnnnnnnnnnnnnnnnnnnnnnnnnnnnnnnnnnnnnnnnnnnnnnnnnnnnnnnnnnnnnnnnnnnnnnnnnnnnnnnnnnnnnnnnnnnnnnnnnnnnnnnnnnnnnnnnnnnnnnnnnnnnnnnnnnnnnnnnnnnnnnnnnnnnnnnnnnnnnnnnnnnnnnnnnnnnnnnnnnnnnnnnnnnnnnnnnnnnnnnnnnnnnnnnnnnnnnnnnnnnnnnnnnnnnnnnnnnnnnnnnnnnnnnnnnnnnnnnnnnnnnnnnnnnnnnnnnnnnnnnnnnnnnnnnnnnnnnnnnnnnnnnnnnnnnnnnnnnnnnnnnnnnnnnnnnnnnnnnnnnnnnnnnnnnnnnnnnnnnnnnnnnnnnnnnnnnnnnnnnnnnnnnnnnnnnnnnnnnnnnnnnnnnnnnnnnnnnnnnnnnnnnnnnnnnnnnnnnnnnnnattatgggggccagtattgagattttagtggaggtagaagaccttgcacatctttagtgagccttcaagtcacgaagaaacatcctgctaaggtatagatcaaacccagtgaaatgaaactataggaatgaaactatatcatcaaggtttctggacccacttatttcagcttgtgttcaatgtaataaaattccgctaccaataaaattattgatgttttaagaccctttaaacctattgtggctacagtgtgctgacttgcccttttataggccagtctgcttccttcagtccctgctctcaaaggggaaatcccatcacctcagctaaccagaccgaagaagagaattggacggccgatggtggcctctcctaatcagaggnnnnnnnnnnnnnnnnnnnnnnnnnnnnnnnnnnnnnnnnnnnnnnnnnnnnnnnnnnnnnnnnnnnnnnnnnnnnnnnnnnnnnnnnnnnnnnnnnnnnnnnnnnnnnnnnnnnnnnnnnnnnnnnnnnnnnnnnnnnnnnnnnnnnnnnnnnnnnnnnnnnnnnnnngatgacgctcaatttgaaatggacatctcatccagttgcagatgacccggcatgtggagttacagagggatccctcatgccactgctgccaccacctcttcctggggcatccaaaggccagcttggcctcatctaatctggaagggagtgacttgttagttccaggcctcctttagttctgaggcagctagaccagggataggagtgggcaacttgccaagcccttaactctacttcctcttcggtctgtggtactcctcctaaccctaaaccctctatgctcaggggctggaactggggaatggagtaagtcaccttctggctgcttagtaaacattcaaagaaat

SEQ ID NO: 34422 - DNA, 785 bp, Macaca Mulatta
ttgaacattaccaaattcatactggtgagaaaccctttgaatgtaaagaatgtggaaaggcctttagtcttctgacacagcttgctggacatcagatcattcataatggtgagaagccatttaaatgtaaggagtgtgggaaggcctttaatcatggctcaaaccttgttcaacctcggagtgtttataatggtgagaaaccctatgaatgtaaggagtgtgggaaggcttttagacttcacctacaactttctctgcatcaaaaacttgtacaggtgagaaaccctttgaatgtaagaaatgtgggacagccttcagacatcagtagcaacttattgaacatcagaaaattcatacttgggtgaaaacctttgaatgtagggaatgtgggaaggcctttcaatataattaccaatttcgtggacatcatagatttcatattcgtgagaacccttatgaatgtcaaggatgtggaaaatgcattaccagtggtagaaaccttagagtacatcagagaattcatactggtaagaaaccatatcaatgtgaagaatgtgggaaagcctttagtcatagttcaaacctatgaaacatattaaaattcataccgatgaggaattctatgaatgtaatgaatgtgaaaaggcctttagcagtaattatgaacttactgtacatctgagaatccatactgctgagaaaccctgtgagtgtaaagaatgtggaaaacttttggatttagcttagtctttactgcacatcaaagaattcatactagtatgaac

SEQ ID NO: 34423 - DNA, 138 bp, Macaca Mulatta
aactgtcagaaatccagaagtccaatatgcagatcaagtccaacataggcacattaaaagatgcacacgagtttaaagaagaccgttctccatatccccaggatttccataatgtcatgcagcttcttgatagtcagg

SEQ ID NO: 34424 - DNA, 98 bp, Macaca Mulatta
cagagctcgcctccttctggaggccactgtgatgatgagccaagcaagttggagccaagttgaagggatagggcaacaaaatataatagtagtttctt

SEQ ID NO: 34425 - DNA, 824 bp, Macaca Mulatta
caattcctctcccttgtctcccctctcctcccttttctccgccttcaggtctggttccagaaccgccggaccaagtggaggaagaagcacgcggccgagatggccacggccaagaagaagcaggactcggagaccgagcgcctcaagggggcctcggagaacgatgaagaggacgacgactacaacaagcctctggatcccaactcggacgacgagaagatcacgcagctgctgaagaagcacaagtccagcagcggcggcggcggcctcctactgcacgcgtccgagccggagagctcatcctgaacaccgccgcccgccgcaccttcccggctctggcctccacttctggggccgcgaggggcgcggggaccgcgcgcacgccgcgcctggccgcccctctgggcccggaggacccggccctgcctgaggggaccctttgctatttttgagatgtacatatctatttttttaacctggaagttgtgggaggggatgtgggggagagagactccggggttgacaaggcaaggaagagcaccaaatgcactgcgtaaatgacgctactgaaacccgcagccgggccacggtcccagtcctatccccatcggcgggcagcggcctcagcgcccgggtccccctggcctccagcttttgcccccgcgggcggcggggtagggggcgccgagaggtgctgtggaagggttcacgcccatcgcgcacgggacctcggagccaagcgggcgggcgctgccaccgatgggaagagggaggtttctcccccccacacactgctgtgcgactaaagtaacctgtgaaggctc

SEQ ID NO: 34426 - DNA, 696 bp, Macaca Mulatta
gtattgcattatgcaagttatttcataatcttacatgtcctgtaacaggcttttgatgttgtgtctttccactcaaatgaatttgctaggtctgttctttttgaagctccccatgtctaactccattccaaaagaaaaatgaggtcagtagacagtctatggtgctagaaacccaccattgcctaatgacctagaaggctttgttatctctgagcttgactaagaccatacctagatcacaggtattatgactccacatgaaccttcacatttgttcgctcataatctacttactgcctaaaaactacaaaaccaggctaagaaacaccaccagttagagcatttacttctgcttctcctggattatgtgctacaaatgtgctttgactttagaaagggatggatgagaagacagatctgagaccaatctgggtagaagcaaaaagttgaacctttgaaagtgctgaacacaaatccaaattcgaatggttcaagtagccgtgaaatcgctcttcataaagtgggcttaattctctagtttaagttcttttgatggaatgaattaattaatgtgtcaggtggcttatttgtggatgccatgattgatgatgttcattttaagctcttacctatagtacaagtacatgatgctactgaatatttttccacttggaaactgtgagctggttgttgcat

SEQ ID NO: 34427 - DNA, 616 bp, Macaca Mulatta
  misc_feature (1)...(616): n = A,T,C or G
gcctgggcgagcgccgcanccggnccgcagggggcaccgngnccagaggggcctctccnccaggcccgnggcgcgcnggtcangggagncccgggnccgcccacggagacttttggcctggcgcgatactcnggaaccctnccagggccggcctgcggaagagccgatcttngcaccttccgctccttncantggcctnccaggcagagtncctggggctccaggctccccgcgcggggcgccgcccaccgccgtactaaacgatccaggaataaagacacttggtnttctaaaaaaaactaaacgaaccgttctgctccggtacggggtcgggggctgccaggcgtgcacagggcacggggcgggagagaccgtggcctccggagggaaccccgggtaccgcactgcgctcgccgcctccgcccggctcggggctgctggcggttggctcaggcagcaagcggcgcctgccccgcttctgcgacatctccctagcgtcccgcccatttcgccggcgtccgccagggggcgctcggcgttcccgccacgtgaggctgccgcccacccggcgggtcccgctgctccgcggcggaggcgtggcctcggctgggactaa

SEQ ID NO: 34428 - DNA, 1616 bp, Macaca Mulatta
  misc_feature (1)...(1616): n = A,T,C or G
agacttgaatgagacctgcctcatcagtcatgggatcatagtgtcacagatggaaaagcaaccatcagctgaattgtactgaactacacacttggctaattcatcttattgctctacacatctaaaggaaggctcattctgttcttggagtctagacagcatcaggagttgggctcagnnnnnnnnnnnnnnnnnnnnnnnnnnnnnnnnnnnnnnnnnnnnnnnnnnnnnnnnnnnnnnnnnnnnnnnnnnnnnnnnnnnnnnnnnnnnnnnnnnnnnnnnnnnnnnnnnnnnnnnnnnnnnnnnnnnnnnnnnnnnnnnnnnnnnnnnnnnnnnnnnnnnnnnnnnnnnnnnnnnnnnnnnnnnnnnnnnnnnnnnnnnnnnnnnnnnnnnnnnnnnnnnnnnnnnnnnnnnnnnnnnnnnnnnnnnnnnnnnnnnnnnnnnnnnnnnnnnnnnnnnnnnnnnnnnnnnnnnnnnnnnnnnnnnnnnnnnnnnnnnnnnnnnnnnnnnnnnnnnnnnnnnnnnnnnnnnnnnnnnnnnnnnnnnnnnnnnnnnnnnnnnnnnnnnnnnnnnnnnnnnnnnncaagtgtgaatacatgctcaactcgatgcccaagagactgtgtttagtgtgtggtgacatcgcttctgggtaccactatggggtagcgtcatgtgaagcctgcaaggcgttcttcaagaggacaattcaagnnnnnnnnnnnnnnnnnnnnnnnnnnnnnnnnnnnnnnnnnnnnnnnnnnnnnnnnnnnnnnnnnnnnnnnnnnnnnnnnnnnnnnnnnnnnnnnnnnnnnnnnnnnnnnnnnnaggggtgcgtcttgacagagtacgtggaggtcggcagaagtacaagcgcagaatagatgcggagaacagcccatacctgaaccctcagctggttcagccagccaaaaagccannnnnnnnnnnnnnnnnnnnnnnnnnnnnnnnnnnnnnnnnnnnnnnnnnnnnnnnnnnnnnnnnnnnnnnnnnnnnnnnnnnnnnnnnnnnnnnnnnnnnnnnnnnnnnnnnnnnnnnnnnnnnnnnnnnnnnnnnnnnnnnnnnnnnnnnnnnnnnnnnnnnnnnnnnnnnnnnnnnnnnnnnnnnnnnnnnnnnnnnnnnnnnnnnnnnnnnnnnnnnnnnnnnnnnnnnnnnnnnnnnnnnnnnnnnnnnnnnnnnnnnnnnnnnnnnnnnnnnnnnnnnnnnnnnnnnnnnnnnnnnnnnnnnnnnnnnnnnnnnnnnnnnnnnnnnnnnnnnnnnnnnnnnnnnnnnnnnnnnnnnnnnnnnnnnnnnnnnnnnnnnnnnnnnnnnnnnnnnnnnnnnnnnnnnnnnnnnnnnnnnnnnnnnnagactccatgcacatagaagatgttgaagccgttcagaagcttcaggatgtcttacatgaggcgctgcaggattatgaagctggccagcacatggaagaccctcgtcgagctggcaagatgctgatgacactgccactgctgaggcagacctctaccaaggccgtgcagcatttctacaacatcaaactagaaggcaaagtccccatgcacaaactttttttggaaatgctggaggccaaggtctga

SEQ ID NO: 34429 - DNA, 582 bp, Macaca Mulatta
atgtaatcctttgtatataggcagtattttttctgtgaaacttcatattgctgaagacatacactaagaattatgtagataatgtacttttatgagatgtacaagtaagtgtcttatctgtacagctgtaaatgttgatgaaatgcaattgggttaatattttaagaatttagtatatacttgggtgtggctatattacaaaatgggatgctggcaatgaaacaatacatttaacactattcgtatattaatctatatgtaatttagtacatatgaatataaatcttgtaacttttaaaattgtaatggaggctgtaatcattttataatcttgtataaaatattaatgcaagtacactggtgtatatatttgcacaaagtatctgatatgtgatgtattaagtcacaaaaagtaagctgtgacatcagtctataagcatatggctccacaaatgtatttggatagcttttctatgtgaagcacaccaataaacaataaaccaactgttgtagtaactggtctagaaatatttaagcagaatcctgtaagattgcttgtcttagcttaaaaataataccttt

SEQ ID NO: 34430 - DNA, 173 bp, Macaca Mulatta
cgctgctgaccctgcctctgggctgtgcgcagagtacaaggaatgcttctccctgtatgacaagcagcagagggggaagataaaagccacagacctcttggtggccatgaggtgcctgggggccagcccgacgccaggggaggtgcagtggcacctgcagacccacgggatag

SEQ ID NO: 34431 - DNA, 4451 bp, Macaca Mulatta
  misc_feature (1)...(4451): n = A,T,C or G
ttgtggctgcttctggttacgttgtgcctgacggaggaactggcaggagcggnnnnnnnnnnnnnnnnnnnnnnnnnnnnnnnnnnnnnnnnnnnnnnnnnnnnnnnnnnnnnnnnnnnnnnnnnnnnnnnnnnnnnnnnnnnnnnnnnnnnnnnnnnnnnnnnnnnnnnnnnnnnnnnnnnnnnnnnnnnnnnnnnnnnnnnnnnnnnnnnnnnnnnnnnnnnnnnnnnnnnnnnnnnnnnnnnnnnnnnnnnnnnnnnnnntcctgtggctaacttgatcccttcttttctctttgaacagggccatcctggacagccgggccccagaggcccacctggtctggatggctgtaatggaactcaaggagctgtcggatttccaggccctgatggctatcctgggcttctcggaccacnnnnnnnnnnnnnnnnnnnnnnnnnnnnnnnnnnnnnnnnnnnnnnnnnnnnnnnnnnnnnnnnnnnnnnnnnnnnnnnnnnnnnnnnnnnnnnnnnnnnnnnnnnnnnnnnnnnnnnnnnnnnnnnnnnnnnnnnnnnnnnnnnnnnnnnnnnnnnnnnnnnnnnnnnnnnnnnnnnnnnnnnnnnnnnnnnnnnnnnnnnnnnnnnnnnnnnnnnnnnnnnnnnnnnnnnnnnnnnnnnnnnnnnnnnnnnnnnnnnnnnnnnnnnnnnnnnnnnnnnnnnnnnnnnnnnnnnnnnnnnnnnnnnnnnnnnnnnnnnnnnnnnnnnnnnnnnnnnnnnnnnnnnnnnnnnnnnnnnnnnnnnnnnnnnnnnnnnnnnnnnnnnnnnnnnnnnnnnnnnnnnnnnnnnnnnnnnnnnnnnnnnnnnnnnnnnnnnnnnnnnnnnnnnnnnnnnnnnnnnnnnnnnnnnnnnnnnnnnnnnnnnnnnnnnnnnnnnnnnnnnnnnnnnnnnnnnnnnnnnnnnnnnnnnnnnnnnnnnnnnnnnnnnnnnnnnnnnnnnnnnnnnnnnnnnnnnnnnnnnnnnnnnnnnnnnnnnnnnnnnnnnnnnnnnnnnnnnnnnnnnnnnnnnnnnnnnnnnnnnnnnnnnnnnnnnnnnnnnnnnnnnnnnnnnnnnnnnnnnnnnnnnnnnnnnnnnnnnnnnnnnnnnnnnnnnnnnnnnnnnnnnnnnnnnnnnnnnnnnnnnnnnnnnnnnnnnnnnnnnnnnnnnnnnnnnnnnnnnnnnnnnnnnnnnnnnnnnnnnnnnnnnnnnnnnnnnnnnnnnnnnnnnnnnnnnnnnnnnnnnnnnnnnnnnnnnnnnnnnnnnnnnnnnnnnnnnnnnnnnnnnnnnnnnnnnnnnnnnnnnnnnnnnnnnnnnnnnnnnnnnnnnnnnnnnnnnnnnnnnnnnnnnnnnnnnnnnnnnnnnnnnnnnnnnnnnnnnnnnnnnnnnnnnnnnnnnnnnnnnnnnnnnnnnnnnnnnnnnnnnnnnnnnnnnnnnnnnnnnnnnnnnnnnnnnnnnnnnnnnnnnnnnnnnnnnnnnnnnnnnnnnnnnnnnnnnnnnnnnnnnnnnnnnnnnnnnnnnnnnnnnnnnnnnnnnnnnnnnnnnnnnnnnnnnnnnnnnnnnnnnnnnnnnnnnnnnnnnnnnnnnnnnnnnnnnnnnnnnnnnnnnnnnnnnnnnnnnnnnnnnnnnnnnnnnnnnnnnnnnnnnnnnnnnnnnnnnnnnnnnnnnnnnnnnnnnnnnnnnnnnnnnnnnnnnnnnnnnnnnnnnnnnnnnnnnnnnnnnnnnnnnnnnnnnnnnnnnnnnnnnnnnnnnnnnnnnnnnnnnnnnnnnnnnnnnnnnnnnnnnnnnnnnnnnnnnnnnnnnnnnnnnnnnnnnnnnnnnnnnnnnnnnnnnnnnnnnnnnnnnnnnnnnnnnnnnnnnnnnnnnnnnnnnnnnnnnnnnnnnnnnnnnnnnnnnnnnnnnnnnnnnnnnnnnnnnnnnnnnnnnnnnnnnnnnnnnnnnnnnnnnnnnnnnnnnnnnnnnnnnnnnnnnnnnnnnnnnnnnnnnnnnnnnnnnnnnnnnnnnnnnnnnnnnnnnnnnnnnnnnnnnnnnnnnnnnnnnnnnnnnnnnnnnnnnnnnnnnnnnnnnnnnnnnnnnnnnnnnnnnnnnnnnnnnnnnnnnnnnnnnnnnnnnnnnnnnnnnnnnnnnnnnnnnnnnnnnnnnnnnnnnnnnnnnnnnnnnnnnnnnnnnnnnnnnnnnnnnnnnnnnnnnnnnnnnnnnnnnnnnnnnnnnnnnnnnnnnnnnnnnnnnnnnnnnnnnnnnnnnnnnnnnnnnnnnnnnnnnnnnnnnnnnnnnnnnnnnnnnnnnnnnnnnnnnnnnnnnnnnnnnnnnnnnnnnnnnnnnnnnnnnnnnnnnnnnnnnnnnnnnnnnnnnnnnnnnnnnnnnnnnnnnnnnnnnnnnnnnnnnnnnnnnnnnnnnnnnnnnnnnnnnnnnnnnnnnnnnnnnnnnnnnnnnnnnnnnnnnnnnnnnnnnnnnnnnnnnnnnnnnnnnnnnnnnnnnnnnnnnnnnnnnnnnnnnnnnnnnnnnnnnnnnnnnnnnnnnnnnnnnnnnnnnnnnnnnnnnnnnnnnnnnnnnnnnnnnnnnnnnnnnnnnnnnnnnnnnnnnnnnnnnnnnnnnnnnnnnnnnnnnnnnnnnnnnnnnnnnnnnnnnnnnnnnnnnnnnnnnnnnnnnnnnnnnnnnnnnnnnnnnnnnnnnnnnnnnnnnnnnnnnnnnnnnnnnnnnnnnnnnnnnnnnnnnnnnnnnnnnnnnnnnnnnnnnnnnnnnnnnnnnnnnnnnnnnnnnnnnnnnnnnnnnnnnnnnnnnnnnnnnnnnnnnnnnnnnnnnnnnnnnnnnnnnnnnnnnnnnnnnnnnnnnnnnnnnnnnnnnnnnnnnnnnnnnnnnnnnnnnnnnnnnnnnnnnnnnnnnnnnnnnnnnnnnnnnnnnnnnnnnnnnnnnnnnnnnnnnnnnnnnnnnnnnnnnnnnnnnnnnnnnnnnnnnnnnnnnnnnnnnnnnnnnnnnnnnnnnnnnnnnnnnnnnnnnnnnnnnnnnnnnnnnnnnnnnnnnnnnnnnnnnnnnnnnnnnnnnnnnnnnnnnnnnnnnnnnnnnnnnnnnnnnnnnnnnnnnnnnnnnnnnnnnnnnnnnnnnnnnnnnnnnnnnnnnnnnnnnnnnnnnnnnnnnnnnnnnnnnnnnnnnnnnnnnnnnnnnnnnnnnnnnnnnnnnnnnnnnnnnnnnnnnnnnnnnnnnnnnnnnnnnnnnnnnnnnnnnnnnnnnnnnnnnnnnnnnnnnnnnnnnnnnnnnnnnnnnnnnnnnnnnnnnnnnnnnnnnnnnnnnnnnnnnnnnnnnnnnnnnnnnnnnnnnnnnnnnnnnnnnnnnnnnnnnnnnnnnnnnnnnnnnnnnnnnnnnnnnnnaggtttcccaggtctccagggccctgctggtctccccggtgccccaggcatctccttgccctcactcatagcaggacagcctggtgaccccgggcgaccaggcctagatggagaacgagnnnnnnnnnnnnnnnnnnnnnnnnnnnnnnnnnnnnnnnnnnnnnnnnnnnnnnnnnnnnnnnnnnnnnnnnnnnnnnnnnnnnnnnnnnnnnnnnnnnnnnnnnnnnnnnnnnnnnnnnnnnnnnnnnnnnnnnnnnnnnnnnnnnnnnnnnnnnnnnnnnnnnnnnnnnnnnnnnnnnnnnnnnnnnnnnnnnnnnnnnnnnnnnnnnaggctcttctggcccccaaggtgctcctggacaaacaccaactgcagaagctgtccaggttcctcctggacccttgggtctgccagggatcgatggcatccctggcctcactggggaccctggggctcaaggccctgtaggcctacaaggnnnnnnnnnnnnnnnnnnnnnnnnnnnnnnnnnnnnnnnnnnnnnnnnnnnnnnnnnnnnnnnnnnnnnnnnnnnnnnnnnnnnnnnnnnnnnnnnnnnnnnnnnnnnnnnnnnggagctccagggcagcaaggccccttcgggagccctggaatgcctggccagagcgcgagagtgggctacacgttggtaaagcacagccagtcggaacaggtgcccctgtgtcccatcgggatgagccagctatgggtggggtacagcttactgttcgtggaggggcaagagaaagcccataaccaggaccnnggctttgctggctcctgtctgccccgcttcagcaccatgcccttcatctactgcaacatcaacgaggtgtgccactatgccaggcgcaatgataaatcctactggctctccactactgcccctatccccatgatgcccgtcagccagacccagattccccagtacatcagccgctgctctgtgtgtgaggcaccctcgcaagccattgctgtgcacagccaggacatcaccatcccgcagtgccccctgggctggcgcagcctctggattgggtactccttcctcat

SEQ ID NO: 34432 - DNA, 764 bp, Macaca Mulatta
gggttttctctgtctgtgtttctttctactaccataaaaagtacctcagatcacctgaacatcgagttaaggttatcatcgtaagaaaaaatatccattatgaagtttgggggaaatacctggcatgaaactgtagttagggatacattccagcattttattcactttattcaagttattcattttattcaagttatatgtatatataattcaacaattttagattatggtgtaagatattccggtaacttaatctatctgtgcttttaagtgtacctggaattctttgatttattttattgcattaatgagttaaagcaaaaatcttgggggaagaaattggcaatatggtataaaaatctgctcatattagaacacagtataattcagcagcagacactagaatcaaatgatagtcttttgtatcagttattaatcttttctaagtctgcatagctgcttataattctgaggcatacaaattgatatggaagaatttgtaaaaacagaattgccttaaaggattttaagtaagagcataattttggggagagttctttagtgattcacaatatccctcttagcattagtttaaagtaaagaggcagactgatgttccctctttcctggtaattcctgagtaattaagagtaagttccaaaagaatttgtagctggaatcttaataacaattgttgggtggctgtttgagttgcccccaccatggtcttagatctaaatctgtgctacccttataactcacag

SEQ ID NO: 34433 - DNA, 776 bp, Macaca Mulatta
tgggttttcctagtaaatttaatttatagaaatcaatggtagcatttagtgttctacaaaggaaatatcaaagtgtttttcaagcctattatattcagtgtgtgccacaggattgaaataaatgacaatgtaattatgaattcatgttttagaactgtttactcattagtaaaggactgcaatgttagtaaagaaaacctatggcatgtatgttaaagattcttagtattgtacagggataaagcaaatgcatgaaaatatgtactgaaaattaaacttactgcagtttcagttataaaggacgtgcactgttataaatagtcttttgttattattaactagataaaggtatataggacagggaactggatgagtggtacctataatttggatgcctaaccaaggcctagagcttcttcttgagatctgaatctaaagtaagtatgcattagatcagtgtgcttcaaaggcatcagacaacaaaagcaacataccacaactaggagttaattctcaaactttagatgtcatctgggaatacagacttacaagtaagagcaaacttaacacgctatgtccattttcgaggtcacaacccactatgtccattttcctcatgtgttttatggaaccagctttccatcaaagcctcaatcctcgaatccagacaaaaggtgaattatcctaggattagtgaatgattcagtgaagttttcttgaaaacaaatgtaggagtgtaacgtactattatgtttgcatcctgttttagtttataa

SEQ ID NO: 34434 - DNA, 1780 bp, Macaca Mulatta
  misc_feature (1)...(1780): n = A,T,C or G
gtgccgaatgctgtacacttgtaacgcgatgataagtgtgcagctaaacgtagaaaaggtacagtgaaaatatgatgtaaaagagaaaacatgcttcagctgtggaggacactcaccctgattggggcctgtggacaaggctgtgggtgtccgtgagggaggggggtgcctctgaggccctgctgcaggctggatgaacagtacacttaggccacactcagtttatactaaaaaatcccttcagtaacacattcacctgagnnnnnnnnnnnnnnnnnnnnnnnnnnnnnnnnnnnnnnnnnnnnnnnnnnnnnnnnnnnnngcttaaaacacacattgtacagctgtataaaaatnnnnnnnnnnnnnnnnnnnnnnnnnnnnagacggggtcttgttgtgttgcccaggttagagtgtagtggcgccatctcagctcactacagtaagcctcagcctcctgggcttaactgatctcctgcctcagcccaagtagctgggaccacaggcacgcgccaccatgttgcccagactggtcttgaactcccagacttaagcgatcctcctgttaggggtggcgaatatcccagctgtcagtggcgaatttaatgaatctgcagcagcctcagctcttgcctccttggaagaaagaattcatctgaagggcataaggcagaaaaaggagactgaggcaagtttccgagtgggagtagaagtgtattaaaaagcttcagagcaggaaagaaaannnnnnnnnnnnnnnnnnnnnnnnnnnnnnnnnnnnnnnnnnnnnnnnnnnnnnnnnnnnnnnnnnnnnnnnnnnnnnnnnnnnnnnnnnnnnnnnnnnnnnnnnnnnnnnnnnnnnnnnnnnnnnnnnnnnnnnnnnnnnnnnnnnnnnnnnnnnnnnnnnnnnnnnnnnnnnnnnnnnnnnnnnnnnnnnnnnnnnnnnnnnnnnnnnnnnnnnnnnnnnnnnnnnnnnnnnnnnnnnnnnnnnnnnnnnnnnnnnnnnnnnnnnnnnnnnnnnnnnnnnnnnnnnnnnnnnnnnnnnnnnnnnnnnnnnnnnnnnnnnnnnnnnnnnnnnnnnnnnnnnnnnnnnnnnnnnnnnnnnnnnnnnnnnnnnnnnnnnnnnnctggcgcgtgcgaccaatgatcgtttttagagaggcagagtgacaactgcaggaccatcaccttgaggactgaactgattgtttatctcgcccaaattcctgtctaaggggtctggggagtcctgccctgcaaatcataaattctcatcagatgggttttatttaaccctgtatattatgacctactttccaacctgactctggcataacattacaagtcaaggaagaaaaatcaaagtagtttacctcaaaatgtgtttctttgccctattttgaaatggccctacaaagctgttctgtgtnnnnnnaatttgcatctgtaaagaatctctgttaacatagctagatctttttcttccagaccctcccaatcctaaagagattaaaagtctagcaccctttgaaaggtctgaataggaaacatttgtcatctattgtctctaagggcagcgactataagacttcaaagaactttggtctccacaatctttgtcttaacctgaacactccctttctatcaatcaggtcttcagacaaactcaaccatttgtcaaccagaaaatgtttaaattcannnnnnnnnnnnnnnttccctcccccgctccaacgtttgagttgtcctgcctttcggtatgaaacgaatgtatttc

SEQ ID NO: 34435 - DNA, 1782 bp, Macaca Mulatta
  misc_feature (1)...(1782): n = A,T,C or G
gcaaatttttaactagacacattgatcattaatagggggttagaaagcgttcaaactaagtctcactctgggacatagaccaattgtgcctcaggcctcctgcagagatgctgggtccccaagtctggtcctctgtgaggcaggggctaagcaggagcttgtccaggaatgtgaggggctgggcctcaggggaggggaagaaggtggacattgcgggcatctacccccctgtgaccacccccttctttgccactgcagaggtggactatgggaaactggaggagaatctgcacaaactgggcaccttccccttccgaggnaggcttcgtggtccagggctccaatggcgagtttcccttcctgaccagcagcgagcgcctcgaggtggtgagccgtgtgcgccaggccatgcccaagaacaagctcctgctagctggctccggatgcgagtnnnnnnnnnnnnnnnnnnnnnnnnnnnnnnnnnnnnnnnnnnnnnnnnnnnnnnnnnnnnnnnnnnnnnnnnnnnnnnnnnnnnnnnnnnnnnnnnnnnnnnnnnnnnnnnnnnnnnnnnnnnnnnnnnnnnnnnnnnnnnnnnnnnnnnnnnnnnnnnnnnnnnnnnnnnnnnnnnnnnnnnnnnnnnnnnnnnnnnnnnnnnnnnnnnnnnnnnnnnnnnnnnnnnnnnnnnnnnnnnnnnnnnnnnnnnnnnnnnnnnnnnnnnnnnnnnnnnnnnnnnnnnnnnnnnnnnnnnnnnnnnnnnnnnnnnnnnnnnnnnnnnnnnnnnnnnnnnnnnnnnnnnnnnnnnnnnnnnnnnnnnnnnnnnnnnnnnnnnnnnnnnnnnnnnnnnnnnnnnnnnnnnnnnnnnnnnnnnnnnnnnnnnnnnnnnnnnnnnnnnnnnnnnnnnnnnnnnnnnnnnnnnnnnnnnnnnnnnnnnnnnnnnnnnnnnnnnnnnnnnnnnnnnnnnnnnnnnnnnnnnnnnnnnnnnnnnnnnnnnnnnnnnnnnnnnnnnnnnnnnnnnnnnnnnnnnnnnnnnnnnnnnnnnnnnnnnnnnnnnnnnnnnnnnnnnnnnnnnnnnnnnnnnnnnnnnnnnnnnnnnnnnnnnnnnnnnnnnnnnnnnnnnnnnnnnnnnnnnnnnnnnnnnnnnnnnnnnnnnnnnnnnnnnnnnnnnnnnnnnnnnnnnnnnnnnnnnnnnnnnnnnnnnnnnnnnnnnnnnnnnnnnnnnnnnnnnnnnnnnnnnnnnnnnnnnnnnnnnnnnnnnnnnnnnnnnnnnnnnnnnnnnnnnnnnnnnnnnnnnnnnnnnnnnnnnnnnnnnnnctggggctttcttgagggcatctctttgggcactgggctttcattccaccacgcttaccagtccctctcccaggatgaggctctgggcacagctctcataccacatttgctgttgcaggtgaccaggattgggctgattgttcacaaaaccaggaagcaggatttccaggtgttggctggatcggctggcttcctgatggccagctatgccttgggtaggccgcccactgctctcaaattgtcatgggtgaccaagacatacccaggcacctgggtctgctgggagagactgtgagggctggggctgggtctgaagacggtggtttgccagcctgcccactctgaaaactcagaaacctggccacgccgcttgcctgtctgaatgtggggtgctgtgagtaaccttgttggctggaggaggatggccgtgtacaatccctggcctgtagtagggatgtctgcagtttgttc

SEQ ID NO: 34436 - DNA, 951 bp, Macaca Mulatta
  misc_feature (1)...(951): n = A,T,C or G
gggcacctctgtactatatttctccccagcaagtatctgcccctgaggagctcaataaaggtttggtcaagtgatgaatggccccactctggtagcttctatcaactgtgggagagagccaaagcccctgtctagctctcactttccttccagctatactaggccagctatttattctgacattttctcttgaaggattggaaagtcagcctttgataggcttctggtttcctctggcctatttctaggttgatttatactcagcttcctgagaggctagggacctctgatactgcactcttccctaatgccttctagttatttaccctaacaaaggaacaaggggaagaactgagtttagggagagaatagagcttatctgcattttagctgtgcctggggcattctagtgagcttggattggtccttagcaggaacagaagtataatggaaagggattccttaaagtcaattgatttacactgggcaagctatttaacctctgagcctgtttctgtcttcattgttgattactgtaataacagctaataattacttatttcttatatgtacaggaaatgagaaactgaactcaggagaataanaactgctatgcnnnnnnnnnnnnnnnnnnnnncgcgctcgctcgactcaacatctgccggcaagatatgcacttcagatcgcaagtgtccaaacggacgtgacagtagtgtagcagtatccataaaccgnnnnnnnnnnnnnnnnnnnnnnnnnnnnnnnnnnnnnnnnnnnnnnnnnnnnnnnnnnnnnnnnnnnnnnnnnnnnnnnnnnnnnnnnnnnnnnnnnnnnnnnnnnnnnnnnnnnnnnnnnnnnnnnnnnnnnnnnnnnnnnnnnnnnnnnnnnnnnnnnnnnnnnnnnnnnnnnnnnnnnnnnnnnnnnnnnnnnnnnnnnnnnnnnnnnnnnnnn

SEQ ID NO: 34437 - DNA, 843 bp, Macaca Mulatta
  misc_feature (1)...(843): n = A,T,C or G
ggagacccgagggagtcttcgtctgctttcagccttgggtctgttttgtgtgggctgggaagccccacagggtgttgagctgccttcagccaaggatctggtgtttgaggaggcttgcgggtactaccagcggcggagcctgcggggtgcccagctcactccagaagaactgagacacagcagcacattccgggcacctcaggccctggcctccatcctccagggccacctgcccccatctacactgctgaccatgttgaggaccgaacttcgggattaccgaggcttagagcagctgaaggcccagctggtggctggcgatgatgaggaggctggttggactaagctggcggagcaggaagtggcacgcctgctgaggaccgagttgataggagaccagctggcccagctcaacactgttttccaggcccttcctacagcagcctggggtgccaccctcagggccctgcagctccagacagatgggaatggcaagctgaggtcccaagcaccccctgatgtgtggaagaaagtgttagggggaataaccgctgtaaaggaaccccccaatgggatactgcccccctttgaactcctctgccaatgtctgtgccggctggagcctcgatggctgccaccttttgtggagctggctcagcagcagggtgggccgggctnnnnnnnnnnnnnccaggactgcccctgtatcgccgagccctggcagtgctaggtgaggaggggaccaggcctgaggctctggagctagagctgctcttgagcagtgggcggcccaaagctgtgctccaagctgtcgggcagctggtgcaaaaggagcaatgggat

SEQ ID NO: 34438 - DNA, 724 bp, Macaca Mulatta
ggggagccgtgccacgcccacaccacacaccactctctccacccagtgcctggaaaagggagagctctgcgatgggaatcacaccaggatacggtcccgattaactgtgtgaccttgggcaggtgctgtgcctgaggaacaataccatttttaagcaagccttttctctcttaaggtttagaacttcaagagagaagcccatctattctgtagctgggactacggacacatgctaccactctagctatctgggtctacctctctgggtctaccacaatatatgtgtggaattctactaagtgccagtcggccctacaagacaaagcccacccatggcattggaaaatacaagcacttaattaaagcagaagagcccaagaagaagaagggaaaagtggaagtgagagtcattaatttggggacagattatgaatatggggttttaaacattcatctgactgcatatgacatgaccctggcagagagttatgcccagtatgttcacaacctctgcaactctctctccattaaagtcgaggaaagttatgcgatgccaaccaaaaccatggaagtgttacatttgcaggaccaagggagcaaaatgttactggactcagtgcttaccacccatgagcgagtggttcagatcagcgggtttgagtgctaccgtttgccagaaatttttcttgggaaaataatcccaaaggcagttctttccctgaaa

SEQ ID NO: 34439 - DNA, 454 bp, Macaca Mulatta
ctccggctgccacctgagttgggggtcagggtggcaggagggagtctgggaggtctctccaggcccctgaagccggcttctaggtgggcagtgttgggaggaagcgtcagagattgatgaagagacccatcgttcccaggtgtagacacaaggggctgggtgggcacagggctcaggggcacggggctgggtgggcacagtgcctggctcctgcccagccccactgctcagagctgtttgctgaagcccccctcactggcgtctgccttttccagtggaggggatgaggggttggcagcaactagggctcaaggttgggggctgcttgcaggcggggggcccgaggggtcttagagggctcaaagtcccagggtcagggtcagtttgaatcccagcccggctgctttctttgttcactgtaggctgagcaaacgactctgtccctggggtcctg

SEQ ID NO: 34440 - DNA, 503 bp, Macaca Mulatta
ttccatccaacatcttaggcaaatagatttccctaaaggtcatacaaggggagcctccaggatatcagtgcagaaacttctttgaggcgtgactcagggaatgggaggggcctctagcagggtctcatgcagtcttgctcaaagtttcttgaggaaccaaacttccaccacttccccttgatatcccatcctcaagcattataacccagatgtttttcctgatagacaagggaggtggaggctgaacttccagctccaaagccaggaagtctggaggtctgagtgttttttccaaccttgggtgtgttccttaacctcttgtgagaggttgagtttgaggacaaactaaagggcacatgcttatctacctcctgggcaggttaaagccacaagtgtttataaagctctttggttcaaagcactattatgtctttttccccctttcattcaattccttattcactactaggctgtttcctctacatctgactgggtcattttaa

SEQ ID NO: 34441 - DNA, 597 bp, Macaca Mulatta
ccctttttccttttgtccccggcagcagggaagatctccaagctgtgggagaatggccgggcagagcagaggggcagcgatagactctggggatggagcaggatggggacgggaggggccggccacctgtctgtaaggagactttgttgcttcccctgccccggaatccacagtgctctgcttctctgttgccctgcccagccccctggtgtggagggaggggtctggtttgtgcgcgcgtgggtgtagctttgtgtgtcctctccccaggcgagtgagcacctgtgcctcccctccccctttgtttgcccctgtgtggttggtcaaggaaggatgtgagggaaatagggaccccccccccttgccctcctgcctcagtctttcccccaccctgtctcttccttgtccttctctggaaaatgccataacacgatgtgaatagcactacaactgctacattgtgtcctgtttgataccttgtgagaggcttaccttcccggtgttagcaggaagacgtcttcagaaaactcctaactctggcctcctccctcccaaatgcaagtctcctctttgcactcgttctatgagctctaggac

SEQ ID NO: 34442 - DNA, 598 bp, Macaca Mulatta
cggcacgagcacgtgcgagtggttgcctggacaagaacttcacattgaagtgttacaagtgtgaggactgcgggaagccctggttgattggagcagatgacaatgggttggtttcccctggaccggccagttcttctttcgggaaagttgccaacttggctagaagccaaaagcttgagttgaggaagggcccttctttcaaaccggcagtccaatgccccatcgtggaccaccacactgagaacacctggcctcacctcagttattgttttgatgtttagcccctcccattcccgaacccactctagcatcccaggtgccctgacccagggcccaagatggcctagggatgcagggtccccaccctggggtctagtcctcgcccatcctgcagggattgcccaccgtcctccagacaccccacctgagcggggcaccaggtttagtgctgctgctttcactgctgcacccacgctctcggccagcccccggagcagcctttgtactctgcttgcggaggcttgggagatgccctgaccctccaggacattcccaccctcccccgtgctgccaggttgtagctatagctacaaataac

SEQ ID NO: 34443 - DNA, 259 bp, Macaca Mulatta
ctcgtgcttcttcgcaacgcatcctcctctggtagtcgataaacggaggctccaaagggcttgggtcctgtggccgttccagcatcaggtcctatgtggagtgtgccctggggtttctgctacctgttcagcgaatcagcataggcgaagaacagccctctagagtattctctgttggttgcagataaagaaatctccggtttaggtcccaaggggagcaggcttttaaactcaagccaggttattttaccaactttga

SEQ ID NO: 34444 - DNA, 425 bp, Macaca Mulatta
acacctcctggcatgtacgtgtacctccccctataaatagttaagtctgtgtatttccctcccctgccccatacgtgtaccctggtgcctctccctccctgagcctcatgtgtgttacccctttctccaccacagagtgaagacctcacaggccgagtcgtggaagatatggagggtgcttcgcaggccaaccagcggcgcatgaatgcagacccgttggaggtgatgctgctcaacatgggctaccggatcacgggcctgagcagtggaggtgccggggcctctgatgacgaggacagctctgagggccaggtgcagtgccggcccagctagaccctccagccctggtccccagcccctgctactggctggaccctccgccctgggcaggaggtcgggggattctgttttggtttgtcttccca

SEQ ID NO: 34445 - DNA, 110 bp, Macaca Mulatta
agtatgaggagcgagtgctgaaaaaaatccgccggaaaatccggaacaagcagtcggcccaagaaagcaggaagaagaaaaaggaatacatagacggcctggaaactcgg

SEQ ID NO: 34446 - DNA, 196 bp, Macaca Mulatta
agttctgccaccctacccatcaccttcaagtgcctggaagagaacaatggcgtggacaagcgtgtcaccagattcgtgctccctgtaggagccaccattaatatggatgggactgccctctatgaggctttggctgccattttcattgctcaagttaacaactttgaactgaacttcggacagattattacaatca

SEQ ID NO: 34447 - DNA, 881 bp, Macaca Mulatta
gaatttgtcatgatgggctttgctggcattcatgaaacacacctcctcttcttcacactcttcctcaccatgtacctgttcaccttggtagagaatttggccatcattttagtggtgggcttggaccaccgactatggagacccatgtatttcttcctgacacacttgtcttgccttgaagtctggtacacttctgttacagtgcccaagatgctggctgtttttattggggtggatggtggcaagaatatttcttatgctggctgcctgtcccagctcttcatcttcaccttccttggggcaactgagtgtttcctactggctgctatggcctatgatcgttatgtggccatttgcatgcctctccactatggggctttggtgtcctggggcacctgcatccgtctggcagctgcttgttggctggtaggcttcctcacacccatcttgccaatctacctcatgtctcagctaacattttgtggcccaaatgtcatcgaccacttcttctgtgatgcctcacccttgctagccttgtcgtgctcagatgtcacttggaaggagactgtggatttcctggtgtctctggctgtgctactggcctcctctacggtcattgctgtgtcctacggcaacattgtctggacactgctgcacatccgctcagttgctgagcgctggaaggccttctctacctgtgcagctcacctgactgtggtgagcctcttctatggcactcttttctttatgtatgtccggaccaaggtgacttcctccatcaacttcaacaaggtggtatctgtcttctactctatcgtcacgcccatgctcaatcctctcatctacagtcttaggaacaaggaagtgaagggagctctggg

SEQ ID NO: 34448 - DNA, 982 bp, Macaca Mulatta
  misc_feature (1)...(982): n = A,T,C or G
aggctggctacagcaaacatcattcaagatgtccagcaaagggagcagcacagatggcagaacagacttagctaatgnnnnnnnnnnnnnnnnnnnnnnnnnnnnnnnnnnnnnnnnnnnnnnnnnnnnnnnnnnnnnnnnnnnnnnnnnnnnnnnnnnnnnnnnnnnnnnnnnnnnnnnnnnnnnnnnnnnnnnnnnnnnnnnnnnnnnnnnnnnnnnnnnnnnnnnnnnnnnnnnnnnnnnnnnnnnnnnnnnnnnnnnnnnnnnnnnnnnnnnnnnnnnnnnnnnnnnnnnnnnnnnnnnnnnnnnnnnnnnnnnnnnnnnnnnnnnnnnnnnnnnnnnnnnnnnnnnnnnnnnnnnnnnnnnnnnnnnnnnnnnnnnnnnnnnnnnnnnnnnnnnnnnnnnnnnnnnnnnnnnnnnnnnnnnnnnnnnnnnnnnnnnnnnnnnnnnnnnnnnnnnnnnnnnnnnnnnnnnnnnnnnnnnnnnnnnnnnnnnnnnnnnnnnnnnnnnnnnnnnnnnnnnnnnnnnnnnnnnnnnnnnnnnnnnnnnnnnnnnnnnnnnnnnnnnnnnnnnnnnnnnnnnnnnnnnnnnnnnnnnnnnnnnnnnnnnnnnnnnnnnnnnnnnnnnnnnnnnnnnnnnnnnnnnnnnnnnnnnnnnnnnnnnnnnnnnnnnnnnnnnnnnnnnnnnnnnnnnnnnnnnnnnnnnnnnnnnnnnnnnnnnnnnnnnnnnnnnnnnnnnnnnnnnnnnnnnnnnnnnnnnnnnnnnnnnnnnnnnnnnnnnnnnnnnnnnnnnnnnnnnnnnnnnnnnnnnnnnnnnnnnnnnnnnnnnnnnnnnnnnnnnnnnnnnnnnnnnnnnnnnnnnnnnnnnnnnnnnnnnnnnnnnnnnnnnnagttggctctggaaccagactctccctgtacattcttatctgcaggtgaagatgcagttgttttcaccattgacctgagacaagtccgcccag

SEQ ID NO: 34449 - DNA, 746 bp, Macaca Mulatta
  misc_feature (1)...(746): n = A,T,C or G
gctgagaacatttctaaggacctctacatagaagtatatccagggacctattctgtcactgtgggctcaaatgacttaaccaagaagactcatgtggtagcagttgattctggacgaagtgtggacctgatcttccctatgtgatgttgaccatcactgccttcacatcaccttttgttgagtagtaagaataaagccactgtatgattctcttgatagctatacattaatcctgtttttaatgctgactgggtcagccttcccaggaactggagtctgtctttttcagtgcnnnnnnnnnnnnnnnnnnnnnnnnnnnnnnnnnnnnnnnnnnnnnnnnnnnnnnnnnnnnnnnnnnnnnnnnnnnnnnnnnnnnnnnnnnnnnnnnnnnnnnnnnnnnnnnnnnnnnnnnnnnnnnnnnnnnnnnnnnnnnnnnnnnnnnnnnnnnnnnnnnnnnnnnnnnnnnnnnnnnnnnnnnnnnnnnnnnnnnnnnnnnnnnnnnnnnnnnnnnnnnnnnnnnnnnnnnnnnnnnnnnnnnnnnnnnnnnnnnnnnnnnnnnnnnnnnnnnnnnnnnnnnnnnnnnnnnnnnnnnnnnnnnnnntcagtgccttttttaactggaggtgtaggagtccttcatgcttgtttgcctgaaagttatatgattcgctctctgaacaggttttactgcttgctttccaagtagaggttaattatgataataaagagactggaaatgaagagaa

SEQ ID NO: 34450 - DNA, 1911 bp, Macaca Mulatta
  misc_feature (1)...(1911): n = A,T,C or G
agtgtaaaacagcttccatgtctaagcaaagaaaattgcctacatattggtttgtcctggtgcggaataaaagggatcattggttccagtcacaggggtagtaattgtgggtactttaaggtttggagcacttagaaggctgtggtagaaacatgaccaatggataccacaggttaaaccatgtgtatctgtggaacactcaatctcaacgtgcacacctttgactacagctgcagaagtgttcctttagacaaagttgtgacccattgtactctggataagggcagcaatggttcacattccattatttgtaaagttacctgctgttagctttcattatttttgctccactcattttatttgtatttaagtgtttcaggtaacctaagaacaaatgtaaaagtaaagatgcagtaaaaatgaatggcttggtattcattacttcgtgtatatcaagcacagcagtaaaacaaaaacccatgtatttaacnnnnnnnnnnnnnnnnnnnnnnnnnnnnnnnnnnnnnnnnnnnnnnnnnnnnnnnnnnnnnnnnnnnnnnnnnnnnnnnnnnnnnnnnnnnnnnnnnnnnnnnnnnnnnnnnnnnnnnnnnnnnnnnnnnnnnnnnnnnnnnnnnnnnnnnnnnnnnnnnnnnnnnnnnnnnnnnnnnnnnnnnnnnnnnnnnnnnnnnnnnnnnnnnnnnnnnnnnnnnnnnnnnnnnnnnnnnnnnnnnnnnnnnnnnnnnnnnnnnnnnnnnnnnnnnnnnnnnnnnnnnnnnnnnnnnnnnnnnnnnnnnnnnnnnnnnnnnnnnnnnnnnnnnnnnnnnnnnnnnnnnnnnnnnnnnnnnnnnnnnnnnnnnnnnnnnnnnnnnnnnnnnnnnnnnnnnnnnnnnnnnnnnnnnnnnnnnnnnnnnnnnnnnnnnnnnnnnnnnnnnngatatttgcctaacatgcatgtgctgtaaaaatagttaacagggaaataacttgagatgatggctagctttgtttaatgtcttacgaaattttcatgaacaatccaagcataattgttaagaacatgtgtattaaattcatgtaagtggaataaaagttttatgaatggacttttcaactactttctctacagcttttcatgtaaatcagtcttttggttctgaaacttctaaaggaaaatgcacactttttgaaatttattccttattccctcttggcagctaatgggcttttaccaagtttaaacacaaaatttatcataacaacaaaaatactactaatataattactgtttccatgtcccatgatcccctctcttcctcccaaccctgaaaaacaatgagttcctattttttctgggagagggggagattgattgggaaaaaaatgtactatgttcgatttaaaattttggtatatgacattttctaacttaaaaggaagccacagtgatctttgcccattatgacactgggtagcattaactataagttttgtgcttccaaatcacttttggtttttaagaatttcttgatactcttatagcctgcctttgaatttgatcctttattctttctatttgtcaggtgcacaagattacttttcctttttagccttctgtcttgtcatcaaccattcctacttagtggccatgtacttggaaaaaggccgcatgatctttctgactccactcaatgtctaaggcaccctgcttccttcgcttgcatcccacagactatttccctcatcctatttactgcagcaaatctctccgtagttaatgagattgtgtttatctccctttaaaaccctacctatcctgagtgggctgtcattgtctgcctttaaaatccttcctctttcttcttcctctattttctaaacaatgatgcggctaagttatacccaaaactcact

SEQ ID NO: 34451 - DNA, 784 bp, Macaca Mulatta
gggtccatatcacaccaccaaaggcttttggaccatttagcatcatgagcctaatggcacagtcagtcacctttcttaagtgttgtgaagatggctcttttctttggatcttgtttctagccctcaactgttgaaagcctcagaatttaggttaattgagaaaacacccacctcttttagagaattatcctttgatgctgcagaatctactcttacaatgccttcctacagctcactggggtgcttaccaaagccatagctttaaactttcccaatccccatcaacagcttcctgaaagtttcctctcttgtttacttctgcaaagggtagcttcttaaaaacgtgatcatgtatgagtaagtatttgttcacttacccttttttacttttaatcaatgtcagataccaagagttgtgttaagaagttgagtgtagcctgcaactacgcgtggatcttactgatccagaaatagtccccatagttagagtagttacttatgaaatggtcattaaagtgaacacagcacatatacattatctgtactgccttttgttatgattaatattgggtatgttctggtaaatccatccttattgtatagaaagaaaattaccttttttaacaagttttccaaagaccgaatagatcacaaagctcaaggaatttaaatattcttgtaatggaactagataattcaaacctgaataaccccatttctgaaagaaaaacagcctgggaatttaagtttatccacctttgaaattttttttacaaataatcag

SEQ ID NO: 34452 - DNA, 799 bp, Macaca Mulatta
ggattccagcggcggacagcacccgggccgagatgtctcgctcagtggccttagccgtgctggcgctactctctctttctggcctggaggctatccagcgtactccaaagattcaggtttactcacgccatccaccagagaatggaaagccaaatttcctgaattgctatgtgtctggatttcgtccatctgatattgaagttgacttactgaagaatggagagaaaatgggaaaagtggagcattcagacttgtctttcagcaaagactggtctttctatctcttgtactacactgaattcgcccccaatgaaaaagatgagtatgcctgccgtgtgaaccatgtgactttgtcagggcccaagacagttaagtgggatcgagaactgttaagcagcatcatggacgtttggaaaagccgcatttggattggaagaattccaaattctgcttccttgcttttttatattgatatgccttaggcagtttatgcaaaaaaatgcagagttttaactatgtttaacaccggccatggatcttctttataaattccactttgaggtggctatctccacgttttgagggtatctgggccagccaagccttatgggaagggctgggccactttaaccggtgggggagccagaagaatttccaatatccccaacactctaagcttttttggctcatgctcccgttttattaggctacctaaagaatacttcacccgtcctccctcttcttttgctctgcacatactttcctccgttgtggatgcaaccgcagcccttgctttcag

SEQ ID NO: 34453 - DNA, 241 bp, Macaca Mulatta
  misc_feature (1)...(241): n = A,T,C or G
acgtgcctcgcgttggcctggtcttcacagatggccgctcccaggatgacatctcggtgtgtgcagcgcgtgccaaggaggaaggnaggcatcgccatgtatgccgtgggcgtgggcaaggcggtggaggcggagctgcgtgagatcgcctcggagccagctgaactgcacgtgtcctacgccccggacttcggcaccatgacgcacctgctgcggaacctcagaagcagcatctgcccag

SEQ ID NO: 34454 - DNA, 489 bp, Macaca Mulatta
caggctactatggaaataatcataggcatgagaacgcagttgcttggtcagcttagagcatcaggtaaagttttccctcaaagagcctatttaagttactgagagtaccctgcccatattttacagtatttcttatgttaacagatgctatctattatttttatgacattatcatgttgtacatcttatattcatgcatgatttgtagacttctatatgtcttcaacttttgcttgttgatgaaaaaaaggctattgcaggaggtgtatttgagaaacctagggacagcatctatgcccttttgatactgttggccatgaacaatttatatttcttggcagagatcaatttagatcttatagttattttcttttatcaccattaatgaatacttatttagttctgtgaaatataaattttaaaaaattgatatgaatgctgctcttcatatttgtggaatacaaaaatgactggtaatacttgaagtca

SEQ ID NO: 34455 - DNA, 1135 bp, Macaca Mulatta
  misc_feature (1)...(1135): n = A,T,C or G
agaaagaagttttcccatttccggaagttagccaagatgaacttaatgaannnnnnnnnnnnnnnnnnnnnnnnnnnnnnnnnnnnnnnnnnnnnnnnnnnnnnnnnnnnnnnnnnnnnnnnnnnnnnnnnnnnnnnnnnnnnnnnnnnnnnnnnnnnnnnnnnnnnnnnnnnnnnnnnnnnnnnnnnnnnnnnnnnnnnnnnnnnnnnnnnnnnnnnnnnnnnnnnnnnnnnnnnnnnnnnnnnnnnnnnnnnnnnnnnnnnnnnnnnnnnnnnnnnnnnnnnnnnnnnnnnnnnnnnnnnnnnnnnnnnnnnnnnnnnnnnnnnnnnnnnnnnnnnnnnnnnnnnnnnnnnnnnnnnnnnnnnnnnnnnnnnnnnnnnnnnnnnnnnnnnnnnnnnnnnnnnnnnnnnnnnnnnnnnnnnnnnnnnnnnnnnnnnnnnnnnnnnnnnnnnnnnnnnnnnnnnnnnnnnnnnnnnnnnnnnnnnnnnnnnnnnnnnnnnnnnnnnnnnnnnnnnnnnnnnnnnnnnnnnnnnnnnnnnnnnnnnnnnnnnnnnnnnnnnnnnnnnnnnnnnnnnnnnnnnnnnnnnnnnnnnnnnnnnnnnnnnnnnnnnnnnnnnnnnnnnnnnnnnnnnnnnnnnnnnnnnnnnnnnnnnnnnnnnnnnnnnnnnnnnnnnnnnnnnnnnnnnnnnnnnnnnnnnnnnnnnnnnnnnnnnnnnnnnnnnnnnnnnnnnnnnnnnnnnnnnnnnnnnnnnnnnnnnnnnnnnnnnnnnnnnnnnnnnnnnnnnnnnnnnnnnnnnnnnnnnnnnnnnnnnnnnnnnnnnnnnnnnnnnnnnnnnnnnnnnnnnnnnnnnnnnnnnnnnnnnnnnnnnnnnnnnnnnggagaaatttgcactgatggctcagaaggcttacgtcatggagagtatgacctacctcacagcagggatgctggaccaaccgggctttcccgactgctccatcgaggcggccatggtgaaggtnnnggtgttcagctccgaagctgcctggcagtgtgtgagtgaggcgctgcagatcctcgggggcttgggctacacgaaggactatccgtacgagcgcatactgcgtgacacccgcatcctcctcatctttgagg

SEQ ID NO: 34456 - DNA, 163 bp, Macaca Mulatta
aagcgacttgtggcggtcgagcgtggcgtaggcgagtcctcggcgctgggcaaatatggacctcgcggcggcagcggagccgggcgccggcagccagcacctggaggtccgcgatgaggtggccgagaagtgccagaaactgttcctggacttcttggaggag

SEQ ID NO: 34457 - DNA, 493 bp, Macaca Mulatta
  misc_feature (1)...(493): n = A,T,C or G
gaggaggcagatgagctggaccggttggtgacagcaaagacggagtcggtgcagtatgaccaccccaaccacacagtcaccgtgaccaccatcagtgacctggacctctcaggggcccggctgctcgggctgaccccacctgagnnnnnnnnnnnnnnnnnnnnnnnnnnnnnnnnnnnnnnnnnnnnnnnnnnnnnnnnnnnnnnnnnnnnnnnnnnnnnnnnnnnnnnnnnnnnnnnnnnnnnnnnnnnnnnnnnnnnnnnnnnnnnnnnnnnnnnnnnnnnnnnnnnnnnnnnnnnnnnnnnnnnnnnnnnnnnnnnnnnnnnnnnnnnnnnnnnnnnnnnnnnnnnnnnnnnnnnnnnnnnnnnnnnnnnnnnnnnnnnnnnnnnnnnnnnnnnnnnnnnnnnnnnnnnnnnnnnnnnnnnnnnnnnnnnnnnnnnnggacctgtcctttctcagcttggctgtccctgtagcccagcctgcacctagg

SEQ ID NO: 34458 - DNA, 93 bp, Macaca Mulatta
ctcacccaggagcagaagaaggagctctcagaaattgcccatagcattgttgccaatggaaaggggatcctggctgcagatgaatctgtaggt

SEQ ID NO: 34459 - DNA, 1009 bp, Macaca Mulatta
  misc_feature (1)...(1009): n = A,T,C or G
aagaagcgctcaaggagaaggagaagcccaaggaagaagaatgggagaagccctaggatgccgccgggctggagtgcaagccgcggccgctgcataagacctgctccctcttcatgcgcaacattgcgcccaacatctcccgggctgagatcatctccnnnnnnnnnnnnnnnnnnnnnnnnnnnnnnnnnnnnnnnnnnnnnnnnnnnnnnnnnnnnggtttttccgccgtggctgggtgaccttcgaccgcagtgttaacattaaagagatctgttggaacctgcagaacatccgtnnnnnnnnnnnnnnnnnnnnnnnnnnnnnnnnnnnnnnnnnnnnnnnnnnnnnnnnnnnnnnnnnnnnnnnnnnnnnnnnnnnnnnnnnnnnnnnnnnnnnnnnnnnnnnnnnnnnnnnnnnnnnnnnnnnnnnnnnnnnnnnnnnnnnnnnnnnnnnnnnnnnnnnnnnnnnnnnnnnnnnnnnnnnngagcctgccctcacaaaacccgatcttgaagaatatcaccgactacctgatcgaggaagtgagcgctgaggaggaggagctgctggggagcagcgggggcgcccctcctgaggagcctcctaaggaagggaacccggcagagatcaacgtggagcgggatgagaagttgatcaaggnnnnnnnnnnnnnnnnnnnnnnnnnnnnnnnnnnnnnnnnnnnnnnnnnnnnnnnnnnnnnnnnnnnnnnnnnnnnnnnnnnnnnnnnnnnnnnnnnnnnnnnnnnnnnnnnnnnnnnnnnnnnnnnnnnnnnnnnnnnnnnnnnnnnnnagtgctggagtggcaaaagacgtttgaggagaagctcacgccattgctgagtgtgcgggagtcgctctcagaggaagaggcccagaagatggggcgcaaagacccggagcaggaagtggagaagtttgtcacctccaacacgcaggaactgggcaaggataagtggctgtgtcctctcagtggcaagaaattcaag

SEQ ID NO: 34460 - DNA, 1148 bp, Macaca Mulatta
  misc_feature (1)...(1148): n = A,T,C or G
aggtatactatgcgaagaagaagcggcgggcccagcaggtgccaccccaggattcgagcaccaagaaggagaagaaggtcctgaaccatggttatgatgacgacaaccatgactacatcgtgcgcagtggagagcgctgnnnnnnnnnnnnnnnnnnnnnnnnnnnnnnnnnnnnnnnnnnnnnnnnaggtggtgaaagcctatgaccatcagacccaggagcttgtggccatcaagatcatcaagaacaaaaaggccttcctgaaccaggcccagattgagctgcggctgctggagctgatgaaccaacatgacaccgagatgaagtactacatagnncacctgaagcggcacttcatgttccggaaccacctgtgcctggtgttcgagctgctgtcctacaacctgtacgacctcctgcgcaacacccacttccgcggcgtctcgctgaacctgacccggaagctggcgcagcagctctgcacggcactgctctttctggccacgcctgagctcagcatcattcactgcgacctcaagcccgaaaacatcttgctctgcaaccccaagcgcagcgccatcaagatagtggacttcggcagttcctgccagcttggccagaggnnnnnnnnnnnnnnnnnnnnnnnnnnnnnnnnnnnnnnnnnnnnnnnnnnnnnnnnnnnnnnnnnnnnnnnnnnnnnnnnnnnnnnnnnnnnnnnnnnnnnnnnnnnnnnnnnnnnnnnnnnnnnnnnnnnnnnnnnnnnnnnnnnnnnnnnnnnnnnnnnnnnnnnnnnnnnnnnnnnnnnnnnnnnnnnnnnnnnnnnnnnnnnnnnnnnnnnnnnnnnnnnnnnnnnnnnnnnnnnnnnnnnnnnnnnnnnnnnnnnnnnnnnnnnnnnnnnnnnnnnnnnnnggattaccagggccccgggacacggcggctgcaggaggnaggacctggtgctgcgcatgctggagtatgagcccgccgcccgcatcagccccctgggggctctgcagcacggcttcttccgccgcacggccgacgaggccaccaacacgggcccggcaggcagcagtgcctccacctcgcccgcgcctctcgacacctgcccctcttccagcaccgccagctccatctccagttctgg

SEQ ID NO: 34461 - DNA, 1004 bp, Macaca Mulatta
  misc_feature (1)...(1004): n = A,T,C or G
gggggacgccccagccgggaaccggacggcacctagcggctgacaaacaacttgctccgtggagcgcctgaaacaccagtccttggggccagtgcctcagtttcaatccaggtaacctttaaatgaaactggcctaaaatctcaggtcatacacagaagagactccaacaagaagctggaaaaggatgatgttgtcattaaacaacctacagaatatcatctataacccggtaatcccgtatgttggcaccattcccgatcagttggatcctggaactttgattgtaatacgtgggcatgttcctagtgatgcagacagattccaggtggatctgcagtatggcagcagcgtgaaacctcgcgccgacgtggcctttcatttcaatcctcgtttcaaaagggccggctgcattgtttgcaatactttgataaaagaaaaatggggacgggaagagatcacttatgacacgcctttcaaaagagagaagtcttttgagatcgtgattatggtgctgaagggacaaattccaggtggctgtaaatggaaaacatactctgctctatggccacaggatcggcacagagaaaatagacactctgggcatttatggcaaagtgaatattcactccattggttttagattcagctcggatttacagagtacccaagcatctggtctggaactgacagagataagtagagaaaaggttccaaagtctggcacgccccagcttagcctgccatttgctgcaaggttgaacacccccatgggccctggacgaactgtcgtcgttaaaggagaagtgaatacaaatgccaaaagctttaatgttgacctactagcaagaaaatcaaaggatatcgctctacacttgaacccacgcctgaatattaaagcatttataagaaattccttttcttcaagagtcctggggagnagaagaaaggaattttttctccttttcccatttagtccctgggatgtacttttgagaaggatatt

SEQ ID NO: 34462 - DNA, 1874 bp, Macaca Mulatta
  misc_feature (1)...(1874): n = A,T,C or G
cgcgcgcggtcacggggctcgctcccgcggggcaggtccgggctgggagcgggcgccgggatcggcgtggcggcgactgcctgggccgcgaggtcgacccccgctgctgcagcggcagaggctgagggacccgccgcggcgctgtcgccggagagggagggccccgctgccgtcggnnnnnnnnnnnnnnnnnnnnnnnnnnnnnnnnnnnnnnnnnnnnnnnnnnnnnnnnnnnnnnnnnnnnnnnnnnnnnnnnnnnnnnnnnnnnnnnnnnnnnnnnnnnnnnnnnnnnnnnnnnnnnnnnnnnnnnnnnnnnnnnnnnnnnnnnnnnnnnnnnnnnnnnnnnnnnnnnnnnnnnnnnnnnnnnnnnnnnnnnnnnnnnnnnnnnnnnnnnnnnnnnnnnnnnnnnnnnnnnnnnnnnnnnnnnnnnnnnnnnnnnnnnnnnnnnnnnnnnnnnnnnnnnnnnnnnnnnnnnnnnnnnnnnnnnnnnnnnnnnnnnnnnnnnnnnnnnnnnnnnnnnnnnnnnnnnnnnnnnnnnnnnnnnnnnnnnnnnnnnnnnnnnnnnnnnnnnnnnnnnnnnnnnnnnnnnnnnnnnnnnnnnnnnnnnnnnnnnnnnnnnnnnnnnnnnnnnnnnnnnnnnnnnnnnnnnnnnnnnnnnnnnnnnnnnnnnnnnnnnnnnnnnnnnnnnnnnnnnnnnnnnnnnnnnnnnnnnnnnnnnnnnnnnnnnnnnnnnnnnnnnnnnnnnnnnnnnnnnnnnnnnnnnnnnnnnnnnnnnnnnnnnnnnnnnnnnnnnnnnnnnnnnnnnnnnnnnnnnnnnnnnnnnnnnnnnnnnnnnnnnnnnnnnnnnnnnnnnnnnnnnnnnnnnnnnnnnnnnnnnnnnnnnnnnnnnnnnnnnnnnnnnnnnnnnnnnnnnnnnnnnnnnnnnnnnnnnnnnnnnnnnnnnnnnnnnnnnnnnnnnnnnnnnnnnnnnnnnnnnnnnnnnnnnnnnnnnnnnnnnnnnnnnnnnnnnnnnnnnnnnnnnnnnnnnnnnnnnnnnnnnnnnnnnnnnnnnnnnnnnnnnnnnnnnnnnnnnnnnnnnnnnnnnnnnnnnnnnnnnnnnnnnnnnnnnnnnnnnnnnnnnnnnnnnnnnnnnnnnnnnnnnnnnnnnnnnnnnnnnnnnnnnnnnnnnnnnnnnnnnnnnnnnnnnnnnnnnnnnnnnnnnnnnnnnnnnnnnnnnnnnnnnnnnnnnnnnnnnnnnnnnnnnnnnnnnnnnnnnnnnnnnnnnnnnnnnnnnnnnnnnnnnnnnnnnnnnnnnnnnnnnnnnnnnnnnnnnnnnnnnnnnnnnnnnnnnnnnnnnnnnnnnnnnnnnnnnnnnnnnnnnnnnnnnnnnnnnnnnnnnnnnnnnnnnnnnnnnnnnnnnnnnnnnnnnnnnnnnnnnnnnnnnnnnnnnnnnnnnnnnnnnnnnnnnnnnnnnnnnnnnnnnnnnnnnnnnnnnnnnnnnnnnnnnnnnnnnnnnnnnnnnnnnnnnnnnnnnnnnnnnnnnnnnnnnnnnnnnnnnnnnnnnnnnnnnnnnnnnnnnnnnnnnnnnnnnnnnnnnnnnnnnnnnnnnnnnnnnnnnnnnnnnnnnnnngaggccctgagttcctgaagacgcccctggggggcagcttcctcgtgtacgagtccttcctctaccggcgggagaaggcagccggggagaaagtgtattggacctgccgagaccaggcccgcatgggttgccgcagccgcgccatcacccagggccgacgggtgactgtgatgcgtggccactgccacccacccgacctggggggcctggaggccctgaggcagcgggagaaacgccccaacatggcgcagcgggggagcccagg

SEQ ID NO: 34463 - DNA, 830 bp, Macaca Mulatta
ggtcccggggtcaccgctacggggcgacaggcttcgcacaaagacctaagaaacatggctttgtcagcccaacagatacccaggtggtttactcagctaagttgaggagcctcattaatgctgtacaactcacaaaatgttttgctagaccaggaagaacattgttacatggcttttctgctcagcctcagatatcctctgacaattgctttctccagtggggatttaagacttacaagacttcctccttatggaatagttcccagtctactagctcaagtagtcaagagaataattctacccaaagcagtctgcttccttccatgaatgaacagtcacagaagacacaaaagatacccagctttgattctgagctgtttctagaagaactggatgaattgcctccattgtctccaatgcagccaatttcagaggaagaaggctattcagattattgcagaccctccattgccaccagcttcattcacacttcgagactatgtggatcattctgagactctgccagaagttagttcttctaggattggatttgtccaagatagaaaaacatacagaagcagcaaacctccttctgagactggattttgaaaaagacattaagcagatgctcctgtttcttaaagacgtgggtatagaggataaccaactgggagcattcctgacaaaaaatcatgcaattttctctgaagaccttgaaaatctgaagatcagggtggcttatctgctttcaaaaaatttcagtaaagcagatgttgcacagatggtcagaaaagcaccatttttgctgaacttttcagtggaaagactgt

SEQ ID NO: 34464 - DNA, 118 bp, Macaca Mulatta
tgctggagaagaaatatatccacccaccctcatttgatgatgtccactgagcaaatgcagccactggaactctcagaagacagactggacaagctagaccctcgttgcagccacttag

SEQ ID NO: 34465 - DNA, 729 bp, Macaca Mulatta
  misc_feature (1)...(729): n = A,T,C or G
aggaagaagttcatgctcaaacttaatcacgcagctaataactagcagttctgggtgttccaattcttccaagatcacatgagattgggtacatttggagtagcatttgccacctttttttattctagaaaaagtttgtgcctcctcctttttgttttctttatcttttaaaaaattatgcaagcagtgtcttgttgcagaaaaaaataagaatatacagaatagcaaatagacaaatacaaatcactgaaagtctcaccattctcagatgattctaatttacacgttcccaatttcttttctatgtatgtaaagatatacagtcactcctcattatttgtgcattctatacatgagaattcagctactcactaaaattgatttgtaacttcagaattaatacttgcagtgctttcatggtcattcagggacatgcacagagcagtgaaaatttgagtcaccagatacccttgttcccagctgaagtcaaacaaggcaacactctgtcttcttatttcagctctcatagtgtaaacaagtatcctttttgtggtctgcttaatacnnnnnnnnnnnnnnnnnnnnnnnnnnnnngttaagattttactgtttaaagtggtccccaagcatagcgctgaagtgctatttattgtttctaaacacaggctgtggcttcccttatagagaaaataggtatgttagataaactcattcagaaatgagttatag

SEQ ID NO: 34466 - DNA, 2870 bp, Macaca Mulatta
  misc_feature (1)...(2870): n = A,T,C or G
ctcccccacctcctgggcctctctgacctcagctcctggaccctggatcctctggctgggactcagcattttccagtctttttcaggggtagagaggggagcctgggctgaactttaccaccgtgccctggcccaggcatcacaaacacggcctccctgtggctgccctgcccccgacagaccccgattaaacccacacctggccttggccctcccctgctccataccttgcatagtttttacctcacttggaataaaattccaactccttcctgtggtctaggaggttcttggggctgactcatcacccctctggtggacacagacattgccagcgtggtggtcgtctgtgcttggttcagggcaaggctgggaggcagtgggtgccgaagtcttcagtgagcnnnnnnnnnnnnnnnnnnnnnnnnnnnnnnnnnnnnnnnnnnnnnnnnnnnnnnnnnnnnnnnnnnnnnnnnnnnnnnnnnnnnnnnnnnnnnnnnnnnnnnnnnnnnnnnnnnnnnnnnnnnnnnnnnnnnnnnnnnnnnnnnnnnnnnnnnnnnnnnnnnnnnnnnnnnnnnnnnnnnnnnnnnnnnnnnnnnnnnnnnnnnnnnnnnnnnnnnnnnnnnnnnnnnnnnnnnnnnnnnnnnnnnnnnnnnnnnnnnnnnnnnnnnnnnnnnnnnnnnnnnnnnnnnnnnnnnnnnnnnnnnnnnnnnnnnnnnnnnnnnnnnnnnnnnnnnnnnnnnnnnnnnnnnnnnnnnnnnnnnnnnnnnnnnnnnnnnnnnnnnnnnnnnnnnnnnnnnnnnnnnnnnnnnnnnnnnnnnnnnnnnnnnnnnnnnnnnnnnnnnnnnnnnnnnnnnnnnnnnnnnnnnnnnnnnnnncaggccaggcgtggtgtctcacgcctgtaatctcagcagtttgggaagccaaggtgggtggatcacctgaagtcaggagttcgagaccagtctggccaacatggcgaaaccccgtctctactaaaaatacaaaaaatttagctgggtgtggtggtggtcgcctgtaatcccagctactcaggaggctgaggcaagagaatcacttgaacctggaaggcagaggttgcagtgagccgnnnnnnnnnnnnnnnnnnnnnnnnnnnnnnnnnnnnnnnnnnnnnnnnnnnnnnnnnnnnnnnnnnnnnnnnnnnnnnnnnnnnnnnnnnnnnnnnnnnnnnnnnnnnnnnnnnnnnnnnnnnnnnnnnnnnnnnnnnnnnnnnnnnnnnnnnnnnnnnnnnnnnnnnnnnnnnnnnnnnnnnnnnnnnnnnnnnnnnnnnnnnnnnnnnnnnnnnnnnnnnnnnnnnnnnnnnnnnnnnnnnnnnnnnnnnnnnnnnnnnnnnnnnnnnnnnnnnnnnnnnnnnnnnnnnnnnnnnnnnnnnnnnnnnnnnnnnnnnnnnnnnnnnnnnnnnnnnnnnnnnnnnnnnnnnnnnnnnnnnnnnnnnnnnnnnnnnnnnnnnnnnnnnnnnnnnnnnnnnnnnnnnnnnnnnnnnnnnnnnnnnnnnnnnnnnnnnnnnnnnnnnnnnnnnnnnnnnnnnnnnnnnnnnnnnnnnnnnnnnnnnnnnnnnnnnnnnnnnnnnnnnnnnnnnnnnnnnnnnnnnnnnnnnnnnnnnnnnnnnnnnnnnnnnnnnnnnnnnnnnnnnnnnnnnnnnnnnnnnnnnnnnnnnnnnnnnnnnnnnnnnnnnnnnnnnnnnnnnnnnnnnnnnnnnnnnnnnnnnnnnnnnnnnnnnnnnnnnnnnnnnnnnnnnnnnnnnnnnnnnnnnnnnnnnnnnnnnnnnnnnnnnnnnnnnnnnnnnnnnnnnnnnnnnnnnnnnnnnnnnnnnnnnnnnnnnntgaccccttcagtgggtttcagcctccaacnnnnnnnnnnnnnnnnnnnnnnnnnnnnnnnnnnnnnnnnnnnnnnnnnnnnnnnnnnntgctctatcagcacttgattgagaaaatcatcctgggaaaccagcctctgggagcaggggccttgccacgctgttctgcgagcctgctgaagccctccttgccatgtgtgcttgcaggcggaggcccagaaccaagctaggaggccactggctgtcctgtaggaccagggaagtctggtgccaccctagcagagggcccatggacttcttctagaggtcagtctgtgcccagcctctaccaccagttcagaacttgaagtgggtgcggtaagcggtggcccctcctcagcaaacatttccagaggattctggcagcagagtttccatgggaacatgtgccagtgctacgctgaacccagtggggctggggttccctttcagccaatattgcaggacctgagcctggtggcctcggccagggtaggcagtgctcttgccacccactctcacaaacctgaactcaaagaactcaagttacgggcaaaacctgcttttcctttttcnnnnnnnnnnnnnnnnnnnnnnnnnnnnnnnaagcacattctaatttaaaggccatgctccattctaaagatgcctctgggatttcagggatggatttttatgtagctcaatagttttcttggcagacagcttctgcaggagaggtgggccgttggctcagtccagccaggctgagtggcgtcactccgttccttgcagtgccaggggatgtcatttgcccacctgaggggcttccccagtctcccttccctgacctgtggtcagaatgatggcctcagccttgactgagaagggtcaagccagactccctgcacttggtgttggcgtgtgttttatgtgtgtctggaggtgacatatgtgggtgacagaggcatatgttgcagtgaaacattaaaactacagcaaagtg

SEQ ID NO: 34467 - DNA, 121 bp, Macaca Mulatta
gcattggcatcgacaaaagtcagaattcccgggaacttgaagagaggctgctaaattcccagtaattgttcctttggccttctagggactgacttcaaagaaggaaggaaataatcaggca

SEQ ID NO: 34468 - DNA, 367 bp, Macaca Mulatta
aactttgttgggaataaacttcactctgtggattttgctgctgagctgtttgcttccctcaggtaaaggcccagctctgggaccctgactttgttcctgtctcctgggttgaactcactcgatctcatcagattatgtgatggggttgggccagccctgcctgggagggggcggcctaggctctgaccccatctttgtccctgactctctgggtgactcatcctttccccgatctgggttggggaaggcagattgggagtgtgggagaggacctcttatggctggccttccctagtggctgtgatggtcatggctgccattcactggggctcagaggccagactgcctgggctagagccaagacaga

SEQ ID NO: 34469 - DNA, 685 bp, Macaca Mulatta
  misc_feature (1)...(685): n = A,T,C or G
aaatgattatttttagtgtcacatctggaaaactggcagcatgttntctatctatagccagcttcttcaactgtataaaagtattctctccagctacgtatatacacacgcacatatatatcatagcaattccttgtggtttataactttcaaatactgctatcagtttataggtaaagaaactgagtgtgttaaatgatttacccagggagggtcttgtggcttcatgtttatggatttgctaggtctctgtctcatggtccactgcctaactgttaagacagtgtgttgattctaataggcatgatgaattgttaaaagaatttactaaaatctcttccaccaaactttgaaaaataatgaagcccccactttagaggctctgttggaaacagtgctgtggagacagatccctcctggctccctagctgatcctggagatgcagcagtagatgagtgggttatctctgaatttgtaagagatgattcccatgaggattaagataaaatgggaagtaaaatctaacaaacacaaagatagctcccaggcactgctttgtgtagtttgacaagattgtggttgtagtagcaaaggacttaaaatgatagtttttaaaccatattctgtccctaagtattaaaaaatctaggaagttattaaaataccagatttgttctgctctgt

SEQ ID NO: 34470 - DNA, 584 bp, Macaca Mulatta
ccaagtcctctcagaactgagaggaagcagactattggtcacaaaatagccgccctcagtcagtgaggcctgggaactttccagaagccccatccgtagtagatcacaagctcagtgggctctgccgtcggacttattggcactgcctgttcttgtcaatactcctgccccaaaatgcactttcaaccctcaggccagagaaaggacctcccaaagggtgccaacctccatcaagactgtattatttaccaagagtttggccagtgtgtgggagacctgaccactccccactcccaaaacacacgcccactgggtaacttctgaacagactgctgttccctggggttcttcaaacctgatacttttctctaaaggtgtaagtatctttgtcttctccttagtaaatgtgataactagattatggaccatttggagaagccaaatggcaaccaaaactattccagtgtcagaagcccctcctggcttaatggaattgtccttgtgttagctcatcccaggaaactccctgtgggtatatatgtgtatgtcttcgtgcatgtgccctcacaggcgaacacgtgtgt

SEQ ID NO: 34471 - DNA, 1543 bp, Macaca Mulatta
  misc_feature (1)...(1543): n = A,T,C or G
gcgcgatggcggctgccgccgccgagacccccgaggtccttcgggaatgtggttgtaagggcatccggacctgtctgatctgcgagcggcagcgtggcggcgacccgccctgggaactgcccccagcnnnnnnnnnnnnnnnnnnnnnnnnnnnnnnnnnnnnnnnnnnnnnnnnnnnnnnnnnnnnnnnnnnnnnnnnnnnnnnnnnnnnnnnnnnnnnnnnnnnnnnnnnnnnnnnnnnnnnnnnnnnnnnnnnnnnnnnnnnnnnnnnnnnnnnnnnnnnnnnnnnnnnnnnnnnnnnnnnnnnnnnnnnnnnnnnnnnnnnnnnnnnnnnnnnnnnnnnnnnnnnnnnnnnnnnnnnnnnnnnnnnnnnnnnnnnnnnnnnnnnnnnnnnnnnnnnnnnnnnnnnnnnnnnnnnnnnnnnnnnnnnnnnnnnnnnnnnnnnnnnnnnnnnnnnnnnnnnnnnnnnnnnnnnnnnnnnnnnnnnnnnnnnnnnnnnnnnnnnnnnnnnnnnnnnnnnnnnnnnnnnnnnnnnnnnnnnnnnnnnnnnnnnnnnnnnnnnnnnnnnnnnnnnnnnnnnnnnnnnnnnnnnnnnnnnnnnnnnnnnnnnnnnnnnnnnnnnnnnnnnnnnnnnnnnnnnnnnnnnnnnnnnnnnnnnnnnnnnnnnnnnnnnnnnnnnnnnnnnnnnnnnnnnnnnnnnnnnnnnnnnnnnnnnnnnnnnnnnnnnnnnnnnnnnnnnnnnnnnnnnnnnnnnnnnnnnnnnnnnnnnnnnnnnnnnnnnnnnnnnnnnnnnnnnnnnnnnnnnnnnnnnnnnnnnnnnnnnnnnnnnnnnnnnnnnnnnnnnnnnnnnnnnnnnnnnnnnnnnnnnnnnnnnnnnnnnnnnnnnnnnnnnnnnnnnnnnnnnnnnnnnnnnnnnnnnnnnnnnnnnnnnnnnnnnnnnnnnnnnnnnnnnnnnnnnnnnnnnnnnnnnnnnnnnnnnnnnnnnnnnnnnnnnnnnnnnnnnnnnnnnnnnnnnnnnnnnnnnnnnnnnnnnnnnnnnnnnnnnnnnnnnnnnnnnnnnnatgggaacgcacctcggggcagcccccttccacctggaccgtggccatgcttgttttggttatttaatttgtcacagtcttggggacgtgggatcatttgagcttaaaaaatattgggggccgggcacggtggctcacgcctgtaatcctaacactttgggaggctgaggtgggtggatcgcttgaggtcaggagttcgagaccagcctggccaacatggtgaaaaccggtctctacaaaaaatacaaaaattagccaggtgtggtgactcgcacctgtagtcccagctacttgggaggctaaggtgggagaatcgcttgaacccgggaggtggaggttgcagtgagccaagattgcgccactgcactccagcctgggcgacagagcaannnnnnnnnnnnnnnnnnnnnnnngggaacattttaaatgattttcacctttattatgcatctattttcatggggtttcctgatatctctctg

SEQ ID NO: 34472 - DNA, 690 bp, Macaca Mulatta
gatctggcaaaaccgagttggcagaaccaattgccattcgtcctactagtgaaacagtaatgtatcctgcatatgcaaaatgggtgcagtcacacagagacctgcccatcaagctcaatcagtggtgcaatgtggtgcgttgggagttcaagcaccctcagcctttcctacgtactcgtgaatttctttggcaggaagggcacagtgcttttgctaccatggaagaggcagcggaagaggtcttgcagatacttgacttatatgctcaggtatatgaagaactcctggcaattcctgttgtaagaggaagaaagacggaaaaggaaaaatttgcaggaggagactatacaactacagtagaagcatttatatctgctagtggaagagctatccagggaggaacatcacatcatttagggcagaatttttccaaaatgtttgaaatcgtttttgaagatccaaagacaccaggagagaagcaatttgcctatcaaaactcctggggcctgacgactcgaactattggtgttatgaccatggttcatggagacaacatgggtttagtattaccaccccgtgtagcatgtgttcaggtggtgattattccgtgtggcattaccaatgcactttctgaagaagacaaagaagcgttgattgccaaatgcaatgattatcgaaggcgggtactca

SEQ ID NO: 34473 - DNA, 6592 bp, Macaca Mulatta
  misc_feature (1)...(6592): n = A,T,C or G
cagtctctgttgagtatccgtggctccctgttttccccaagacgcaatagcaaaacaagcattttcagtttcagaggtcgggcaaaggatgttggatctgaaaatgactttgctgatgacgaacacagcacatttgaagacagcgaaagcaggagagactcactgtttgtgccgcacagacatggagagcgacgcaacagtaacgttagtcaggccagtatgtcatccaggatggtgccagggcttccagcaaatgggaagatgcacagcactgtggattgcaatggtgtggtttccttggtgggtggaccttcagctctaacgtcacctactggacaacttctcccagaggnnnnnnnnnnnnnnnnnnnnnnnnnnnnnnnnnnnnnnnnnnnnnnnnnnnnnnnnnnnnnnnnnnnnnnnnnnnnnnnnnnnnnnnnnnnnnnnnnnnnnnnnnnnnnnnnnnnnnnnnnnnnnnnnnnnnnnnnnnnnnnnnnnnnnnnnnnnnnnnnnnnnnnnnnnnnnnnnnnnnnnnnnnnnnnnnnnnnnnnnnnnnnnnnnnnnnnnnnnnnnnnnnnnnnnnnnnnnnnnnnnnnnnnnnnnnnnnnnnnnnnnnnnnnnnnnnnnnnnnnnnnnnnnnnnnnnnnnnnnnnnnnnnnnnnnnnnnnnnnnnnnnnnnnnnnnnnnnnnnnnnnnnnnnnnnnnnnnnnnnnnnnnnnnnnnnnnnnnnnnnnnnnnnnnnnnnnnnnnnnnnnnnnnnnnnnnnnnnnnnnnnnnnnnnnnnnnnnnnnnnnnnnnnnnnnnnnnnnnnnnnnnnnnnnnnnnnnnnnnnnnnnnnnnnnnnnnnnnnnnnnnnnnnnnnnnnnnnnnnnnnnnnnnnnnnnnnnnnnnnnnnnnnnnnnnnnnnnnnnnnnnnnnnnnnnnnnnnnnnnnnnnnnnnnnnnnnnnnnnnnnnnnnnnnnnnnnnnnnnnnnnnnnnnnnnnnnnnnnnnnnnnnnnnnnnnnnnnnnnnnnnnnnnnnnnnnnnnnnnnnnnnnnnnnnnnnnnnnnnnnnnnnnnnnnnnnnnnnnnnnnnnnnnnnnnnnnnnnnnnnnnnnnnnnnnnnnnnnnnnnnnnnnnnnnnnnnnnnnnnnnnnnnnnnnnnnnnnnnnnnnnnnnnnnnnnnnnnnnnnnnnnnnnnnnnnnnnnnnnnnnnnnnnnnnnnnnnnnnnnnnnnnnnnnnnnnnnnnnnnnnnnnnnnnnnnnnnnnnnnnnnnnnnnnnnnnnnnnnnnnnnnnnnnnnnnnnnnnnnnnnnnnnnnnnnnnnnnnnnnnnnnnnnnnnnnnnnnnnnnnnnnnnnnnnnnnnnnnnnnnnnnnnnnnnnnnnnnnnnnnnnnnnnnnnnnnnnnnnnnnnnnnnnnnnnnnnnnnnnnnnnnnnnnnnnnnnnnnnnnnnnnnnnnnnnnnnnnnnnnnnnnnnnnnnnnnnnnnnnnnnnnnnnnnnnnnnnnnnnnnnnnnnnnnnnnnnnnnnnnnnnnnnnnnnnnnnnnnnnnnnnnnnnnnnnnnnnnnnnnnnnnnnnnnnnnnnnnnnnnnnnnnnnnnnnnnnnnnnnnnnnnnnnnnnnnnnnnnnnnnnnnnnnnnnnnnnnnnnnnnnnnnnnnnnnnnnnnnnnnnnnnnnnnnnnnnnnnnnnnnnnnnnnnnnnnnnnnnnnnnnnnnnnnnnnnnnnnnnnnnnnnnnnnnnnnnnnnnnnnnnnnnnnnnnnnnnnnnnnnnnnnnnnnnnnnnnnnnnnnnnnnnnnnnnnnnnnnnnnnnnnnnnnnnnnnnnnnnnnnnnnnnnnnnnnnnnnnnnnnnnnnnnnnnnnnaggatgtattaaaaagtttccattctgtcaagtaagtacagaagaaggcaaaggaaagatctggtggaatcttcggaaaacctgctacagcattgttgagcacaactggtttgagactttcatnnnnnnnnnnnnnnnnnnnnnnnnnnnnnnnnnggcctttgaagatatatacattgaacagcgaaagactatcaaaaccatgctagaatatgctgacaaagtctttacctatatattcattctggaaatgcttctcaaatgggttgcttatggatttcaaacgtatttcactaatgcctggtgctggctagatttcttgatcgttgatgtnnnnnnnnnnnnnnnnnnnnnnnnnnnnnnnnnnnnnnnnnnnnnnnnnnnnnnnnnnnnnnnnnnnnnnnnnnnnnnnnnnnnnnnnnnnnnnnnnnnnnnnnnnnnnnnnnnnnnnnnnnnnnnnnnnnnnnnnnnnnnnnnnnnnnnnnnnnnnnnnnnnnnnnnnnnnnnnnnnnnnnnnnnnnnnnnnnnnnnnnnnnnnnnnnnnnnnnnnnnnnnnnnnnnnnnnnnnnnnnnnnnnnnnnnnnnnnnnnnnnnnnnnnnnnnnnnnnnnnnnnnnnnnnnnnnnnnnnnnnnnnnnnnnnnnnnnnnnnnnnnnnnnnnnnnnnnnnnnnnnnnnnnnnnnnnnnnnnnnnnnnnnnnnnnnnnnnnnnnnnnnnnnnnnnnnnnggccacatttaaaggctggatggatattatgtatgcagctgttgattcacgagatgtnnnnnnnnnnnnnnnnnnnnnnnnnnnnnnnnnnnnnnnnnnnnnnnnnnnnnnnnnnnnnnnnnnngggtcattcttcactctggatctatttcattggtgtcatcatagataacttcaaccagcagaaaaagaagataagtnnnnnnnnnnnnnnnnnnnnnnnnnnnnnnnnnnnnnnnnnnnnnnnnnnnnnnnnnnnnnnnnnnnnnnnnnnnnnnnnnnnnnnnnnnnnnnnnnnnnnnnnnnnnnnnnnnnnnnnnnnnnnnnnnnnnnnnnnnnnnnnnnnnnnnnnnnnnnnnnnnnnnnnnnnnnnnnnnnnnnnnnnnnnnnnnnnnnnnnnnnnnnnnnnnnnnnnnnnnnnnnnnnnnnnnnnnnnnnnnnnnnnnnnnnnnnnnnnnnnnnnnnnnnnnnnnnnnnnnnnnnnnnnnnnnnnnnnnnnnnnnnnnnnnnnnnnnnnnnnnnnnnnnnnnnnnnnnnnnnnnnnnnnnnnnnnnnnnnnnnnnntaggtatgtttctggctgagatgatagaaaagtattttgtgtcccctaccctgttccgagtgatccgtcttgccaggattggcagaatcctacgtctgatcaaaggagcaaaggggatccgcacgctgctctttgctttgatgatgtcccttcctgcgttgtttaatatcggcctcctgctcttcctggtcatgttcatctacgccatctttgggatgtccaactttgcctatgttaaaaaggaagctggaattgatgacatgttcaactttgagacctttggcaacagcatgatctgcttgttccaaattacaacctctgctggctgggatggattgctagcacctattcttaatagtgcaccacccgactgtgaccctgacacaattcatcctggcagctcagttaagggagattgtgggaacccatctgttgggattttcttttttgtcagttacatcatcatatccttcctggttgtggtgaacatgtacatcgcggtcatcctggaaaacttcagtgttgctactgaagaaagtgcagagcctctgagtgaggatgactttgagatgttctatgaggtttgggaaaagtttgatcccgatgcgacccagtttatagagttctctaagctctctgactttgcagctgccctggatcctcctcttctcatagcaaaacccaacaaagtccagcttattgcnnnnnnnnnnnnnnnnnnnnnnnnnnnnnnnnnnnnnnnncttgatattttatttgcctttacaaacgtgttttgggtgagagtggagagatggatgcccttcgaatacagatggaagaccggtttatgtcatcaaacccctccaaagtctcttatgagcctattacaaccactttgaaacgtaaacaagaggaagtgtctgccgctatcattcagcgtaatttcagatgttatcttttaaagcaaaggttaaaaaatatatcaaataattataacaaagaggcaattaaagggaggattgacttacctataaaacaagacatgattattgacaaattaaatgggaactccactccagaaaaatcagatgggagttcctctaccacctctcctccttcctatgatagtgtaacaaaaccannnnnnnnnnnnnnnnnnnnnnnnnnnnnnnnnnnnnnnnnnnnnnnnnnnnnnnnnnnnnnnnnnnnnnnnnnnnnnnnnnnnnnnnnttatctttgtgatcaattgtttacagcctatgaaggtaaagtatatgtgtcaactggacttcaagaggaggtccatgccaaactgactgttttaacaaatactcatagtcagtgcctatacaagacagtgacctctttgtcactgcaactctgtgagacagggtatcaacattgacaagaggttgctgtttttattaccagctgacactgctgaggagaaacccaatggctacctagactatagggatagttgtgcaaagtgatcattgtaactacaccaaacacctttagtacagtccttgcatccattctatttttaacttccatgtctgccatatttttacaaaatttgttctagtgcatttccatggtccccaattcatagtttattcataatactatgtcactatttttgtaaatgaggtnnnnnnnnnnnnnnnnnnnnnnnnnnnnnnnnnnnnnnnnnnnnnnnnnnaaaggtgttttgcccaggagagataaaatttttgcttcaaaacccagaaaaaagaaattgtaatgggttacagtttcagttacttccattttcctagatggcttttaattttgaaagtattttagtcttgttatgtttgtttctgtctgaacagttatgtgcctgtaaagtttcctctaatattacaggattattttatgcaaagtgttctgtttcagcaagtgcaaattttattctaagtttcagagctctatatttaattttggtcaaatgctttccaaaaaggtaatctaataaatccattctagaaaaatatatctaaagtattgctttagaatagttgttccactttctgctgcagtattgctttgccatcttctgctctcagcaaagctgatagtctatgtcaattaaataccctatgttatgtaaatagttattttatcctgtggtgcatgtttgggcaaatatatatatagcctgataaacaacttctattaaatcaaatatgtaccacagtgtatgtgtcttttgcgagcttccaacagggatgtatcctgtaccattcattaaacatagtttaaaggctatcactagtgcatgttaatattgcctatgctgctctattttactcaatccattcttcacaagtcttggttaaagattgtcacatattggtgaaagaatgaattcaacctgctatctgtccattatgtcaagcagaataatttgaagctatttacaaacacctttacttttgcacttttaattcaacatgagtatcatatggtatctctctagatttcaaggaaacacactggatactgcctactgacaaaacctattcttcatannnnnnnnnnnnnnnnnnnnnnnnnnnnnnnnnnnnnnnnnnnnnnnnnnnnnnnnnnnnnnnnnnnnnnnnnnnnnnnnnnnnnnnnnnnnnnnnnnnnnnnnnnnnnnnnnnnnnnnnnnnnnnnnnnnnnnnnnnnnnnnnnnnnnnnnnnnnnnnnnnnnnnnnnnnnnnnnnnnnnnnnnnnnnnnnnnnnnnnnnnnnnnnnnnnnnnnnnnnnnnnnnnnnnnnnnnnnnnnnnnnnnnnnnnnnnnnnnnnnnnnnnnnnnnnnnnnnnnnnnnnnnnnnnnnnnnnnnnnnnnnnnnnnnnnnnnnnnnnnnnnnnnnnnnnnnnnnnnnnnnnnnnnnnnnnnnnnnnnnnnnnnnnnnnnnnnnnnnnnnnnnnnnnnnnnnnnnnnnnnnnngcacaaaccaaaagtttaatgttaattccttttacaaaactatttactgtagtgtattgatgaactgcatgcagggaattgctattactaaaaagaatggtgagctacgtcattattgagccaaaagaataaatttcattttttattgcatttcacttattggcctctggggnnnnnnnnnnnnnnnnnnngctgttggcagtataaaatatatataattaataaaacctctgcttgatctgacatttgtatacataaaagtttacatgaattttacaacaaactagtgcatgattcaccaagcagtactacagaataaaggcaaattaaaagcagctttgtgaacttttatgtgtgcaaaggatcaagttcacatgttccaactttcaggtttgataataatagtaaccacctacaatagctttcaatttcaattaattcccttggctataagcatccaaactcatcttctctcaaatataattgatgctatctcctacattacttggtggct

SEQ ID NO: 34474 - DNA, 168 bp, Macaca Mulatta
agtgtcaaaccaagaattccatgaagtcagttaaaaataccagctcattcagcaacgtatcaagcccacaatgtgaggcagagcctgagaattgcagctgtcatgaaaccatcgcataaacactgtggagatagcacagtcatcaggaatcctggcaggaaacccgat

SEQ ID NO: 34475 - DNA, 182 bp, Macaca Mulatta
aaagggaattgagatctttatgagagggtctattcactcagaagggtttcttccgtgtgtctatagcgttactgataattcaggaaagggatcaagtcctattttctcacaattatctgcataactgttttagtaaaacctgaaccttattcctattttgattgcaaaagtaaatatctgga

SEQ ID NO: 34476 - DNA, 1178 bp, Macaca Mulatta
  misc_feature (1)...(1178): n = A,T,C or G
ggctcccactccttgaagtatttccacacttccgtgtcccggcccggccgcggggagccccgcttcatctccgtgggctacgtggacgacacccagttcgtgcggtacgacagcgacgccgccagtccgaggatgcagccgcgggcgccgtgggtggagcaggaggggccggagtattgggaccaggagacacggagcgccagggacaccgcacggactttccgagtgaacctggagaccctgcgcggctactacaaccagagcgaggccggtctcataccctccagtggatgcatggctgcgacctggcgcccgacaggcgcttcctccgcgggtatgaacagttcgcctacgacggcaaggattatctcaccctgaatgaggacctgcgctcctggtctgcggtggacacggcggctcagatctccgtgcaaaagtcaaatgatggcggtgaggcggagcaccagagagcctacctggaagacacatgcgtggagtggctccgcagatacctggagaatgggaaggagacgctgnnnnnnnnnnnnnnnnnnnnnnnnnnnnnnnnnnnnnnnnnnnnnnnnnnnnnnnnnnnnnnnnnnnnnnnnnnnnnnnnnnnnnnnnnnnnnnnnnnnnnnnnnnnnnnnnnnnnnnnnnnnnnnnnnnnnnnnnnnnnnnnnnnnnnnnnnnnnnnnnnnnnnnnnnnnnnnnnnnnnnnnnnnnnnnnnnnnnnnnnnnnnnnnnnnnnnnnnnnnnnnnnnnnnnnnnnnnnnnnnnnnnnnnnnnnnnnnnnnnnnnnnnnnnnnnnnnnnnnnnnnnnnnnnnnnnnnnnnnnnnnnnnnnnnnnnnnnnnnnnnnnnnnnnnnnnnnnnnnnnnnnnnnnnnnnnnnnnnnnnnnnnnnnnnnnnnnnnnnnnnnnnnnnnnnnnnnnnnnnnnnnnnnnnnnnnnnnnnnnnnnnnnnnnnnnnnnnnnnnnnnnnnnnnnnnnnnnnnnnnnnnnnnnnnnnnnnnnnnnnnnnnnnnnnnnnnnnnnnnnnnnnnnnnnnnnnnnnnnnnnnnnnnnnnacagctgccttgtgtgtgactgagatgcaggatttcttcacgcctcccgtttgtgtcttaagggactctggcttctctttttgcaagggcctctgaatctgtctgtgtccctg

SEQ ID NO: 34477 - DNA, 854 bp, Macaca Mulatta
  misc_feature (1)...(854): n = A,T,C or G
ttgcatctggaaagtccagaacgagttgttgatttcccagcaagcactggagcggatttggaaggaactgtgcaatgtagtgggttctttgtgaaagaacagcaatgagcaaagccacaggaacctcctctggggtgcccagagcactggccctgggctagcgacttgcctcagcttcatttcccgcagaggctccatggagaggaagccggcagagtcttggctcttgagtctgagggcttcagcctgaacccaagactctcctctgagatagcagcccccagagaagactagctgttctctgatnnnnnnnnnnnnnnnnnnnnnnnnnnnnnnnnnnnnnnnnnnnnnnnnnnnnnnnnnnnnnnnnnnnnnnnnnnnnnnnnnnnnnnnnnnnnnnnnnnnnnnnnnnnnnnnnnnnnnnnnnnnnnnnnnnnnnnnnnnnnnnnnnnnnnnnnnnnnnnnnnnnnnnnnnnnnnnnnnnnnnnnnnnnnnnnnnnnnnnnnnnnnnnnnnnnnnnnnnnnnnnnnnnnnnnnnnnnnnnnnnnnnnnnnnnnnnnnnnnnnnnnnnnnnnnnnnnnnnnnnnnnnnnnnnnnnnnnnnnnnnnnnnnnnnnnnnnnnnnnnnnnnnnnnnnnnnnnnnnnnnnnnnnnnnnnnnnnnnnnnnnnnnnnnnnnnnnnnnnnnnnnnnnnnnnnnnnnnnnnnnnnnnnnnnnnnnnnnnnnnnnnnnnnnnnnggctgataagaaggacccccaaggcaacggcactgtggctgggtttgaactactgctccagaaacagctgaagggcaaacaaatgcagaaggaaatgtcagaattcatccgggaaag

SEQ ID NO: 34478 - DNA, 259 bp, Macaca Mulatta
tcctaagggtatttatactttatgatgataacatggaaactgaaataaaatacaatgcgctatatcttttatgtattctaactttaaaagacaagtgcaacactgttagactgacttttatatgtgctcttttattctgataatattagggctaacttatgttttataatgattataatttacatgcttatttttaaaatagtatatgtggacgcatatatatcattatattaaaataaattctaccattttaaattgg

SEQ ID NO: 34479 - DNA, 853 bp, Macaca Mulatta
  misc_feature (1)...(853): n = A,T,C or G
tcttgctgcaaagcttatgaatacatgggatacattatggaaaaagagcaagcgtatacagatgctgccttgaactatgagatggcatggaaatacagcaatcggacaaatccagcagtagnnaggatacaaactggcatttaattacttaaaagcaaaaagatatgtggattcaattgacatatgtcaccaggnnnnnnnnnnnnnnnnnnnnnnnnnnnnnnnnnnnnnnnnnnnnnnnnnnnnnnnnnnnnnnnnnnnnnnnnnnnnnnnnnnnnnnnnnnnnnnnnnnnnnnnnnnnnnnnnnnnnnnnnnnnnnnnnnnnnnnnnnnnnnnnnnnnnnnnnnnnnnnnnnnnnnnnnnnnnnnnnnnnnnnnnnnnnnnnnnnnnnnnnnnnnnnnnnnnnnnnnnnnnnnnnnnnnnnnnnnnnnnnnnnnnnnnnnnnnnnnnnnnnnnnnnnnnnnnnnnnnnnnnnnnnnnnnnnnnnnnnnnnnnnnnnnnnnnnnnnnnnnnnnnnnnnnnnnnnnnnnnnnnnnnnnnnnnnnnnnnnnnnnnnnnnnnnnnnnnnnnnnnnnnnnnnnnnnnnnnnnnnnnnnnnnnnnnnnnnnnnnnnnnnnnnnnnnnnnnnnnnnnnnnnnnnnnnnnnnnnnnnnnnnnnnnnnnggaagtcagcaaacaagatgctaactgatggagtgaaatccccaggagatgcagaaggcaagtgcagctaactgaggcctcagaggcaggagatgcccatcgggatgagagctatggctttctccagcgatgactctgcttctatgaggtcactagtagtagaaccatgtattgctggcatacacttggg

SEQ ID NO: 34480 - DNA, 879 bp, Macaca Mulatta
  misc_feature (1)...(879): n = A,T,C or G
aggttctttgcagatggattttaagtgttaagaagaattatcggaagaatgttgcctatcataattggagacatgcctttaatacagctcaatgcatgtttgctgctctaaaagcaggcaaaattcagnnnnnnnnnnnnnnnnnnnnnnnnnnnnnnnnnnnnnnnnnnnnnnnnnnnnnnnnnnnnnnnnnnnnnnnnnnnnnnnnnnnnnnnnnnnnnnnnnnnnnnnnnnnnnnnnnnnnnnnnnnnnnnnnnnnnnnnnnnnnnnnnnnnnnnnnnnnnnnnnnnnnnnnnnnnnnnnnnnnnnnnnnnnnnnnnnnnnnnnnnnnnnnnnnnnnnnnnnnnnnnnnnnnnnnnnnnnnnnnnnnnnnnnnnnnnnnnnnnnnnnnnnnnnnnnnnnnnnnnnnnnnnnnnnnnnnnnnnnnnnnnnnnnnnnnnnnnnnnnnnnnnnnnnnnnnnnnnnnnnnnnnnnnnnnnnnnnnnnnnnnnnnnnnnnnnnnnnnnnnnnnnnnnnnnnnnnnnnnnnnnnnnnnnnnnnnnnnnnnnnnnnnnnnnnnnnnnnnnnnnnnnnnnnnnnnnnnnnnnnnnnnnnnnnnnnnnnnnnnnnnnnnnnnnnnnnnnnnnnnnnnnnnnnnnnnnnnnnnnnnnnnnnnnnnnnnnnnnnnnnnnnnnnnnnnnnnnnnnnnnnnnnnnnnnnnnnnnnnnnnnnaggccctgacccacgtgtcagaggattgtttccctttgctagatggctgcagaaagaacaggcagaaatggcaggcccttgcagaacagcaggagaagatgctgattaatggggaaagcggccaggccaagcggaactgaggggcctatttcatgcagagctgaagtt

SEQ ID NO: 34481 - DNA, 274 bp, Macaca Mulatta
ggggttctgtgatctccccctaaacatctcagtagacacagcgattgagcatgtcatctggattggtcccaaaaaggctcttgcttttgcacgtcccaaagaaaatgtaacctttatggccaaaagctactggggccaactaaacatcgccagggggagttactccctgtccatcagcaatctgactctgaatgatgcaggatcctacaaagcccagataaaccaaaggaattttgaagtcaccactgaggaggaattcaccctgttcatctat

SEQ ID NO: 34482 - DNA, 587 bp, Macaca Mulatta
gagatggggttttgccatggtggccaggctggtctcgaactcctgacctcaagtgatctgtctgcctcggcctcccaaaatgctgggattacaggtgtgagccacagggcctggcacttgagagggttcttgaaagcttggaagaagtgatagtgcatagacgatgaagtggagatgtcaaaacagccttggaggaaggtatgcaaagtctcagagaagtggacaagccagaatggctcttctgttgtaggttgtacaggagaacagcacgacaagagtgatgccatcttaaaaccgccatatgatgatgcatgtttcacccccacataccagggtgctctgcggtaagctctttaaacaatgcctgtacaatacataaccctttgtaaagatgcttagctcaaacactccccaagtagatatgagttttgcagtgaagttggaggcatggccacctgcacgtgttttaccctaaaagcttgctacagaaaagtactttctgcagggcagatgtggggatctaccgttttgtggctgcccggaacatcacttctgttcctaagtccctattaaatatttctttacaa

SEQ ID NO: 34483 - DNA, 1623 bp, Macaca Mulatta
  misc_feature (1)...(1623): n = A,T,C or G
ncagatcctggaggcaacacccctcttggagtccttcggtaatgccaaaaccgtcaggaacgacaactccagccgctttgggaagttcatggaaatctttctggaaggnnnnnnnnnnnnnnnnnnnnnnnnnnnnnnnnnnnnnnnnnnnnnnnnnnnnnnnnnnnnnnnnnnnnnnnnnnnnnnnnnnnnnnnnnnnnnnnnnnnnnnnnnnnnnnnnnnnnnnnnnnnnnnnnnnnnnnnnnnnnnnnnnnnnnnnnnnnnnnnnnnnnnnnnnnnnnnnnnnnnnnnnnnnnnnnnnnnnnnnnnnnnnnnnnnnnnnnnnnnnnnnnnnnnnnnnnnnnnnnnnnnnnnnnnnnnnnnnnnnnnnnnnnnnnnnnnnnnnnnnnnnnnnnnnnnnnnnnnnnnnnnnnnnnnnnnnnnnnnnnnnnnnnnnnnnnnnnnnnnnnnnnnnnnnnnnnnnnnnnnnnnnnnnnnnnnnnnnnnnnnnnnnnnnnnnnnnnnnnnnnnnnnnnnnnnnnnnnnnnnnnnnnnnnnnnnnnnnnnnnnnnnnnnnnnnnnnnnnnnnnnnnnnnnnnnnnnnnnnnnnnnnnnnnnnnnnnnnnnnnnnnnnnnnnnnnnnnnnnnnnnnnnnnnnnnnnnnnnnnnnnnnnnnnnnnnnnnnnnnnnnnnnnnnnnnnnnnnnnnnnnnnnnnnnnnnnnnnnnnnnnnnnnnnnnnnnnnnnnnnnnnnnnnnnnnnnnnnnnnnnnnnnnnnnnnnnnnnnnnnnnnnnnnnnnnnnnnnnnnnnnnnnnnnnnnnnnnnnnnnnnnnnnnnnnnnnnnnnnnnnnnnnnnnnnnnnnnnnnnnnnnnnnnnnnnnnnnnnnnnnnnnnnnnnnnnnnnnnnnnnnnnnnnnnnnnnnnnnnnnnnnnnnnnnnnnnnnnnnnnnnnnnnnnnnnnnnnnnnnnnnnnnnnnnnnnnnnnnnnnnnnnnnnnnnnnnnnnnnnnnnnnnnnnnnnnnnnnnnnnnnnnnnnnnnnnnnnnnnnnnnnnnnnnnnnnnnnnnnnnnnnnnnnnnnnnnnnnnnnnnnnnnnnnnnnnnnnnnnnnnnnnnnnnnnnnnnnnnnnnnnnnnnnnnnnnnnnnnnnnnnnnnnnnnnnnnnnnnnnnnnnnnnnnnnnnnnnnnnnnnnnnnnnnnnnnnnnnnnnnnnnnnnnnnnnnnnnnnnnnnnnnnnnnnnnnnnnnnnnnnnnnnnnnnnnnnnnnnnnnnnnnnnnnnnnnnnnnnnnnnnnnnnnnnnnnnnnnnnnnnnnnnnnnnnnnnnnnnnnnnnnnnnnnnnnnnnnnnnnnnnnnnnnnnnnnnnnnnnnnnnnnnnnnnnnnnnnnnnnnnnnnnnnnnnnnnnnnnnnnnnnnnnnnnnnnnnnnnnnnnnnnnnnnnnnnnnnnnnnnnncaggtactgctgtctagtggccctcaagcatgacctgccggctaatggggacatgtgtgtgtcagtgctgagtcgcctgtgcaaagtcatgccaaacatgtaccgtgttggggtcagcaannnnnncttaaagaacacctataccagctgctggagagtattagagggcatgtcctgaatctggcagccctca

SEQ ID NO: 34484 - DNA, 505 bp, Macaca Mulatta
cactgaggtgggccgtgtcaaggcaaggccgtctgaccacaggcatcatcctattaactagaatccatataaggaagaaaactcccagcagctcctaggagacttatgggagctgggggtctgtttgggttgggccgtgttaccccatcgagttcccacctgagcaggaggaggttgcacctggtcccgggggctcctgtggcctcgggcctcaggcctcggcctgtggactctgactctccttccctctccctctgcaggggaccctgccaccgccctcccacggggccttctccggccaccacttgccatttgtgggcttcacctacacctcgggcaggtgaggctagtcctcacacacctggtgggaggctcagggttgcctgacctagcacactgggcacgtagcccactggggccctgggaaggagggcagaagggctccccagtgcctgcacatggcaggtgctctagctctcatcctcggggtcctggtgaggccaca

SEQ ID NO: 34485 - DNA, 441 bp, Macaca Mulatta
cagctggtccagaagcgactcttggccttagaagaggaggaagatgcagaggcgcctccaagttacagtggagctcagttggactcaagtccttctgtttctgatgaggatgaagatggggatgggcggcttcgaccctcacctgggcttcaggtggctgggggcgccatttgccttggaaaggtttcttcttcaggaaaacgggcaagagaagtgcatggtgggcaggagcaaggcctagggagccccagagggatgcacagggatgggaacactctgccatcccccagcagctgggacctgcagccagagcctgcagctctccagggaactctgggacccttgggtatggagaggagagggtctgggaaggttataaaccaggtatcgcgacttcgagatggccatctaggaggtgcagggctgcctgggcgctgcctg

SEQ ID NO: 34486 - DNA, 1386 bp, Macaca Mulatta
  misc_feature (1)...(1386): n = A,T,C or G
cgccacagctgccaggtgttaagatggcggcgcggggccgcgcccgcgctcccacactctcctcccccagcctttttcgggctggtagcacgactcgcgtagccgtgcgcgggttgcctttcggcctgggcagtggtcctggctgccggtcgacgaccgccccgcgtcatgcggctcctcagctggtggcaagtactgctgtgggtgctggggcgtcccgtccgcggcgtggaggnnnnnnnnnnnnnnnnnnnnnnnnnnnnnnnnnnnnnnnnnnnnnnnnnnnnnnnnnnnnnnnnnnnnnnnnnnnnnnnnnnnnnnnnnnnnnnnnnnnnnnnnnnnnnnnnnnnnnnnnnnnnnnnnnnnnnnnnnnnnnnnnnnnnnnnnnnnnnnnnnnnnnnnnnnnnnnnnnnnnnnnnnnnnnnnnnnnnnnnnnnnnnnnnnnnnnnnnnnnnnnnnnnnnnnnnnnnnnnnnnnnnnnnnnnnnnnnnnnnnnnnnnnnnnnnnnnnnnnnnnnnnnnnnnnnnnnnnnnnnnnnnnnnnnnnnnnnnnnnnnnnnnnnnnnnnnnnnnnnnnnnnnnnnnnnnnnnnnnnnnnnnnnnnnnnnnnnnnnnnnnnnnnnnnnnnnnnnnnnnnnnnnnnnnnnnnnnnnnnnnnnnnnnnnnnnnnnnnnnnnnnnnnnnnnnnnnnnnnnnnnnnnnnnnnnnnnnnnnnnnnnnnnnnnnnnnnnnnnnnnnnnnnnnnnnnnnnnnnnnnnnnnnnnnnnnnnnnnnnnnnnnnnnnnnnnnnnnnnnnnnnnnnnnnnnnnnnnnnnnnnnnnnnnnnnnnnnnnnnnnnnnnnnnnnnnnnnnnnnnnnnnnnnnnnnnnnnnnnnnnnnnnnnnnnnnnnnnnnnnnnnnnnnnnnnnnnnnnnnnnnnnnnnnnnnnnnnnnnnnnnnnnnnnnnnnnnnnnnnnnnnnnnnnnnnnnnnnnnnnnnnnnnnnnnnnnnnnnnnnnnnnnnnnnnnnnnnnnnnncaggtatagaagccaagaagaatgtggtggttactcaagctgaccaaataggccctcttcccagcactttgataaaaagtgtggactggttgcttgtattttccttattctttttaattagttttattatgtatgctaccattcgaactgagagtattcggtggctaattccaggacaagagcaggaacatgtggagtagtgatagactgaaagaagttggaaagaggaacttcaatccttcgtttcagaaattagtgctacagtttcatacattttctccagtaacgtgttgacttgaaacttcagtcagattaaaagaatcatttgttgaaaaagctgaatgtataaaaaaattataaactggtgtttt

SEQ ID NO: 34487 - DNA, 496 bp, Macaca Mulatta
cacatctcagtagagtcatcttcctttcctccctgacaggacacagctatttcatcataagaacggggcccgcaaaagtgccaagaagatcctcattgtcatcacagatgggcagaaatacaaagaccccctggaatacagagatgtcatcccccaggcagagaaggctggcatcattcgctatgctatcggggtgcgcctcttcttcacccctgccccaggctcagcctgcacctcctgcaggtgcagtgctgctgggctcctcctcctcagctgcctctctgctgcaggtgggacgcgctttccaggaacccaccgccaggcaggagctgaacaccatcggctcagcgcctccacaggaccacgtgttcaaggtggacaactttgcagcccttagcagcatccagaagcagctgcaggagaagatctatgcagttgagggtaaacgggagcaagagggctcctgggagccaaggggtccccacccaattgtcct

SEQ ID NO: 34488 - DNA, 698 bp, Macaca Mulatta
cttagcacaaagaagctgcatctctgtgagctccacccatcctgattattcatcttaagcgatttcaatttgtaaatggtcggtggataaaatcacagaaaattgtcaaatttcctcgggaaagttttgatccaagtgcttttttggtaccaagagacccggctctctgtcggcgtaaaccactcacaccccagggggatgagctttccgagccccgggttctggcaagagaggtgaagaaagtggatgcgcagagttcggctggggaagaggacgtgctcctgagcaaaagcccatcctcactcagcgctaacatcatcagcagcccgaaaggttctccttcttcatcaagaaaaagtggagccagctgtccctccagcaaaaacagcagccctagtagcagcccacggactttggggaggagcaaagggaggctccggctgccccagattggcagcaaaaataaactgtcaagtagtaaggagaacttggatgccagcagagataatggggctgggcagatctgtgagctggctgacgccttgagccgagggcatatgctggggggcagccagccagagttggtcactcctcaggaccacgaggtagctttggccaatggattcctttatgagcatgaagcatgtggcaatggctacagcaatggtcagcttggaaaacacagtgaagaagacagg

SEQ ID NO: 34489 - DNA, 757 bp, Macaca Mulatta
tcatgctgctgtccagtgagcagccaggccagagcttcgggccgcagtgtgttctctgctcgatgcggcagccgtgactcagggggaatgggggctgcacgtctgcccctgacacacctctgcctgctgtgctttacaggtcttttatcagaaatcaccgatccagagagcttcctgaaggacctgttgaactcagtcccttgaccaccacacagcagctgcagtggcgaagacgaagctggcttgccttccaccctctgttctccctccttgtgcgttgagttccctccgcggatgctgcattgttaccccgccctcccctctctcatttttcttggtgtggcttggggtttttaggcttcctgttttatctcgtgtgtgtggtgcactagctatgaagttgtctgtaacccaagccatcaaagggcctgtacatacctaggagccatgagttgtcccggccaacttcatacttgagtttgcacatcttgagaaataaacaaatgacttaatacacattgaaaaagaaggtgtagcctgctgctgcagctcctcctcagtggtgcaggccaaatggtttcccttgaatgcacagccgtttccggcgtcagcccgggaagactcgtgtcagaatcgctgtctccaggcctgttgtcagtgctaagtggaacctgtctattcttggccagcaagttgggacaccacatttgatcgctctgatttttcccaaaacaaagcccatgccttgctcttaatt

SEQ ID NO: 34490 - DNA, 282 bp, Macaca Mulatta
ttttgcccagagcacccatgaatgccatgaaacaaatttgagaaaacgctagaacagatgttgttttatctgttgtatttgttgtaggaggttatacatacaacttgggcgtggaggaggcagagaggtgaggcactgaactagtaacacatggtgtttcctccacatccagaattccaaatggcatcagctattcaccaagtggccccatgggcaccacgtaacctttgaggaggggccactgaagggatcatcccacaaggaaccccttcatagagaact

SEQ ID NO: 34491 - DNA, 1293 bp, Macaca Mulatta
  misc_feature (1)...(1293): n = A,T,C or G
aggtttgcctgtctgtcctgagctgggaaggaacacatacnnnnnnnnnnnnnnnnnnnnnnnnnnnnnnnnnnnnnnnnnnnnnnnnnnnnnnnnnnnnnnnnnnnnnnnnnnnnnnnnnnnnnnnnnnnnnnnnnnnnnnnnnnnnnnnnnnnnnnnnnnnnnnnnnnnnnnnnnnnnnnnnnnnnnnnnnnnnnnnnnnnnnnnnnnnnnnnnnnnnnnnnnnnnnnnnnnnnnnnnnnnnnnnnnnnnnnnnnnnnnnnnnnnnnnnnnnnnnnnnnnnnnnnnnnnnnnnnnnnnnnnnnnnnnnnnnnnnnnnnnnnnnnnnnnnnnnnnnnnnnnnnnnnnnnnnnnnnnnnnnnnnnnnnnnnnnnnnnnnnnnnnnnnnnnnnnnnnnnnnnnnnnnnnnnnnnnnnnnnnnnnnnnnnnnnnnnnnnnnnnnnnnnnnnnnnnnnnnnnnnnnnnnnnnnnnnnnnnnnnnnnnnnnnnnnnnnnnnnnnnnnnnnnnnnnnnnnnnnnnnnnnnnnnnnnnnnnnnnnnnnnnnnnnnnnnnnnnnnnnnnnnnnnnnnnnnnnnnnnnnnnnnnnnnnnnnnnnnnnnnnnnnnnnnnnnnnnnnnnnnnnnnnnnnnnnnnnnnnnnnnnnnnnnnnnnnnnnnnnnnnnnnnnnnnnnnnnnnnnnnnnnnnnnnnnnnnnnnnnnnnnnnnnnnnnnnnnnnnnnnnnnnnnnnnnnnnnnnnnnnnnnnnnnnnnnnnnnnnnnnnnnnnnnnnnnnnnnnnnnnnnnnnnnnnnnnnnnnnnnnnnnnnnnnnnnnnnnnnnnnnnnnnnnnnnnnnnnnnnnnnnnnnnnnnnnnnnnnnnnnnnnnnnnnnnnnnnnnnnnnnnnnnnnnnnnnnnnnnnnnnnnnnnnnnnnnnnnnnnnnnnnnnnnnnnnnnnnnnnnnnnnnnnnnnnnnnnnnnnnnnnnnnnnnnnnnnnnnnnngcagcccactcttatgtcgatttgacctgatcctgattttgcttgataccaagaatgaagactgggatcgtatcatttcctcctttatcttggaaaataaaggtnnnaggttacccaagcaaatcagagaagctctggagcatggaaaagatgaaaacctatttctgcctcataaggaatctgcagcccacactgtctgatgtgggcaatcaagttcttcttcggtactaccagatgcaaaggcagagtgattcccggaacgctgcccggaccaccattcgcctgttggaaagcnttgatacgattagcagaa

SEQ ID NO: 34492 - DNA, 301 bp, Macaca Mulatta
aaaccatacaaatgtaaggtttgtgacaaggctttccggagtgattcatgcattacagaacatcagagagttcatactggagagaaaccttacacatgtaatgactgtggcaaggtttttagtacaaaagcaaaccttgcatgtcatcataaacttcatactgcagagaaaccttacaaatgtgaagaatgtgagaaagttttcagtcgcaaatcacacctggaaagacataggaggattcatactggagagaaaccatacaaatgtaaggattgtgacaaggctttccggagggattcac

SEQ ID NO: 34493 - DNA, 613 bp, Macaca Mulatta
ggggggctgtttcctgatatcctgaacaagggaagcccagtagaggctggaactggacctctccagcctcctcaccagcaccgtgcccatctcaactggacttcccgccctccttctccaccttctagtgcccgtggcctgggattcaaagccaccgttccccaggtccctgggctgggccctgacagggagccgccaccctccccatgctaacaaggaagcccagtttcgtgttcagtttcttttgtagaggaagcaagggctggggtggggacagctgtcaatcacaagcccttaaataaagcagccagcgcacatcccttgctgtccgtgatgtcttgggttctgtgtctgcctcgtcaccagaagaaggagaggggacctgaggttccagcgtttgggaggtggcctggtggcgcatgtgaccagcccttcacaccgcccagcattttattcagtcagtaagcattcagggtggcggagcaggcaggcatctggccaggtgcttacagcagtcacattaggagatggggtaggtgagacagaacaggtggtcacaggaggcttctgggaggggcaggctgaggcggtgacattgtagggccacctctag

SEQ ID NO: 34494 - DNA, 1831 bp, Macaca Mulatta
  misc_feature (1)...(1831): n = A,T,C or G
cagacaatggagcttgctcggaatccagccatgatgcaagaaatgatgcggaaccaggatcgggccctgagcaaccttgagagcatccctggaggatataatgccctccgccgcatgtacacggacatccaggagcccatgttcagtgctgcccgggaacannnnnnnnnnnnnnnnnnnnnnnnnnnnnnnnnnnnnnnnnnnntcatcctcccagcctctccgtactgagaatcgagnnnnnnnnnnnnnnnnnnnnnnnnnnnnnnnnnnnnnnnnnnnnnnnnnnnnnnnnnnnnnnnnnnnnnnnnnnnnnnnnnnnnnnnnnnnnnnnnnnnnnnnnnnnnnnnnnnnnnnnnnnnnnnnnnnnnnnnnnnnnnnnnnnagggatgttcaatagcccagaaatgcaagccctcctccagcagatctctgagaacccccagctgatgcagaatgtgatctcagcaccctacatgcgcagcatgatgcagacgcttgcccagaaccccgactttgctgctcannagatgatggtgaatgtgccgctcttcgcggggaatccccaactgcaggagcagctccgcctgcagctcccagtcttcctgcagcagncagatgcagaacccagagtcactctccatccttaccaatccccgagccatgcagnnnnnnnnnnnnnnnnnnnnnnnnnnnnnnnnnnnnnnnnnnnnnnnnnnnnnnnnnnnnnnnnnnnnnnnnnnnnnnnnnnnnnnnnnnnnnnnnnnnnnnnnnnnnnnnnnnnnnnnnnnnnnnnnnnnnnnnnnnnnnnnnnnnnnnnnnnnnnnnnnnnnnnnnnnnnnnnnnnnnnnnnnnnnnnnnnnnnnnnnnnnnnnnnnnnnnnnnnnnnnnnnnnnnnnnnnnnnnnnnnnnnnnnnnaggtgcagactccagaagtgagatttcagcagcagctggagcagctcaactccatgggcttcatcaatcgtgaggccaacctgcaggccctgattgccacaggaggggacatcaacgcagctatcgagagactgctgggctcccagctctcctaatccctcggcccatgcctcctgcctctcccctccctcgatgtcagcgtttggttcttctgtcagcccttaccctctacagcttgtcatcccttccgtcttctccctcatcctctccaaacagcagggtgactttagaggcatgggctccaaccccttagctctgtctgagaattatggttttactgctacatctctaacagaatcttctctcctggtctccttgagcagtgctacttaaatagttttcacagtttcattgattgactctacctccttgccccacaccaccttttgcaatctttaaactttcagtggctgtgcagagtcgaaggaggaaccagctgtctggtttactggaacatagtcttccatctataccactagggttttgtcttatgtttacttttggtaactctcttccttctttttctccctactccccacccctagcccaaccaatgctagaatttcttgctctgaaggaggagcaggtgaaacacgcggtagttttcctcctcggcccctattctggtcacttcattcagcactttttcgtgggcactgttgggacttccagggtaaggaggaagacgcttgttctctctgtctgaagagggagatgagacagccctctggacaggaattaacaaaccctggaccagcccagtggaaactggtgtgaaagaggagggaatgagattattcggaggaagggaataggggagacagcctgagtaaaaggcttggaagttggaatt

SEQ ID NO: 34495 - DNA, 898 bp, Macaca Mulatta
aagaccttttgtgatttcattatcttgcctatgcagaagaaaaatcgttgaggaaaattgtcattagccagtttaactgattcaaactcttgtttatttcatactaaactagtgaataagtgaaataaaggaaactcgtcattaatctaaagacagagttcaaaggaatagggccaaatatattctcaatatttggaactaatgtttttaaggtttttagaaaaatcaggtcatttaagaaatcgttttgtagtttctgatttatagaggcttcaagttttccatcttcactgtatgttgctgaaagtgaggatgaggatacacagttgatatttttagaaacagtaattttacttttaaggaaattggctagctctttgagctagagagctgtaggaagctcaacattctttgtagagaacgttgcttttgttggattgtacaagtataaaaacattgcttttgttgaattgtataggtgtaaagggaataactgtatgcaggtttgaaaaggaaatgtgctttaggcacgagtcataagatgccattgtacttgtaggcattttattttccattagaaatgaacatcagctcttctcttctgagtggtaacacatagccccaaagcacgagattattttttcattgggtttttattgctgttgtttagttttggtttgttaacgccaacccagtttgtctgtggaacactgactctgctctctaatgagaacaaagttagaaatctgctgataacctaaaataatttagaaatgaattaaaaatgtgaagtcaggggttaaagtgatgatgataaaatagcatgcaagaaacaagctccttccatcagacttggctactgttttcttctagtatgatttggtttggaagagcctct

SEQ ID NO: 34496 - DNA, 733 bp, Macaca Mulatta
ggggggaggcgggggggacgcgcgggaggaaagatggaagactaccaggctgcggaggagactgcttttgttgttgatgaagtgagcaacattgtaaaagaggctatagaaagcgcaattggtggtaacgcttatcaacacagcaaagtgaaccagtggaccacaaatgtagtagaacaaactttaagccaactcactaagctgggaaaaccgtttaaatacatcgtgacctgtgtaatcatgcagaagaatggggctggattacacacggcaagttcctgcttctgggacagctctactgacgggagctgcactgtgcgatgggagaataagaccatgtactgcatcgtcagcgccttcggactgtctatctgacttgcagttcagcctatggccctttctccttttgtctctagttcatcctctaaccaccagccatgaattcagtgaactctctccttgttctctttaagtgttttgtggcattctcacaatgtagaggaaaaaaccaaatgaccacactgtgatgtgaacggcaccgaagtctgatgagtatccctgtaggtcacctgcagcctgcgttgccacgtgtcttaactctgaatatttcttttcaaaggtgctaaaatctgaaatctgctagtgtgaaacttgctctactctctgaaatgattcatagacactaatttttcatactttatacttttggttagaataaattaatccaattctt

SEQ ID NO: 34497 - DNA, 8022 bp, Macaca Mulatta
  misc_feature (1)...(8022): n = A,T,C or G
acatgagaccgacaacgagtttgtctgcggagaaaataattgggcagctgagtcagaaattcatattcaaagaattccagctgcatctccacctctaaacggcagctttgacattcaagcttatggacatattctcaaaggnnnnnnnnnnnnnnnnnnnnnnnnnnnnnnnnnnnnnnnnnnnnnnnnnnnnnnnnnnnnnnnnnnnnnnnnnnnnnnnnnnnnnnnnnnnnnnnnnnnnnnnnnnnnnnnnnnnnnnnnnnnnnnnnnnnnnnnnnnnnnnnnnnnnnnnnnnnnnnnnnnnnnnnnnnnnnnnnnnnnnnnnnnnnnnnnnnnnnnnnnnnnnnnnnnnnnnnnnnnnnnnnnnnnnnnnnnnnnnnnnnnnnnnnnnnnnnnnnnnnnnnnnnnnnnnnnnnnnnnnnnnnnnnnnnnnnnnnnnnnnnnnnnnnnnnnnnnnnnnnnnnnnnnnnnnnnnnnnnnnnnnnnnnnnnnnnnnnnnnnnnnnnnnnnnnnnnnnnnnnnnnnnnnnnnnnnnnnnnnnnnnnnnnnnnnnnnnnnnnnnnnnnnnnnnnnnnnnnnnnnnnnnnnnnnnnnnnnnnnnnnnnnnnnnnnnnnnnnnnnnnnnnnnnnnnnnnnnnnnnnnnnnnnnnnnnnnnnnnnnnnnnnnnnnnnnnnnnnnnnnnnnnnnnnnnnnnnnnnnnnnnnnnnnnnnnnnnnnnnnnnnnnnnnnnnnnnnnnnnnnnnnnnnnnnnnnnnnnnnnnnnnnnnnnnnnnnnnnnnnnnnnnnnnnnnnnnnnnnnnnnnnnnnnnnnnnnnnnnnnnnnnnnnnnnnnnnnnnnnnnnnnnnnnnnnnnnnnnnnnnnnnnnnnnnnnnnnnnnnnnnnnnnnnnnnnnnnnnnnnnnnnnnnnnnnnnnnnnnnnnaaactgagggtatagttgatatttcagttactaccaatggatttcaagtcacagcaggggatgcttttagttacaattgtttacagacgccaattataactgattttagtccaaaagtaggaacaatactaggnnnnnnnnnnnnnnnnnnnnnnnnnnnnnnnnnnnnnnnnnnnnnnnnnnnnnnnnnnnnnnnnnnnnnnnnnnnnnnnnnnnnnnnnnnnnnnnnnnnnnnnnnnnnnnnnnnnnnnnnnnnnnnnnnnnnnnnnnnnnnnnnnnnnnnnnnnnnnnnnnnnnnnnnnnnnnnnnnnnnnnnnnnnnnnnnnnnnnnnnnnnnnnnnnnnnnnnnnnnnnnnnnnnnnnnnnnnnnnnnnnnnnnnnnnnnnnnnnnnnnnnnnnnnnnnnnnnnnnnnnnnnnnnnnnnnnnnnnnnnnnnnnnnnnnnnnnnnnnnnnnnnnnnnnnnnnnnnnnnnnnnnnnnnnnnnnnnnnnnnnnnnnnnnnnnnnnnnnnnnnnnnnnnnnnnnnnnnnnnnnnnnnnnnnnnnnnnnnnnnnnnnnnnnnnnnnnnnnnnnnnnnnnnnnnnnnnnnnnnnnnnnnnnnnnnnnnnnnnnnnnnnnnnnnnnnnnnnnnnnnnnnnnnnnnnnnnnnnnnnnnnnnnnnnnnnnnnnnnnnnnnnnnnnnnnnnnnnnnnnnnnnnnnnnnnnnnnnnnnnnnnnnnnnnnnnnnnnnnnnnnnnnnnnnnnnnnnnnnnnnnnnnnnnnnnnnnnnnnnnnnnnnnnnnnnnnnnnnnnnnnnnnnnnnnnnnnnnnnnnnnnnnnnnnnnnnnnnnnnnnnnnnnnnnnnnnnnnnnnnnnnnnnnnnnnnnnnnnnnnnnnnnnnnnnnnnnnnnnnnnnnnnnnnnnnnnnnnnnnnnnnnnnnnnnnnnnnnnnnnnnnnnnnnnnnnnnnnnnnnnnnnnnnnnnnnnnnnnnnnnnnnnnnnnnnnnnnnnnnnnnnnnnnnnnnnnnnnnnnnnnnnnnnnnnnnnnnnnnnnnnnnnnnnnnnnnnnnnnnnnnnnnnnnnnnnnnnnnnnnnnnnnnnnnnnnnnnnnnnnnnnnnnnnnnnnnnnnnnnnnnnnnnnnnnnnnnnnnnnnnnnnnnnnnnnnnnnnnnnnnnnnnnnnnnnnnnnnnnnnnnnnnnnnnnnnnnnnnnnnnnnnnnnnnnnnnnnnnnnnnnnnnnnnnnnnnnnnnnnnnnnnnnnnnnnnnnnnnnnnnnnnnnnnnnnnnnnnnnnnnnnnnnnnnnnnnnnnnnnnnnnnnnnnnnnnnnnnnnnnnnnnnnnnnnnnnnnnnnnnnnnnnnnnnnnnnnnnnnnnnnnnnnnnnnnnnnnnnnnnnnnnnnnnnnnnnnnnnnnnnnnnnnnnnnnnnnnnnnnnnnnnnnnnnnnnnnnnnnnnnnnnnnnnnnnnnnnnnnnnnnnnnnnnnnnnnnnnnnnnnnnnnnnnnnnnnnnngttctatcagtggattatacatccattgaatgtgaaacatcccctgctgcccaacagcttgtggatgtagatcttctaatacatggagtgcctgcccagtgccagggaaactgcaccttttcatatttagaaagcatcactccttatataacaggagtcttcccaaactctgtcatagggtctgtaaaagttcttattgaaggagaaggtttggggactgttttggaggacattgctgttttcattggaaatcaacagttcagagcaatagaggttaatgaaaacaacatcactgctcttgtgactcctctcccagttggacatcattctcttagtgttgtggtgggaagtaaaggcttggctctgggaaacctgactgtcagcagccccccagtagcatctctatcaccaacttctggaagcattggtggtggaactacattggtgatcacaggaaatggcttctatccaggcaacactacagtcactattggggatgacccttgtcaaattatttccatcaaccccaatgaagtcaactgccgcactcccgctgggaccactggaatggtcggtgttaaaatctttgttaatacaattgcttatccacctttgctttttacatatgccctggaggatactccatttctcagaggattatcccaagcagaggtnnnnnnnnnnnnnnnnnnnnnnnnnnnnnnnnnnnnnnnnnnnnnnnnnnnnnnnnnnnnnnnnnnnnnnnnnnnnnnnnnnnnnnnnnnnnnnnnnnnnnnnnnnnnnnnnnnnnnnnnnnnnnnnnnnnnnnnnnnnnnnnnnnnnnnnnnnnnnnnnnnnnnnnnnnnnnnnnnnnnnnnnnnnnnnnnnnnnnnnnnnnnnnnnnnnnnnnnnnnnnnnnnnnnnnnnnnnnnnnnnnnnnnnnnnnnnnnnnnnnnnnnnnnnnnnnnnnnnnnnnnnnnnnnnnnnnnnnnnnnnnnnnnnnnnnnnnnnnnnnnnnnnnnnnnnnnnnnnnnnnnnnnnnnnnnnnnnnnnnnnnnnnnnnnnnnnnnnnnnnnnnnnnnnnnnnnnnnnnnnnnnnnnnnnnnnnnnnnnnnnnnnnnnnnnnnnnnnnnnnnnnnnnnnnnnnnnnnnnnnnnnnnnnnnnnnnnnnnnnnnnnnnnnnnnnnnnnnnnnnnnnnnnnnnnnnnnnnnnnnnnnnnnnnnnnnnnnnnnnnnnnnnnnnnnnnnnnnnnnnnnnnnnnnnnnnnnnnnnnnnnnnnnnnnnnnnnnnnnnnnnnnnnnnnnnnnnnnnnnnnnnnnnnnnnnnnnnnnnnnnnnnnnnnnnnnnnnnnnnnnnnnnnnnnnnnnnnnnnnnnnnnnnnnnnnnnnnnnnnnnnnnnnnnnnnnnnnnnnnnnnnnnnnnnnnnnnnnnnnnnnnnnnnnnnnnnnnnnnnnnnnnnnnnnnnnnnnnnnnnnnnnnnnnnnnnnnnnnnnnnnnnnnnnnnnnnnnnnnnnnnnnnnnnnnnnnnnnnnnnnnnnnnnnnnnnnnnnnnnnnnnnnnnnnnnnnnnnnnnnnnnnnnnnnnnnnnnnnnnnnnnnnnnnnnnnnnnnnnnnnnnnnnnnnnnnnnnnnnnnnnnnnnnnnnnnnnnnnnnnnnnnnnnnnnnnnnnnnnnnnnnnnnnnnnnnnnnnnnnnnnnnnnnnnnnnnnnnnnnnnnnnnnnnnnnnnnnnnnnnnnnnnnnnnnnnnnnnnnnnnnnnnnnnnnnnnnnnnnnnnnnnnnnnnnnnnnnnnnnnnnnnnnnnnnnnnnnnnnnnnnnnnnnnnnnnnnnnnnnnnnnnnnnnnnnnnnnnnnnnnnnnnnnnnnnnnnnnnnnnnnnnnnnnnnnnnnnnnnnnnnnnnnnnnnnnnnnnnnnnnnnnnnnnnnnnnnnnnnnnnnnnnnnnnnnnnnnnnnnnnnnnnnnnnnnnnnnnnnnnnnnnnnnnnnnnnnnnnnnnnnnnnnnnnnnnnnnnnnnnnnnnnnnnnnnnnnnnnnnnnnnnnnnnnnnnnnnnnnnnnnnnnnnnnnnnnnnnnnnnnnnnnnnnnnnnnnnnnnnnnnnnnnnnnnnnnnnnnnnnnnnnnnnnnnnnnnnnnnnnnnnnnnnnnnnnnnnnnnnnnnnnnnnnnnnnnnnnnnnnnnnnnnnnnnnnnnnnnnnnnnnnnnnnnnnnnnnnnnnnnnnnnnnnnnnnnnnnnnnnnnnnnnnnnnnnnnnnnnnnnnnnnnnnnnnnnnnnnnnnnnnnnnnnnnnnnnnnnnnnnnnnnnnnnnnnnnnnnnnnnnnnnnnnnnnnnnnnnnnnnnnnnnnnnnnnnnnnnnnnnnnnnnnnnnnnnnnnnnnnnnnnnnnnnnnnnnnnnnnnnnnnnnnnnnnnnnnnnnnnnnnnnnnnnnnnnnnnnnnnnnnnnnnnnnnnnnnnnnnnnnnnnnnnnnnnnnnnnnnnnnnnnnnnnnnnnnnnnnnnnnnnnnnnnnnnnnnnnnnnnnnnnnnnnnnnnnnnnnnnnnnnnnnnnnnnnnnnnnnnnnnnnnnnnnnnnnnnnnnnnnnnnnnnnnnnnnnnnnnnnnnnnnnnnnnnnnnnnnnnnnnnnnnnnnnnnnnnnnnnnnnnnnnnnnnnnnnnnnnnnnnnnnnnnnnnnnnnnnnnnnnnnnnnnnnnnnnnnnnnnnnnnnnnnnnnnnnnnnnnnnnnnnnnnnnnnnnnnnnnnnnnnnnnnnnnnnnnnnnnnnnnnnnnnnnnnnnnnnnnnnnnnnnnnnnnnnnnnnnnnnnnnnnnnnnnnnnnnnnnnnnnnnnnnnnnnnnnnnnnnnnnnnnnnnnnnnnnnnnnnnnnnnnnnnnnnnnnnnnnnnnnnnnnnnnnnnnnnnnnnnnnnnnnnnnnnnnnnnnnnnnnnnnnnnnnnnnnnnnnnnnnnnnnnnnnnnnnnnnnnnnnnnnnnnnnnnnnnnnnnnnnnnnnnnnnnnnnnnnnnnnnnnnnnnnnnnnnnnnnnnnnnnnnnnnnnnnnnnnnnnnnnnnnnnnnnnnnnnnnnnnnnnnnnnnnnnnnnnnnnnnnnnnnnnnnnnnnnnnnnnnnnnnnnnnnnnnnnnnnnnnnnnnnnnnnnnnnnnnnnnnnnnnnnnnnnnnnnnnnnnnnnnnnnnnnnnnnnnnnnnnnnnnnnnnnnnnnnnnnnnnnnnnnnnnnnnnnnnnnnnnnnnnnnnnnnnnnnnnnnnnnnnnnnnnnnnnnnnnnnnnnnnnnnnnnnnnnnnnnnnnnnnnnnnnnnnnnnnnnnnnnnnnnnnnnnnnnnnnnnnnnnnnnnnnnnnnnnnnnnnnnnnnnnnnnnnnnnnnnnnnnnnnnnnnnnnnnnnnnnnnnnnnnnnnnnnnnnnnnnnnnnnnnnnnnnnnnnnnnnnnnnnnnnnnnnnnnnnnnnnnnnnnnnnnnnnnnnnnnnnnnnnnnnnnnnnnnnnnnnnnnnnnnnnnnnnnnnnnnnnnnnnnnnnnnnnnnnnnnnnnnnnnnncaagcattattccatttcagaagaaacgactgactcatatgtctgggtggatggctctgattccaaatgcaaaacacattaactggtattttaaaggtgtggatcacataaccaacatttcatatacatcaacattttatggatttaaggnaggaagaagactatgtctttatatcacataacttcactcaaaatcctgatatgtttaatattattgatatgaggaatnnnnnnnnnnnnnnnnnnnnnnnnnnnnnnnnnnnnnnnnnnnnnnnnnnnnnnnnnnnnnnnnnnnnnnnnnnnnnnnnnnnngtgtcaggaagaaatgaccttcatcagagtcagcccatttctgagaacctggaccctgatgtgaaagacgttgttattaatttccaagcttactgttgtattctccaggattgctttcctgtacatcccccatcaagaaaaccaattcccaagaagcgaccagccacgtatannnnnnnnnnnnnnnnnnnnnnnnnnnnnnnnnnnnnnnnnnnnnnnnnnnnnnnnnnnnnnnnnnnnnnnnnnnnnnnnnnnnnnnnnnnnnnnnnnnnnnnnnnnnnnnnnnnnnnnnnnnnnnnnnnnnnnnnnnnnnnnnnnnnnnnnnnnnnnnnnnnnnnnnnnnnnnnnnnnnnnnnnnnnnnnnnnnnnnnnnnnnnnnnnnnnnnnnnnnnnnnnnnnnnnnnnnnnnnnnnnnnnnnnnnnnnnnnnnnnnnnnnnnnnnnnnnnnnnnnnnnnnnnnnnnnnnnnnnnnnnnnnnnnnnnnnnnnnnnnnnnnnnnnnnnnnnnnnnnnnnnnnnnnnnnnnnnnnnnnnnnnnnnnnnnnnnnnnnnnnnnnnnnnnnnnnnnnnnnnnnnnnnnnnnnnnnnnnnnnnnnnnnnnnnnnnnnnnnnnnnnnnnnnnnnnnnnnnnnnnnnnnnnnnnnnnnnnnnnnnnnnnnnnnnnnnnnnnnnnnnnnnnnnnnnnnnnnnnnnnnnnnnattccaccagacagaaacaagaagtatcgttaaaatcctgcatgatcataaaattctcattcttaatgatagcctttcctatactcactnnnnnnnnnnnnnnnnnnnnnnnnnnnnnnnnnnnnnnnnnnnnnnnnnnnnnnnnnnnnnnnnnnnnnnnnnnnnnnnnnnnnnnnnnnnnnnnnnnnnnnnnnnnnnnnnnnnnnnnnnnnnnnnnnnnnnnnnnnnnnnnnnnnnnnnnnnnnnnnnnnnnnnnnnnnnnnnnnnnnnnnnnnnnnnnnnnnnnnnnnnnnnnnnnnnnnnnnnnnnnnnnnnnnnnnnnnnnnnnnnnnnnnnnnnnnnnnnnnnnnnnnnnnnnnnnnnnnnnnnnnnnnnnnnnnnnnnnnnnnnnnnnnnnnnnnnnnnnnnnnnnnnnnnnnnnnnnnnnnnnnnnnnnnnnnnnnnnnnnnnnnnnnnnnnnnnnnnnnnnnnnnnnnnnnnnnnnnnnnnnnnnnnnnnnnnnnnnnnnnnnnnnnnnnnnnnnnnnnnnnnnnnnnnnnnnnnnnnnnnnnnnnnnnnnnnnnnnnnnnnnnnnnnnnnnnnnnnnnnnnnnnnnnnnnnnnnnnnnnnnnnnnnnnnnnnnnnnnnnnnnnnnnnnnnnnnnnnnnnnnnnnnnnnnnnnnnnnnnnnnnnnnnnnnnnnnnnnnnnnnnnnnnnnnnnnnnnnnnnnnnnnnnnnnnnnnnnnnnnnnnnnnnnnnnnnnnnnnnnnnnnnnnnnnnnnnnnnnnnnnnnnnnnnnnnnnnnnnnnnnnnnnnnnnnnnnnnnnnnnnnnnnnnnnnnnnnnnnnnnnnnnnnnnnnnnnnnnnnnnnnnnnnnnnnnnnnnnnnnnnnnnnnnnnnnnnnnnnnnnnnnnnnnnnnnnnnnnnnnnnnnnnnnnnnnnnnnnnnnnnnnnnnnnnnnnnnnnnnnnnnnnnnnnnnnnnnnnnnnnnnnnnnnnnnnnnagagctcattaattgttggaagtagacctgggtttaattgctctgatgtcctaactaatgatgatcccaatattgaactcactgctgctcatcggagtcctagatctccatcaggt

SEQ ID NO: 34498 - DNA, 2172 bp, Macaca Mulatta
  misc_feature (1)...(2172): n = A,T,C or G
cagggaataccaacagcatctttgccctggactacatcagcggagcactgaccnnnnnnnnnnnnnnnnnnnnnnnnnnnnnnnnnnnnnnnnnnnnnnnnnnnnnnnnnnnnnnnnnnnnnnnnnnnnnnnnnnnnnnnnnnnnnnnnnnnnnnnnnnnnnnnnnnnnnnnnnnnnnnnnnnnnnnnnnnnnnnnnnnnnnnnnnnnnnnnnnnnnnnnnnnnnnnnnnnnnnnnnnnnnnnnnnnnnnnnnnnnnnnnnnnnnnnnnnnnnnnnnnnnnnnnnnnnnnnnnnnnnnnnnnnnnnnnnnnnnnnnnnnnnnnnnnnnnnnnnnnnnnnnnnnnnnnnnnnnnnnnnnntgcagggcctgaacagcatgtttgaggtgtatctggtggggaacaactcccaccacttcatcatctccccgacctccgtccaagggaaggcggacattcgtattcgggtggccatcccactggactacgagaccgtggaccgctacgactnnnnnnnnnnnnnnnnnnnnnnnnnnnnnnnnnnnnnnnnnnnnnnnnnnnnnnnnnnnnnnnnnnnnnnnnnnnnnnnnnnnnnnnnnnnnnnnnnnnnnnnnnnnnnnnnnnnnnnnnnnnnnnnnnnnnnnnnnnnnnnnnnnnnnnnnnnnnnnnnnnnnnnnnnnnnnnnnnnnnnnnnnnnnnnnnnnnnnnnnnnnnnnnnnnnnnnnnnnnnnnnnnnnnnnnnnnnnnnnnnnnnnnnnnnnnnnnnnnnnnnnnnnnnnnnnnnnnnnnnnnnnnnnnnnnnnnnnnnnnnnnnnnnnnnnnnnnnnnnnnnnnnnnnnnnnnnnnnnnnnnnnnnnnnnnnnnnnnnnnnnnnnnnnnnnnnnnnnnnnnnnnnnnnnnnnnnnnnnnnnnnnnnnnnnnnnnnnnnnnnnnnnnnnnnnnnnnnnnnnnnnnnnnnnnnnnnnnnnnnnnnnnnnnnnnnnnnnnnnnnnnnnnnnnnnnnnnnnnnnnnnnnnnnnnnnnnnnnnnnnnnnnnnnnnnnnnnnnnnnnnnnnnnnnnnnnnnnnnnnnnnnnnnnnnnnnnnnnnnnnnnnnnnnnnnnnnnnnnnnnnnnnnnnnnnnnnnnnnnnnnnnnnnnnnnnnnnnnnnnnnnnnnnnnnnnnnnnnnnnnnnnnnnnnnnnnnnnnnnnnnnnnnnnnnnnnnnnnnnnnnnnnnnnnnnnnnnnnnnnnnnnnnnnnnnnnnnnnnnnnnnnnnnnnnnnnnnnnnnnnnnnnnnnnnnnnnnnnnnnnnnnnnnnnnnnnnnnnnnnnnnnnnnnnnnnnnnnnnnnnnnnnnnnnnnnnnnnnnnnnnnnnnnnnnnnnnnnnnnnnnnnnnnnnnnnnnnnnnnnnnnnnnnnnnnnnnnnnnnnnnnnnnnnnnnnnnnnnnnnnnnnnnnnnnnnnnnnnnnnnnnnnnnnnnnnnnnnnnnnnnnnnnnnnnnnnnnnnnnnnnnnnnnnnnnnnnnnnnnnnnnnnnnnnnnnnnnnnnnnnnnnnnnnnnnnnnnnnnnnnnnnnnnnnnnnnnnnnnnnnnnnnnnnnnnnnnnnnnnnnnnnnnnnnnnnnnnnnnnnnnnnnnnnnngtggtggctgtggacccagacctgggggagaatggcactctggtgtacagcatccagccacccaacaagttctacagcctcaacggcaccacaggcaagatccgcaccacccatgccatgctggaccgggagaaccctgacccccacgaggctgagctgatgcgcaaaatcgtcgtctctgtcactgactgtnnnnnnnnnnnnnnnnnnnnnnnnnnnnnnnnnnnnnnnnnnnnnnnnnnnnnnnnnnnnnnnnnnnnnnnnnnnnnnnnnnnnnnnnnnnnnnnnnnnnnnnnnnnnnnnnnnnnnnnnnnnnnnnnnnnnnnnnnnnnnnnnnnnnnnnnnnnnnnnnnnnnnnnnnnnnnnnnnnnnnnnnnnnnnnnnnnnnnnnnnnnnnnnnnnnnnnnnnnnnnnnnnnncatcaacagcagcagcggcgtggtggtcaccaccaccgagctggaccgagagcgcatcgccgagtaccagctgcgggtggtcgccagtgacgcaggcacgcccaccaagagctccaccagcacgctcaccatcc

SEQ ID NO: 34499 - DNA, 608 bp, Macaca Mulatta
atcatagccccaactcccatgttgttttgtgaagataaaagctgggatctttatttttttcttaagtctcacaagacatggggcatctccacaaatttaagttcctgtccatttggaaatttgtttctatgtgtacagtttgtcagagaaaaacataaaagtttttgtatgaatacagaatgtgatttacgcaagaattaacagaaaactagttgtggagtgcttgccttaaggaaacctttggtttccatcgcatcccatctgccgaggagtgcacggttatcgctgatgttcatgagcatagtaaccactaagtcatctaaattaatctcagctgtgaactttgtgtttctcaacaaattctgtcacaccatttttgtgatagagaaatacttgaagattaatgtagtttgtagtaggttcaaagttatactcagacatgctctgacagatggaaaactgaactctgaagagaaaatgcagtcttctggctgtccagcgagggagctcccccttggaagcatctcctaggaatcacagtgtagatttgaatcgccttgtcaggatataaggggccccttgatgttagtcagaaataacgtcacatg

SEQ ID NO: 34500 - DNA, 559 bp, Macaca Mulatta
caaatgtacaaatataggcaaagtaaaaaagccattaatgcctgcccacatcttactcaaaatcatagagttcatactaaataaaagcattaaaatctactctcagaagatcagaaaatatgtttttaaagtatagaagagtatttattttgaaaaagcattacaaatatgaaaaggattgtaatatctttacttgcatcacagatcttattgtacacattttgtactagagaaaaaccctcaggcagttgttaaaattgtgttgaacatcagggagtttatattgaagaaaaccctgcaagtgtaatgaatttggaaaaacattttttcaaaaactacaaattataaaccactgaggtgttcatctaaaatatatttttgtagatgcattaaatatgaatgatactcaatccaaaattaagtctatatgtatatcagggaacaattcacagtagaaatatctagggtgctcaaacattagacattacactaaatcagagtgctgagtagaaaataatacaaactaaaatttgtgtaaacattatttgtatataacttt

SEQ ID NO: 34501 - DNA, 9908 bp, Macaca Mulatta
  misc_feature (1)...(9908): n = A,T,C or G
gcccggctcgctcacgggtcgttgcggccggtgacatgtccatgagctgcggaggctgcggcccccannnnnnnnnnnnnnnnnnnnnnnnnnnnnnnnnnnnnnnnnnnnnnnnnnnnnnnnnnnnnnnnnnnnnnnnnnnnnnnnnnnnnnnnnnnnnnnnnnnnnnnnnnnnnnnnnnnnnnnnnnnnnnnnnnnnnnnnnnnnnnnnnnnnnnnnnnnnnnnnnnnnnnnnnnnnnnnnnnnnnnnnnnnnnnnnnnnnnnnnnnnnnnnnnnnnnnnnnnnnnnnnnnnnnnnnnnnnnnnnnnnnnnnnnnnnnnnnnnnnnnnnnnnnnnnnnnnnnnnnnnnnnnnnnnnnnnnnnnnnnnnnnnnnnnnnnnnnnnnnnnnnnnnnnnnnnnnnnnnnnnnnnnnnnnnnnnnnnnnnnnnnnnnnnnnnnnnnnnnnnnnnnnnnnnnnnnnnnnnnnnnnnnnnnnnnnnnnnnnnnnnnnnnnnnnnnnnnnnnnnnnnnnnnagagtcatccttctggaatgctttgtgtcatgagagtgtcacctacatcaccaaaacttaggattgattttatctttagcctcctaagtaaatatgctactggtataaggtacaccttggacacattcttgcatcagaagcaccaacttgagaccactgatgaagatgatgatgatactaaccagtctgtgtcatccatagaggatgactttgtcactgcttttgagcacttagaagaggaagagacttcaaagccgtataatgatgnggaatgaacattactgcgctaaggaaccagtgtgatgctgcttcccaaacagttactggtcatcatttagaaacccatgatttaaagattctcattagctctggacagcagaagtcattggctaaaccctcaacttcctcagtgaatgtgctgggacctaaagaactaccttctgtgaaaacttcagtcacaacatccatttcagagccttggacccaaaggagtttctataggtcatctaatgcttcagataaagatagtgatttacagaaaacattttgttcgtcttctcctgcctactcatctgaatcagaatgttcaagtccaagtcctgttattttcttggatgaagaaggatatcaaaaaagcttaaaagcaaaacttgagctgcctaaaattcctgtgatgaaagatgatatagaggattcagactcagaagtaagtgaattttttgatagttttgatcagtttgatgaactagaacaaactttagagacttacctgtttaataaagatcctgtcatagggaagtcatcacagaagaaagggcacaaacatggaaaatcatgtatgaatcctcaaaaattcaagtttgatcatccaggtcacccagctnnnnnnnnnnnnnnnnnnnnnnnnnnnnnnnnnnnnnnnnnnnnnnnnnnnnnnnnnnnnnnnnnnnnnnnnnnnnnnnnnnnnnnnnnnnnnnnnnnnnnnnnnnnnnnnnnnnnnnnnnnnnnnnnnnnnnnnnnnnnnnnnnnnnnnnnnnnnnnnnnnnnnnnnnnnnnnnnnnnnnnnnnnnnnnnnnnnnnnnnnnnnnnnnnnnnnnnnnnnnnnnnnnnnnnnnnnnnnnnnnnnnnnnnnnnnnnnnnnnnnnnnnnnnnnnnnnnnnnnnnnnnnnnnnnnnnnnnnnnnnnnnnnnnnnnnnnnnnnnnnnnnnnnnnnnnnnnnnnnnnnnnnnnnnnnnnnnnnnnnnnnnnnnnnnnnnnnnnnnnnnnnnnnnnnnnnnnnnnnnnnnnnnnnnnnnnnnnnnnnnnnnnnnnnnnnnnnnnnnnnnnnnnnnnnnnnnnnnnnnnnnnnnnnnnnnnnnnnnnnnnnnnnnnnnnnnnnnnnnnnnnnnnnnnnnnnnnnnnnnnnnnnnnnnnnnnnnnnnnnnnnnnnnnnnnnnnnnnnnnnnnnnnnnnnnnnnnnnnnnnnnnnnnnnnnnnnnnnnnnnnnnnnnnnnnnnnnnnnnnnnnnnnnnnnnnnnnnnnnnnnnnnnnnnnnnnnnnnnnnnnnnnnnnnnnnnnnnnnnnnnnnnnnnnnnnnnnnnnnnnnnnnnnnnnnnnnnnnnnnnnnnnnnnnnnnnnnnnnnnnnnnnnnnnnnnnnnnnnnnnnnnnnnnnnnnnnnnnnnnnnnnnnnnnnnnnnnnnnnnnnnnnnnnnnnnnnnnnnnnnnnnnnnnnnnnnnnnnnnnnnnnnnnnnnnnnnnnnnnnnnnnnnnnnnnnnnnnnnnnnnnnnnnnnnnnnnnnnnnnnnnnnnnnnnnnnnnnnnnnnnnnnnnnnnnnnnnnnnnnnnnnnnnnnnnnnnnnnnnnnnnnnnnnnnnnnnnnnnnnnnnnnnnnnnnnnnnnnnnnnnnnnnnnnnnnnnnnnnnnnnnnnnnnnnnnnnnnnnnnnnnnnnnnnnnnnnnnnnnnnnnnnnnnnnnnnnnnnnnnnnnnnnnnnnnnnnnnnnnnnnnnnnnnnnnnnnnnnnnnnnnnnnnnnnnnnnnnnnnnnnnnnnnnnnnnnnnnnnnnnnnnnnnnnnnnnnnnnnnnnnnnnnnnnnnnnnnnnnnnnnnnnnnnnnnnnnnnnnnnnnnnnnnnnnnnnnnnnnnnnnnnnnnnnnnnnnnnnnnnnnnnnnnnnnnnnnnnnnnnnnnnnnnnnnnnnnnnnnnnnnnnnnnnnnnnnnnnnnnnnnnnnnnnnnnnnnnnnnnnnnnnnnnnnnnnnnnnnnnnnnnnnnnnnnnnnnnnnnnnnnnnnnnnnnnnnnnnnnnnnnnnnnnnnnnnnnnnnnnnnnnnnnnnnnnnnnnnnnnnnnnnnnnnnnnnnnnnnnnnnnnnnnnnnnnnnnnnnnnnnnnnnnnnnnnnnnnnnnnnnnnnnnnnnnnnnnnnnnnnnnnnnnnnnnnnnnnnnnnnnnnnnnnnnnnnnnnnnnnnnnnnnnnnnnnnnnnnnnnnnnnnnnnnnnnnnnnnnnnnnnnnnnnnnnnnnnnnnnnnnnnnnnnnnnnnnnnnnnnnnnnnnnnnnnnnnnnnnnnnnnnnnnnnnnnnnnnnnnnnnnnnnnnnnnnnnnnnnnnnnnnnnnnnnnnnnnnnnnnnnnnnnnnnnnnnnnnnnnnnnnnnnnnnnnnnnnnnnnnnnnnnnnnnnnnnnnnnnnnnnnnnnnnnnnnnnnnnnnnnnnnnnnnnnnnnnnnnnnnnnnnnnnnnnnnnnnnnnnnnnnnnnnnnnnnnnnnnnnnnnnnnnnnnnnnnnnnnnnnnnnnnnnnnnnnnnnnnnnnnnnnnnnnnnnnnnnnnnnnnnnnnnnnnnnnnnnnnnnnnnnnnnnnnnnnnnnnnnnnnnnnnnnnnnnnnnnnnnnnnnnnnnnnnnnnnnnnnnnnnnnnnnnnnnnnnnnnnnnnnnnnnnnnnnnnnnnnnnnnnnnnnnnnnnnnnnnnnnnnnnnnnnnnnnnnnnnnnnnnnnnnnnnnnnnnnnnnnnnnnnnnnnnnnnnnnnnnnnnnnnnnnnnnnnnnnnnnnnnnnnnnnnnnnnnnnnnnnnnnnnnnnnnnnnnnnnnnnnnnnnnnnnnnnnnnnnnnnnnnnnnnnnnnnnnnnnnnnnnnnnnnnnnnnnnnnnnnnnnnnnnnnnnnnnnnnnnnnnnnnnnnnnnnnnnnnnnnnnnnnnnnnnnnnnnnnnnnnnnnnnnnnnnnnnnnnnnnnnnnnnnnnnnnnnnnnnnnnnnnnnnnnnnnnnnnnnnnnnnnnnnnnnnnnnnnnnnnnnnnnnnnnnnnnnnnnnnnnnnnnnnnnnnnnnnnnnnnnnnnnnnnnnnnnnnnnnnnnnnnnnnnnnnnnnnnnnnnnnnnnnnnnnnnnnnnnnnnnnnnnnnnnnnnnnnnnnnnnnnnnnnnnnnnnnnnnnnnnnnnnnnnnnnnnnnnnnnnnnnnnnnnnnnnnnnnnnnnnnnnnnnnnnnnnnnnnnnnnnnnnnnnnnnnnnnnnnnnnnnnnnnnnnnnnnnnnnnnnnnnnnnnnnnnnnnnnnnnnnnnnnnnnnnnnnnnnnnnnnnnnnnnnnnnnnnnnnnnnnnnnnnnnnnnnnnnnnnnnnnnnnnnnnnnnnnnnnnnnnnnnnnnnnnnnnnnnnnnnnnnnnnnnnnnnnnnnnnnnnnnnnnnnnnnnnnnnnnnnnnnnnnnnnnnnnnnnnnnnnnnnnnnnnnnnnnnnnnnnnnnnnnnnnnnnnnnnnnnnnnnnnnnnnnnnnnnnnnnnnnnnnnnnnnnnnnnnnnnnnnnnnnnnnnnnnnnnnnnnnnnnnnnnnnnnnnnnnnnnnnnnnnnnnnnnnnnnnnnnnnnnnnnnnnnnnnnnnnnnnnnnnnnnnnnnnnnnnnnnnnnnnnnnnnnnnnnnnnnnnnnnnnnnnnnnnnnnnnnnnnnnnnnnnnnnnnnnnnnnnnnnnnnnnnnnnnnnnnnnnnnnnnnnnnnnnnnnnnnnnnnnnnnnnnnnnnnnnnnnnnnnnnnnnnnnnnnnnnnnnnnnnnnnnnnnnnnnnnnnnnnnnnnnnnnnnnnnnnnnnnnnnnnnnnnnnnnnnnnnnnnnnnnnnnnnnnnnnnnnnnnnnnnnnnnnnnnnnnnnnnnnnnnnnnnnnnnnnnnnnnnnnnnnnnnnnnnnnnnnnnnnnnnnnnnnnnnnnnnnnnnnnnnnnnnnnnnnnnnnnnnnnnnnnnnnnnnnnnnnnnnnnnnnnnnnnnnnnnnnnnnnnnnnnnnnnnnnnnnnnnnnnnnnnnnnnnnnnnnnnnnnnnnnnnnnnnnnnnnnnnnnnnnnnnnnnnnnnnnnnnnnnnnnnnnnnnnnnnnnnnnnnnnnnnnnnnnnnnnnnnnnnnnnnnnnnnnnnnnnnnnnnnnnnnnnnnnnnnnnnnnnnnnnnnnnnnnnnnnnnnnnnnnnnnnnnnnnnnnnnnnnnnnnnnnnnnnnnnnnnnnnnnnnnnnnnnnnnnnnnnnnnnnnnnnnnnnnnnnnnnnnnnnnnnnnnnnnnnnnnnnnnnnnnnnnnnnnnnnnnnnnnnnnnnnnnnnnnnnnnnnnnnnnnnnnnnnnnnnnnnnnnnnnnnnnnnnnnnnnnnnnnnnnnnnnnnnnnnnnnnnnnnnnnnnnnnnnnnnnnnnnnnnnnnnnnnnnnnnnnnnnnnnnnnnnnnnnnnnnnnnnnnnnnnnnnnnnnnnnnnnnnnnnnnnnnnnnnnnnnnnnnnnnnnnnnnnnnnnnnnnnnnnnnnnnnnnnnnnnnnnnnnnnnnnnnnnnnnnnnnnnnnnnnnnnnnnnnnnnnnnnnnnnnnnnnnnnnnnnnnnnnnnnnnnnnnnnnnnnnnnnnnnnnnnnnnnnnnnnnnnnnnnnnctggtagctggtctcatttaagttttgaagatgaacaccaagatgaaagcagcagttttcatcatctnnnnnnngtaatggtaacagcagtagctggagcagtcttggtttagaaggagatttgtatgaggacaatttatcctttccaacatcagacagnnnnnnnnnnnnnnnnnnnnnnnnnnnnnnnnnnnnnnnnnnnnnnnnnnnnnnnnnnnnnnnnnnnnnnnnnnnnnnnnnnnnnnnnnnnnnnnnnnnnnnnnnnnnnnnnnnnnnnnnnnnnnnnnnnnnnnnnnnnnnnnnnnnnnnnnnnnnnnnnnnnnnnnnnnnnnnnnnnnnnnnnnnnnnnnnnnnnnnnnnnnnnnnnnnnnnnnnnnnnnnnnnnnnnnnnnnnnnnnnnnnnnnnnnnnnnnnnnnnnnnnnnnnnnnnnnnnnnnnnnnnnnnnnnnnnnnnnnnnnnnnnnnnnnnnnnnnnnnnnnnnnnnnnnnnnnnnnnnnnnnnnnnnnnnnnnnnnnnnnnnnnnnnnnnnnnnnnnnnnnnnnnnnnnnnnnnnnnnnnnnnnnnnnnnnnnnnnnnnnnnnnnnnnnnnnnnnnnnnnnnnnnnnnnnnnnnnnnnnnnnnnnnnnnnnnnnnnnnnnnnnnnnnnnnnnnnnnnnnnnnnnnnnnnnnnnnnnnnnnnnnnnnnnnnnnnnnnnnnnnnnnnnnnnnnnnnnnnnnnnnnnnnnnnnnnnnnnnnnnnnnnnnnnnnnnnnnnnnnnnnnnnnnnnnnnnnnnnnnnnnnnnnnnnnnnnnnnnnnnnnnnnnnnnnnnnnnnnnnnnnnnnnnnnnnnnnnnnnnnnnnnnnnnnnnnnnnnnnnnnnnnnnnnnnnnnnnnnnnnnnnnnnnnnnnnnnnnnnnnnnnnnnnnnnnnnnnnnnnnnnnnnnnnnnnnnnnnnnnnnnnnnnnnnnnnnnnnnnnnnnnnnnnnnnnnnnnnnnnnnnnnnnnnnnnnnnnnnnnnnnnnnnnnnnnnnnnnnnnnnnnnnnnnnnnnnnnnnnnnnnnnnnnnnnnnnnnnnnnnnnnnnnnnnnnnnnnnnnnnnnnnnnnnnnnnnnnnnnnnnnnnnnnnnnnnnnnnnnnnnnnnnnnnnnnnnnnnnnnnnnnnnnnnnnnnnnnnnnnnnnnnnnnnnnnnnnnnnnnnnnnnnnnnnnnnnnnnnnnnnnnnnnnnnnnnnnnnnnnnnnnnnnnnnnnnnnnnnnnnnnnnnnnnnnnnnnnnnnnnnnnnnnnnnnnnnnnnnnnnnnnnnnnnnnnnnnnnnnnnnnnnnnnnnnnnnnnnnnnnnnnnnnnnnnnnnnnnnnnnnnnnnnnnnnnnnnnnnnnnnnnnnnnnnnnnnnnnnnnnnnnnnnnnnnnnnnnnnnnnnnnnnnnnnnnnnnnnnnnnnnnnnnnnnnnnnnnnnnnnnnnnnnnnnnnnnnnnnnnnnnnnnnnnnnnnnnnnnnnnnnnnnnnnnnnnnnnnnnnnnnnnnnnnnnnnnnnnnnnnnnnnnnnnnnnnnnnnnnnnnnnnnnnnnnnnnnnnnnnnnnnnnnnnnnnnnnnnnnnnnnnnnnnnnnnnnnnnnnnnnnnnnnnnnnnnnnnnnnnnnnnnnnnnnnnnnnnnnnnnnnnnnnnnnnnnnnnnnnnnnnnnnnnnnnnnnnnnnnnnnnnnnnnnnnnnnnnnnnnnnnnnnnnnnnnnnnnnnnnnnnnnnnnnnnnnnnnnnnnnnnnnnnnnnnnnnnnnnnnnnnnnnnnnnnnnnnnnnnnnnnnnnnnnnnnnnnnnnnnnnnnnnnnnnnnnnnnnnnnnnnnnnnnnnnnnnnnnnnnnnnnnnnnnnnnnnnnnnnnnnnnnnnnnnnnnnnnnnnnnnnnnnnnnnnnnnnnnnnnnnnnnnnnnnnnnnnnnnnnnnnnnnnnnnnnnnnnnnnnnnnnnnnnnnnnnnnnnnnnnnnnnnnnnnnnnnnnnnnnnnnnnnnnnnnnnnnnnnnnnnnnnnnnnnnnnnnnnnnnnnnnnnnnnnnnnnnnnnnnnnnnnnnnnnnnnnnnnnnnnnnnnnnnnnnnnnnnnnnnnnnnnnnnnnnnnnnnnnnnnnnnnnnnnnnnnnnnnnnnnnnnnnnnnnnnnnnnnnnnnnnnnnnnnnnnnnnnnnnnnnnnnnnnnnnnnnnnnnnnnnnnnnnnnnnnnnnnnnnnnnnnnnnnnnnnnnnnnnnnnnnnnnnnnnnnnnnnnnnnnnnnnnnnnnnnnnnnnnnnnnnnnnnnnnnnnnnnnnnnnnnnnnnnnnnnnnnnnnnnnnnnnnnnnnnnnnnnnnnnnnnnnnnnnnnnnnnnnnnnnnnnnnnnnnnnnnnnnnnnnnnnntaaatgttaggactaggaatgtttgctcttgttaattatgaattaattggttattaagtttagaatgcatttttacaagtatgtatcaaattgtgtttagtaacttgagtgtatgcacaggtttgatcaacagcaaaatagagttctgaatttctttcaaagtgacaatacattattttgtaaaactttgtgtttgaaaatgtttacttctgtttatggtgtaatcattctgaggtgagacttttcttattcttatttcctttgcattttgctagagctgtgctgagttcagcatttgcttatttaaccactacaaaatgacagaccagttattaggtattagcatgtgtggtaataataatagtggaacttcacacttacatcaattcagtgcaggggcatagagtaaaatattaaatattggcagatgtgaaaagaagtgtgagttaaaaatattaaatattggcaagtgcgaaaagaagtgtcaaacttcctcatatagagaaaagaattttgagtttagagcagtatcttttaattaagtatagtctaaacttaactttctttaaaggcactttgtggtttttccaaagatattctagatctatttggttgctctatagtcaaacagctcttttgaagacaactctcttattttattacaaattggcttgatgtatttctactgtaacattgtaatattgctgtgctgtacattttggcccttatgaaatatatctttttcagaaccgttaaagtttttatgtacattgagctgaattctccgtttaccagtttcataaccttcaaatgatatgtggaaaaaacgtgaatgagacctctgatagggggttttcagaaccttgtcacaccaannnnnnnnnnnnnnnnnnnnnnnnnnnnnnnnnnnnnnnnnnnnnnnnnnnnnnnnnnnnnnnnnnnnnnnnnnnnnnnnnnnnnnnnnnnnnnnnnnnnnnnnnnnnnnnnnnnnnnnnnnnnnnnnnnnnnnnnnnnnnnnnnnnnnnnnnnnnnnnnnnnnnnnnnnnnnnnnnnnnnnnnnnnnnnnnnnnnnnnnnnnnnnnnnnnnnnnnnnnnnnnnnnnnnnnnnnnnnnnnnnnnnnnnnnnnnnnnnnnnnnnnnnnnnnnnnnnnnnnnnnnnnnnnnnnnnnnnnnnnnnnnnnnnnnnnnnnnnnnnnnnnnnnnnnnnnnnnnnnnnnnnnnnnnnnnnnnnnnnnnnnnnnnnnnnnnnnnnnnnnnnnnnnnnnnnnnnnnnnnnnnnnnnnnnnnnnnnnnnnnnnnnnnnnnnnnnnnnnnnnnnnnnnnnnnnnnnnnnnnnnnnnnnnnnnnnnnnnnnnnnnnnnnnnnnnnnnnnnnnnnnnnnnnnnnnnnnnnnnnnnnnnnnnnnnnnnnnnnnnnnnnnnnnnnnnnnnnnnnnnnnnnnnnnnnnnnnnnnnnnnnnnnnnnnnnnnnnnnnnnnnnnnnnnnnnnnnnnnnnnnnnnnnnnnnnnnnnnnnnnnnnnnnnnnnnnnnnnnnnnnnnnnnnnnnnnnnnnnnnnnnnnnnnnnnnnnnnnnnnnnnnnttttttctcattttcagcaaaactcctctaagcatttactcatttactgtattcctgctctgaagatgtggatacagaattagtcactcttgtcactttatttatttattggttttttttttaaccatctgtgtacattcctttcatagggtagagttgtagttctacaggttcttattttgtttttgttgtaatgtttgaatactatttaatatccggttttaatattgctggatttgctacctttggttacttgtgcagtgttaaaagtaatccactttcttgtttaatataccagatacatagcaaaagcagcttggaataattatagctgtttatttggctgtgctcagttactacattaagatcttgtactgtgtaacagtaactcttttttgctcttcagtaatttaatatgttcacttaacaaaacatgaactttgagatgcactaaaattttgttttagcagtggctcaaaaaatttcagaaattacttttgtaattatttgcaattaattgttcttttatcttacaattgtttaagcctgtgatctttcttctcccaactaagagttcttcaataaatttaagaaatacctgg

SEQ ID NO: 34502 - DNA, 487 bp, Macaca Mulatta
agtcagagcagggtcaggagacggggctgacggcacgggtggcggggatagacttttgggatgcggccgcgactctctgcttctctccagcgctcaatctgctagcattttcctctagtgcttccggatcctcttcattcttttcggctactcaaccgctccgcgtgctgctggagtatttctagctttaggagtgcagtagggcgcagacagctaactgagtaacattcatgaaatgaggctctttcctgtggcggcgtagtgtttggaattaaagtaattcagtggagtgtaacttagagaatatcgcaagtgacacactgactcctgcaccttttcctcagagcagtcccgccacaccaatagaaggctgtcgtgaatcccatcagatgtaaaatcattccttctgtttgctcttttaatttgcatcctctgcaggtagtccaaattcaacttcaaatatggtgtaggttttgctagagtccat

SEQ ID NO: 34503 - DNA, 170 bp, Macaca Mulatta
  misc_feature (1)...(170): n = A,T,C or G
aggatattttcaaacaagcaactgaagataggctcaccagtgccaaggaactgccctattttgaaggtgatttctggcccaatgtgtnnnnnnnnnnnnnnnnnnnnnnnnnnnnnnnnnnnnnnnnnnnnnnnnnnnnnnnnnnnctgcagccagtgaaaccactgagg

SEQ ID NO: 34504 - DNA, 223 bp, Macaca Mulatta
  misc_feature (1)...(223): n = A,T,C or G
accagtctgcttagttttaagtgaaattccttttatgtctacttggtttttacttgtgtcaacatttanntgctacctcttctattgaaggatgaactcctaatgccttctgttgtgacaacaatggcattttttatagcttgtgtaacttccttttcaatatttgaaaagacttctgaagaagaactgcagttgaaatccttttccaattctgtgaggaaat

SEQ ID NO: 34505 - DNA, 689 bp, Macaca Mulatta
gagcagaggcatctttacacagaatatagtggtagtattatttagggagagacagacgtgttgccatgttacttagtcatactagagagccagcccagtttgaataatgaaggtgcagacgtgttgtcttcttcgctgacgagctgtctgaacaaggagccaggaactgtcgggtcaccagctgtggagtgtgccggggggacaacctgccattggatgtagagaaaagtgccttagagttgacctgagccctcctgcccactcgccctctgcacgacaccactcagagtccacacggcacacacagcggagctgagaagcacgatggctctagtcagaagactctgctgtcggtccagatttgaagaggacacagggaacagcatgagcctttgtgacaaaactagaatttggaaatgaggactgtcctgggaaaagggtagacacaggcacctctctccacagcctgctaacataatgtgggcagaactgaaagatcactgcagtggaaactgttctggaagaggctgcagcatagcccatgcttagggactggatggtttttgcaagagcttttttcttttttaactaccatctcccaacttttaaagccagatacttgataaggattttagatcttaatgggttcgatggtagggaatatgcaaaggatacactgctaatactgt

SEQ ID NO: 34506 - DNA, 373 bp, Macaca Mulatta
tagcctctacatgctaggatcacaggaagactttgtaaggacagtttaagttctcctgcaaggtttaatttgttatcatgtaaatattccaaagcaggctgccttgtggttttggccagccttgtgctatgttgataagaatgatttactgcttaaaatcactttactttatccaatttttactgaactttttatgtaaaaaaataaaatcaattaaagaaattggcatgtgtgttccctaaaagttaattgagcatatttgtgtgtaatgatatcactggaaaaaggagagatagtggccttagatgtgtgaagtccaaggttaatccctgtgattgtattttattacaggacttgttcattctccacaggt

SEQ ID NO: 34507 - DNA, 779 bp, Macaca Mulatta
aagcagtgccagaggcgcacctccaatgtgggcgagagcaacctgtggcccctgaacaagttcctgccaggctcccggttgcttgtgtaaaactcaaagtttggatctgtgtttcctggggaaagtttttatcttttacatgtctgggggtgattgtgaaaccgcatatttttacctcagagaaaaaaatcattgtttaggtttggtgctttcattagattgcttgttaagcccttattgaattcactcctgcctttctcccacccccacttatttcctatactcgtctctgatggcagtgaaggtgtctaaatggtcctgagggctacaacctgctgcacaggggctgggaaggggacccagattcattatggctgctggggtactgctgacccagccctgctgctgcttcgtgaatttgtgtacaaaacttttttcgtctgtaatgaatagtggcaataataaatattttctaagtgcccgactgtgcacgacaattcataatggtacattttacccctctcccctcccccaaccctagacttttccagaggggtatatgtgtgaacatcacagagatgggtttgactatttacctaggaggccagaaaaatgctccctgagttttctcattgatgacatacctgggactttagtggggcctcccaagatatcattcccttgtccagctatttccatgcccttggaataactatgcactgtgaggtgagtctcccactacttcacttcattcaagagctgtaggtgctgttcaagag

SEQ ID NO: 34508 - DNA, 218 bp, Macaca Mulatta
gcaggcatgaagacccccaacgcacaggaagccgaatgtttacaaaccagggcagctgcaggacgggccactgggtctgcaaacatgacaaagaaaaaagtctcccaaaagaagcagagaggcagaccttcatcccagtcccgcaggaacatcgtgggatgcagaatttctcatggatggaaagaaggagatgagcccatcacccagtggaaaggaac

SEQ ID NO: 34509 - DNA, 122 bp, Macaca Mulatta
ctctctcttgcctgccttccctttccctttcttcctgactagccccaagtcccttcatttgcatctgctatgcaatagtccctctcctctcctccttcttccctcagatttagctgatcctt

SEQ ID NO: 34510 - DNA, 1453 bp, Macaca Mulatta
  misc_feature (1)...(1453): n = A,T,C or G
caaggtatcctgttaaaagtggctgaaaccatcaaaagttggatttttttttctcagtgcaataagaaagatgacttacttcacaagttggnnnnnnnnnnnnnnnnnnnnnnnnnnnnnnnnnnnnnnnnnnnnnnnnnnnnnnnnnnnnnnnnnnnnnnnnnnnnnnnnnnnnnnnnnnnnnnnnnnnnnnnnnnnnnnnnnnnnnnnnnnnnnnnnnnnnnnnnnnnnnnnnnnnnnnnnnnnnnnnnnnnnnnnnnnnnnngggatctctcaatgctatttgccttcattagcttgctcattatgcttcctacttggtggattgtgtcttcctggctggtatggggagttattctatttgtgtatctggtcataagagctttgagattatggaggacagccaaactacaagtgaccctaaaaaaatacagtattcatttggaagatatggccacaaacagccgagcttttactaaccttgtgagaaaagctttacgtctcattcaagaaaccgaagtgatttccagaggatttacactgnnnnnnnnnnnnnnnnnnnnnnnnnnnnnnnnnnnnnnnnnnnnnnnnnnnnnnnnnnnnnnnnnnnnnnnnnnnnnnnnnnnnnnnnnnnnnnnnnnnnnnnnnnnnnnnnnnnnnnnnnnnnnnnnnnnnnnnnnnnnnnnnnnnnnnnnnnnnnnnnnnnnnnnnnnnnnnnnnnnnnnnnnnnnnnnnnnnnnnnnnnnnnnnnnnnnnnnnnnnnnnnnnnnnnnnnnnnnnnnnnnnnnnnnnnnnnnnnnnnnnnnnnnnnnnnnnnnnnnnnnnnnnnnnnnnnnnnnnnnnnnnnnnnnnnnnnnnnnnnnnnnnnnnnnnnnnnnnnnnnnnnnnnnnnnnnnnnnnnnnnnnnnnnnnnnnnnnnnnnnnnnnnnnnnnnnnnnnnnnnnnnnnnnnnnnnnnnnnnnnnnnnnnnnnnnnnnnnnnnnnnnnnnnnnnnnnnnnnnnnnnnnnnnnnnnnnnnnnnnnnnnnnnnnnnnnnnnnnnnnnnnnnnnnnnnnnnnnnnnnnnnnnnnnnnnnnnnnnnnnnnnnnnnnnnnnnnnnnnnnnnnnnnnnnnnnnnnnnnnnnnnnnnnnnnnnnnnnnnnnnnnnnnnnnnnnnnnnnnnnnnnnnnnnnnnnnnnnnnnnnnnnnnnnnnnnnnnnnnnnnnnnnnnnnnnnnnnnnnnnnnnnnnnnnnnnnnnnnnnnnnnnnnnnnnnnnnnnnnnnnnnnnnnnnnnnnnnnnnnnnnnnnnnnaagaggccatttctcaggtcgacaaactgctacgaagaaatacggataaaaaaggnaaaggcaagcctgaaatagcatgtgaaaacccacattgtacagtagtacctttgaagcagcctactctacacattgcagacaaagatccaatcccagaggagcagg

SEQ ID NO: 34511 - DNA, 590 bp, Macaca Mulatta
  misc_feature (1)...(590): n = A,T,C or G
atgtggcctttgaattttcctcattggaaagtactaaataaataaaaattcatgtgaaaatgatcactgataaatatcttcatagtagggcaagttattggatacagagaagagctgctcggaattgtaaccatatgttacagatctcagcacccatcagaactgtaaagctataatccccagaattaaagtttttattattttttatacattgtaaaacatggacgtttatttatgtggttaaattctattanaatttacatgctaaaataaaatagaccattttcaaattatttagattcagatatttccattagattaagcagatatttatcctagccctattggcagagattaatgatgagaagacgatcaagancagattagatcaatgaggttaacttataaatcaaggacagagaggatagaattgggaagcttgtattgtgagaagaatggatgtaaaggagacnatgtagatacttccagaaggnatagncatatagttttagacatatgattgaaaatggnaggagatgacagagacacttttcagtgaatgacaatttatatggggagaaaaatattgc

SEQ ID NO: 34512 - DNA, 1012 bp, Macaca Mulatta
  misc_feature (1)...(1012): n = A,T,C or G
gggctttcactgcaaggcggcggcggtagcggctgtgttgctcgtttctctgagccatccagtgccatcctcgtcgctgcagcgacacacgcgctcgccgccgccatgactgagcagatgacccttcgtggcaccctcaagggccacaacggctgggtaacccagatcgctactaccccgcagttcccggacatgatcctgtccgcctctcgagataagaccatcatcatgtggaaactgaccagggatgagaccaactatggaattccacagcgtgctctgcggggtcactcccactttgttagtgatgtggttatctcctcagatggccagtttgccctctcaggctcctgggatggaaccctgcgcctctgggatctcacaacgggcaccaccacgaggcgatttgtgggccataccaaggatgtgctgagtgtggccttctcctctgacaaccggcagattgtctctggatctcgagataaaaccatcaagctatggaataccctgggtgtgtgcaaatacactgtccaggatgagagccactcagagtgggtgtcttgtgtccgcttctcgcctaacagcagcaaccctatcatcgtctcctgcggctgggacaaactggtcaaggtatggaacctggctaactgcaagctgaagaccaaccacattggccacacgggctatctgaacacggtgactgtctctccagacggattccctcctgtgcttctgggaggcaagggggggcagagcccctgttattggcatcccccccccnntgnnaaancccntnnacncnnnnnnnnnnnnnnnnnnngcnnnnnnncgntggncggggccnnnaancccctaaaccnncacacccnaatttgctgganncntacancaccccacacataaggatattgaagatttggggtagtggaaaaatgacgatggagattaaacccaggaactaggcagatagtcgatgagacggtgttgaggggcacaatcttccgcttagggg

SEQ ID NO: 34513 - DNA, 225 bp, Macaca Mulatta
ccctccgcccgaggaggaccagggcgaggaggggcctcgattgtgggtgatgccaaatcaccaggtgctccggggaccggaggaagaccaaggccacatgtaccacccccagtagggctccaggggccaccactgcccctccctgtcccacggcccaggctgttgggactggaacccttcctaccctccccctgccagaggtaggcaaataaaccccagcaggcc

SEQ ID NO: 34514 - DNA, 2774 bp, Macaca Mulatta
  misc_feature (1)...(2774): n = A,T,C or G
gtgtggtggaggatgtctgtgtcatggagacctggaatccagaaaaggctgccagttggaaccaggcccccaaactccactactgcctggactatgaccgtcagaaggctgaattgtttgtgactagcctggaagngctgtgaccagcaaccatgatggaggctgtgactgctatgtccaagggagtgtggccaataggactggctctgtggaggcgcagacagccctaaagaagcggcagctgcacaccacctgggaggagggcctggtgctccccctggcggaggaggagctccccacagccaccctgacgctaaccttgaggacctgcgaccgcttctcccgccacagtgtagcaggggagctctgcctgggcctggatgggacatctgtgcctctaggggctgcccagtggggtgagctgaagacttcagcgaaggnnaggagccatctgcaggagctggagaggtccttctatccatcagctacctcccagctgccaaccgcctcctggtggtgctgattaaagccaagaacctccactctaaccagtccaaggagctcctggggaagnnnnnnnnnnnnnnnnnnnnnnnnnnnnnnnnnnnnnnnnnnnnnnnnnnnnnnnnnnnnnnnnnnnnnnnnnnnnnnnnnnnnnnnnnnnnnnnnnnnnnnnnnnnnnnnnnnnnnnnnnnnnnnnnnnnnnnnnnnnnnnnnnnnnnnnnnnnnnnnnnnnnnnnnnnnnnnnnnnnnnnnnnnnnnnnnnnnnnnnnnnnnnnnnnnnnnnnnnnnnnnnnnnnnnnnnnnnnnnnnnnnnnnnnnnnnnnnnnnnnnnnnnnnnnnnnnnnnnnnnnnnnnnnnnnnnnnnnnnnnnnnnnnnnnnnnnnnnnnnnnnnnnnnnnnnnnnnnnnnnnnnnnnnnnnnnnnnnnnnnnnnnnnnnnnnnnnnnnnnnnnnnnnnnnnnnnnnnnnnnnnnnnnnnnnnnnnnnnnnnnnnnnnnnnnnnnnnnnnnnnnnnnnnnnnnnnnnnnnnnnnnnnnnnnnnnnnnnnnnnnnnnnnnnnnnnnnnnnnnnnnnnnnnnnnnnnnnnnnnnnnnnnnnnnnnnnnnnnnnnnnnnnnnnnnnnnnnnnnnnnnnnnnnnnnnnnnnnnnnnnnnnnnnnnnnnnnnnnnnnnnnnnnnnnnnnnnnnnnnnnnnnnnnnnnnnnnnnnnnnnnnnnnnnnnnnnnnnnnnnnnnnnnnnnnnnnnnnnnnnnnnnnnnnnnnnnnnnnnnnnnnnnnnnnnnnnnnnnnnnnnnnnnnnnnnnnnnnnnnnnnnnnnnnnnnnnnnnnnnnnnnnnnnnnnnnnnnnnnnnnnnnnnnnnnnnnnnnnnnnnnnnnnnnnnnnnnnnnnnnnnnnnnnnnnnnnnnnnnnnnnnnnnnnnnnnnnnnnnnnnnnnnnnnnnnnnnnnnnnnnnnnnnnnnnnnnnnnnnnnnnnnnnnnnnnnnnnnnnnnnnnnnnnnnnnnnnnnnnnnnnnnnnnnnnnnnnnnnnnnnnnnnnnnnnnnnnnnnnnnnnnnnnnnnnnnnnnnnnnnnnnnnnnnnnnnnnnnnnnnnnnnnnnnnnnnnnnnnnnnnnnnnnnnnnnnnnnnnnnnnnnnnnnnnnnnnnnnnnnnnnnnnnnnnnnnnnnnnnnnnnnnnnnnnnnnnnnnnnnnnnnnnnnnnnnnnnnnnnnnnnnnnnnnnnnnnnnnnnnnnnnnnnnnnnnnnnnnnnnnnnnnnnnnnnnnnnnnnnnnnnnnnnnnnnnnnnnnnnnnnnnnnnnnnnnnnnnnnnnnnnnnnnnnnnnnnnnnnnnnnnnnnnnnnnnnnnnnnnnnnnnnnnnnnnnnnnnnnnnnnnnnnnnnnnnnnnnnnnnnnnnnnnnnnnnnnnnnnnnnnnnnnnnnnnnnnnnnnnnnnnnnnnnnnnnnnnnnnnnnnnnnnnnnnnnnnnnnnnnnnnnnnnnnnnnnnnnnnnnnnnnnnnnnnnnnnnnnnnnnnnnnnnnnnnnnnnnnnnnnnnnnnnnnnnnnnnnnnnnnnnnnnnnnnnnnnnnnnnnnnnnnnnnnnnnnnnnnnnnnnnnnnnnnnnnnnnnnnnnnnnnnnnnnnnnnnnnnnnnnnnnnnnnnnnnnnnnnnnnnnnnnnnnnnnnnnnnnnnnnnnnnnnnnnnnnnnnnnnnnnnnnnnnnnnnnnnnnnnnnnnnnnnnnnnnnnnnnnnnnnnnnnnnnnnnnnnnnnnnnnnnnnnnnnnnnnnnnnnnnnnnnnnnnnnnnnnnnnnnnnnnnnnnnnnnnnnnnnnnnnnnnnnnnnnnnnnnnnnnnnnnnnnnnnnnnnnnnnnnnnnnnnnnnnnngagttttgctctttgttgcccaggctggagtgcagtggcacgatctcggctcactgcaacctctgccttccaagttcaagtgattctcctgtctcagcctcccgggtagctgggattacaggcacccaccaacatgaccggctaatttttgtacttttagtagagacggggtttcaccatgttggccaggctggtcttcaactccagacctcaggtgatctacctgcctcggcctcccaaagtactgggattacaagtgtaagccaccatgcccagcctatttttcactttaatttggcagctgagaatgcccagaaagtgccggaagcatcgtggtatttccagaaccgtggattctgcctttggacccctctctattaacattaaaactctgggctttcagatgtcac

SEQ ID NO: 34515 - DNA, 858 bp, Macaca Mulatta
  misc_feature (1)...(858): n = A,T,C or G
aggcaatccgatttacgacttttttctgggacgggagctcaaccctcgtatctgtttcttcgacttcaaatatttctgtgaactgcgacctggcctcatcggctgggtnnnnnnnnnnnnnnnnnnnnnnnnnnnnnnnnnnnnnnnnnnnnnnnnnnnnnnnnnnnnnnnnnnnnnnnnnnnnnnnnnnnnnnnnnnnnnnnnnnnnnnnnnnnnnnnnnnnnnaggaggccatcctcaccaccatggatatcacacatgacgggtttggcttcatgctggcatttggggacatagcctgggtgcccttcacctacagcctgcaagcccagttcctgctgcgccacccgcagcccctggggttgcccatggcttccgccatctgcctcatcaatgnnnnnnnnnnnnnnnnnnnnnnnnnnnnnnnnnnnnnnnnnnnnnnnnnnnnnnnnnnnnnnnnnnnnnnnnnnnnnnnnnnnnnnnnnnnnnnnnnnnnnnnnnnnnnnnnnnnnnnnnnnnnnnnnnnnnnnnnnnnnnnnnnnnnnnnnnnnnnnnnnnnnnnnnnnnnnnnnnnnnnnnnnnnnnnnnnnnnnnnnnnnnnnnnnnnnnnnnnnnnnnnnnnnnnggcaggagtactgccggcgtgtgccttaccgcatcgcgctctacatctactgaagcggctccaccaccccaggtgggggcatatgcccactcatccaccagcacacccaagaccaggagcctggacacacttgggactcaagggcttgtaccccacccagccctgaggatgaacagcctcagagaagaggtggtttagagcaaggaaaaaaatgaaaccagtgaccaaaatcg

SEQ ID NO: 34516 - DNA, 763 bp, Macaca Mulatta
ggttgtttccacccttgcccaaccaccaccaggattaaaggatcaagccattgatggtgaagggggttcataactgctggacagagaatgaaatatcatgtttatttggtggggaggggacagccagtgtctaatgctattccaaaaggttacttctcaaattagggacacctgggaatttgaagtgccagccctggggcaaggactgggaaggtttataggccccttgaaaaaaggctatggcacttgatcctaacactagaaatctaaggtacaactgaaaatgactcatcttggacagaaagggtttaaagagctggactaaccaggagaggagtgcagtggttccctacaggtgcgctggaaacagtccagaagggaccttctgggatctggggagcactgctgccagttatgaacagcagtcagggccagtaaagaccagtcctgcctaaacaccactgcatccctggtaatctatctgtgaccctcttctcattggtactgatgtcctgccaagacgctcaagcaacagtagactagattctcagaaactagaagagagacccccatatccagctgctggcctgaatgtccgtttttgctgaagcaggcaagctgcagttaatttatggttagcacatcactctggatctcgtggcttaattgagtttgtaaatcactcagtttcttcttcaatccagagagggctgacaggacaatggtttcaggacgcagagagccacaggactccacgttgtcc

SEQ ID NO: 34517 - DNA, 1919 bp, Macaca Mulatta
  misc_feature (1)...(1919): n = A,T,C or G
anaangttaggaattctcagcagtattctcnnntngtccccaaatgaccatatgaggagtcaacagtttatcgtgtgtagtgtaataacttttacattaaatatatagtcattcacttctcacaacgtggtgctggccccttctagaagaacgaagtttccattatgcattgactaaaaaatctcaaaaacaactaagcagctacgctatagctcagtaagtaccattaaactgttctgggctagtgtacatttcaggttaatagagatctccattttgggttttagaaaggcagcaataattatattttggcttttagtctagatgctcagcatagttaaggcgacagtttaagcatattaaatgaaggtagttaaaatttaagaatcatcacaatctcttgcaacctacatacactgtttaatgcttacatggaatgaaaccagtgttcttaattggcattttatacacacaccgaatttttttaaaaaatcaaaggcaatcattctaaatgtactatggtagccaggttaaaaaaatgcaaaatatgctatatggaacttaaagtaatattgaaacaggcactactcatttacctaggagaaaaggtgactggttttcacacaaaggctaagccttgtatcagttcatcctaatcacaatggcttataaaagcatcaggtttccagtagagaaactgttctaggaaagtcagtaaatctcttgaaagtttcacatctgtaaaaccaggataaggctacaactattttgaaatctgaacaaggtatcagatgaaaatagtaagattcccagccataatgtaagatagaaaagtcctcatgcagcatatgcttgctggctccgggaaagcttcatgtgcataatacagaagttgccaaagaaggaaactggagacgttcagctgcatttccatggtgccgtgaattttaaacctcaggaatggtgtggtccattaggcttttcatgatgcttggtgccatccgcttaataatatgttcaaagataaaagcaggcatgattgtaatagtaactacagtcccagatgttgatagtatgtctgcaatttgagagtccttcaatccaatgacattctgtccattgatttcacagatgttatgttctgtgagaagaccatttctggctgcagagctatctttcactatggatgttattttttccatttttaaagataaaaccaacatgtccagtgctatccttatgcatggtaatcgtccgttcaaaggggcctgtcacgaatggtcatggtaatcttctctccaaaagcctgtttgagcaccttgtgcgctttatctgagctccaccctgcacagttttcaccattgatctggagtacttggtccccaaatctcagaccaaccaatgaggctggagaattagcctggactagctgaacaaatataccattatctattgatttaagcctgagtccaatttttccatcttgatccttacacaaaatgacttcacgaatcccttgcttaatttctgctctacgaattccaacatcattaccagttacaggagccaccatatagttcacactggaaggtcttgctaccaactgcccctgaagtggtgcaccagaaaccacggccacatttgcacgtatttcttcttcatttaaactcagccccatgtattgagacagctccggatatagtttgggatagagatttcgatcttgagagataggagcagaagcttctgacaaaattgctggattggcagggtttgcagaaaaagcagtttgagcctgaattactttgtctaccttcaagtcttcaagagatggatagagcgacatttttgcaggattcttctagccccacaaggaaacgctcgccgccaccgcctccggtcactcccacggacttccc

SEQ ID NO: 34518 - DNA, 339 bp, Macaca Mulatta
acacagactctcttccatttacacacggcagggtgagaaattatgccttgaagtaagcgtggcaagttgagcttaaagaaagactgatacatgacaagccttacaaataagaaagttccctgagttttagagtgtttaagagtctaaccactctccttttctactttcagaaagaggttgctgatttagctaaagcataaatctctggtgatgctttgtttgtgctagcttctggaatgagggtgcccagtctcccttgtatactagggggcaagaatgtgtgtttggaacgggaaaaccaagatcacactgtagattctttcagtgatgaacatttcc

SEQ ID NO: 34519 - DNA, 652 bp, Macaca Mulatta
  misc_feature (1)...(652): n = A,T,C or G
ggcaaaaaatacaaaaattatccaggcatggtggcgcatgcccgtagtgccagctgnnnnnnnnnnnnnnnnnnnnngatctttgagcccaggatgctannnnnnnnnnnnnnnnnnnntgcaccattgtactccagcctgggcagcagagtgagaccctgtctcaagaaatacatttaatttttcattttcagttaacactgtactcttataacaccattaatatattgtagctggtacttcggtgattctgttaccaggttttctaagctatttacagtgcgtagctttcatttgcagcattatgttcccacaaatctgtactcagcatatacagtatagtttatctgctttatttctgtcttatagaaatcatgaatgtggtctgcagacattgatgaagaaaatctgttgggaattgatacatgggctaaggcatcagaagtttaatttgaagtttatgttcacacactgaaaaacttagtttttcctttgttgggaaaaaaacatggtgcatggctaaaaaatttggggaaaaggtaaactattttggaaaggaaaggtaattaaaaagctcccagttttttttaaaagggtaaacgccaaaaggggtaacaaatgggtttttgtnnnnnnnnnnnnnnnnnnnnnc

SEQ ID NO: 34520 - DNA, 797 bp, Macaca Mulatta
  misc_feature (1)...(797): n = A,T,C or G
gacaacttgcctttgctgatttgaagagagttgtgctatnnnnnnnnnnnnnnnnnnnnnnnnnnnnnnnnnnnnnnnnnnnnnnnnnnnnnnnnnnnnnnnnnnnnnnnnnnnnnnnnnnnnnnnnnnnnnnnnnnnnnnnnnnnnnnnnnnnnnnnnnnnnnnnnnnnnnnnnnnnnnnnnnnnnnnnnnnnnnnnnnnnnnnnnnnnnnnnnnnnnnnnnnnnnnnnnnnnnnnnnnnnnnnnnnnnnnnnnnnnnnnnnnnnnnnnnnnnnnnnnnnnnnnnnnnnnnnnnnnnnnnnnnnnnnnnnnnnnnnnnnnnnnnnnnnnnnnnnnnnnnnnnnnnnnnnnnnnnnnnnnnnnnnnnnnnnnnnnnnnnnnnnnnnnnnnnnnnnnnnnnnnnnnnnnnnnnnnnnnnnnnnnnnnnnnnnnnnnnnnnnnnnnnnnnnnnnnnnnnnnnnnnnnnnnnnnnnnnnnnnnnnnnnnnnnnnnnnnnnnnnnnnnnnnnnnnnnnnnnnnnnnnctctaccatatgcccactggggtgttggcccatctgagtggcagacactcctgcaacccagcttttccagccaccagcgggatgattgtatgtgccagcacatggtaattttggtataattccaacttgggcacaacgtttgctatttgtcatttttaaactgaatccgaaagaaacccctattacaaatttaagataattgatttgaaagtgctttgtataaaaaagcaaatgataaaaggaatcagaattaatgaaatgtttgttgatcttt

SEQ ID NO: 34521 - DNA, 903 bp, Macaca Mulatta
gggtcccctgtcccacctggcagatctggaggccctgaaagtggcagactcaaagaccctattggagagcgagcgggaaaggctctttgcgaaaatggaggagaacagggactttgtcggctgggcgctggacgtgctatctccaaacctcatctctaccagcatgcttgggcgagtcaaatacaacctgaactccctgtcacatgatacagccactgggcttatacagtatgcattggaccagggcgtgaacgtcacccaggtgtttgtggacactgtagggatgccagagacataccaggcgcggctgcagcaaagttttcccgggattgaggtgacggtcaaggccaaagcagatgccctttacccagtggttagtgctgccagcatctgtgccaaggtggcccgggaccaggccgtgaagaaatggaagttcgtggagaaactgcaggactcggatactgactatggctcaagctaccccaacgatcccaagacaaaagcgtggtttgaaggaccacctcggagcctggtgttccgcttccccctcaacttggccctgcttcaactgggtccaccgcctcttaaccattcctgggataaatgaggccggacgtatggttatctggggagggattccgtcccccccatgccacctccgcagggccctcaatgtacacatccaccccccctacacttccttccactaaataaggcccctcccagtcccctactccctcgacacgtcccttcttgtaaataccatcaccttggtacacttcgccgcctccccttaaaccctattcgacaccccggtgccttcttgaccccttatgtccggctcgacctttatccgttcttgtcccggtcggttatccccccttccccaccctgcgccctttc

SEQ ID NO: 34522 - DNA, 665 bp, Macaca Mulatta
  misc_feature (1)...(665): n = A,T,C or G
ctaacgagaaggcaactgatgactatcattatgagaagtcaagaaaatgaataggcggtactgagctgtgcagagtgggatgtaaatagcgccttcctctccctatatccctcccgtgaaacatggcttcctggccgggcatggtggctcagnnnnnnnnnnnnnnnnnnnnnnnnnnnnnnnnngggcnnnnnnnnnnnnnnngnnnnnnnnnnnnnnnnnnnacaaacatggannnnnnnnnnnnnnnnnnnnnnnnnnnnnnngttagccgggcatggtggcannnnnnnnnnnnnnnnnnnnnnnnnnnagctgaggcagannnnnnnnnnnnnnnngannnnnnnnnnnnnnggtgagccgagattgcaccattgcactctagcctgggcaacaagagcaaaannnnnnnnnnnnnnnnnnnnnnnnnnnnngcttcctggacagagcatgctcatttgctagcgaacagttccagaaacagaccctattggtccttctgcttacctgctggatttttcaggcactaaatttataactttttgaaacaaaacaatgtgtaattttccatttgggggcaaactctattcttgtgagcattattaaatcttgtttgtaaatatattgtcttttaatatttgctctgggtcaggaagaaactg

SEQ ID NO: 34523 - DNA, 6230 bp, Macaca Mulatta
  misc_feature (1)...(6230): n = A,T,C or G
aatttgcatctcttcaagacacaagattaaaacaaaattgacgctaaattggattttaaattatcttccgttcatttatccttcgtctttcttatgtggatatgcaagcaagaagaagggactggacattcccaacatgctcactcccttaatctgtccgtctagaggtttggcttctacaaaccaaggnnnnnnnnnnnnnnnnnnnnnnnnnnnnnnnnnnnnnnnnnnnnnnnnnnnnnnnnnnnnnnnnnnnnnnnnnnnnnnnncaggcagcagagctcgttctcacaatagcccccccagcattggcattgctgtcatcctcgtgggcatttccgacgaggtggccatcaaggatgcccacgagaaagatgatttccaccatctctccgtggtgcctcgggtggaactggtagccatgaatgagaccgacccaaagagcatcatcacccgcatctgtgatctcatgtctgaccggaagatccagggggtggtgtttgctgatgacncagaccaggaagccatcgcccagatcctcgatttcatttctgcacagactctcacccctatcctgggcatccacgggggctcctctatgataatggcagataannnnnnnnnnnnnnnnnnnnnnnnnnnnnnnnnnnnnnnnnnnnnnnnnnnnnnnnnnnnnnnnnnnnnnnnnnnnnnnnnnnnnnnnnnnnnnnnnnnnnnnnnnnnnnnnnnnnnnnnnnnnnnnnnnnnnnnnnnnnnnnnnnnnnnnnnnnnnnnnnnnnnnnnnnnnnnnnnnnnnnnnnnnnnnnnnnnnnnnnnnnnnnnnnnnnnnnnnnnnnnnnnnnnnnnnnnnnnnnnnnnnnnnnnnnnnnnnnnnnnnnnnnnnnnnnnnnnnnnnnnnnnnnnnnnnnnnnnnnnnnnnnnnnnnnnnnnnnnnnnnnnnnnnnnnnnnnnnnnnnnnnnnnnnnnnnnnnnnnnnnnnnnnnnnnnnnnnnnnnnnnnnnnnnnnnnnnnnnnnnnnnnnnnnnnnnnnnnnnnnnnnnnnnnnnnnnnnnnnnnnnnnnnnnnnnnnnnnnnnnnnnnnnnnnnnnnnnnnnnnnnnnnnnnnnnnnnnnnnnnnnnnnnnnnnnnnnnnnnnnnnnnnnnnnnnnnnnnnnnnnnnnnnnnnnnnnnnnnnnnnnnnnnnnnnnnnnnnnnnnnnnnnnnnnnnnnnnnnaggtatctgatcaacgtcacttttgaggggaggaatctgtccttcagtgaagatggttaccagatgcacccaaagctggtgataattcttctgaacaaggagaggaagtgggaaagggnnnnnnnnnnnnnnnnnnnnnnnnnnnnnnnnnnnnnnnnnnnnnnnnnnnnnnnnnnnnnnnnnnnnnnnnnnnnnnnnnnnnnnnnnnnnnnnnnnnnnnnnnnnnnnnnnnnnnnnnnnnnnnnnnnnnnnnnnnnnnnnnnnnnnnnnnnnnnnnnnnnnnnnnnnnnnnnnnnnnnnnnnnnnnnnnnnnnnnnnngaataaaacagatgaggagccgggttacatcaaaaaatgctgcaaggggttctgtatcgacatccttaagaaaatttctaaatctgtgaagttcacctatgacctttacctggttaccaatggcaagcatgggaagaaaatcaatggaacctggaatggtatgattggagaggtnnnnnnnnnnnnnnnnnnnnnnnnnnnnnnnnnnnnnnnnnnnnnnnnnnnnnnnnnnnnnnnnnnnnnnnnnnnnnnnnnnnnnnnnnnnnnnnnnnnnnnnnnnnnnnnnnnnnnnnnnnnnnnnnnnnnnnnnnnnnnnnnnnnnnnnnnnnnnnnnnnnnnnnnnnnnnnnnnnnnnnnnnnnnnnnnnnnnnnnnnnnnnnnnnnnnnnnnnnnnnnnnnnnnnnnnnnnnnnnnnnnnnnnnnnnnnnnnnnnnnnnnnnnnnnnnnnnnnnnnnnnnnnnnnnnnnnnnnnnnnnnnnnnnnnnnnnnnnnnnnnnnnnnnnnnnnnnnnnnnnnnnnnnnnnnnnnnnnnnnnnnnnnnnnnnnnnnnnnnnnnnnnnnnnnnnnnnnnnnnnnnnnnnnnnnnnnnnnnnnnnnnnnnnnnnnnnnnnnnnnnnnnnnnnnnnnnnnnnnnnnnnnnnnnnnnnnnnnnnnnnnnnnnnnnnnnnnnnnnnnnnnnnnnnnnnnnnnnnnnnnnnnnnnnnnnnnnnnnnnnnnnnnnnnnnnnnnnnnnnnnnnnnnnnnnnnnnnnnnnnnnnnnnnnnnnnnnnnnnnnnnnnnnnnnnnnnnnnnnnnnnnnnnnnnnnnnnnnnnnnnnnnnnnnnnnnnnnnnnnnnnnnnngaaactggatgccttcatctatgatgcagcagtgctgaactatatggcaggcagagatgaaggctgcaagctggtgaccattggcagtgggaaggtctttgcttccactggctatggcattgccatccaaaaagattctgggtggaagcgccaggtggaccttgctatcctgcagctctttggagatggnnnnnnnnngaactggaagctctctggctcactggcatttgtcacaatgagaagaatgaggtcatgagcagccagctggacattgacaacatggcaggggtcttctacatgttgggggcggccatggctctcagcctcatcaccttcatctgcgaacaccttttctattggcagttccgacattgctttatgggtgtctgttctggcaagcctggcatggtcttctccatcancagagnnntctacagctgcatccatggggtggcgatcgaggagcgccaatccgtaatgaactcccccaccgcaaccatgaacaacacacactccaacatcctgcgcctgctgcgcacagccaagaacatggctaacctgtctggtgtgaacggctccccgcagagcgccctggacttcatccgacgggagtcatctgtctatgacatctcggagcatcgccgcagcttcacacattctgactgcaaatcctacaacaacccgccctgtgaggagaacctcttcagtgactacatcagtgaggtggagagaacgttcgggaacctgcagctgaaggacagcaacgtgtaccaagatcactaccaccatcaccaccggccccatagcatcggcagtgccagctccatcgatggcctctacgactgtgacaacccacccttcactacccagtccaggtccatcagcaagaagcccctggacatcggcctcccctcctccaagcacagccagctcagtgacctgtacggcaaattctccttcaagagcgaccgctacagtggccacgatgacctgatccgctccgatgtctctgacatctcaacccacaccgtcacctacgggaacatcgagggcaatgccgccaagaggcgtaagcagcaatataaggacagcctgaagaagcggcccgcctcggccaagtcccgcagggagtttgacgagatcgagctggcctaccgtcgccgaccgccccgctcccctgaccacaagcgctacttcagggacaaggaagggctacgggacttctacctggaccagttccgaacaaaggagaactcaccccactgggagcacgtggacctgaccgacatctacaaggagcggagtgacgactttaagcgcgactcggtcagcggaggagggccctgtaccaacaggtcccacatcaagcacggggtctttttacaaacacggcgaggtcagtggggtacctgcaccgtgggagaagaacctgaccaacgtggagtgggaggaccggtccgggggcaacttctgccgcagctgtccctccaagctgcacaactactccacgacagtgacgggtcaaaactcgggcacgcaggcgtgcatccggtgcgaggcttgcaagaaagcaggcaacctgtatgacatcagcgaggacaactccctgcaggaactggaccagccggctgccccggaggcggtgacgtcaaacgcctccaccactaagtatcctcagagcccgactaattccaaggcccagaacaagaaccggaacaaacctgcgccggcagcactccgacgacaccttcgtggacctgcagaaggaagaagccgccctggccccgcgcagcgtaagcctgaaagacaagggccgattcatggatgggagcccctacgcccacatgtttgagatgtcagctggcgagagcacctttgccaacaacaagtcctcagtgcccactgccggacatcaccaccacaacaaccccggcggcggctacatgctcagcaagtcgctctaccctgaccgggtcacgcaaaaccctttcatccccacttttggggacgaccagtgcttgctccatggcagcaaatcctacttcttcaggcagcccacggtggcgggggcgtcgaaagccaggccggactttcgggcccttgtcaccaacaagccggtggtctcggcccttcatggggccgtgccagcccgtttccagaaggacatctgtatagggaaccagtccaacccctgtgtgcctaacaacaaaagccacagggctttcaatggctcnnnnnnnnnnnnnnnnnnnnnnnnnnnnnnnnnnnnnnnnnnnnnnnnnnnnnnnnnnnnnnnnnnnnnnnnnnnnnnnnnnnnnnnnnnnnnnnnnnnnnnnnnnnnnnnnnnnnnnnnnnnnnnnnnnnnnnnnnnnnnnnnnnnnnnnnnnnnnnnnnnnnnnnnnnnnnnnnnnnnnnnnnnnnnnnnnnnnnnnnnnnnnnnnnnnnnnnnnnnnnnnnnnnnnnnnnnnnnnnnnnnnnnnnnnnnnnnnnnnnnnnnnnnnnnnnnnnnnnnnnnnnnnnnnnnnnnnnnnnnnnnnnnnnnnnnnnnnnnnnnnnnnnnnnnnnnnnnnnnnnnnnnnnnnnnnnnnnnnnnnnnnnnnnnnnnnnnnnnnnnnnnnnnnnnnnnnnnnnnnnnnnnnnnnnnnnnnnnnnnnnnnnnnnnnnnnnnnnnnnnnnnnnnnnnnnnnnnnnnnnnnnnnnnnnatttaggtgaggaagcaaaagccatctatgtgagaccatttagcacactgcttgtgaaaagaaagaggctctggctaaattcatgctgcttagatgacatctgtctaggaatcgtgtgccaagcagaggttgggaggccatgtgtgtttatatataagccaaaaaatgcttgcttcaaccccatgagactccatagtggtggtgaacaggaacaaaaggtcattggtggcggagcggattcttgaacaaactggaaagtacgttatgatagtgtcccacagtgccttggaggcaagagcaggtggattgtgcatgcatgtgtgttcatgcacacttgcacccacatgtagtcgggtgcctcaagagaaggcaaccttgactctttctgttgtttctttcaatatccccaagcagtgtgattgtttggcttatatacagacagagatggccatgtgttacctgaattttggctgtgtctcccttcatccttcttgaatgagaatgaaaattcttgataaagaagaatccgtggtctnnnnnnnnnnnnnnggtgagcaatcctgcaagagcaaggtacaaaaacaagtcctcagtggttggcaattttttcaaccagtttgaaccaagaaccttccaggaaggctaaagggaaacagaattttcacagccacgattcttttgcccacacttgagagcaaaagattctacaaagctcttttgagtatttagactgtcgaccggccaaggtttggggaggagcaaagccacctttgaagaagtaaggagtcgtgtatggtagggtaagtgagagagggggatgtttccaatgctttgatcccttcttacttaacctgaagctagaagagcaggcttcttcccccaaaactgattacaactgctgtggagcagacagttaagagaaatgaacttgacaattaagagaaatgagctgcactccatgagtgtagctcaggaggtacgaagagaggggaagagacttggcaatgggagaggggggcagagagggatcctccacaacctctttgggcctggatccctgggaatgtgacttgagcccagagtgaacactcttggtagaagcccttccaccttcctgcaactcttaaggttccctctcagattgtaccattgag

SEQ ID NO: 34524 - DNA, 757 bp, Macaca Mulatta
  misc_feature (1)...(757): n = A,T,C or G
ggatatttttaatcatctacatgtaaatgaagcaatagaattctaacataaggccaagaaatgagatgaatgtttggggtttatgttttttaaggtaaatacgggtattgtttttaattattaccatttattaaattgtgggctttgaaacctaatgaaacctgttagccacttctctgtgccatatacttcccatgttaccaaaatacccccaactctttagtcaaaagagaaccctgacctcctgagtttccacggtcctttctgtaccaggtttaaatatagtcttctggagaagtctttttgacattaagctctgggacaggacaccttgggtttgtggactccagcccactatgatgttatgacttctctggccaggcctctggtggaagtgcacgggcactcccaatgttgttaatgctctgtcttccatttgttctggaatcctgtgtgttggtctgttgttccatgcattagctgtttgtaagtaatgcatttgcatactgaaaaaagaatgccaccctgccacagttgatgggtgaaggaaggtccttttgacgtggtgcaatttttgatgaaatgtctctgggggacacgaggatgcccctaatgatgcctgaccttgtcatgggttgcagcattttgaacttttgggnnnnnnnnnnnnnnnnnnnnnnngtttaaatctataaacctggccaccttttttcaaaccctggaatttttaaaggatggcttttcccaataaaaaatc

SEQ ID NO: 34525 - DNA, 791 bp, Macaca Mulatta
gtgtggtgggggtcgtggtgggggggcatggcgaagtcggccttcacattaactaagtaggcaggtaggatctgaagaaggcacaggtgcaagtaaaattcgtcaattaaaccactattttgattacgttccattagctttcttccacttagtagcaaagacgttctttactgaccaccaaataaaccacagggtgtgtacaagcatcaagagtgcccagtgaggagtgttcttctctgggactcagccaaccgccccacctgacacacagtggtctccggcctaggagcacaggacaggtgctcaggtacaggcagactcgtggtgtggcctggccttgtgggggacgagagggcctctgccagggtccacctgccaggcccacactgtctccctctgacctggcctcctcctcaatgccctggggctggccagctccaggggtccacgactccccctggcctcctgcagttcagcccactctaacctacccccactccctcagagcccctcgctcagcatcctcctcttcctctatttcccggagtcatttgagatttctgtcctcagccctcaagttccctgcccagtcctccaggggcagccccagctgagacctcccggtgtgccctccccacccagtggctctgcaagctgctcagcagcccttggtgatggtgcactggcctgtcttttgtgcttcctgctgcgtcacccattgctcccaaagcatgcggcccacttgctggccaagtgctcgaggtggtcagcacctagacagtgctcctccc

SEQ ID NO: 34526 - DNA, 224 bp, Macaca Mulatta
cttcacaattgtgttcactctctagagaactgagtctgaagtgtctatgattcacaaaccatttggaaatcttgtgaagcctgtgggccccctcaccagggaattttgcacagaccctctgaggtcagactgtgaaggcatttgcagtcaaaagcatcgggatgaaaacctgcattctcaaacagttgtctccatggagggaggtgtgcatgctgctcaggggt

SEQ ID NO: 34527 - DNA, 736 bp, Macaca Mulatta
  misc_feature (1)...(736): n = A,T,C or G
cggcacgaggccaaaactattgaatgatacacnattgattnnttgattatactgntgttctaanctnntcantgnaaannttattcaancnnacagngnnnaaataattccctgntcatattcacttggtctggtaccctggcaaagcacttaaagtgaagtaccactgtcaagagctacagacaccagaagaagcctctggaactgaagaaggatcagctgtaccaacagagcttagtaatttctaaaaagaaaaaatgatattttccaacttcttaaaaagtgacgatactagcataaatcatttttctggtaaaatagctaaggtatagatcttcgaacaatttgggaaagcctatgattacaagtaaaaactcaaaaannnnnnnnnnnnnnnnnnnnnnnnnnnnnnnnnnnnnnnnnnnnnnnnnnnnnnnnnnnnnnnnnnnnnnnnnnnnnnnnnnnnnnnnnnnnnnnnnnnnnnnnnnnnnnnnnnnnnnnnnnnnnnnnnnnnnnnnnnnnnnnnnnnnnnnnnnnnnnnnnnnnnnnnnnnnnnnnnnnnnnnnnnnnnnnnnnnnnnnnnnnnnnnnnnnnnnnnnnnnnnnnnnnnnnnnnnnnnnnnnnnnnnnnnnnnnnnnnnnnnnnnnnnnnnnnnnnnnnnnnnnnnnnnnnnnnnnnnnnnnnnnnnnnnnnnnnnnnnnnnnnnnnnnnnnnnnnnnnnnnnnnnnnnnnnnnn

SEQ ID NO: 34528 - DNA, 10763 bp, Macaca Mulatta
  misc_feature (1)...(10763): n = A,T,C or G
ttcatcattttctggatttcgtaaaacagatttacaaggagcttccaaaagtagtgnnnnnnnnnnnnnnnnnnnnnnnnnnnnnnnnnnnnnnnnnnnnnnnnnnnnnnnnnnnnnnnnnnnnnnnnnnnnnnnnnnnnnnnnnnnnnnnnnnnnnnnnnnnnnnnnnnnnnnnnnnnnnnnnnnnnnnnnnnnnnnnnnnnnnnnnnnnnnnnnnnnnnnnnnnnnnnnnnnnnnnnnnnnnnnnnnnnnnnnnnnnnnnnnnnnnnnnnnnnnnnnnnnnnnnnnnnnnnnnnnnnnnnnnnnnnnnnnnnnnnnnnnnnnnnnnnnnnnnnnnnnnnnnnnnnnnnnnnnnnnnnnnnnnnnnnnnnnnnnnnnnnnnnnnnnnnnnnnnnnnnnnnnnnnnnnnnnnnnnnnnnnnnnnnnnnnnnnnnnnnnnnnnnnnnnnnnnnnnnnnnnnnnnnnnnnnnnnnnnnnnnnnnnnnnnnnnnnnnnnnnnnnnnnnnnnnnnnnnnnnnnnnnnnnnnnnnnnnnnnnnnnnnnnnnnnnnnnnnnnnnnnnnnnnnnnnnnnnnnnnnnnnnnnnnnnnnnnnnnnnnnnnnnnnnnnnnnnnnnnnnnnnnnnnnnnnnnnnnnnnnnnnnnnnnnnnnnnnnnnnnnnnnnnnnnnnnnnnnnnnnnnnnnnnnnnnnnnnnnnnnnnnnnnnnnnnnnnnnnnnnnnnnnnnnnnnnnnnnnnnnnnnnnnnnnnnnnnnnnnnnnnnnnnnnnnnnnnnnnnnnnnnnnnnnnnnnnnnnnnnnnnnnnnnnnnnnnnnnnnnnnnnnnnnnnnnnnnnnnnnnnnnnnnnnnnnnnnnnnnnnnnnnnnnnnnnnnnnnnnnnnnnnnnnnnnnnnnnnnnnnnnnnnnnnnnnnnnnnnnnnnnnnnnnnnnnnnnnnnnnnnnnnnnnnnnnnnnnnnnnnnnnnnnnnnnnnnnnnnnnnnnnnnnnnnnnnnnnnnnnnnnnnnnnnnnnnnnnnnnnnnnnnnnnnnnnnnnnnnnnnnnnnnnnnnnnnnnnnnnnnnnnnnnnnnnnnnnnnnnnnnnnnnnnnnnnnnnnnnnnnnnnnnnnnnnnnnnnnnnnnnnnnnnnnnnnnnnnnnnnnnnnnnnnnnnnnnnnnnnnnnnnnnnnnnnnnnnnnnnnnnnnnnnnnnnnnnnnnnnnnnnnnnnnnnnnnnnnnnnnnnnnnnnnnnnnnnnnnnnnnnnnnnnnnnnnnnnnnnnnnnnnnnnnnnnnnnnnnnnnnnnnnnnnnnnnnnnnnnnnnnnnnnnnnnnnnnnnnnnnnnnnnnnnnnnnnnnnnnnnnnnnnnnnnnnnnnnnnnnnnnnnnnnnnnnnnnnnnnnnnnnnnnnnnnnnnnnnnnnnnnnnnnnnnnnnnnnnnnnnnnnnnnnnnnnnnnnnnnnnnnnnnnnnnnnnnnnnnnnnnnnnnnnnnnnnnnnnnnnnnnnnnnnnnnnnnnnnnnnnnnnnnnnnnnnnnnnnnnnnnnnnnnnnnnnnnnnnnnnnnnnnnnnnnnnnnnnnnnnnnnnnnnnnnnnnnnnnnnnnnnnnnnnnnnnnnnnnnnnnnnnnnnnnnnnnnnnnnnnnnnnnnnnnnnnnnnnnnnnnnnnnnnnnnnnnnnnnnnnnnnnnnnnnnnnnnnnnnnnnnnnnnnnnnnnnnnnnnnnnnnnnnnnnnnnnnnnnnnnnnnnnnnnnnnnnnnnnnnnnnnnnnnnnnnnnnnnnnnnnnnnnnnnnnnnnnnnnnnnnnnnnnnnnnnnnnnnnnnnnnnnnnnnnnnnnnnnnnnnnnnnnnnnnnnnnnnnnnnnnnnnnnnnnnnnnnnnnnnnnnnnnnnnnnnnnnnnnnnnnnnnnnnnnnnnnnnnnnnnnnnnnnnnnnnnnnnnnnnnnnnnnnnnnnnnnnnnnnnnnnnnnnnnnnnnnnnnnnnnnnnnnnnnnnnnnnnnnnnnnnnnnnnnnnnnnnnnnnnnnnnnnnnnnnnnnnnnnnnnnnnnnnnnnnnnnnnnnnnnnnnnnnnnnnnnnnnnnnnnnnnnnnnnnnnnnnnnnnnnnnnnnnnnnnnnnnnnnnnnnnnnnnnnnnnnnnnnnnnnnnnnnnnnnnnnnnnnnnnnnnnnnnnnnnnnnnnnnnnnnnnnnnnnnnnnnnnnnnnnnnnnnnnnnnnnnnnnnnnnnnnnnnnnnnnnnnnnnnnnnnnnnnnnnnnnnnnnnnnnnnnnnnnnnnnnnnnnnnnnnnnnnnnnnnnnnnnnnnnnnnnnnnnnnnnnnnnnnnnnnnnnnnnnnnnnnnnnnnnnnnnnnnnnnnnnnnnnnnnnnnnnnnnnnnnnnnnnnnnnnnnnnnnnnnnnnnaggccattgaaaccgctctggactgcctgaaaagtgccaacactgagccctactaccggaggcaggcgtgggaagtgatcaaatgcttcctggtggccatgatgagcctggaggacaacaagcatgcactctaccagctcctggcacaccccannnnnnnnnnnnnnnnnnnnnnnnnnnnnnnnnnnnnnnnnnnnnnnnnnnnnnnnnnnnnnnnnnnnnnnnnnnnnnnnnnnnnnnnnnnnnnnnnnnnnnnnnnnnnnnnnnnnnnnnnnnnnnnnnnnnnnnnnnnnnnnnnnnnnnnnnnnnnnnnnnnnnnnnnnnnnnnnnnnnnnnnnnnnnnnnnnnnnnnnnnnnnnnnnnnnnnnnnnnnnnnnnnnnnnnnnnnnnnnnnnnnnnnnnnnnnnnnnnnnnnnnnnnnnnnnnnnnnnnnnnnnnnnnnnnnnnnnnnnnnnnnnnnnnnnnnnnnnnnnnnnnnnnnnnnnnnnnnnnnnnnnnnnnnnnnnnnnnnnnnnnnnnnnnnnnnnnnnnnnnnnnnnnnnnnnnnnnnnnnnnnnnnnnnnnnnnnnnnnnnnnnnnnnnnnnnnnnnnnnnnnnnnnnnnnnnnnnnnnnnnnnnnnnnnnnnnnnnnnnnnnnnnnnnnnnnnnnnnnnnnnnnnnnnnnnnnnnnnnnnnnnnnnnnnnnnnnnnnnnnnnnnnnnnnnnnnnnnnnnnnnnnnnnnnnnnnnnnnnnnnnnnnnnnnnnnnnnnnnnnnnnnnnnnnnnnnnnnnnnnnnnnnnnnnnnnnnnnnnnnnnnnnnnnnnnnnnnnnnnnnnnnnnnnnnnnnnnnnnnnnnnnnnnnnnnnnnnnnnnnnnnnnnnnnnnnnnnnnnnnnnnnnnnnnnnnnnnnnnnnnnnnnnnnnnnnnnnnnnnnnnnnnnnnnnnnnnnnnnnnnnnnnnnnnnnnnnnnnnnnnnnnnnnnnnnnnnnnnnnnnnnnnnnnnnnnnnnnnnnnnnnnnnnnnnnnnnnnnnnnnnnnnnnnnnnnnnnnnnnnnnnnnnnnnnnnnnnnnnnnnnnnnnnnnnnnnnnnnnnnnnnnnnnnnnnnnnnnnnnnnnnnnnnnnnnnnnnnnnnnnnnnnnnnnnnnnnnnnnnnnnnnnnnnnnnnnnnnnnnnnnnnnnnnnnnnnnnnnnnnnnnnnnnnnnnnnnnnnnnnnnnnnnnnnnnnnnnnnnnnnnnnnnnnnnnnnnnnnnnnnnnnnnnnnnnnnnnnnnnnnnnnnnnnnnnnnnnnnnnnnnnnnnnnnnnnnnnnnnnnnnnnnnnnnnnnnnnnnnnnnnnnnnnnnnnnnnnnnnnnnnnnnnnnnnnnnnnnnnnnnnnnnnnnnnnnnnnnnnnnnnnnnnnnnnnnnnnnnnnnnnnnnnnnnnnnnnnnnnnnnnnnnnnnnnnnnnnnnnnnnnnnnnnnnnnnnnnnnnnnnnnnnnnnnnnnnnnnnnnnnnnnnnnnnnnnnnnnnnnnnnnnnnnnnnnnnnnnnnnnnnnnnnnnnnnnnnnnnnnnnnnnnnnnnnnnnnnnnnnnnnnnnnnnnnnnnnnnnnnnnnnnnnnnnnnnnnnnnnnnnnnnnnnnnnnnnnnnnnnnnnnnnnnnnnnnnnnnnnnnnnnnnnnnnnnnnnnnnnnnnnnnnnnnnnnnnnnnnnnnnnnnnnnnnnnnnnnnnnnnnnnnnnnnnnnnnnnnnnnnnnnnnnnnnnnnnnnnnnnnnnnnnnnnnnnnnnnnnnnnnnnnnnnnnnnnnnnnnnnnnnnnnnnnnnnnnnnnnnnnnnnnnnnnnnnnnnnnnnnnnnnnnnnnnnnnnnnnnnnnnnnnnnnnnnnnnnnnnnnnnnnnnnnnnnnnnnnnnnnnnnnnnnnnnnnnnnnnnnnnnnnnnnnnnnnnnnnnnnnnnnnnnnnnnnnnnnnnnnnnnnnnnnnnnnnnnnnnnnnnnnnnnnnnnnnnnnnnnnnnnnnnnnnnnnnnnnnnnnnnnnnnnnnnnnnnnnnnnnnnnnnnnnnnnnnnnnnnnnnnnnnnnnnnnnnnnnnnnnnnnnnnnnnnnnnnnnnnnnnnnnnnnnnnnnnnnnnnnnnnnnnnnnnnnnnnnnnnnnnnnnnnnnnnnnnnnnnnnnnnnnnnnnnnnnnnnnnnnnnnnnnnnnnnnnnnnnnnnnnnnnnnnnnnnnnnnnnnnnnnnnnnnnnnnnnnnnnnnnnnnnnnnnnnnnnnnnnnnnnnnnnnnnnnnnnnnnnnnnnnnnnnnnnnnnnnnnnnnnnnnnnnnnnnnnnnnnnnnnnnnnnnnnnnnnnnnnnnnnnnnnnnnnnnnnnnnnnnnnnnnnnnnnnnnnnnnnnnnnnnnnnnnnnnnnnnnnnnnnnnnnnnnnnnnnnnnnnnnnnnnnnnnnnnnnnnnnnnnnnnnnnnnnnnnnnnnnnnnnnnnnnnnnnnnnnnnnnnnnnnnnnnnnnnnnnnnnnnnnnnnnnnnnnnnnnnnnnnnnnnnnnnnnnnnnnnnnnnnnnnnnnnnnnnnnnnnnnnnnnnnnnnnnnnnnnnnnnnnnnnnnnnnnnnnnnnnnnnnnnnnnnnnnnnnnnnnnnnnnnnnnnnnnnnnnnnnnnnnnnnnnnnnnnnnnnnnnnnnnnnnnnnnnnnnnnnnnnnnnnnnnnnnnnnnnnnnnnnnnnnnnnnnnnnnnnnnnnnnnnnnnnnnnnnnnnnnnnnnnnnnnnnnnnnnnnnnnnnnnnnnnnnnnnnnnnnnnnnnnnnnnnnnnnnnnnnnnnnnnnnnnnnnnnnnnnnnnnnnnnnnnnnnnnnnnnnnnnnnnnnnnnnnnnnnnnnnnnnnnnnaggtttttcatagtctcctcaaggctcatgcaatggaagctcgagcgatcgtcagacaggcgatggccattctgaccccggcggtgccggccaggatggaggacgggcaccagatgctgacccactggacccggaagatcatcgtagaggaggggcacaccgtcccacagctggtccacattctgcacctgatagtgcaacacttcaaggtgnnnnnnnnnnnnnnnnnnnnnnnnnnnnnnnnnnnnnnnnnnnnnnnnnnnnnnnnnnnnnnnnnnnnnnnnnnnnnnnnnnnnnnnnnnnnnnnnnnnnnnnnnnnnnnnnnnnnnnnnnnnnnnnnnnnnnnnnnnnnnnnnnnnnnnnnnnnnnnnnnnnnnnnnnnnnnnnnnnnnnnnnnnnnnnnnnnnnnnnnnnnnnnnnnnnnnnnnnnnnnnnnnnnnnnnnnnnnnnnnnnnnnnnnnnnnnnnnnnnnnnnnnnnnnnnnnnnnnnnnnnnnnnnnnnnnnnnnnnnnnnnnnnnnnnnnnnnnnnnnnnnnnnnnnnnnnnnnnnnnnnnnnnnnnnnnnnnnnnnnnnnnnnnnnnnnnnnnnnnnnnnnnnnnnnnnnnnnnnnaggttaatgacaacaccaacacggcggggtcccctggggaggtgctctctcgccggtgtgtgaaccttctgaagaccgcgttgcggccagacatgtggcccaagtctgaactcaagctgcagtggttcgacaagctgctgatgactgtgnggagcagccaaaccaagtgaactatgggaatatctgcacgggactagaagtgctgagcttcctgctaactgtcctgcagtccccagccatcctcagtagctttaaacccctgcagcgtggaatcgccgcctgcatgacctgtggaaacaccaaggtgttgcgagccgtccacagccttctctcacgcctcatgagcattttcccaacggagccgagtnnnnnnnnnnnnnnnnnnnnnnnnnnnnnnnnnnnnnnnnnnnnnnnnnnnnnnnnnnnnnnnnnnnnnnnnnnnnnnnnnnnnnnnnnnnnnnnnnnnnnnnnnnnnnnnnnnnnnnnnnnnnnnnnnnnnnnnnnnnnnnnnnnnnnnnnnnnnnnnnnnnnnnnnnnnnnnnnnnnnnnnnnnnnnnnnnnnnnnnnnnnnnnnnnnnnnnnnnnnnnnnnnnnnnnnnnnnnnnnnnnnnnnnnnnnnnnnnnnnnnnnnnnnnnnnnnnnnnnnnnnnnnnnnnnnnnnnnnnnnnnnnnnnnnnnnnnnnnnnnnnnnnnnnnnnnnnnnnnnnnnnnnnnnnnnnnnnnnnnnnnnnnnnnnnnnnnnnnnnnnnnnnnnnnnnnnnnnnnnnnnnnnnnnnnnnnnnnnnnnnnnnnnnnnnnnnnnnnnnnnnnnnnnnnnnnnnnnnnnnnnnnnnnnnnnnnnnnnnnnnnnnnnnnnnnnnnnnnnnnnnnnnnnnnnnnnnnnnnnnnnnnnnnnnnnnnnnnnnnnnnnnnnnnnnnnnnnnnnnnnnnnnnnnnnnnnnnnnnnnnnnnnnnnnnnnnnnnnnnnnnnnnnnnnnnnnnnnnnnnnnnnnnnnnnnnnnnnnnnnnnnnnnnnnnnnnnnnnnnnnnnnnnnnnnnnnnnnnnnnnnnnnnnnnnnnnnnnnnnnnnnnnnnnnnnnnnnnnnnnnnnnnnnnnnnnnnnnnnnnnnnnnnnnnnnnnnnnnnnnnnnnnnnnnnnnnnnnnnnnnnnnnnnnnnnnnnnnnnnnnnnngctgctcctggctgtgtgtgagaagagcacccccattggcaccagctgccaaggagccatgctcccatccatcaccaacgtcatcaacctggccgatagccatgaccgtgccgccttcgccatggtcacgcatgtcaagcaggagccccgggagcgggagaacagcgagtctaaagaggaggnnnaggatgtagagatagacattgaactagctcctggggatcagaccagcacacccaaaaccaaagaactttcggaaaaggacattggaaaccagctgcacatgctaaccaacaggcacgacaagtttctggacaccctccgagaggtgaannnnnnnnnnnnnnnnnnnnnnnnnnnnnnnnnnnnnnnnnnnnnnnnnnnnnnnnnnnnnnnnnnnnnnnnnnnnnnnnnnnnnnnnnnnnnnnnnnnnnnnnnnnnnnnnnnnnnnnnnnnnnnnnnnnnnnnnnnnnnnnnnnnnnnnnnnnnnnnnnnnnnnnnnnnnnnnnnnnnnnnnnnnnnnnnnnnnnnnnnnnnnnnnnnnnnnnnnnnnnnnnnnnnnnnnnnnnnnnnnnnnnnnnnnnnnnnnnnnnnnnnnnnnnnnnnnnnnnnnnnnnnnnnnnnnnnnnnnnnnnnnnnnnnnnnnnnnnnnnnnnnnnnnnnnnnnnnnnnnnnnnnnnnnnnnnnnnnnnnnnnnnnnnnnnnnnnnnnnnnnnnnnnnnnnnnnnnnnnnnnnnnnnnnnnnnnnnnnnnnnnnnnnnnnnnnnnnnnnnnnnnnnnnnnnnnnnnnnnnnnnnnnnnnnnnnnnnnnnnnnnnnnnnnnnnnnnnnnnnnnnnnnnnnnnnnnnnnnnnnnnnnnnnnnnnnnnnnnnnnnnnnnnnnnnnnnnnnnnnnnnnnnnnnnnnnnnnnnnnnnnnnnnnnnnnnnnnnnnnnnnnnnnnnnnnnnnnnnnnnnnnnnnnnnnnnnnnnnnnnnnnnnnnnnnnnnnnnnnnnnnnnnnnnnnnnnnnnnnnnnnnnnnnnnnnnnnnnnnnnnnnnnnnnnnnnnnnnnnnnnnnnnnnnnnnnnnnnnnnnnnnnnnnnnnnnnnnnnnnnnnnnnnnnnnnnnnnnnnnnnnnnnnnnnnnaggtggaagtgagctgtccgaaggagatggcctggaaggtgaacatgtaccgcggatacctggccatctgccaccccgaggaacagcagctcagcttcattgagcgcctggtggagatggccagcagcctggccatccgtgagtggcggcggctgccccatgtggtgtcccacgtgcacacaccactcctgcaggnnnnnnnnnnnnnnnnnnnnnnnnnnnnnnnnnnnnnnnnnnnnnnnnnnnnnnnnnnnnnnnnnnnnnnnnnnnnnnnnnnnnnnnnnnnnnnnnnnnnnnnnnnnnnnnnnnnnnnnnnnnnnnnnnnnnnnnnnnnnnnnnnnnnnnnnnnnnnnnnnnnnnnnnnnnnnnnnnnnnnnnnnnnnnnnnnngcgattgtaactgcctatgagaatagctctcagcatgatcccagttcaaataacgctatgcttggggttcacgcatcagcttcagcaatcatccagtacggaaaaatcgcccggaaacaaggactggtcaatgtagctctggatatattaagtcggattcatactattccaactgttcctatcgtggattgcttccagaagattagacagcaagttaaatgctacctccagctggcaggcgtcatgggcaaaaacgagtgcatgcagnnnnnnnnnnnnnnnnnnnnnnnnnnnnnnnnnnnnnnnnnnnnnnnnnnnnnnnnnnnnnnnnnnnnnnnnnnnnnnnnnnnnnnnnnnnnnnnnnnnntccgaggaggcaaacaaagccttctctgcagccgtgcagatgcacgatgtgctggtgaaagcctgggccatgtggggcgactacctggagaacatcttcgtgaaggagcggcagctgcacctgggcgtatctgccatcacctgctacctgcacgcctgccggcatcaaaacgagagcaaatcgaggaaatacttagccaaggtgnnnnnnnnnnnnnnnnnnnnnnnnnnnnnnnnnnnnnnnnnnnnnnnnnnnnnnnnnnnnnnnnnnnnnnnnnnnnnnnnnnnnnnnnnnnnnnnnnnnnnnnnnnnnnnnnnnnnnnnnnnnnnnnnnnnnnnnnnnnnnnnnnnnnnnnnnnnnnnnnnnnnnnnnnnnnnnnnnnnnnnnnnnnnnnnnnnnnnnnnnnnnnnnnnnnnnnnnnnnnnnnnnnnnnnnnnnnnnnnnnnnnnnnnnnnnnnnnnnnnnnnnnnnnnnnnnnnnnnnnnnnnnnnnnnnnnnnnnnnnnnnnnnnnnnnnnnnnnnnnnnnnnnnnnnnnnnnnnnnnnnnnnnnnnnnnnnnnnnnnnnnnnnnnnnnnnnnnnnnnnnnnnnnnnnnnnnnnnnnnnnnnnnnnnnnnnnnnnnnnnnnnnnnnnnnnnnnnnnnnnnnnnnnnnnnnnnnnnnnnnnnnnnnnnnnnnnnnnnnnnnnnnnnnnnnnnnnnnnnnnnnnnnnnnnnnnnnnnnnnnnnnnnnnnnnnnnnnnnnnnnnnnnnnnnnnnnnnnnnnnnnnnnnnnnnnnnnnnnnnnnnnnnnnnnnnnnnnnnnnnnnnnnnnnnnnnnnnnnnnnnnnnnnnnnnnnnnnnnnnnnnnnnnnnnnnnnnnnnnnnnnnnnnnnnnnnnnnnnnnnnnnnnnnnnnnnnnnnnnnnnnnnnnnnnnnnnnnnnnnnnnnnnnnnnnnnnnnnnnnnnnnnnnnnnnnnnnnnnnnnnnnnnnnnnnnnnnnnnnnnnnnnnnnnnnnnnnnnnnnnnnnnnnnnnnnnnnnnnnnnnnnnnnnnnnnnnnnnnnnnnnnnnnnnnnnnnnnnnnnnnnnnnnnnnnnnnnnnnnnnnnnnnnnnnnnnnnnnnnnnnnnnnnnnnnnnnnnnnnnnnnnnnnnnnnnnnnnnnnnnnnnnnnnnnnnnnnnnnnnnnnnnnnnnnnnnnnnnnnnnnnnnnnnnnnnnnnnnnnnnnnnnnnnnnnnnnnnnnnnnnnnnnnnnnnnnnnnnnnnnnnnnnnnnnnnnnnnnnnnnnnnnnnnnnnnnnnnnnnnnnnnnnnnnnnnnnnnnnnnnnnnnnnnnnnnnnnnnnnnnnnnnnnnnnnnnnnnnnnnnnnnnnnnnnnnnnnnnnnnnnnnnnnnnnnnnnnnnnnnnnnnnnnnnnnnnnnnnnnnnnnnnnnnnnnnnnnnnnnnnnnnnnnnnnnnnnnnnnnnnnnnnnnnnnnnnnnnnnnnnnnnnnnnnnnnnnnnnnnnnnnnnnnnnnnnnnnnnnnnnnnnnnnnnnnnnnnnnnnnnnnnnnnnnnnnnnnnnnnnnnnnnnnnnnnnnnnnnnnnnnnnnnnnnnnnnnnnnnnnnnnnnnnnnnnnnnnnnnnnnnnnnnnnnnnnnnnnnnnnnnnnnnnnnnnnnnnnnnnnnnnnnnnnnnnnnnnnnnnnnnnnnnnnnnnnnnnnnnnnnnnnnnnnnnnnggacactggcaaactgaatgttgcctactttcggtttgacataaacgacgccactggagacctagatgccaaccgtcctgtcccgtttcgactcacgcccaacatttctgagtttctgactaccatcggtgtctccggcccgttgacggcatccatgattgcggttgcccggtgcttcgcccagccgaactttaaggtgg

SEQ ID NO: 34529 - DNA, 334 bp, Macaca Mulatta
ggactgggaacccagggccgctgctgcagcagcccctggtgagggcgccagggagaggacgttgaccaggcagctggcccaggatgctgggctgctgctgtggtctgagctcctggtcggagcaagaggagggggctggctgtgtcctcaggcaggggccaggcctcagtggagcttgccaggccatcgattccatctgtgcttccagagttgagcagactccagggactgagctgctctcatcaaatcccctagacgctaactagatagcaatggacgtgtggttctttccacaagagactttagacccctacatggaaacaaagcccaaaag

SEQ ID NO: 34530 - DNA, 702 bp, Macaca Mulatta
  misc_feature (1)...(702): n = A,T,C or G
ggaatacgtcgcctacagccacacaggccgcatcatccctgccatctggttccgctacgacctcagccccatcacggtcaagtacacagagagacggcagccgctctacagattcatcaccacgnnnnnnnnnnnnnnnnnnnnnnnnnnnnnnnnnnnnnnnnnnnnnnnnnnnnnnnnnnnnnnnnnnnnnnnnnnnnnnnnnnnnnnnnnnnnnnnnnnnnnncattgacgccgcacccagcctaacagccgaggactctgggcatcgccagccttgcctccaacgccctgtctcctttggccctcaatctggcctcaaatctggctgtgtcccaaagtgtgtgtgggaggtggggggaaagtagaggatggctcgatgtttcgcagctacctcgtttccccgtgtttcattttagacaaattacactgcccgaagttgcagttcccctttccctggggagccccaagagtagagtcaggcaaggggtggggagtccagggatcttggggacccctcctaggagagctgcagtctcttccctcttaggggaatatcccagaacgcatatcgatcagctcgcagccaggcttcgacaatctcgtggcccccactgtgtggacacactaatgatttggtttcttccctgggcagccaacctgccccagaggcgccagacctgggctgtcagctttgggacc

SEQ ID NO: 34531 - DNA, 3940 bp, Macaca Mulatta
  misc_feature (1)...(3940): n = A,T,C or G
gacagggagccaggaggggaaccacggattgacctgacctgcgtccagccctcctcagggtcactgcaaaaagtgattcacatgtgcccaggccctgaagtgggctggacctgggagtggcnnnnnnnnnnnnnnnnnnnnnnnnnnnnnnnnnnnnnnnnnnnnnnnnnnnnnnnnnnnnnnnnnnnnnnnnnnnnnnnnnnnnnnnnnnnnnnnnnnnnnnnnnnnnnnnnnnnnnnnnnnnnnnnnnnnnnnnnnnnnnnnnnnnnnnnnnnnnnnnnnnnnnnnnnnnnnnnnnnnnnnnnnnnnnnnnnnnnnnnnnnnnnnnnnnnnnnnnnnnnnnnnnnnnnnnnnnnnnnnnnnnnnnnnnnnnnnnnnnnnnnnnnnnnnnnnnnnnnnnnnnnnnnnnnnnnnnnnnnnnnnnnnnnnnnnnnnnnnnnnnnnnnnnnnnnnnnnnnnnnnnnnnnnnnnnnnnnnnnnnnnnnnnnnnnnnnnnnnnnnnnnnnnnnnnnnnnnnnnnnnnnnnnnnnnnnnnnnnnnnnnnnnnnnnnnnnnnnnnnnnnnnnnnnnnnnnnnnnnnnnnnnnnnnnnnnnnnnnnnnnnnnnnnnnnnnnnnnnnnnnnnnnnnnnnnnnnnnnnnnnnnnnnnnnnnnnnnnnnnnnnnnnnnnnnnnnnnnnnnnnnnnnnnnnnnnnnnnnnnnnnnnnnnnnnnnnnnnnnnnnnnnnnnnnnnnnnnnnnnnnnnnnnnnnnnnnnnnnnnnnnnnnnnnnnnnnnnnnnnnnnnnnnnnnnnnnnnnnnnnnnnnnnnnnnnnnnnnnnnnnnnnnnnnnnnnnnnnnnnnnnnnnnnnnnnnnnnnnnnnnnnnnnnnnnnnnnnnnnnnnnnnnnnnnnnnnnnnnnnnnnnnnnnnnnnnnnnnnnnnnnnnnnnnnnnnnnnnnnnnnnnnnnnnnnnnnnnnnnnnnnnnnnnnnnnnnnnnnnnnnnnnnnnnnnnnnnnnnnnnnnnnnnnnnnnnnnnnnnnnnnnnnnnnnnnnnnnnnnnnnnnnnnnnnnnnnnnnnnnnnnnnnnnnnnnnnnnnnnnnnnnnnnnnnnnnnnnnnnnnnnnnnnnnnnnnnnnnnnnnnnnnnnnnnnnnnnnnnnnnnnnnnnnnnnnnnnnnnnnnnnnnnnnnnnnnnnnnnnnnnnnnnnnnnnnnnnnnnnnnnnnnnnnnnnnnnnnnnnnnnnnnnnnnnnnnnnnnnnnnnnnnnnnnnnnnnnnnnnnnnnnnnnnnnnnnnnnnnnnnnnnnnnnnnnnnnnnnnnnnnnnnnnnnnnnnnnnnnnnnnnnnnnnnnnnnnnnnnnnnnnnnnnnnnnnnnnnnnnnnnnnnnnnnnnnnnnnnnnnnnnnnnnnnnnnnnnnnnnnnnnnnnnnnnnnnnnnnnnnnnnnnnnnnnnnnnnnnnnnnnnnnnnnnnnnnnnnnnnnnnnnnnnnnnnnnnnnnnnnnnnnnnnnnnnnnnnnnnnnnnnnnnnnnnnnnnnnnnnnnnnnnnnnnnnnnnnnnnnnnnnnnnnnnnnnnnnnnnnnnnnnnnnnnnnnnnnnnnnnnnnnnnnnnnnnnnnnnnnnnnnnnnnnnnnnnnnnnnnnnnnnnnnnnnnnnnnnnnnnnnnnnnnnnnnnnnnnnnnnnnnnnnnnnnnnnnnnnnnnnnnnnnnnnnnnnnnnnnnnnnnnnnnnnnnnnnnnnnnnnnnnnnnnnnnnnnnnnnnnnnnnnnnnnnnnnnnnnnnnnnnnnnnnnnnnnnnnnnnnnnnnnnnnnnnnnnnnnnnnnnnnnnnnnnnnnnnnnnnnnnnnnnnnnnnnnnnnnnnnnnnnnnnnnnnnnnnnnnnnnnnnnnnnnnnnnnnnnnnnnnnnnnnnnnnnnnnnnnnnnnnnnnnnnnnnnnnnnnnnnnnnnnnnnnnnnnnnnnnnnnnnnnnnnnnnnnnnnnnnnnnnnnnnnnnnnnnnnnnnnnnnnnnnnnnnnnnnnnnnnnnnnnnnnnnnnnnnnnnnnnnnnnnnnnnnnnnnnnnnnnnnnnnnnnnnnnnnnnnnnnnnnnnnnnnnnnnnnnnnnnnnnnnnnnnnnnnnnnnnnnnnnnnnnnnnnnnnnnnnnnnnnnnnnnnnnnnnnnnnnnnnnnnnnnnnnnnnnnnnnnnnnnnnnnnnnnnnnnnnnnnnnnnnnnnnnnnnnnnnnnnnnnnnnnnnnnnnnnnnnnnnnnnnnnnnnnnnnnnnnnnnnnnnnnnnnnnnnnnnnnnnnnnnnnnnnnnnnnnnnnnnnnnnnnnnnnnnnnnnnnnnnnnnnnnnnnnnnnnnnnnnnnnnnnnnnnnnnnnnnnnnnnnnnnnnnnnnnnnnnnnnnnnnnnnnnnnnnnnnnnnnnnnnnnnnnnnnnnnnnnnnnnnnnnnnnnnnnnnnnnnnnnnnnnnnnnnnnnnnnnnnnnnnnnnnnnnnnnnnnnnnnnnnnnnnnnnnnnnnnnnnnnnnnnnnnnnnnnnnnnnnnnnnnnnnnnnnnnnnnnnnnnnnnnnnnnnnnnnnnnnnnnnnnnnnnnnnnnnnnnnnnnnnnnnnnnnnnnnnnnnnnnnnnnnnnnnnnnnnnnnnnnnnnnnnnnnnnnnnnnnnnnnnnnnnnnnnnnnnnnnnnnnnnnnnnnnnnnnnnnnnnnnnnnnnnnnnnnnnnnnnnnnnnnnnnnnnnnnnnnnnnnnnnnnnnnnnnnnnnnnnnnnnnnnnnnnnnnnnnnnnnnnnnnnnnnnnnnnnnnnnnnnnnnnnnnnnnnnnnnnnnnnnnnnnnnnnnnnnnnnnnnnnnnnnnnnnnnnnnnnnnnnnnnnnnnnnnnnnnnnnnnnnnnnnnnnnnnnnnnnnnnnnnnnnnnnnnnnnnnnnnnnnnnnnnnnnnnnnnnnnnnnnnnnnnnnnnnnnnnnnnnnnnnnnnnnnnnnnnnnnnnnnnnnnnnnnnnnnnnnnnnnnnnnnnnnnnnnnnnnnnnnnnnnnnnnnnnnnnnnnnnnnnnnnnnnnnnnnnnnnnnnnnnnnnnnnnnnnnnnnnnnnnnnnnnnnnnnnnnnnnnnnnnnnnnnnnnnnnnnnnnnnnnnnnnnnnnnnnnnnnnnnnnnnnnnnnnnnnnnnnnnnnnnnnnnnnnnnnnnnnnnnnnnnnnnnnnnnnnnnnnnnnnnnnnnnnnnnnnnnnnnnnnnnnnnnnnnnnnnnnnnnnnnnnnnnnnnnnnnnnnnnnnnnnnnnnnnnnnnnnnnnnnnnnnnnnnnnnnnnnnnnnnnnnnnnnnnnnnnnnnnnnnnnnnnnnnnnnnnnnnnnnnnnnnnnnnnnnnnnnnnnnnnnnnnnnnnnnnnnnnnnnnnnnnnnnnnntcacgccagcgttcgcccgtctgcatgggccccggctgctgtgaccaccatgcccggggcaggagctgtgnnnnnnnnnnnnnnnnnnnnnncacgcactctatgagggagaccccgacagaggatgcttgaaccagaatctcaggaccctgaccagggagctgccagcccagggcgccgcttcccatgggnnnnnnnnnnnnnnnnnnnnnnnnnnnnnnncccacagcccgcctggccaggcctcccggccaccacgcagaatacctcgaaccagacgggctgtgagccagccccactcacctgccagccccaacacccgacggggggctgaggccagtctgcccctccctgtgggctcagagtcttctgtgggggaggcagccaagagctctgtccacaaaaccaaatctgggtgtcagacgccaagaccccagggtgggatcagggaccactcctcggggcataatatcagttttcccccagagcccgggtccctgttcgccacggggcaggcggggtccctggagccctggtgtggagcggaaagtcccagggcggtccctgtcttagaaggagg

SEQ ID NO: 34532 - DNA, 2145 bp, Macaca Mulatta
  misc_feature (1)...(2145): n = A,T,C or G
gcggccgccatggcggagaattggaagaactgcttcgaggaggagctcatctgccccatctgcctgcacgtcttcgtggagccagtgcagctgccgtgcaaacacaacttctgccggggctgcatcggcgaggcgtgggctaaggacagcggcctcgtgcgctgcccagagtgcaaccaggcctacaaccagaagccgggcctggagaagaacctgaagctcaccaacatcgtggagaagttcaacgccctgcacgtggagaagccgccggcggcgctgcactgcgtgttctgccgccgcggccccccgctgcccgcccagaaggtctgcctgcgctgcgaggcgccctgctgccagtcccacgtgcagacgcacctgcagcagccctccaccgcccgcgggcacctcctggtggaggcggacgacgtgcgggcctggagctgcccgcagcacaacgcctaccgcctctaccactgcgaggccgagctggaaggcgtgtgccagtactgctgctactacagcggcgcgcataagggacactcggtgtgcnnnnnnnnnnnnnnnnnnnnnnnnnnnnnnnnnnnnnnnnnnnnnnnnnnnnnnnnnnnnnnnnnnnnnnnnnnnnnnnnnnnnnnnnnnnnnnnnnnnnnnnnnnnnnnnnnnnnnnnnnnnnnnnnnnnnnnnnnnnnnnnnnnnnnnnnnnnnnnnnnnnnnnnnnnnnnnnnnnnnnnnnnnnnnnnnnnnnnnnnnnnnnnnnnnnnnnnnnnnnnnnnnnnnnnnnnnnnnnnnnnnnnnnnnnnnnnnnnnnnnnnnnnnnnnnnnnnnnnnnnnnnnnnnnnnnnnnnnnnnnnnnnnnnnnnnnnnnnnnnnnnnnnnnnnnnnnnnnnnnnnnnnnnnnnnnnnnnnnnnnnnnnnnnnnnnnnnnnnnnnnnnnnnnnnnnnnnnnnnnnnnnnnnnnnnnnnnnnnnnnnnnnnnnnnnnnnnnnnnnnnnnnnnnnnnnnnnnnnnnnnnnnnnnnnnnnnnnnnnnnnnnnnnnnnnnnnnnnnnnnnnnnnnnnnnnnnnnnnnnnnnnnnnnnnnnnnnnnnnnnnnnnnnnnnnnnnnnnnnnnnnnnnnnnnnnnnnnnnnnnnnnnnnnnnnnnnnnnnnnnnnnnnnnnnnnnnnnnnnnnnnnnnnnnnnnnnnnnnnnnnnnnnnnnnnnnnnnnnnnnnnnnnnnnnnnnnnnnnnnnnnnnnnnnnnnnnnnnnnnnnnnnnnnnnnnnnnnnnnnnnnnnnnnnnnnnnnnnnnnnnnnnnnnnnnnnnnnnnnnnnnnnnnnnnnnnnnnnnnnnnnnnnnnnnnnnnnnnnnnnnnnnnnnnnnnnnnnnnnnnnnnnnnnnnnnnnnnnnnnnnnnnnnnnnnnnnnnnnnnnnnnnnnnnnnnnnnnnnnnnnnnnnnnnnnnnnnnnnnnnnnnnnnnnnnnnnnnnnnnnnnnnnnnnnnnnnnnnnnnnnnnnnnnnnnnnnnnnnnnnnnnnnnnnnnnnnnnnnnnnnnnnnnnnnnnnnnnnnnnnnnnnnnnnnnnnnnnnnnnnnnnnnnnnnnnnnnnnnnnnnnnnnnnnnnnnnnnnnnnnnnnnnnnnnnnnnnnnnnnnnnnnnnnnnnnnnnnnaacactacgtgacgagctaacgccacgcaggccgttgggcgctggggaatcttcctccccggcccccgggctcgggagttatgcatccagagacctgcccttctatcttcctcgcctcccctcttcctcattccattgccccaggtcnnnnnnnnnnnnnnnnnnnnnnnnnnnnnnnnnnnnnnnnnnnnnnnnnnnttatgaatctcctggacgcacaggtgacagtgggagctggcctgggctgggaccgcaggtggccctggagatgggaaagtgtctgtgtcaaggcgctgagctctcttctgtctctcctttttccctctactccttccccttcacacccccgtggctggaaggagccttagcttccctgaaagcttgggggtcccacccttcttaccctgcccgggaggaacgcccagggtttgtttctcctcttgttttccttttgggcagtttgatcactgatcgagtaaggaatgacctttatattgtg

SEQ ID NO: 34533 - DNA, 450 bp, Macaca Mulatta
ttcctctactccggccatctggccctgaggctgtaccatatcactgaccaggtccatctctaccccatcgatgatgtgtatactggaatgtgccttcagaaactcggcctcgttccagagaaacacaaaggcttcaggacatttgatatcgaggagaaaaacaaaaataatatctgctcctatgtagatctgatgttagtacatagtagaaaacctcaagagatgattgatatttggtctcagttgcagagtgctcatttaaaatgctaaaatagatacaaactcaattttgcatagaaaggtgtattttgaatagtttccatgttgtgttctcacattagagtaatttctatattaaaccatgaaaattgcctttacgagtgagatccatttgagggcctctaaacccttcaatgtggtactcacgtgaagagggaaagcggaagatgg

SEQ ID NO: 34534 - DNA, 2977 bp, Macaca Mulatta
  misc_feature (1)...(2977): n = A,T,C or G
tgtggcttccgctggtgctgttcctgaccgtgctgctgctggccgtcgtctgcaaagtttacttgggactgttctctggcaaatccccaaatcctttctctgaagatgtcaaacggccaccagcgcccctggtaactgacaaggaggccaggaagaaggttctcaaacaagnnnnnnnnnnnnnnnnnnnnnnnnnnnnnnnnnnnnnnnnnnnnnnnnnnnnnnnnnnnnnnnnnnnnnnnnnnnnnnnnnnnnnnnnnnnnnnnnnnnnnnnnnnnnnnnnnnnnnnnnnnnnnnnnnnnnnnnnnnnnnnnnnnnnnnnnnnnnnnnnnnnnnnnnnnnnnnnnnnnacaggaatcctttacgaggggcgtatggaggcgtgcagcattggccgttttatcttggaccagatcactgaagggcagctgnnnnnnnnnnnnnnnnntctccttttgacatcatggtactggaagnnnnnnnnnnnnnnnnnnnnnnnnnnnnnnnnnnnnnnnnnnnnnnnnnnnnnnnnnnnnnnnnnnnnnnnnnnnnnnnnnnnnnnnnnnnnnnnnnnnnnnnnnnnnnnnnnnnnaggtggtatccaatggagtcgctcatgccatcctgttgaagttcctcccattgcccgtgattcagctcctcgacaggtgcgggctgctgactcgtttctctccattccttcatgcatccacccagagcctggctgaggtcctgcagcagctgggggcctcctctgagctccaggcagtgctcagctacatcttccccacttacggtnnnnnnnnnnnnnnnnnnnnnnnnnnnnnnnnnnnnnnnnnnnnnnnnnnnnnnnnnnnnnnnnnnnnnnnnnnnnnnnnnnnnnnnnnnnnnnnnnnnnnnnnnnnnnnnnnnnnnnnnnnnnnnnnnnnnnnnnnnnnnnnnnnnnnnnnnnnnnnnnnnnnnnnnnnnnnnnnnnnnnnnnnnnnnnnnnnnntgtcagtgtgaggaaggggcatgagctggtgaacatctattgccccgtcgtggtctccaatgcagggctgttcaacacctatgagcacctactgccggggaatgcccgctgtctgccaggnnnnnnnnnnnnnnnnnnnnnnnnnnnnnnnnnnnnnnnnnnnnnnnnnnnnnnnnnnnnnnnnnnnnnnnnnnnnnnnnnnnnnnnnnnnnnnnnnnnnnnnnnnnnnnnnnnnnnnnnnnnnnnnnnnnnnnnnnnnnnnnnnnnnnnnnnnnnnnnnnnnnnnnnnnnnnnnnnnnnnnnnnnnnnnnnnnnnnnnnnnnnnnnnnnnnnnnnnnnnnnnnnnnnnnnnnnnnnnnnnnnnnnnnnnnnnnnnnnnnnnnnnnnnnnnnnnnnnnnnnnnnnnnnnnnnnnnnnnnnnnnnnnnnnnnnnnnnnnnnnnnnnnnnnnnnnnnnnnnnnnnnnnnnnnnnnnnnnnnnnnnnnnnnnnnnnnnnnnnnnnnnnnnnnnnnnnnnnnnnnnnnnnnnnnnnnnnnnnnnnnnnnnnnnnnnnnnnnnnnnnnnnnnnnnnnnnnnnnnnnnnnnnnnnnnnnnnnnnnnnnnnnnnnnnnnnnnnnnnnnnnnnnnnnnnnnnnnnnnnnnnnnnnnnnnnnnnnnnnnnnnnnnnnnnnnnnnnnnnnnnnnnnnnnnnnnnnnnnnnnnnnnnnnnnnnnnnnnnnnnnnnnnnnnnnnnnnnnnnnnnnnnnnnnnnnnnnnnnnnnnnnnnnnnnnnnnnnnnnnnnnnnnnnnnnnnnnnnnnnnnnnnnnnnnnnnnnnnnnnnnnnnnnnnnnnnnnnnnnnnnnnnnnnnnnnnnnnnnnnnnnnnnnnnnnnnnnnnnnnnnnnnnnnnnnnnnnnnnnnnnnnnnnnnnnnnnnnnnnnnnnnnnnnnnnnnnnnnnnnnnnnnnnnnnnnnnnnnnnnnnnnnnnnnnnnnnnnnnnnnnnnnnnnnnnnnnnnnnnnnnnnnnnnnnnnnnnnnnnnnnnnnnnnnnnnnnnnnnnnnnnnnnnnnnnnnnnnnnnnnnnnnnnnnnnnnnnnnnnnnnnnnnnnnnnnnnnnnnnnnnnnnnnnnnnnnnnnnnnnnnnnnnnnnnnnnnnnnnnnnnnnnnnnnnnnnnnnnnnnnnnnnnnnnnnnnnnnnnnnnnnnnnnnnnnnnnnnnnnnnnnnnnnnnnnnnnnnnnnnnnnnnnnnnnnnnnnnnnnnnnnnnnnnnnnnnnnnnnnnnnnnnnnnnnnnnnnnnnnnnnnnnnnnnnnnnnnnnnnnnnnnnnnnnnnnnnnnnnnnnnnnnnnnnnnnnnnnnnnnnnnnnnnnnnnnnnnnnnnnnnnnnnnnnnnnnnnnnnnnnnnnnnnnnnnnnnnnnnnnnnnnnnnnnnnnnnnnnnnnnnnnnnnnnnnnnnnnnnnnnnnnnnnnnnnnnnnnnnnnnnnnnnnnnnnnnnnnnnnnnnnnnnnnnnnnnnnnnnnnnnnnnnnnnnnnnnnnnnnnnnnnnnnnnnnnnnnnnnnnnnnnnnnnnnnnnnnnnnnnnnnnnnnnnnnnnnnnnnnnnnnnnnnnnnnnnnnnnnnnnnnnnnnnnnnnnnnnnnnnnnnnnnnnnnnnnnnnnnnnnnnnnnnnnnnnnnnnnnnnnnnnnnnnnnnnnnnnnnnnnnnnnnnnnnnnnnnnnnnnnnnnnnnnnnnnnnnnnnnnnnnnnnnnnnnnnnnnnnnnnnnnnnnnnnnnnnnnnnnnnnnnnncagaacagggaaagtgacagaatgtgtgtgaagcccagaaatggcatttgccgttaattagcacatgtgagagttagatgggtatgtgaatgcaagctcaaggtttggaaaaatgacttttcagttatgtctttggtatcagacatacgaaaggctgctttgtagttcgtgttaatgtaacaataaattcattgattccattgctttaacatttgaa

SEQ ID NO: 34535 - DNA, 775 bp, Macaca Mulatta
gttattcctttcatcctgctcttggcctccaccatcttgctcatggcatcattgaccaaccttatacaacatcatggcactggtcactgcaatccaagcatgaaagcgcacttcactgccctgaggtcccttgccatcttgtttatcgtgtttacctcttactttctaaccatacttatcaccatgataggtactctatttgataagagatgttggttatggttctgggaagcttttgtctatgctttcatctttatgcattccacttcactgatgctgagcagccctacattgaaaaggattctaaatggaaaatgctaggcctagaggttgcctgaggcacaaggtacaagactcccgggcaattgatataattaataccagtaaagagtattgctcttatcaatcaattcattgtgaatcaccatgaatgcaagcctcattctcttccatcttcgcagccatctatttctaaataatcaaccctttctccatccttttccactggtttcctttccctttcacaatcctcaggttggttccaacttgctcaagactgccccatctctccttagtccttgccaactctggaatcgtacacctggtatattctacacaagacagtcaaaatcatggtgtccacacattaatttaactttcccatgactgccagttacttcacacatgaatatgaataccatcccacaaaaacgtattgcttgtaccctgaatgcttcccatactaagccttcaattcactttctttagtcaaggg

SEQ ID NO: 34536 - DNA, 1539 bp, Macaca Mulatta
  misc_feature (1)...(1539): n = A,T,C or G
gggcttctgctccaggcgggcttctgcaacaggcgtgggtcacgctctcgctcgctctctttctgccgccatcttggttctgcgttccctgaacaaaatgcccggagaagccacagaaaccgtccctgctacagagcaggagttgccgcagccccaggctgagacagggtctggaacagaatctgatagtgatgaatcagtaccagagcttgaagaacaggattccacccaggcaaccacacaacaagcccagctggcggcagcagctgaaattgatgaagaaccagtcagtaaagcaaaacagagtcggagtgaaaagaaggcacggaaggctatgtccaaactgggtcttcgacaggttacaggagttactagagtcactatccggaaatctaagaatatcctctttgtcatcacaaaaccagatgtctacaagagccctgcttcagatacttacatagtttttggggaagccaagatcgaagatttatcccagcaagcacaactagcagctgctgagaaattcaaagttcaaggtgaagctgtctcaaacattcaagaaaacacacagactccaaccgtacaagaggagagtgaagaggaagaggtcgatgaaacaggtgtagaagttaaagacatagaattggtcatgtcacaagcaaatgtgtcgagagctaaggcagtccgagcccttgaagaacaacagtaatgatattgtaaatgcgattatggaattaaacaatgttaaccatctgaaaagcaactttttttttggtgtctcaaagggagtaactacagcttggtttgaaatttgtactgtttctatcataaataaagttatggcttcttgttggnnnnnnnnnnnnnnnnnnnnnnnnnnnnnnnnnnnnnnnnnnnnnnnnnnnnnnnnnnnnnnnnnnnnnnnnnnnnnnnnnnnnnnnnnnnnnnnnnnnnngtcgaccccccccgccccccaaaaacttttcaaaacctttctttgggcccgcggccccataaggaaagaaaacagggcataaagcttttcccaagaaaacccgggcaaaaacaagggttggaatnnnnnnnnnnnnnnnnnnnnnnggggaaaccaagttttctaaaaaatcccaaagggatttcgaaggtctttacgggatctttcaaagggattccaaccaaccccaatttcaaattacccccggcctggccattaaaaaaaaaacgggtggaaattcataaaaccttctgcccaattggaaacccttctcaaaacgggtttgaaaaaaccttaaacccccggggggcttccccccctttggcccccttggcaaaaaaatattccccccnnnnnnnnnnnnnnnnnnnnnnnnnnnnnnnnnnaatttgggcccccttttaaaacaaaaacgggggaaaaccctcccccccagggttttggcnnnnnnnnnnnnnnnnnnnnnnnnnnnnnnnnnnnnnnnnnnaaagggaaaaacggccccggggtttttcaccgggagaacaaaccaacccatcttttgg

SEQ ID NO: 34537 - DNA, 788 bp, Macaca Mulatta
taaagccctatggatgcaaggaatgtgggaagaccttcagtcgtgcctcgtatcttgttcaacatggaagacttcacactggcgagaagccctatgaatgtaaggagtgtggcaaggcctttagtactggctcataccttgttcagcatcagaggattcatactggggagaaaccccatgaatgtaaggaatgtgggaaagcctttattagtcgccatcagcttactgtacatcaaagggttcatactggagagaaaccctatgagtgtaaggaatgtggcaaggccttcagagtgcacgtacatctcacacagcatcggaaaattcatactgatgtaaagccctacgaatgtaaggaatgtggaaagacttttagtcgagcctcgtaccttgtacaacatggcagaatccatactggtaagaagccctatgagtgtaaggagtgtggcaaggccttcagttctggctcataccttgttcagcatcaaagaattcatactggggagaaaccctatgaatgtaacaaatgtgggaaagcctttaccgtttatggacaacttattggacatcagagtgttcacactggtgagaaaccttttgaatgtaaggaatgtgggaaggcatttagacttaattcattccttaccgaacatcagcgggtacacactggtgagaaaccctttaaatgtaaaatatgtgggaagacctttagatacagttcagcccttaaagtgcatctgagaaagcatatgggtgttataccctaagagtttgaggaatgtgggaag

SEQ ID NO: 34538 - DNA, 129 bp, Macaca Mulatta
  misc_feature (1)...(129): n = A,T,C or G
ncagatggcaggcagcagattctgagtctgggcatggacctgcagttggaatggatgaagttagaagatttccaaaagcaccttgatgggaaagatgagaattttgctgcagcagatgcaattccaagt

SEQ ID NO: 34539 - DNA, 4056 bp, Macaca Mulatta
  misc_feature (1)...(4056): n = A,T,C or G
ccggccccggcccgggagaggcgatggcgagccgcgatagcaaccacgctggcgagagctttctcggctccgacggggannnnnnnnnnnnnnnnnnnnnnnnnnnnnnnnnnnnnnnnnnnnnnnnnnnnnnnnnnnnnnnnnnnnnnnnnnnnnnnnnnnnnnnnncaggttatcagaccaggatgaagagggaaagatcaagcaggagtgtatcatatctgacccctcattttccatggtgacagtccaaagggaagatagtgggataacctgggaaaccaattcaagtagatctactccttgggcttcagaagaaagtcagacttctggtgtgtgtagtcgggaagggtcaactgtgaattctcctcctggaaatgtttcctttattgtggatgaagtgaaaaaggttcggaaaaggactcataagtcaaagcatggttcaccatcattacgccggaaaggcaacaaaaaaagaaattcatttgaatcccaagatgttccaacaaacaaaaaaggcagtcctttaacttcagcaagcaagatactaaccacggagaaagagaagtcatatactggtgtttatgataaagcaagaaaaaagaagaccccttcaaatacacctccgatcactggggcaatatacaaagaacacaagccattagtgttaagaccagtctacataggaacagtacaatataaaattaagatgtttaattcagttaaagaagaattaattcctctacaattttatggaacattaccaaagggttatgtaattaaagaaatacattataggaaagggaaagatgcatccattagtctagagccagatttggacaatagtgattctaatacagtgtccaaaacaagccaattagtagcccaaagcatagaggataaagtgaaagaggttgctccaccctggagaggctcaatctccaaaggatcagaatccctaacctcaatgttcagtcacgaagatcaaaagaaaatttgtgctgattctcccctaaatgccacatctgcattggagcacacagttccctcttattcaagtagtgacagagcagaacaaggaatacagctcaggcattcacagtcagtgccacaacagccagaagatgaagnnnnnnnnnnnnnnnnnnnnnnnnnnnnnnnnnnnnnnnnnnnnnnnnnnnnnnnnnnnnnnnnnnnnnnnnnnnnnnnnnnnnnnnnnnnnnnnnnnnnnnnnnnnnnnnnnnnnnnnnnnnnnnnnnnnnnnnnnnnnnnnnnnnnnnnnnnnnnnnnnnnnnnnnnnnnnnnnnnnnnnnnnnnnnnnnnnnnnnnnnnnnnnnnnnnnnnnnnnnnnnnnnnnnnnnnnnnnnnnnnnnnnnnnnnnnnnnnnnnnnnnnnnnnnnnnnnnnnnnnnnnnnnnnnnnnnnnnnnnnnnnnnnnnnnnnnnnnnnnnnnnnnnnnnnnnnnnnnnnnnnnnnnnnnnnnnnnnnnnnnnnnnnnnnnnnnnnnnnnnnnnnnnnnnnnnnnnnnnnnnnnnnnnnnnnnnnnnnnnnnnnnnnnnnnnnnnnnnnnnnnnnnnnnnnnnnnnnnnnnnnnnnnnnnnnnnnnnnnnnnnnnnnnnnnnnnnnnnnnnnnnnnnnnnnnnnnnnnnnnnnnnnnnnnnnnnnnnnnnnnnnnnnnnnnnnnnnnnnnnnnnnnnnnnnnnnnnnnnnnnnnnnnnnnnnnnnnnnnnnnnnnnnnnnnnnnnnnnnnnnnnnnnnnnnnnnnnnnnnnnnnnnnnnnnnnnnnnnnnnnnnnnnnnnnnnnnnnnnnnnnnnnnnnnnnnnnnnnnnnnnnnnnnnnnnnnnnnnnnnnnnnnnnnnnnnnnnnnnnnnnnnnnnnnnnnnnnnnnnnnnnnnnnnnnnnnnnnnnnnnnnnnnnnnnnnnnnnnnnnnnnnnnnnnnnnnnnnnnnnnnnnnnnnnnnnnnnnnnnnnnnnnnnnnnnnnnnnnnnnnnnnnnnnnnnnnnnnnnnnnnnnnnnnnnnnnnnnnnnnnnnnnnnnnnnnnnnnnnnnnnnnnnnnnnnnnnnnnnnnnnnnnnnnnnnnnnnnnnnnnnnnnnnnnnnnnnnnnnnnnnnnnnnnnnnnnnnnnnnnnnnnnnnnnnnnnnnnnnnnnnnnnnnnnnnnnnnnnnnnnnnnnnnnnnnnnnnnnnnnnnnnnnnnnnnnnnnnnnnnnnnnnnnnnnnnnnnnnnnnnnnnnnnnnnnnnnnnnnnnnnnnnnnnnnnnnnnnnnnnnnnnnnnnnnnnnnnnnnnnnnnnnnnnnnnnnnnnnnnnnnnnnnnnnnnnnnnnnnnnnnnnnnnnnnnnnnnnnnnnnnnnnnnnnnnnnnnnnnnnnnnnnnnnnnnnnnnnnnnnnnnnnnnnnnnnnnnnnnnnnnnnnnnnnnnnnnnnnnnnnnnnnnnnnnnnnnnnnnnnnnnnnnnnnnnnnnnnnnnnnnnnnnnnnnnnnnnnnnnnnnnnnnnnnnnnnnnnnnnnnnnnnnnnnnnnnnnnnnnnnnnnnnnnnnnnnnnnnnnnnnnnnnnnnnnnnnnnnnnnnnnnnnnnnnnnnnnnnnnnnnnnnnnnnnnnnnnnnnnnnnnnnnnnnnnnnnnnnnnnnnnnnnnnnnnnnnnnnnnnnnnnnnnnnnnnnnnnnnnnnnnnnnnnnnnnnnnnnnnnnnnnnnnnnnnnnnnnnnnnnnnnnnnnnnnnnnnnnnnnnnnnnnnnnnnnnnnnnnnnnnnnnnnnnnnnnnnnnnnnnnnnnnnnnnnnnnnnnnnnnnnnnnnnnnnnnnnnnnnnnnnnnnnnnnnnnnnnnnnnnnnnnnnnnnnnnnnnnnnnnnnnnnnnnnnnnnnnnnnnnnnnnnnnnnnnnnnnnnnnnnnnnnnnnnnnnnnnnnnnnnnnnnnnnnnnnnnnnnnnnnnnnnnnnnnnnnnnnnnnnnnnnnnnnnnnnnnnnnnnnnnnnnnnnnnnnnnnnnnnnnnnnnnnnnnnnnnnnnnnnnnnnnnnnnnnnnnnnnnnnnnnnnnnnnnnnnnnnnnnnnnnnnnnnnnnnnnnnnnnnnnnnnnnnnnnnnnnnnnnnnnnnnnnnnnnnnnnnnnnnnnnnnnnnnnnnnnnnnnnnnnnnnnnnnnnnnnnnnnnnnnnnnnnnnnnnnnnnnnnnnnnnnnnnnnnnnnnnnnnnnnnnnnnnnnnnnnnnnnnnnnnnnnnnnnnnnnnnnnnnnnnnnnnnnnnnnnnnnnnnnnnnnnnnnnnnnnnnnnnnnnnnnnnnnnnnnnnnnnnnnnnnnnnnnnnnnnnnnnnnnnnnnnnnnnnnnnnnnnnnnnnnnnnnnnnnnnnnnnnnnnnnnnnnnnnnnnnnnnnnnnnnnnnnnnnnnnnnnnnnnnnnnnnnnnnnnnnnnnnnnnnnnnnnnnnnnnnnnnnnnnnnnnnnnnnnnnnnnnnnnnnnnnnnnnnnnnnnnnnnnnnnnnnnnnnnnnnnnnnnnnnnnnnnnnnnnnnnnnnnnnnnnnnnnnnnnnnnnnnnnnnnnnnnnnnnnnnnnnnnnnnnnnnnnnnnnnnnnnnnnnnnnnnnnnnnnnnnnnnnnnnnnnnnnnnnnnnnnnnnnnnnnnnnnnnnnnnnnnnnnnnnnnnnnnnnnnnnnnnnnnnnnnnnnnnnnnnnnnnnnnnnnnnnnnnnnnnnnnnnnnnnnnnnnnnnnnnnnnnnnnnnnnnnnnnnnnnnnnnnnnnnnnnnnnnnnnnnnnnnnnnnnnnnnnnnnnnnnnnnnnnnnnnnnnnnnnnnnnnnnnnnnnnnnnnnnnnnnnnnnnnnnnnnnnnnnnnnnnnnnnnnnnnnnnnnnnnnnnnnnnnnnnnnnnnnnnnnnnnnnnnnnnnnnnnnnnnnnnnnnnnnnnnnnnnnnnnnnnnnnnnnnnnnnnnnnnnnnnnnnngattctaaaataacaactacacctacagtgcttcattcagcttcctcaggagtggaaaagcaagttgaacatggtccacatgcactagcattttcagctttgtcagaagaaattaaaaaagaa

SEQ ID NO: 34540 - DNA, 251 bp, Macaca Mulatta
  misc_feature (1)...(251): n = A,T,C or G
taagtgtaaagcaggaaattacttttactgatgtatctgagcaactgatgagagacaaaaaacaaatcagagagccagtagacttacagaaaaagaagaagcggaaacaacgttcccccgcaaaanatccttacaataaatgaggatggatcacttggtttgaaaacccctaaatctcacgtttgtgagcactgcaatgctgcctttagaacgaactatcacttacagagacatgtcttcattcatacagg

SEQ ID NO: 34541 - DNA, 4325 bp, Macaca Mulatta
  misc_feature (1)...(4325): n = A,T,C or G
aataggaaagaagttaaatcacaagacaaagaagaaagaaaagttgatcaaaaacctaagtcagtagtaaaggaccaagatcactggagaagatctgaacgagcatcacttcctcattccaaaaacgaaataacattttctcataattcaagtaaataccatgtagaagagagaagaggatgggaagattgtaaaagagacaggagtgtaaacagtcatagttttcaagatggaagatgtccatcttttctttcaaacagtagaactcacaaaaacattgactctaaggaagttgatgctatgcaacagtgggaaaacacacctttaaaagcagaaagacatagaaccgaggataagaggaaaagagaacgagaaagcaaagaagataataagcatattagaaatgaaaaaagagtacctacagaacattttcagaaggttaataaggaaactaagaaaaccacttctgatttaaagaaacagaatgaaccaaagactgataagggagaagtccctgataatggagtttctgaaggagcacataataaagagcttgcaatgaaagctgagaatggtccaaatgaaacaaaaaacaaagacctaaaattgagttttatggaaaaattgaacttaactctttctcctgctaaaaagcaacctgtttctcaggataatcagaataaaacaactgatgttcccaagtccagtggtgtatgtgattgagagtcttcagtgcaannnnnnnnnnnnnnnnnnnnnnnnnnnnnnnnnnnnnnnnnnnnnnnnnnnnnnnnnnnnnnnnnnnnnnnnnnnnnnnnnnnnnnnnnnnnnnnnnnnnnnnnnnnnnnnnnnnnnnnnnnnnnnnnnnnnnnnnnnnnnnnnnnnnnnnnnnnnnnnnnnnnnnnnnnnnnnnnnnnnnnnnnnnnnnnnnnnnnnnnnnnnnnnnnnnnnnnnnnnnnnnnnnnnnnnnnnnnnnnnnnnnnnnnnnnnnnnnnnnnnnnnnnnnnnnnnnnnnnnnnnnnnnnnnnnnnnnnnnnnnnnnnnnnnnnnnnnnnnnnnnnnnnnnnnnnnnnnnnnnnnnnnnnnnnnnnnnnnnnnnnnnnnnnnnnnnnnnnnnnnnnnnnnnnnnnnnnnnnnnnnnnnnnnnnnnnnnnnnnnnnnnnnnnnnnnnnnnnnnnnnnnnnnnnnnnnnnnnnnnnnnnnnnnnnnnnnnnnnnnnnnnnnnnnnnnnnnnnnnnnnnnnnnnnnnnnnnnnnnnnnnnnnnnnnnnnnnnnnnnnnnnnnnnnnnnnnnnnnnnnnnnnnnnnnnnnnnnnnnnnnnnnnnnnnnnnnnnnnnnnnnnnnnnnnnnnnnnnnnnnnnnnnnnnnnnnnnnnnnnnnnnnnnnnnnnnnnnnnnnnnnnnnnnnnnnnnnnnnnnnnnnnnnnnnnnnnnnnnnnnnnnnnnnnnnnnnnnnnnnnnnnnnnnnnnnnnnnnnnnnnnnnnnnnnnnnnnnnnnnnnnnnnnnnnnnnnnnnnnnnnnnnnnnnnnnnnnnnnnnnnnnnnnnnnnnnnnnnnnnnnnnnnnnnnnnnnnnnnnnnnnnnnnnnnnnnnnnnnnnnnagatgtgtttttacgaaattcagctcattctacctctaagagtcagtctgatctcaataaggaaaatcaaaagccaatttacaaatctgacaaatgtacagaagcagacatatgtaagaattcaccattagatgaattagaagaaggggaaattagaagtgatagtgaaacatctaaaccacaagaatgttttgaaaaaaattccaagcctagagcatcggctgatgtgcggaagtcaaagactatcccacgacatgggaaaagtactgtgggtctggataaagacagtaggaaaacacatgtaagaatccatcagaccaataacaaatggaataaaagacctgataaatctagcagatcttcaaaaacggagaagaaagataaagtgatgagcacttccagcttggaaaaaatagttccaattattgctgtaccctcttctgaacaagagatcatgcacatgttacgaatgataagaaaacatgtaaggaaaaattatatgaaattcaaggcaaaattttcattaatacaatttcatagaattattgagtcagcgattttgagttttacatctctaattaaacatctcaacttacacaaaatctgtaagtcagtgactnnnnnnnnnnnnnnnnnnnnnnnnnnnnnnnnnnnnnnnnnnnnnnnnnnnnnnnnnnnnnnnnnnnnnnnnnnnnnnnnnnnnnnnnnnnnnnnnnnnnnnnnnnnnnnnnnnnnnnnnnnnnnnnnnnnnnnnnnnnnnnnnnnnnnnnnnnnnnnnnnnnnnnnnnnnnnnnnnnnnnnnnnnnnnnnnnnnnnnnnnnnnnnnnnnnnnnnnnnnnnnnnnnnnnnnnnnnnnnnnnnnnnnnnnnnnnnnnnnnnnnnnnnnnnnnnnnnnnnnnnnnnnnnnnnnnnnnnnnnnnnnnnnnnnnnnnnnnnnnnnnnnnnnnnnnnnnnnnnnnnnnnnnnnnnnnnnnnnnnnnnnnnnnnnnnnnnnnnnnnnnnnnnnnnnnnnnnnnnnnnnnnnnnnnnnnnnnnnnnnnnnnnnnnnnnnnnnnnnnnnnnnnnnnnnnnnnnnnnnnnnnnnnnnnnnnnnnnnnnnnnnnnnnnnnnnnnnnnnnnnnnnnnnnnnnnnnnnnnnnnnnnnnnnnnnnnnnnnnnnnnnnnnnnnnnnnnnnnnnnnnnnnnnnnnnnnnnnnnnnnnnnnnnnnnnnnnnnnnnnnnnnnnnnnnnnnnnnnnnnnnnnnnnnnnnnnnnnnnnnnnnnnnnnnnnnnnnnnnnnnnnnnnnnnnnnnnnnnnnnnnnnnnnnnnnnnnnnnnnnnnnnnnnnnnnnnnnnnnnnnnnnnnnnnnnnnnnnnnnnnnnnnnnnnnnnnnnnnnnnnnnnnnnnnnnnnnnnnnnnnnnnnnnnnnnnnnnnnnnnnnnnnnnnnnnnnnnnnnnnnnnnnnnnnnnnnnnnnnnnnnnnnnnnnnnnnnnnnnnnnnnnnnnnnnnnnnnnnnnnnnnnnnnnnnnnnnnnnnnnnnnnnnnnnnnnnnnnnnnnnnnnnnnnnnnnnnnnnnnnnnnnnnnnnnnnnnnnnnnnnnnnnnnnnnnnnnnnnnnnnnnnnnnnnnnnnnnnnnnnnnnnnnnnnnnnnnnnnnnnnnnnnnnnnnnnnnnnnnnnnnnnnnnnnnnnnnnnnnnnnnnnnnnnnnnnnnnnnnnnnnnnnnnnnnnnnnnnnnnnnnnnnnnnnnnnnnnnnnnnnnnnnnnnnnnnnnnnnnnnnnnnnnnnnnnnnnnnnnnnnnnnnnnnnnnnnnnnnnnnnnnnnnnnnnnnnnnnnnnnnnnnnnnnnnnnnnnnnnnnnnnnnnnnnnnnnnnnnnnnnnnnnnnnnnnnnnnnnnnnnnnnnnnnnnnnnnnnnnnnnnnnnnnnnnnnnnnnnnnnnnnnnnnnnnnnnnnnnnnnnnnnnnnnnnnnnnnnnnnnnnnnnnnnnnnnnnnnnnnnnnnnnnnnnnnnnnnnnnnnnnnnnnnnnnnnnnnnnnnnnnnnnnnnnnnnnnnnnnnnnnnnnnnnnnnnnnnnnnnnnnnnnnnnnnnnnnnnnnnnnnnnnnnnnnnnnnnnnnnnnnnnnnnnnnnnnnnnnnnnnnnnnnnnnnnnnnnnnnnnnnnnnnnnnnnnnnnnnnnnnnnnnnnnnnnnnnnnnnnnnnnnnnnnnnnnnnnnnnnnnnnnnnnnnnnnnnnnnnnnnnnnnnnnnnnnnnnnnnnnnnnnnnnnnnnnnnnnnnnnnnnnnnnnnnnnnnnnnnnnnnnnnnnnnnnnnnnnnnnnnnnnnnnnnnnnnnnnnnnnnnattgaagaattgccttcagtggaagaaatctcacactctgtcggggatcatcttccaaacacatacatagatctaacgaaagatccagtcactgaaaccaaaaacttgggggaattcatagaagtaacagttttaaacattgatcagttgggatgttctggaggcaatttaaatcaaagtgctcaaatattagacaattctttgcaggctgatactgtaggtgcttttattgatttgacacaagatgcttcaagtgagactaaaagtgaaggtaatcatcctgaattagctgttgaagacttgggatgtggggtgatacaggtagatgaagataattgtaaggaagaaaaggcacaaatggcaaacaggcctttggagtgcattgttgaggaaacctatatcga

SEQ ID NO: 34542 - DNA, 776 bp, Macaca Mulatta
ctgtcctcccacagtgcgacccctgtggcctgcatttccggcacaagagtcaactgcggctgcatctgcgccagaaacacggagctgctaccaacaccaaagtgcactaccacattctgggggggccctagctgagcgcaggcccagaccccacttgcttcctgtgggtgggaaagctgcaggcccaggccttgcttccctatcaggcttgggcataggggtgtgcaaggccactttggtatcagaaattgccaccatcttaatttctcgctggggagagcagggggtggcagatcccggctagatctgcctctgttttgctggtcaaaacctcttccccacaagccagattgtttctgaggagagagctagctaggggctgggaaaggggagagattggagtcctggtctccccaagggaatagccctccacctgtggcccccattgcattcagtttatctgtaaatataatttattgaggcctttgggtggcatcagggccttcattcaattgcatttcccactcccctcttccacaagtgtgattgaaagtgaccagaaacacagaaggtgagatcacagctctgctggcagagattactagcctgggctctctcctttggcttgggtattttatattaattctgtcataacttttatccttagacttgttcttgtttgcttgttagtttgtttaaaatggaaaaaggggttctctgtgtcctgcccctgtaattctaggtctggaacctttatttgttctagggcagctctg

SEQ ID NO: 34543 - DNA, 158 bp, Macaca Mulatta
agcactctgatgtgctcagaagagcacctgcccaaagtttttctggttttaatttaaaggacaaggctacatatattcagctttttgaaatgaccaaagctagttagggtctccttgatgtagctaagctgcttcaatgatcttcacatttgcactcc

SEQ ID NO: 34544 - DNA, 631 bp, Macaca Mulatta
aattcctcaaaccgaagctccttggaaaaaattatgtataatgttatttgttttattatagcaattattcctaattaaagcagtatttaatgcaatttccagttatttctttggagaatttgatgtcattgttgcattaccttgaatgttggaaagatgtggtgcgtgttgcttgttcatcacaaaaatcagtaagcacaataaagtggatgccaaaccatcaaacacataggtgttcccgctgtgtccctggatatggaataagcaggtataaaaaaatattttaattatagttttgttataaatataacttatgggaaaaaaatttgataggaataatactgtatattactaatttttaactatccctacgggaaaccttatgactcacagaattttctcatatacagtattcagtgcacagaaatcttatgattggctcaagtacagtaagttacttctcagtagaactctcaagtctgagtcctatctgtagctctgcttttggctgtacattcctaggatcggggctgcttatgcctttcgtttatccttggggtttgagagcactgtatttgggagagagtttaaaaatacattagaagagggaaaccatttaaagtttcactgt

SEQ ID NO: 34545 - DNA, 752 bp, Macaca Mulatta
  misc_feature (1)...(752): n = A,T,C or G
gtgaaggaatatgactccatctcccggctggaccagtggctcaccaccatgctgctgcgcatcaagaagaccatccagggcgacgaggaggacctgcgctaagccccacccagcctcccagcgcccgtcttcgtgtcccatctgcttagagagannnnnnnnnnnnnnnnnnnnnnnnnnnnnnnnnnnnnnnnnnnnnnnnnnnnnnnnnnnnnnnnnnnnnnnnnnnnnnnnnnnnnnnnnnnnnnnnnnnnnnnnnnnnnnnnnnnnnnnnnnnnnnnnnnnnnnnnnnnnnnnnnnnnnnnnnnnnnnnnnnnnnnnnnnnnnnnnnnnnnnnnnnnnnnnnnnnnnnnnnnnnnnnnnnnnnnnnnnnnnnnnnnnnnnnnnnnnnnnnnnnnnnnnnnnnnnnnnnnnnnnnnnnnnnnnnnnnnnnnnnnnnnnnnnnnnnnnnnnnnnnnnnnnnnnnnnnnnnnnnnnnnnnnnnnnnnnnnnnnnnnnnnnnnnnnnnnnnnnnnnnnnnnnnnnnnnnnnnnnnnnnnnnnnnnnnnnnnnnnnnnnnnnnnnnnnnnnnnnnnnnnnnnnnnnnnnnntcctgcagccccgacctctcaggttagaccccgggccgtggagcttagggggttgtccccgaccccagccccacacctgctccttccctaatgctttgaggttttcttggttggaagctgcagctggcccgagaaagaaaataaaaaacaacacttttgcat

SEQ ID NO: 34546 - DNA, 783 bp, Macaca Mulatta
ggggaagctctgtggtcggtgttttctgtgtgagaggaaaagatgctggaaccacaggagaatggcatgattgacctaccagattatgagcatgtagaagatgaaacttttcctcctttcccacctccagcctctccagagagacaagacggtgaaggaattgagcctgatgaagagtcaggaagtggagcacttgttcctgtacctccaaagagaacagttaaaagaaatatacccaagctggatgctcagagattaatttcagagagaggacttccagccttaaggcatgtatttgataaggcaaaattcaaaggtaaaggtcatgaggctgaagacttgaagatgcttatcagacacatggagcactgggcacataggctattccctaaactgcagtttgaggattttattgacagagttgaatacctgggaagtaaaaaggaggttcagaactgtttgaaacgaattcgacttgttctccctattttacatgaagattttgttagcagtaatgatgaagttgtggaaataatgaacatgatgtaactgctactgaattagatccctttctgacaaactcatctgaaagtgagatatttgcttctgagtcaagtagaagcctaacagaagagcaacaacaaagaattgagagaaataaaccactggcccttggaaaagaagcaggcaaaactgctgagtaatagtcagtccctaagaaaatgatatgttaatgaatacagcccaggggcacacatgggttggaagaagtttaatactgaa

SEQ ID NO: 34547 - DNA, 1001 bp, Macaca Mulatta
  misc_feature (1)...(1001): n = A,T,C or G
gggatccacccannnnnnnnnnnnnnnnnnnnnnnnnnnnnnnnnnnnnnnnnnnnnnnngnnnnnnnnnnnnnnnnnnnnnnnntggagtctcgctgnnnnnnnnnnnnnnnnnnnnnnnnntgcaaggtcagctcactacaacctccgcctcccaggttcaagtgattcttctgtctcagcctcctgagtagttggcattacaggcgcctgccatcaaacacggataatttttttgcatttttagcagagacaaggttttatcatattggccaggcctgtctcgatctcctgaccccgtgatccgcccnnnnnnnnnnnnnnnnnnnnnnnnnnntcaggcgcgagcccctgtacccgggcacaggtcaacatttctaaaattgccccatgcttccatagggcaaggaaatatctccttaatcatctttaatgtttacctaactggaacaagtcccttgggttacaagcacacaacacagtccggttaaaaatgaaccctagccctgtttaattccccccccccctaacatggggaaaagggaagcccctggaaaattcgccataaacagggccccccataattgcccttgtcttgtttgggggccaagggaattgtcccccctttcaaaggtctcttggttccaggggacctcacaggaagacctctcacatatggcctttcattcctagtgtccccccaaaattttcgccctaatacttggtccacccctatgccaatacaatacccacaccctttcatcacagcctttcccacctggggggttacagagaaatataaaaagacccacctgggaatatatacataatagaaaaagtgagggggaaattgaataatacttctttttagagaaaacaaccccccactcgtgggctccccggtggaagataacaccctatatacaccgttgtaaaaatagaaaaaaatctggtcgtgggccttattatcaaatggggcacagcaagggcaacttcttccc

SEQ ID NO: 34548 - DNA, 872 bp, Macaca Mulatta
cgggaaatccttctctgagaaatcagtccttacagtacatcagagaatacacacaggggaaaaaccttataaatgtaatgaatgtggaaaaaccttctacaataaatcagacctaaccaaacatcagagaacacacacaggtaagaagccctatagatgtaaggaatgtgggaaattcttctctaggaattcataccttacaatacaccagagaatgcatacaggagacaaaccctttgtgtgtaaaaaatgtgggaaaaccttataccataaggcagactatacagtacataagagaacacacagaggggagaagtcttattactgtaatgaatgtgggaaaacctttatttgcaactcagtcctcaactcccatcagagaaaacacatgggggagaagccctatgggtgtaatgagtgtgggaagtccttctctgagaaatcagttcttactgtacatcagagaatacacacaggggaaaaaccttataaatgtaatgaatgtgggaagtactatcataagtcagatctcactaaacatcagagaacacacacaagggagaaaccctatgaatgtagtcagtgtgggaaaagcttcagttgcagcttaggtctcaaagtatatcagagaagacacacaagggagaaaccctatggatgtaagcagtgtggggaaaccctctgagaaataaactctcatagcacatccaaggatacacatgggaaaaagcttataaatgtagaaatgagagaaatctttctcaagcaattcatacctcaaaatacttaggagaaatcaaataggacatgacccctgtgaatgtaaagaacttggcaaaccttttaccataagtcatcttccaaagtaaata

SEQ ID NO: 34549 - DNA, 2855 bp, Macaca Mulatta
  misc_feature (1)...(2855): n = A,T,C or G
cagacgagatctcgatcgaaggcgagatggcggacgtgctagatcttcacgaggccgggggcgaagatttcgccatggatgaggatggggacgnnnnnnnnnnnnnnnnnnnnnnnnnnnnnnnnnnnnnnnnnnnnnnnnnnnnnnnnnnnnnnnnnnnnnnnnnnnnnnnnnnnnnnnnnnnnnnnnnnnnnnnnnnnnnnnnnnnnnnnnnnnnnnnnnnnnnnnnnnnnnnnnnnnnnnnnnnnnnnnnnnnnnnnnnnnnnnnnnnnnnnnnnnnnnnnnnnnnnnnnnnnnnnnnnnngcagaatatggggaaattaattaccttcacctcaacctcgacaggcgaacaggatatctgaaggnaggggtatactctagttgagtatgaaacatacaaggaggcccaggctgctatggagggactcaatggccaggatttgatgggacagcccatcagcgttgactggtgttttgttcggggtccaccaaaaggcaagaggagnagaggaggccgaagacgcagcagaagtccagaccggagacgtcgctgacaggtcctctgttgtccaggtgttctcttcaagattccatttgaccatgcagccttggacaaatagnnnnnnnnnnnnnnnnnnnnnnnnnnnnnnnnnnnnnnnnnnnnnnnnnnnnnnnnnnnnnnnnnnnnnnnnnnnnnnnnnnnnnnnnnnnnnnnnnnnnnnnnnnnnnnnnnnnnnnnnnnnnnnnnnnnnnnnnnnnnnnnnnnnnnnnnnnnnnnnnnnnnnnnnnnnnnnnnnnnnnnnnnnnnnnnnnnnnnnnnnnnnnnnnnnnnnnnnnnnnnnnnnnnnnnnnnnnnnnnnnnnnnnnnnnnnnnnnnnnnnnnnnnnnnnnnnnnnnnnnnnnnnnnnnnnnnnnnnnnnnnnnnnnnnnnnnnnnnnnnnnnnnnnnnnnnnnnnnnnnnnnnnnnnnnnnnnnnnnnnnnnnnnnnnnnnnnnnnnnnnnnnnnnnnnnnnnnnnnnnnnnnnnnnnnnnnnnnnnnnnnnnnnnnnnnnnnnnnnnnnnnnnnnnnnnnnnnnnnnnnnnnnnnnnnnnnnnnnnnnnnnnnnnnnnnnnnnnnnnnnnnnnnnnnnnnnnnnnnnnnnnnnnnnnnnnnnnnnnnnnnnnnnnnnnnnnnnnnnnnnnnnnnnnnnnnnnnnnnnnnnnnnnnnnnnnnnnnnnnnnnnnnnnnnnnnnnnnnnnnnnnnnnnnnnnnnnnnnnnnnnnnnnnnnnnnnnnnnnnnnnnnnnnnnnnnnnnnnnnnnnnnnnnnnnnnnnnnnnnnnnnnnnnnnnnnnnnnnnnnnnnnnnnnnnnnnnnnnnnnnnnnnnnnnnnnnnnnnnnnnnnnnnnnnnnnnnnnnnnnnnnnnnnnnnnnnnnnnnnnnnnnnnnnnnnnnnnnnnnnnnnnnnnnnnnnnnnnnnnnnnnnnnnnnnnnnnnnnnnnnnnnnnnnnnnnnnnnnnnnnnnnnnnnnnnnnnnnnnnnnnnnnnnnnnnnnnnnnnnnnnnnnnnnnnnnnnnnnnnnnnnnnnnnnnnnnnnnnnnnnnnnnnnnnnnnnnnnnnnnnnnnnnnnnnnnnnnnnnnnnnnnnnnnnnnnnnnnnnnnnnnnnnnnnnnnnnnnnnnnnnnnnnnnnnnnnnnnnnnnnnnnnnnnnnnnnnnnnnnnnnnnnnnnnnnnnnnnnnnnnnnnnnnnnnnnnnnnnnnnnnnnnnnnnnnnnnnnnnnnnnnnnnnnnnnnnnnnnnnnnnnnnnnnnnnnnnnnnnnnnnnnnnnnnnnnnnnnnnnnnnnnnnnnnnnnnnnnnnnnnnnnnnnnnnnnaatactgattgcctccctagtccttgtccagctaactctgctgtttataattgaaaggattcaacaaaattagcatcaggtgctagacatatggttaggatctcaccacagttgagtgactggtagatagctattaggtaggtggataaatgatgctagaagcaacaggtctagggttaaggattaaggcctgggaattggagtcttaccatggctccccttccttgtctgagggctggacacactgaggacaatgtggctatagcagatggccatggcagtcagtggcagcagaaagaggcagcggaaggtgaagaggttataggtggtctcttgccatcgagccttgaagctgcctttggtgacacactgggtgaaagggactgggccagctcggtggacggtatggaacaggaacagctggagtggagttcaggactattagaactggttcccctcaccacccagcctacccacctatgtcatactgtctcctcccaattcatccttaattccaagtgaagcagcacagtgctgaaaacagttcatccatggtgccatgttaaagaggttggaaatatgtcttgaaaatcctgccttccttttaggcttgaatatgatgctgagcagtgagtttgttaaatcttggaacttaaaacaatcccaccttctcaagtactattctaacactgcgctttataagggatgatatttctaccacctcactcatatttttagctgaaatgattttcctggtatgtctgttattttgtggaaaaagaaaaactgtgtaaaataggtgctgccaaaattccaggccattttgcagtgactctgaagtgacctttagtagtaatagtcttatgtgcagtaactataatggtaaagaatgttaaataataaaatttaacattttccaaatgctgttgggctgcccctccccctttttgttaaattgctgggttttccaactgaatcagtaaaaactatttccgtttag

SEQ ID NO: 34550 - DNA, 675 bp, Macaca Mulatta
  misc_feature (1)...(675): n = A,T,C or G
cggaggctgcagcggcgtgagcggcgagggcgctgcagcgccgcctgagcccgcgggctgggcagggcgggcgccgctcccacatccaggcgcacgttcacccggtgccttcgcctgccaggagtccttgctcgcgtcgcgcgtgtcgccacntaggccgccgccgtccccgccggcagctccctctgtacctcccgtctggccccggggggatgtgaccggcgcagcgacagcccgccccgcacagaggcgggtgatatggcacacccagaggaccctatggtctcctgccccctggccgctggccctgtcccaggggcactgtgatacccggaaggctgtgaattcctcgtgatgccaggccctctcggggatctcagatcatccccggggccgctgtgatgcacacccccacccgtgcagcgacccgccagggagcgcgctgacctccccaaagactgtggccaccgcaggcgccttggacccccatggggggacagggcgtcccctgccttctgcagccccgcgagggcggtggccttggcccctgcaggctgggcgtccacgttcgggtgcccctcggcgtctgctgccggatcccgcatctttcttggccgcctgtgtccgcgtatgcgggctctgtccggccatccctctctccgccgcgtctctgac

SEQ ID NO: 34551 - DNA, 1113 bp, Macaca Mulatta
  misc_feature (1)...(1113): n = A,T,C or G
caggtttggttttcctaaacaaagactttcacagggaccgacagcccttgataatgtgacaaaaaccagcctcttccaccccactgcagtgacttttgccagaagtggagcagtgggcacggccgaccttgtcgttcatcaatgccgcccctggcaggatctgaggattggtggcagccatgcctccccctgccccagtcgctccttcccccccactctaacctgcatggtgtgggcgcccttgggagccccgaggactgattgtctgaccttgcttcacatccccagtaaggactgccccaagatgtcgctcgagtggctggtggcctggagctggtcgctggatggcctgagggactgcatcgccaccggcatccagtccgtgcgggactgcgacaccactgctgtcatcactgtggcctgcctcctnnnnnnnnnnnnnnnnnnnnnnnnnnnnnnnnnnnnnnnnnnnnnnnnnnnnnnnnnnnnnnnnnnnnnnnnnnnnnnnnnnnnnnnnnnnnnnnnnnnnnnnnnnnnnnnnnnnnnnnnnnnnnnnnnnnnnnnnnnnnnnnnnnnnnnnnnnnnnnnnnnnnnnnnnnnnnnnnnnnnnnnnnnnnnnnnnnnnnnnnnnnnnnnnnnnnnnnnnnnnnnnnnnnnnnnnnnnnnnnnnnnnnnnnnnnnnnnnnnnnnnnnnnnnnnnnnnnnnnnnnnnnnnnnnnnnnnnnnnnnnnnnnnnnnnnnnnnnnnnnnnnnnnnnnnnnnnnnnnnnnnnnnnnnnnnnnnnnnnnnnnnnnnnnnnnnnnnnnnnnnnnnnnnnnnnnnnnnnnnnnnnnnnnnnnnnnnnnnnnnnnnnnnnnnnnnnnnnnnnnnnnnnnnnnnnnnnnnnnnnnnnnnnnnnnnnnnnnnnnnnnnnnnnnnnnnnnnnnnnnnnnnnnnnnnnnnnnnnnnnnnnnnnnnnnnnnnnnnnnnnnnnnnnnnnnnnnnnnnnnnnnnnnnnnnnnnnnnnnnnnnnnnnaatgtttttgggaacgcgtgcatctctgtgctgagccctgggactgtgataacggagcactatggacccaccaacatccgcatccgatgccatttagg

SEQ ID NO: 34552 - DNA, 1266 bp, Macaca Mulatta
  misc_feature (1)...(1266): n = A,T,C or G
gggacccccaagggcgtggacttcacagctgtgcgggatctgctgctgtcggtggagggggtggaagccctgcacagcctgcatatctgggcactgaccgtggcccagcctgttctgtctgtccacattgccattgnnnnnnnnnnnnnnnnnnnnnnnnnnnnnnnnnnnnnnnnnnnnnnnnnnnnnnnnnnnnnnnnnnnnnnnnnnnnnnnnnnnnnnnnnnnnnnnnnnnnnnnnnnnnnnnnnnnnnnnnnnnnnnnnnnnnnnnnnnnnnnnnnnnnnnnnnnnnnnnnnnnnnnnnnnnnnnnnnnnnnnnnnnnnnnnnnnnnnnnnnnnnnnnnnnnnnnnnnnnnnnnnnnnnnnnnnnnnnnnnnnnnnnnnnnnnnnnnnnnnnnnnnnnnnnnnnnnnnnnnnnnnnnnnnnnnnnnnnnnnnnnnnnnnnnnnnnnnnnnnnnnnnnnnnnnnnnnnnnnnnnnnnnnnnnnnnnnnnnnnnnnnnnnnnnnnnnnnnnnnnnnnnnnnnnnnnnnnnnnnnnnnnnnnnnnnnnnnnnnnnnnngttctaccactcgcaggggcaaaggcggtgagccatgggatgtccaaagggaggctggccccagcgcacccgtactgcctgcctcatcccccattctcagcctggctggcctttgcctttatgaatctgagcccctccctctgcctatagcaataggcacagggatgaggaccctcacactctcatttgagcctccctgaggcagggagccaggaggcacctgaggcctgtctgtgcctcagtcacttcagctgtgagccaaatgttccctttcctggaggggagaggcctcttactaggtaagggacaggtttcctctttcttattccctcagctgtgccaacacaaaacacaaccttggcacaggtggtgggtggagggtagagtgatttcagtttgggttctgcgctaacagcctccaagccccttggcacttctgttgccctgagagtgtcccaggggattcagagtctccagcaagatatggctgggccagctctgctgcctacctggcctgacccagtcggagcctggcatggtggagggagagggagagaagcggggctgcactggcccagaggccagctaggagggagaccgtggcttcctggggcttgtgtgtgaagattcctgacttaggggtggcttgtgtttacaagatgcaagaggggagatctgtccccgactcatggagacaacatgccca

SEQ ID NO: 34553 - DNA, 666 bp, Macaca Mulatta
gtcaaagcatacggaaagaataaaatattttaaatttctctcttgcaatatagaattatgcaatgtatttgcggagaggaggagaaaaataattaatttcacaatgaaaccagataaccagatataagttgaaacactattgtgaatgaatcttcatgacatacaagaaacagattatgtacaatttttggctggtcttaatagaatttaatgccctttgaattaaatgataatcaattatggtaggactgccaattagcaactttttaaaaaaaagttctaatgcattgtttaagtgtacctattcttttaccctcttacaggatttaaatcaattcatgactctctcagctctctccagcaaatacagaaaacaaagatggatttagagaaatgtaaagtacagaaagacctgaagaaattacagcgtaagatagtggaactccaggaagtataaaccttttcagtcatcttctttttcaccagccaatggagtgatttgttgggaaaagttctgaagaagaaagttactatctctgggatgtttactgcttctaatgtctccttttaaggagatgaatgtaccagaaaaataataaagcacagaagctttggatgtcttgcatttattaatgaaaaaactaagaaatttccttatatatctgc

SEQ ID NO: 34554 - DNA, 812 bp, Macaca Mulatta
  misc_feature (1)...(812): n = A,T,C or G
gggcctttcggccggaaccgccatcttccagtaatttgccaaaatgacgaacacaaagggaaagaggagaggcacccgatatatgttctctaggccttttagaaaacatggagttgttcctttggccacgtatatgcgaatctataagaaaggtgatatcgtagacatcaagggaatgggtaccgttcaaaaaggaatgccccacaagtgttaccatggcaaaactgggagagtctacaacgttacccagcatgctgttggcattgttgtaaacaaacaagttaagggcaagattcttgccaagagaattaatgtacgtattgagcacattaagcattctaagagcagagatagcttcctgaaacgcgtgaaggaaaatgatcagaaaaagaaagaagccaaagagaaaggtacctgggttcaactgaagcgccagcctgctccacccagagaagcacactttgtgagaaccaatgggaaggagcctgagctgctggaacctattccctatgaattcatggcataataggnnnnnnnnnnnnnnnnnnnnnnnncctctgggctgaaaaataataaatttatttatataaaaaataaataatataataatcaattttaccacctcatattacccccatttaattaccacccctaacaaaacccctaactacaatcataaacaataacctctccttctacccaataaaaatacaaaaatnnttnnntttaatttctgggcccctcctcccccctcccagaaaaaaatttttttctacaccaccctccttgtttggggcgcgtggccgcccacc

SEQ ID NO: 34555 - DNA, 185 bp, Macaca Mulatta
agatttcaaaaatatcattgcatcctatagaagataatcctattgaagagatttcagttctaagcccagaggatcttgaagcaatcaagaatccagattctataacaaatcaaattgcacttttggaagcccggtgtcatgaaatgaaaccaaacctcggtgccattgcagagtataaaaagaag

SEQ ID NO: 34556 - DNA, 115 bp, Macaca Mulatta
gatgtgtcacctccccaaaactgttggtaaatgtcagattttttcctccaagagttgtccttctgtgctatttgtttttcactcaaatattttagctcattattattgttttaaa

SEQ ID NO: 34557 - DNA, 1938 bp, Macaca Mulatta
  misc_feature (1)...(1938): n = A,T,C or G
tgtttttgtctcacagaattagagcccattgggaacgatgccaccaccatcagacattgtcaaagtggccattgagtggccaggtgctaacgcccagctccttgaaatcgaccagnnnnnnnnnnnnnnnnnnnnnnnnnnnnnnnnnnnnnnnnnnnnnnnnnnnnnnnnnnnnnnnnnnnnnnnnnnnnnnnnnnnnnnnnnnnnnnnnnnnnnnnnnnnnnnnnnnnnnnnnnnnnnnnnnnnnnnnnnnnnnnnnnnnnnnnnnnnnnnnnnnnnnnnnnnnnnnnnnnnnnnnnnnnnnnnnnnnnnnnnnnnnnnnnnnnnnnnnnnnnnnnnnnnnnnnnnnnnnnnnnnnnnnnnnnnnnnnnnnnnnnnnnnnnnnnnnnnnnnnnnnnnnnnnnnnnnnnnnnnnnnnnnnnnnnnnnnnnnnnnnnnnnnnnnnnnnnnnnnnnnnnnnnnnnnnnnnnnnnnnnnnnnnnnnnnnnnnnnnnnnnnnnnnnnnnnnnnnnnnnnnnnnnnnnnnnnnnnnnnnnnnnnnnnnnnnnnnnnnnnnnnnngattgcagggcatgtgagccagcccatggtggannnnnnnnnnnnnnnnnnnnnnnnnnnnnnnnnnnnnnnnnnnnnnnnnnnnnnnnnnnnnnnnnnnnnnnnnnnnnnnnnnnnnnnnnnnnnnnnnnnnnnnnnnnnnnnnnnnnnnnnnnnnnnnnnnnnnnnnnnnnnnnnnnnnnnnnnnnnnnnnnnnnnnnnnnnnnnnnnnnnnnnnnnnnnnnnnnnnnncatgtgatccgagggttccgccccatcaaaactgagatggcccatcagctgtatgttcttcaagtcctaacctttaaccttctggaagaaaggatgatgaccaagatggaccccaatgaccaggncaggctcaaagagacatcatatttgaactgaggaggattgcatttgacgcagagtctgatcctagcaatgtccctgggagtgggacggaaaaacgcaaagccatgtacaccaaggactacaaaatgctgggatttacnnnnnnnnnnnnnnnnnnnnnnnnnnnnnnnnnnnnnnnnnnnnnnnnnnnnnnnnnnnnnnnnnnnnnnnnnnnnnnnnnnnnnnnnnnnnnnnnnnnnnnnnnnnnnnnnnnnnnnnnnnnnnnnnnnnnnnnnnnnnnnnnnnnnnnnnnnnnnnnnnnnnnnnnnnnnnnnnnnnnnnnnnnnnnnnnnnnnnnnnnnnnnnnnnnnnnnnnnnnnnnnnnnnnnnnnnnnnnnnnnnnnnnnnnnnnnnnnnnnnnnnnnnnnnnnnnnnnnnnnnnnnnnnnnnnnnnnnnnnnnnnnnnnnnnnnnnnnnnnnnnnnnnnnnnnnnnnnnnnnnnnnnnnnnnnaggttatgcaagtcgtccgagagcaaatcactcgagctttgccatccaaacccaactctttggatcagttcaagagcaaactgcgtagcctgagttactctgagattctacgactgcgccagtctgagaggatgagtcaggatgacttccagtccccaccaattgtnnnnnnnnnnnnnnnnnnnnnnnnnnnnnnnnnnnnnnnnnnnnnnnnnnnnnnnnnnnnnnnnnnnnnnnnnnnnnnnnnnnnnnnnnnnnnnnnnnnnnnnnnnnnnnnnnnnnnnnnnnnnnnnnnnnnnnnnnnnnnnnnnnnnnnnnnnnnnnnnnnnnnnnnnnnnnnnnnnnnnnnnnnnnnnnnnnnnnnnnnnnnnnnnnnnnnnnnnnnnnnnnnnnnnnnnnnnnnnnnnnnnnnnnnnnnnnnnnnnnnnnnnnnnnnnnnnnnnnnnnnnnnnnnnaggaggtgttggaattggccttctccatcctgtatgaccctgatgagaccttaaacttcattgcacctaataaatatga

SEQ ID NO: 34558 - DNA, 206 bp, Macaca Mulatta
  misc_feature (1)...(206): n = A,T,C or G
ntggtgctggggctgcccttcctgctggagaaccccatcggctacctgtcccgctcctttgaccttggccgccagtttctgttccgctggacagtgaactggcgcttcctcccggaggctctcttcctgcatcgagccttccacctggccctgttggctgcccacctcaccctgctcctgctgtttgccctctgcaggtggcacag

SEQ ID NO: 34559 - DNA, 1920 bp, Macaca Mulatta
  misc_feature (1)...(1920): n = A,T,C or G
ttgccgttgcctattctccagcccaagatgcagccaacagagagatgccctctctaccccgggcnnnnnnnnnnnnnnnnnnnnnnnnnnnnnnnnnnnnnngaaatacctggagaattacctcaaccgcctcttgaccatgtctttctatcgcaactaccatgccnnnnnnnnnnnnnnnnnnnnnnnnnnnnnnnnnnnnnnnnnnnnnnnnnnnnnnnnnnnnnnnnnnnnnnnnnnnnnnnnnnnnnnnnnnnnnnnnnnnnnnnnnnnnnnnnnnnnnnnnnnnnnnnnnnnnnnnnnnnnnnnnnnnnnnnnnnnnnnnnnnnnnnnnnnnnnnnnnnnnnnnnnnnnnnnnnnnnnnnnnnnnnnnnnnnnnnnnnnnnnnnnnnnnnnnnnnnnnnnnnnnnnnnnnnnnnnnnnnnnnnnnnnnnnnnnnnnnnnnnnnnnnnnnnnnnnnnnnnnnnnnnnaggtccttgattctcaagtgcagcagctaccggcaggcacggtggtgggttctctagagatcactgagctggcacggggcccaggcagagacttcctacagctgcaccagcatgacagctacgccccatcccggcctgggaccttggcccggtggtnnnnnnnnnnnnnnnnnnnnnnnnnnnnnnnnnnnnnnnnnnnnnnnnnnnnnnnnnnnnnnnnnnnnnnnnnnnnnnnnnnnnnnnnnnnnnnnnnnnnnnnnnnnnnnnnnnnnnnnnnnnnnnnnnnnnnnnnnnnnnnnnnnnnnnnnnnnnnnnnnnnnnnnnnnnnnnnnnnnnnnnnnnnnnnnnnnnnnnnnnnnnnnnnnnnnnnnnnnnnnnnnnnnnnnnnnnnnnnnnnnnnnnnnnnnnnnnnnnnnnnnnnnnnnnnnnnnnnnnnnnnnnnnnnnnnnnnnnnnnnnnnnnnnnnnnnnnnnnnnnnnnnnnnnnnnnnnnnnnnnnnnnnnnnnnnnnnnnnnnnnnnnnnnnnnnnnnnnnnnnnnnnnnnnnnnnnnnnnnnnnnnnnnnnnnnnnnnnnnnnnnnnnnnnnnnnnnnnnnnnnnnnnnnnnnnnnnnnnnnnnnnnnnnnnnnnnnnnnnnnnnnnnnnnnnnnnnnnnnnnnnnnnnnnnnnnnnnnnnnnnnnnnnnnnnnnnnnnnnnnnnnnnnnnnnnnnnnnnnnnnnnnnnnnnnnnnnnnnnnnnnnnnnnnnnnnnnnnnnnnnnnnnnnnnnnnnnnnnnnnnnnnnnnnnnnnnnnnnnnnnnnnnnnnnnnnnnnnnnnnnnnnnnnnnnnnnnnnnnnnnnnnnnnnccaccaaggccaagtattacactcccacgtacccctacctgcttcccaagtctaccagcactgccaaccagctccccttcacgctcccaggggggcagtgcaccactgtgcaggtnnnnnnnnnnnnnnnnnnnnnnnnnnnnnnnnnnnnnnnnnnnnnnnnnnnnnnnnnnnnnnnnnnnnnnnnnnnnnnnnnnnnnnnnnnnnnnnnnnnnnnnnnnnnnnnnnnnnnnnnnnnnnnnnnnnnnnnnnnnnnnnnnnnnnnnnnnnnnnnnnnnnnnnnnnnnnnnnnnnnnnnnnnnnnnnnnnnnnnnnnnnnnnnnnnnnnnnnnnnnnnnnnnnnnnnnnnnnnnnnnnnnnnnnnnnnnnnnnnnnnnnnnnnnnnnnnnnnnnnnnnnnnnnnnnnnnnnnnnnnnnnnnnnnnnnnnnnnnnnnnnnnnnnnnnnnnnnnnnnnnnnnnnnnnnnnnnnnntggggacagcatggcgggactatatttccatctgcgggcttcgtacacacggagaactgggcgggcaccccgtctcggagctcatctacatccacagcaagatgctcatcgcagatgaccggacagtcatca

SEQ ID NO: 34560 - DNA, 957 bp, Macaca Mulatta
  misc_feature (1)...(957): n = A,T,C or G
aaggaatcaatagtggatgaacaagagagtaacaaagaagaaaatatccatctgacaagatttcttcgtgtcctagccaactttctcatcatctgctgtttgtgtggaagtgggtacctcatttactttgtggtgaagcgatcccagcaattctccaaaatgcagaatgttagctggtatgaaaggaatgaggtnnnnnnnnnnnnnnnnnnnnnnnnnnnnnnnnnnnnnnnnnnnnnnnnnnnnnnnnnnnnnnnnnnnnnnnnnnnnnnnnnnnnnnnnnnnnnnnnnnnnnnnnnnnnnnnnnnnnnnnnnnnnnnnnnnnnnnnnnnnnnnnnnnnnnnnnnnnnnnnnnnnnnnnnnnnnnnnnnnnnnnnnnnnnnnnnnnnnnnnnnnnnnnnnnnnnnnnnnnnnnnnnnnnnnnnnnnnnnnnnnnnnnnnnnnnnnnnnnnnnnnnnnnnnnnnnnnnnnnnnnnnnnnnnnnnnnnnnnnnnnnnnnnnnnnnnnnnnnnnnnnnnnnnnnnnnnnnnnnnnnnnnnnnnnnnnnnnnnnnnnnnnnnnnnnnnnnnnnnnnnnnnnnnnnnnnnnnnnnnnnnnnnnnnnnnnnnnnnnnnnnnnnnnnnnnnnnnnnnnnnnnnnnnnnnnnnnnnnnnnnnnnnnnnnnnnnnnnnnnnnnnnnnnnnnnnnnnnnnnnnnnnnnnnnnnnnnnnnnnnnnngatgggctccttctatgctccaggcctggtgggcattaacgtgctgcgcctgctgacctccatgtacttccagtgctgggcagtgatgagcagcaacgtaccccatgaacgcgtgttcaaagcctcccgatccaacaacttctacatgggcctcctgctgctggtgctcttcctcagcctcctgccagtggcctacaccatcatgtccctcccaccctcctttgactgcgggccgttcag

SEQ ID NO: 34561 - DNA, 1922 bp, Macaca Mulatta
  misc_feature (1)...(1922): n = A,T,C or G
gggcagaatcctaatgtacctggctagctggtggtgagcaggggctttggggccaacttgttgggctccccaaggaaacccctttgaaaccaatggatgcattcacgggctcgggtctcaagaggaagtttgatgatgtggatgtgggctcatcagtttccaactcggatgatgagatctccagcagcgatagtgctgacagatgcgacagcctcaatcctcctaccactgccagcttcacannnnnnnnnnnnnnnnnnnnnnnnnnnnnnnnnnnnnnnnnnnnnnnnnnnnnnnnnnnnnnnnnnnnnnnnnnnnnnnnnnnnnnnnnnnnnnnnnnnnnnnnnnnnnnnnnnnnnnnnnnnnnnnnnnnnnnnnnnnnnnnnnnnnnnnnnnnnnnnnnnnnnnnnnnnnnnnnnnnnnnnnnnnnnnnnnnnnnnnnnnnnnnnnnnnnnnnnnnnnnnnnnnnnnnnnnnnnnnnnnnnnnnnnnnnnnnnnnnnnnnnnnnnnnnnnnnnnnnnnnnnnnnnnnnnnnnnnnnnnnnnnnnnnnnnnnnnnnnnnnnnnnnnnnnnnnnnnnnnnnnnnnnnnnnnnnnnnnnnnnnnnnnnnnnnnnnnnnnnnnnnnnnnnnnnnnnnnnnnnnnnnnnnnnnnnnnnnnnnnnnnnnnnnnnnnnnnnnnnnnnnnnnnnnnnnnnnnnnnnnnnnnnnnnnnnnnnnnnnnnnnnnnnnnnnnnnnnnnnnnnnnnnnnnnnnnnnnnnnnnnnnnnnnnnnnnnnnnnnnnnnnnnnnnnnnnnnnnnnnnnnnnnnnnnnnnnnnnnnnnnnnnnnnnnnnnnnnnnnnnnnnnnnnnnnnnnnnnnnnnnnnnnnnnnnnnnnnnnnnnnnnnnnnnnnnnnnnnnnnnnnnnnnnnnnnnnnnnnnnnnnnnnnnnnnnnnnnnnnnnnnnnnnnnnnnnnnnnnnnnnnnnnnnnnnnnnnnnnnnnnnnnnnnnnnnnnnnnnnnnnnnnnnnnnnnnnnnnnnnnnnnnnnnnnnnnnnnnnnnnnnnnnnnnnnnnnnnnnnnnnnnnnnnnnnnnnnnnnnnnnnnnnnnnnnnnnnnnnnnnnnnnnnnnnnnnnnnnnnnnnnnnnnnnnnnnnnnnnnnnnnnnnnnnnnnnnnnnnnnnnnnnnnnnnnnnnnnnnnnnnnnnnnnnnnnnnnnnnnnnnnnnnnnnnnnnnnnnnnnnnnnnnnnnnnnnnnnnnnnnnnnnnnnnnnnnnnnnnnnnnnnnnnnnnnnnnnnnnnnnnnnnnnnnnnnnnnnnnnnnnnnnnnnnnnnnnnnnnnnnnnnnnnnnnnnnnnnnnnnnnnnnnnnnnnnnnnnnnnnnnnnnnnnnnnnnnnnnnnnnnnnnnnnnnnnnnnnnnnnnnnnnnnnnnnnnnnnnnnnnnnnnnnnnnnnnnnnnnnnnnnnnnnnnnnnnnnnnncctcactggtggtttgtagctccacagacccaactgccctctgtaaatcagaggtggggaaaacacccaccctagaagcgctactgcccgaagattgtaaccctgaggagcctgaaaatgaagacttccgcccttcctggtccccctcaagcctccccttccgcacggacaatgaagagggctgtggggtggcgaagccctcccagcagaatgaggatcggccccccgaagattcttccttagaactccctctggcagtgtgacgggggctagaggtccttcctcttacccattctctatttattcccttattttatctaacaccatttcaaaacaaaactgtagaagcagctgctgctcccatgttattttattggggtctttggggaacgggtgggaaaggattgtttgagtattttttaaaagggaaacagtaccaaggagaccagccccagcttgatc

SEQ ID NO: 34562 - DNA, 401 bp, Macaca Mulatta
atggctaccctgaaccagatgcaccgcctggggcctcccaagcgaccgcctcggaagctgggccccacggaaggccggccgcagctaaagggtgtggtcttgtccactttcaccctcaagcccaagaagcctaactcggccaatcgcaagtgttgtcgagtacggctcagcacgggccgcgaggccgtctgcttcatccccggggagggtcacaatctgcaggagcaccacgttgtccttgtggagggcggccgcacccaggacctgccgggcgtcaagctcaccgttgtgcgtggcaagtacgactgtggccacgtgcagaagaagaagtgacagctggggccatggtggactgggcacccctgcagaacatgaaccttccgctcccggctaccacaggg

SEQ ID NO: 34563 - DNA, 636 bp, Macaca Mulatta
  misc_feature (1)...(636): n = A,T,C or G
ggggtaaatagtgaactagtgaagaggatcttgaatttcttaatgcatccaaagccctctggcaaaccattgccaaaatctaaaaaaacttctagcaaaggcagtaaaaaggaacgcaacagttctggaatggcaaggaaggctaagcgaaccaaatgtcctgaaattctgtcagatgaatctagtagnnnnnnnnnnnnnnnnnnnnnnnnnnnagagtcttcagatgacgacgataaagaaagtgaagaggagccaccaaaaagacagccaaaagagaaaaacctaaacagaaagctacttctaaaagtaaaaaatctgtgaaaagtgccaatgttaagaaggcagatagcagcaccaccaagaagaatcaaaacagttccaaaaaagaaagtgagtctgaggatagttcagatgatgaacctttaattaaaaagttgaagaaaccccctacagatgaagaattaaaggaaacaataaagaaattactggccagtgctaacttggaagaagtcacaatgaaacagatttgcaaaaaggtctatgaaaattatcctacttatgatttnactganaggaaagatttcantanaacaactgtaaaagagctaatttcttgagatagnagacaagaaa

SEQ ID NO: 34564 - DNA, 860 bp, Macaca Mulatta
  misc_feature (1)...(860): n = A,T,C or G
cctggttctaaggggtcagcttgagatcgactgagggaagcgggcccagactctgtgaggaggcaaggtnnnnnnnnnnnnnnnnnnnnnnnnnnnnnnnnnnnnnnnnnnnnnnnnnnnnnnnnnnnncctgtgggtctcaattgcccagctccggcccacactcgcctgctgccctgacctgagtcatcatgcttcttcggcagaagcgtcagtcctgcaaggctgaggaaggccgtcaggcccaaggagatgcaccggggcttatggacgtgcagattctcacaactgaggagcagaaggctgcatcctcctcctctactctgatcgcgggaaccctggaggaggtgcctgattctgggtcactgagtcctgcccagagtcctcggggtgcctcctcttccctgaccgtcaccgacgacactctatggagccaatccaatgaggtttccagcagcaatgaagaggaggggccaagcacctccccagacccagctcacctggagtcccttttccgggaagcacttgatgagaaagtggctgagttagttcatttcctgctccgcaaatatcaaattaaggagccggtcacaaaggcagaaatgctggagagtgtcatcaaaaattacaagaaccactttcctgagatcttcagcaaagcctctgagtgcatgcaggtgatctttggcattgacgtgaaggaagtggaccccgccggccactgctacgtccttgtcacctgcctgggcctctcctatgacggcctgctgggtgacgatcagagcacgcacaagaccggcctcctgataatcgtcctgggcatgatcgtaatggagggcaggtgcaccccggaggaggca

SEQ ID NO: 34565 - DNA, 562 bp, Macaca Mulatta
  misc_feature (1)...(562): n = A,T,C or G
tttttaattgcttataacaagcatattttttggccattggaatataatattttgccccaatatccgttattttccgaaagggatttggtatctttttgaaaaatgcttaaatcatcagaagatccgcagaattcactttattgagaaaatcccgaaagttttccatcccaacatgatggacttcggtttgaacacaattcgttttttcatttgaattggcatttcacaaatatttgctaaacatttgctggagaaatnnnnnnnnnnnnnnnnnnnnnagaaaactcaaaatgaaaattcattcccctgaaatatttaggtgtcttcattctatagtttgatctattaagaaattagtatttttccatgtttattgttttatcagactgcattagaaagattagtgattcatcttcacagcacatttttaagcagttatttcaaccagcacattcgttttgttcatattcactatagaatgatatcttgtaaataaagacactcagcacactgtgaaaatgtatttgtgcaccttgctttttaaatatttctactaaaaatg

SEQ ID NO: 34566 - DNA, 798 bp, Macaca Mulatta
  misc_feature (1)...(798): n = A,T,C or G
aggccctcattctctagcctagaaatagacaaacagtgcaaatttgactttcttgccatctatgatggcccctccaccaactctggcctgattggacaagtctgtggccgtgtgactcccaccttcgaatcgtcatcaaactctctgactgtcgtgttgtctacagattatgccaattcttaccggggcttttctgcttcctacacctcaatttatgcagaaaacatcaacactacatctttaacttgctcttctgacaggatgagagttattataagcaaatcttacctagaggcttttaactctaatgggaataccttacaactaaaagacccaacttgcagaccaaaattatcaaatgttgtggaattttctatccctcttaatggatgtggtacaatcagaaaggtnaagatcagtcaattacttacaccaatataatcaccttttctgcatcctcacgttctgaagtgatcacccgtcagaaacaactccagattattgtgaagtgtgaaatggaacataattctacagtggggttgatatacataacagaagatgatgtaatacaaaatcaaaatgcactgggcaaatataacacaagcatggctttttttgaatccgattcatttgaaaagactatactcgagtcaccatattatgtggatttgaaccaaactctttttgttcaagttagtctgcacacctcagatccaaatttggtggtgtttctggatacctgtagagcctctcccacctctgaccttgcgtctccaacctatgacctaatcaagagtg

SEQ ID NO: 34567 - DNA, 731 bp, Macaca Mulatta
gggcgggtgggtagccagtggttccgtcgggcttgtttggtgggagatcagatcaaacattgtctggcctgcactgtaaaactagttagctgacgacgacttctcaggtttcttcaagatgcctgcagcacttgtggagaatagccaggttatctgtgaagtatgggccagtaatctagaagaagagatgaggaagatccgagaaatcgtgctcagttacagttatattgccatggacacagaatttccaggtgttgtggtgcgaccaattggtgaatttcgtagttccatagattaccagtatcagcttctgcggtgcaatgttgaccttttaaaaattatccagctgggccttacattcacaaatgagaagggagaatatccttctggaatcaatacttggcagttcaatttcaaatttaaccttacagaggacatgtactcccaggattccatagatctccttgctaactcaggactacagtttcagaagcatgaagaggaagggattgacacactgcactttgcagaaactgccttatgacatcaggagtggttctctgtgacaatgtcaaatggctttcatttcatagtggctatgattttggctatatggtaaagttgcttacagattctcgtttgccagaagaggaacatgaattctttcatattctgaaaccttttcttcccatccatttatgatgtgaaataccttgatgaaagagttgcac

SEQ ID NO: 34568 - DNA, 1613 bp, Macaca Mulatta
  misc_feature (1)...(1613): n = A,T,C or G
tttctatgcagattttggaccgctgaacttggcaatggtgtacagatattgctgcaaactaaacaagaaactaaannnnnnnnnnnnnnnnnnnnnnnnnnnnnnnnnnnnnnnnnnnnnnnnnnnnnnnnnnnnnnnnnnnnnnnnnnnnnnnnnnnnnnnnnnnnnnnnnnnnnnnnnnnnnnnnnnnnnnnnnnnnnnnnnnnnnnnnnnnnnnnnnnnnnnnnnnnnnnnnnnnnnnnnnnnnnnnnnnnnnnnnnnnnnnnnnnnnnnnnnnnnnnnnnnnnnnnnnnnnnnnnnnnnnnnnnnnnnnnnnnnnnnnnnnnnnnnnnnnnnnnnnnnnnnnnnnnnnnnnnnnnnnnnnnnnnnnnnnnnnnnnnnnnnnnnnnnnnnnnnnnnnnnnnnnnnnnnnnnnnnnnnnnnnnnnnnnnnnnnnnnnnnnnnnnnnnnnnnnnnnnnnnnnnnnnnnnnnnnnnnnnnnnnnnnnnnnnnnnnnnnnnnnnnnnnnnnnnnnnnnnnnnnnnnnnnnnnnnnnnnnnnnnnnnnnnnnnnnnnnnnnnnnnnnnnnnnnnnnnnnnnnnnnnnnnnnnnnnnnnnnnnnnnnnnnnnnnnnnnnnnnnnnnnnnnnnnnnnnnnnnnnnnnnnnnnnnnnnnnnnnnnnnnnnnnnnnnnnnnnnnnnnnnnnnnnnnnnnnnnnnnnnnnnnnnnnnnnnnnnnnnnnnnnnnnnnnnnnnnnnnnnnnnnnnnnnnnnnnnnnnnnnnnnnnnnnnnnnnnnnnnnnnnnnnnnnnnnnnnnnnnnnnnnnnnnnnnnnnnnnnnnnnnnnnnnnnnnnnnnnnnnnnnnnnnnnnnnnnnnnnnnnnnnnnnnnnnnnnnnnnnnnnnnnnnnnnnnnnnnnnnnnnnnnnnnnnnnnnnnnnnnnnnnnnnnnnnnnnnnnnnnnnnnnnnnnnnnnnnnnnnnnnnnnnnnnnnnnnnnnnnnnnnnnnnnnnnnnnnnnnnnnnnnnnnnnnnnnnnnnnnnnnnnnnnnnnnnnnnnnnnnnnnnnnnnnnnnnnnnnnnnnnnnnnnnnnnnnnnnnnnnnnnnnnnnnnnnnnnnnnnnnnnnnnnnnnnnnnnnnnnnnnnnnnnnnnnnnnnnnnnnnnnnnnnnnnnnnnnnnnnnnnnnnnnnnnnnnnnnnnnnnnnnnnnnnnnnnnnnnnnnnnnnnnnnnnnnnnnnnnnnnnnnnnnnnnnnnnnnnnnnnnnnnnnnnnnnnnnnnnnnnnnnnnnnnnnnnnnnnngcttttccataaactcccggctagccagttctctagggaacttgaatgctgcaacagacgatccagaaaacaaaaagacctcctcatcctctaaggcaggcttcacagccagcccgtttaccaacctcttgaatggcagctcccagccgactaccagaaattaccctgagctcaacaacaatcagtacaacagaagcagcagcagcaacgggggcaacctgaacagccccccaggcccccacaacgccaagacagaggagcacaccaccatcctccgaccctcctacaccgggctttcttcttcttcagcgagattcctgagccgttctatccct

SEQ ID NO: 34569 - DNA, 499 bp, Macaca Mulatta
tggtcaacccccaccatgttcttccacatcgctgtggacagtgaggccttgggccacgtctgcttccagctgtttgcagacaaggttctgaagacaaaagaaaactttcatggctctgagcactgggagagaaaggatttgggtataagggttcctgatttcacagaattattccaggttttgtatgtcagggtggtgacttcacatgccatatggcactggtgacaagtccgtctacggggagaaatttgttgaggagaacttcatcctaaagcatacaggtcctggcatcttgtccatggcaaatgctggacccaacacaaatggttcccagtttttcatctgcactgccaagactgagtggttggatggcaagcatgtggtctttggcaaagtgaaagaaggcatgaatattgtggaggccatggagcgctttgggtccaggaatggcaagaccagcaagaagatcaccattgctgactgtggacaactcgaataa

SEQ ID NO: 34570 - DNA, 221 bp, Macaca Mulatta
ccatacaacaagactgttagaaggactgaatgtatatgaaaatgtctgggactcagtaggtccttaataagtgctagtttccttccctttccttttcccagggatctagtttttaatcctgttcctccagggcttgccctcggagactcagaacttgctcttattcctccagaccaagaaagaccatccatacacctggagaattgaactggcaaaaacag

SEQ ID NO: 34571 - DNA, 587 bp, Macaca Mulatta
  misc_feature (1)...(587): n = A,T,C or G
tggggaggctgccggctctcttatgcctcatcagccagtgctcctgcctacagcgtgcaggctgtggggcgccgggcctgcggcacttcctgtataagccactggacatccctgaccaccaccgccaactgccccagtttaccagncagccctgagctagaggccccctacagcagagaggaggagcggcagcggctgtcggacctgtaccaccgcctgcatgctcgtctccacaacacctcccgacccctgcgcctcatttaccacgtggctgagaaggagacactgctggcctgggtnnnnnnnnnnnnnnnnnnnnnnnnnnnnnnnnnnnnnnnnnnnnnnnnnnnnnnnnnnnnnnnnnnnnnnnnnnnnnnnnnnnnnnnnnnnnnnnnnnnnnnnnnnnnnnnnnnnnnnnnnnnnnnnnnnnnnnnnnnnnnnnnnnnnnnnnnnnnnnnnnnnnnnnnnnnnnnnnnnnnnnnnnnnnnnnnnnnnnnnnnnnnnnnnnnnccagaccaggcagtgctaggagcaaccacctttgttttttaccttctgtccaccctggaagtgtggtgggggtgtgt

SEQ ID NO: 34572 - DNA, 1951 bp, Macaca Mulatta
  misc_feature (1)...(1951): n = A,T,C or G
caggcgaggacagcaatgaccttattcgacacttcctcatcgagtcttctgccaaaggagtgcatctcaaaggagccgatgaggagccctactttggnnnnnnnnnnnnnnnnnnnnnnnnnnnnnnnnnnnnnnnnnnnnnnnnnnnnnnnnnnnnnnnnnnnnnnnnnnnnnnnnnnnnnnnnnnnnnnnnnnnnnnnnnnnnnnnnnnnnnnnnnnnnnnnnnnnnnnnnnnnnnnnnnnnnnnnnnnnnnnnnnnnnnnnnnnnnnnnnnnnnnnnnnnnnnnnnnnnnnnnnnnnnnnnnnnnnnnnnnnnnnnnnnnnnnnnnnnnnnnnnnnnnnnnnnnnnnnnnnnnnnnnnnnnnnnnnnnnnnnnnnnnnnnnnnnnnnnnnnnnnnnnnnnnnnnnnnnnnnnnnnnnnnnnnnnnnnnnnnnnnnnnnnnnnnnnnnnnnnnnnnnnnnnnnnnnnnnnnnnnnnnnnnnnnnnnnnnnnnnnnnnnnnnnnnnnnnnnnnnnnnnnnnnnnnnnnnnnnnnnnnnnnnnnnnnnnnnnnnnnnnnnnnnnnnnnnnnnnnnnnnnnnnnnnnnnnnnnnnnnnnnnnnnnnnnnnnnnnnnnnnnnnnnnnnnnnnnnnnnnnnnnnnnnnnnnnnnnnnnnnnnnnnnnnnnnnnnnnnnnnnnnnnnnnnnnnnnnnnnnnnnnnnnnnnnnnnnnnnnnnnnnnnnnnnnnnnnnnnnnnnnnnnnnnnnnnnnnnnnnnnnnnnnnnnnnnnnnnnnnnnnnnnnnnnnnnnnnnnnnnnnnnnnnnnnnnnnnnnnnnnnnnnnnnnnnnnnnnnnnnnnnnnnnnnnnnnnnnnnnnnnnnnnnnnnnnnnnnnnnnnnnnnnnnnnnnnnnnnnnnnnnnnnnnnnnnnnnnnnnnnnnnnnnnnnnnnnnnnnnnnnnnnnnnnnnnnnnnnnnnnnnnnnnnnnnnnnnnnnnnnnnnnnnnnnnnnnnnnnnnnnnnnnnnnnnnnnnnnnnnnnnnnnnnnnnnnnnnnnnnnnnnnnnnnnnnnnnnnnnnnnnnnnnnnnnnnnnnnnnnnnnnnnnnnnnnnnnnnnnnnnnnnnnnnnnnnnnnnnnnnnnnnnnnnnnnnnnnnnnnnnnnnnnnnnnnnnnnnnnnnnnnnnnnnnnnnnnnnnnnnnnnnnnnnnnnnnnnnnnnnnnnnnnnnnnnnnnnnnnnnnnnnnnnnnnnnnnnnnnnnnnnnnnnnnnnnnnnnnnnnnnnnnnnnnnnnnnnnnnnnnnnnnnnnnnnnnnnngacccagctgtcctgcacccccttgccaatgagtcttccccatcttttctttccacttnnnnnnnnnnnnnnnnnnnnnnnnnnnnnnnnnnnnnnnnnnnnnnnnnnnnnnnnnnnnnnnnnnnnnnnnnnnnnnnnnnnnnnnnnnnnnnnnnnnnnnnnnnnnnnnnnnnnnnnnnnnnnnnnnnnnnnnnnnnnnnnnnnnnnnnnnnnnnnnnnnnnnnnnnagacggagtctcattgtcacccaggctggactgcggtggtgcgatctaggttcactgcaacctccacctcccaggttcaagcaattctcctgcctcaggctcccgagtagctgggattacaggcatgtgccactcacccgggtaattttgtatttttagtagagatggggtttcaccatgttggccaggctggtcttgaactcctgacctcaagtaatccacctgcttcggcctcccaaagtgctgggattacagggacgagccaccgcgcccagcttctttccatttcttgataggcgaatattccaaagctggtatcgtaactgccctaatgttgcatattaggcggtgggagtagagataagggccatctctctgtgattctgcctcagctcctgtcttgctgagccctcccccaacccacgctcca

SEQ ID NO: 34573 - DNA, 642 bp, Macaca Mulatta
ctggcccgcatgaagcaggaaccagtgcgcacggatgacggccgcgccatggccgtgcgcattcaagcctacgactacctcgagtgctcggccaagaccaaggaaggcgtgcgcgaggtgttcgagacggccacgcgcgccgcgctgcagaagcgctacggctcccagaacggctgcatcaactgctgcaaggtgctatgagggccgcgcccgtcgcgcctgcccctgccggcgcggctccccctcctggaccagtcccccacgagcccggagaaggggagactcgtgtcccacaaggaccccaccggactgcctggcatctgtctgctggcgcctctggctcgcgccaggattcggcgtgggcaccgggcgcccccttcccagtgtctgtgcgtccagctgtgttgcacaggcctgggctccccgctgagtgccaagggtcccctgagcatgcttttctgaagagccaggcctcagagtgtgtggctgtgtgtctgttcgactcccttcgccccattttcaccccacccccgcctctgatccccgggggcgagattggcgcgggagtgtggccgcgccccatcagatgttcgcccttcaccagcgggcgcctgatatcccttgtctgtaacatagaccccg

SEQ ID NO: 34574 - DNA, 652 bp, Macaca Mulatta
ttttagcatgttaatagcactttaatagcaaaaaaaggcacatcaactacaaagttatccttagtttggaaatgcttttctagattaatgatcgaaatgccgttagggtcctagacacatcagcctaaagtggcatctggaattgaatggatttacttgataatgatcaatctttagctcttccctttggttatatgattttataaggttatggattgatcagcatttacgttttactaatggtaagggtgagggtgatagggcaggttatgggttttctagtactgttgaaaactgcaagtactggctgtttgtatacttagccataacttggtgaataaaaacctgagcaatgtctatgtattaatgcgttggcaaagaaagctgcttgtgtcagctttgttaattgcctcaggatatttctattaaaataagctgttttaagaggaacagaagggaaatctgctacctagtctatacacagtgtgaacctcatagagggcttctgataccctcaaacgtggagagcagtaagggagcggagtggttaaggactttcaggaacttaactattctggaataagaaattaatcaactgaccttgggccagcaggtttttaactaaattgtcacttgcctttctcacccagtt

SEQ ID NO: 34575 - DNA, 252 bp, Macaca Mulatta
ctttttcagttcattttgaaggtccagcttcctgattaaatgtctgacatattaatgaatgaccagcagcagctttcagctcttaaaaagacacttatattatgattttacatgctggttacctgttccattgttgtcaaatgcccactctccatcagatgtgttcctctattttcttgtccacaaagtactcctcacttttcaatttgtcacgttactaaatggtgttacattaaagccctgtgttaagtg

SEQ ID NO: 34576 - DNA, 503 bp, Macaca Mulatta
cagtgccagccgccctaaccctggacccaggcacagcccaccagcgcctgatcctgtcggacgactgcaccattgtggcttacggcaacctgcacccacagccgctgcaggactcaccaaagcgcttcgatgtggaggtgtcggtgctgggttctgaagccttcagtagtggcgtccactactgggaggtggtggtggcagagaagacccagtgggtgatcgggctggcgcacgaagctgcaagccgcaagggcagcatccagatccagcccagccgcggcttctactgcatcgtgatgcacgatggcaaccagtacagcgcctgcacggagccctggacgcggctcaacgtccgggacaagcttgacaaggtgggcgtcttcctggactacgatcaaggcttgctcatcttctacaatgctgatgacatgtcctggctctacaccttccgcgagaagttccctggcaagctctgctcttacttcagcccctggccagagcca

SEQ ID NO: 34577 - DNA, 126 bp, Macaca Mulatta
caatggagttgagagttttcagatttgctcagaagactgttcctttgaaaacctatgaagttttacccaatgtatatctggatctaaaaattaaagaaaatatcagtcgtgttcagattcctttat

SEQ ID NO: 34578 - DNA, 915 bp, Macaca Mulatta
atcgctcctgagccccaaggagccctgagggtgaggactgaggcactgagggtccctccctgtactcctcaggctcctgggtggcctgttatgccagcggcccctgttccctgcagtctgtgctctgtatctgggcctgtctcggagctggcctggcagcactgcacttgccatgctggaaaccagcccaggcctcccagggaaaggcccagccacttccagcttttgatctttgggccagaggccaccttacacacaccccaggtgtccatggggagcactggattgccctcctactatgagcatccttcatctgggcagaaccccaccctgcagatgcttctaataaaaagcgcttctcatcttccagcgatctgagtggatgccagggatacaggaagagggcaccagaggagggaggggcggagggctgaggcacaggaagctgcatcttgtctttgagttttattaggaaggggagtccaacctagtgtaagaggttagaccagaaggtctaggcttgctaaataaaatccacggtctggcccctctggagagagcagagcctcctcagaaaagctggcctgaggaagaagccctttgccccctcccctcctataagttagtgtcatttggctctgggaacgctggggcccggggtgggcgaaacccctggcattggcagtgcccccccttagtggttggcacctggccctgccggacccggtgaactgccctgcaccgcggggctccagtctcaagccggcatgcacggtggggacaaagctgcaggtccacatgtcagggcggcggcccacggggacaggagtccagcctcatctctcagccaggctggccaggatgccaatgagattgtccagccccagcaaatagccgtcctcgcgattgccctcc

SEQ ID NO: 34579 - DNA, 960 bp, Macaca Mulatta
aaagtaattaattgatgaaaattatggaatatagtagtctagcatacttgactaccccttgtatcatgaagtagtctataaaatgaagcggcagcaggagggctcatttaataacatatcattatctgttcctttattatttctatcacagaaattcatctgttgctatgggagcctcactttcttgctcggaatattccctaaaggtaacagatgtgaccaaagtaaggactttgaatgctattgcaaagaatatcctggtttagccagacctctctgagagacatggatatcacaggatgaaggtagaagtataatctgcaattctctgtgacacagctttaaccaccttctctggccaggacagttgcaatctttgttttaagtttcacatggccatggagaacgtgcccaagaagaaaaagaatttgaaacagagatacagtcacttcctttgcttagtcttaccagcgattgtcatcgtggttaaagctggtctatgcttcttccacagacagaagcttagtcttgttttcagtggaattaattgatgaactggaaaaatttaactgcatggtatgaattcagagtgtgacttaagagtcaattcaaagcagtattttgcattttcatttgtaaaataaaaatgtccactcttatagtatagtctcttattctttcactaaatacagtcggtagcctacaagtatgaaaggaaaaatgttgtctcatttttttcttcactttctctttttattatgtgctgattggatatgctgctttgggcaagatgttaagggtacagagtaaaatggtgcagtgtgaaaattccctagacttgggaagcaggatatcaaagttcctagacttacaaagacagacgtgaaccctgacattcaacaggttacttcttctgtaaacagagagaaatggcttaattctaagatccatctgacaatt

SEQ ID NO: 34580 - DNA, 1342 bp, Macaca Mulatta
  misc_feature (1)...(1342): n = A,T,C or G
ctgatgagaatattgatgtcacctgcaatgaccccgagttcccctcctctccatactcctcttcctccccctgcggcctggacagcatccatgaattctacaactcgcctgctcttcatggccgtcaagtgggccaagaacctacctgtgttctccagcctgcccttccgggatcaggtnnnnaggtgatcctgctggaagaggcgtggagtgaacttttcctcctcggggccatccagtggtctctgcctctggacagctgtcctctgctggcaccgcctgaggcctctactgccgnnnnnnnnnnnnnnnnnnnnnnnnnnnnnnnnnnnnnnnnnnnnnnnnnnnnnnnnnnnnnnnnnnnnnnnnnnnnnnnnnnnnnnnnnnnnnnnnnnnnnnnnnnnnnnnnnnnnnnnnnnnnnnnnnnnnnnnnnnnnnnnnnnnnnnnnnnnnnnnnnnnnnnnnnnnnnnnnnnnnnnnnnnnnnnnnnnnnnnnnnnnnnnnnnnnnnnnnnnnnnnnnnnnnnnnnnnnnnnnnnnnnnnnnnnnnnnnnnnnnnnnnatctgtccctgccctctctaccctttccccgcctctcccacaccctcccagggctcactgattagacagcacaagggtctcagttcagcggcacacagcaaacatctactgtgtcccaggcacagtaccaggtcccggggtggggaccaagatgtacataagacaaagctactgccttccagagacaaccagcagtgaccgcactgaagatgcaaactgccctagtcaggtactgagggttgcatgaatctgcaggagacagagaccctttggcatgggaagcgtaaagcagaattgggagggactttggggagacagggctggacttgaaaggaagaaatctaaaagaaaacatcatttgcaaagggagagaggggcaagcatggtatgttgttaggacaggagcccaccttgaaggtataacaggtgccagtgagaaatggggagaataagccagaaaagtacgccaggaccagtccattcaggactttgaatgccagccaaaggccacgtctgacttgggaggcagagagcagctactgcaggtttccgagcaggagtgtgtcatacacagggctggacctcacgcagatgggcatggccatgggtacagaggatattagagggaagggggtggcagctactgccaccttccaggtggttccatgaagttctgatctttgggcatggccgggggagtggaagggagactctaggagttggaataggtcagacccagtgtttgggtgaaggtaaggaatgagggaagaggagctctttg

SEQ ID NO: 34581 - DNA, 694 bp, Macaca Mulatta
  misc_feature (1)...(694): n = A,T,C or G
gaattgttagcacgactgcgtccaaatagcactggtgctgagattagaagcgtctgcacagaagctggtatgtttgccatcagagcacggcgaaaaatcgctaccgagaaggattcttggaagctgtaaataaggtcattaagtcttatgccaaattcagtgctactcctcgttacatgacatacaactgaaccctgaaggctttcaggtgaaaactttagattggaatcctaaccttacatagacttgttaataaccacttcataaacaaataaatggcttcaaannnnnnnnnnnnnnnnnnnnnnnnnnnnnnnnnnnnnnnnnnnnnnnnnnnnnnnnnnnnnnnnnnnnnnnnnnnnnnnnnnnnnnnnnnnnnnnnnnnnnnnnnnnnnnnnnnnnnnnnnnnnnnnnnnnnnnnnnnnnnnnnnnnnnnnnnnnnnnnnnnnnnnnnnnnnnnnnnnnnnnnnnnnnnnnnnnnnnnnnnnnnnnnnnnnnnnnnnnnnnnnnnnnnnnnnnnnnnnnnnnnnnnnnnnnnnnnnnnnnnnnnnnnnnnnnnnnnnnnnnnnnnnnnnnnnnnnnnnnnnnnnnnnnnnnnnnnnnnnnnnnnnnnnnnnnnnnnnnnnnnnnnnnnnnnnnnnnnnnnnnnnnnnnnnnnnnnnnnnnnnnnnnnnnnnnnnnnnnnnnnnnnnnn

SEQ ID NO: 34582 - DNA, 474 bp, Macaca Mulatta
  misc_feature (1)...(474): n = A,T,C or G
aaagtgattcatatgttctccacagctgaaggcctgctgacccagggtgataagatcactgctgatggacttcaggaggtgtttgagaccaatgtctttggccattttatcctgnnnnnnnnnnnnnnnnnnnnnnnnnnnnnnnnnnnnnnnnnnnnnnnnnnnnnnnnnnnnnnnnnnnnnnnnnnnnnnnnnnnnnnnnnnnnnnnnnnnnnnnnnnnnnnnnnnnnnnnnnnnnnnnnnnnnnnnnnnnnnnnnnnnnnnnnnnnnnnnnnnnnnnnnnnnnnnnnnnnnnnnnnnnnnnnnnnagggtctgtattccaatgtggtgtgtccaggtacagcactgaccaatttgacatatggaattctgcctccctttatatggacactgttgatgccggcaatattncttcgcttttttgcaaatgcattcactttgacaccatacaatggaacagaagcgctggtatg

SEQ ID NO: 34583 - DNA, 642 bp, Macaca Mulatta
  misc_feature (1)...(642): n = A,T,C or G
gaaaagctgtttttcaggctgacagtccatttaagggtagccgagaccttgcatggtagagtaggaatcatagtgtcagtgaggtcccgtgagtctttgtgagtccttgtgtcatcgttcgggcactgtttttttatgcaagggcaaaaatctttgtatcnnnnnnnnnnnnnnnnnnnnnnnnnnnnnnaaaaggaaaataaaagatattgaggtcttcctagtgttacttaaattaagatgaaggtaagaaacannnnnnnnnnnnnnnnnncaaaagtgctatttgtttcctaaaaacagtgatttctattaaaaaggtgtcagaactggagaaaatgccgtgtagttataattttttagcacagaccctgctgatcacaatgacattttgccgtgtgtgtgtctctagactggtgggccagtctccttgaaggacagaggcggagctccccacccttctctctcctcagaaaagaccgtgctctcttcttggtgcagggatcttgtctcctgttgtgaagcccaaatggaagtgtggatggtatcagggccctacccgtggtcttctcagattctgctagagcaaaaggctggtgcctaaataagatcccttcctttggtgctgcttttggtctttca

SEQ ID NO: 34584 - DNA, 2161 bp, Macaca Mulatta
  misc_feature (1)...(2161): n = A,T,C or G
caggcgcagtgagcctgcaggccgacctcactcgtggcacacaactaagtctggggagaagcaacccgatgccagcatgatgcagatatctcagggtatgatcggccctccttggcaccaaagctaccaatccannnnnnnnnnnnnnnnnnnnnnnnnnnnnnnnnnnnnnnnnnnnnnnnnnnnnnnnnnnnnnnnnnnnnnnnnnnnnnnnnnnnnnnnnnnnnnnnnnnnnnnnnnnnnnnnnnnnnnnnnnnnnnnnnnnnnnnnnnnnnnnnnnnnnnnnnnnnnnnnnnnnnnnnnnnnnnnnnnnnnnnnnnnnnnnnnnnnnnnnnnnnnnnnnnnnnnnnnnnnnnnnnnnnnnnnnnnnnnnnnnnnnnnnnnnnnnnnnnnnnnnnnnnnnnnnnnnnnnnnnnnnnnnnnnnnnnnnnnnnnnnnnnnnnnnnnnnnnnnnnnnnnnnnnnnnnnnnnnnnnnnnnnnnnnnnnnnnnnnnnnnnnnnnnnnnnnnnnnnnnnnnnnnnnnnnnnnnnnnnnnnnnnnnnnnnnnnnnnnnnnnnnnnnnnnnnnnnnnnnnnnnnnnnnnnnnnnnnnnnnnnnnnnnnnnnnnnnnnnnnnnnnnnnnnnnnnnnnnnnnnnnnnnnnnnnnnnnnnnnnnnnnnnnnnnnnnnnnnnnnnnnnnnnnnnnnnnnnnnnnnnnnnnnnnnnnnnnnnnnnnnnnnnnnnnnnnnnnnnnnnnnnnnnnnnnnnnnnnnnnnnnnnnnnnnnnnnnnnnnnnnnnnnnnnnnnnnnnnnnnnnnnnnnnnnnnnnnnnnnnnnnnnnnnnnnnnnnnnnnnnnnnnnnnnnnnnnnnnnnnnnnnnnnnnnnnnnnnnnnnnnnnnnnnnnnnnnnnnnnnnnnnnnnnnnnnnnnnnnnnnnnnnnnnnnnnnnnnnnnnnnnnnnnnnnnnnnnnnnnnnnnnnnnnnnnnnnnnnnnnnnnnnnnnnnnnnnnnnnnnnnnnnnnnnnnnnnnnnnnnnnnnnnnnnnnnnnnnnnnnnnnnnnnnnnnnnnnnnnnnnnnnnnnnnnnnnnnnnnnnnnnnnnnnnnnnnnnnnnnnnnnnnnnnnnnnnnnnnnnnnnnnnnnnnnnnnnnnnnnnnnnnnnnnnnnnnnnnnnnnnnnnnnnnnnnnnnnnnnnnnnnnnnnnnnnnnnnnnnnnnnnnnnnnnnnnnnnnnnnnnnnnnnnnnnnnnnnnnnnnnnnnnnnnnnnnnnnnnnnnnnnnnnnnnnnnnnnnnnnnnnnnnnnnnnnnnnnnnnnnnnnnnnnnnnnnnnnnnnnnnnnnnnnnnnnnnnaaaccattttttcttccccacagcttcaaatgccttcaggctcgggcccggcccagcgggtgaagacaagggttttcccaggctttcaaagccttgggagggtgattttcagggaggccacaatcccaaccttctgaaggagcctgaagagagaaggcgtaggccagagcctgtcaggcaacttgggcaagaccaagtcagccttttcatctctccagaacattcctgagagtctgagaagacacagcagcctggagctaggccggggagcccaggagggttacccgggaggcaggcccacctgtgcagtcaacaccaaggcagaagaccctgggaggaaagccgctcctgaccttgggagccatctggaccggcagctttcctacccgcggcccgaggggaggaccggtgcctcggcctctttccacagcacagacccaaggcctgaagagctgcctgccgcctcgcacccgcacacatccagtctcggccggagggggcccggcccaggcagcgcctcggctcttcagggctttcagtacgggaagccccactgctcggtgctggagaaggtctccaaattcgagcagcgagagcaagggagccagagaccgagtgtgggcggctccggttttggccagaactataggccccacaggacagtctcaacttccagtatttctgggaatgacttcgaggagataaaagcccacatccgtttctctgagtcagctgaacccctaggcaacggggagcagcacttcaaaaacggggagctgacgttggaagaggcttcccggcaggcaagggtcagcagctgagcggaggagcg

SEQ ID NO: 34585 - DNA, 228 bp, Macaca Mulatta
  misc_feature (1)...(228): n = A,T,C or G
caggagttggtgaccttcagagatgtggctgtagacttctcccaagaagaatgggattgtctggattcttctcaaagacacctgtatagtaatgtgatgctggagaactacaggatcttagtatcactgggnggactttgcttttcaaaccaagtgtgatattattgttggaacaggaaaagcaccctggatggtgaagagagagctgacaaaaggcttgtgctcagg

SEQ ID NO: 34586 - DNA, 163 bp, Macaca Mulatta
ggtccacgggagagctgtggagcttggtgagtgtttcgtggcctctcggtttggtcggcacccccagccgctggcccaggacccctctgcagaagcattccaggagagcaggcgtcaccaagatgtccaaccccttcctgaagcaagtcttcaacaaggacaa

SEQ ID NO: 34587 - DNA, 1394 bp, Macaca Mulatta
  misc_feature (1)...(1394): n = A,T,C or G
gcgccgcgcgccctccgccggcgcccacacctgtcaactccgcgcgctcccaggttcttggagacgccgggtgaggagccgccctgaccgactggcccccctccgcactgcacccttgccccaccccgcaccctccctttcttcaccctcgcacccacacccctcacggtgccagggggcggcggccccgggcggagcgctttcgcgtgcagctaccactccagncagaagtcttaatgaagtagccagctgcagaagaatctggatcattagataaaatgactttccatgtgggaagactgatagctatcatcttgttctaccttctcattttgcttgttgggattatgggctgcctggaagaaccaaaaacagtggcagcgcannnnnnnnnnnnnnnnnnnnnnnnnnnnnnnnnnnnnnnnnnnnnnnnnnnnnnnnnnnnnnnnnnnnnnnnnnnnnnnnnnnnnnnnnnnnnnnnnnnnnnnnnnnnnnnnnnnnnnnnnnnnnnnnnnnnnnnnnnnnnnnnnnnnnnnnnnnnnnnnnnnnnnnnnnnnnnnnnnnnnnnnnnnnnnnnnnnnnnnnnnnnnnnnnnnnnnnnnnnnnnnnnnnnnnnnnnnnnnnnnnnnnnnnnnnnnnnnnnnnnnnnnnnnnnnnnnnnnnnnnnnnnnnnnnnnnnnnnnnnnnnnnnnnnnnnnnnnnnnnnnnnnnnnnnnnnnnnnnnnnnggagccaccatcagtgtgatcattgacgtggatgtgaacatttctgtcatcatctctgcactcgttgccactctgtacaccctggtgggagggctctattctgtggcctacaccgatgttgttcagctcttttgcatttttgtggggctgnnnnnnnnnnnnnnnnnnnnnnnnnnnnnnnnnnnnnnnnnnnnnnnnnnnnnnnnnnnnnnnnnnnnnnnnnnnnnnnnnnnnnnnnnnnnnnnnnnnnnnnnnnnnnnnnnnnnnnnnnnnnnnnnnnnnnnnnnnnnnnnnnnnnnnnnnnnnnnnnnnnnnnnnnnnnnnnnnnnnnnnnnnnnnnnnnnnnnnnnnnnnnnnnnnnnnnnnnnnnnnnnnnnnnnnnnnnnnnnnnnnnnnnnnnnnnnnnnnnnnnnnnnnnnnnnnnnnnnnnnnnnnnnnnnntcaacagactggaaccagactgcatatgggcttccagatcccaagactacagatgaagcagacatgattttaccaattgttctgcagtatctctgccctgtgtatatttctttctttggtcttggtgcagtttctgctgctgttatgtcatcagcagactcttccatcttgtcagcaagttccatgtttgcacggaacatctaccagctttccttcagacaaaatg

SEQ ID NO: 34588 - DNA, 100 bp, Macaca Mulatta
gccaatgcagacccgtcagtgataaactgtctgcataacctgtcccgtcgcattgccactgtgctgcagcacgaggagcgccgctgccagtacctcaccc

SEQ ID NO: 34589 - DNA, 399 bp, Macaca Mulatta
acacagctatttcatcataagaacggggcccgcaaaagtgccaagaagatcctcattgtcatcacagatgggcagaaatacaaagaccccctggaatacagagatgtcatcccccaggcagagaaggctggcatcattcgctatgctatcggggtgcgcctcttcttcacccctgccccaggctcagcctgcacctcctgcaggtgcagtgctgctgggctcctcctcctcagctgcctctctgctgcaggtgggacgcgctttccaggaacccaccgccaggcaggagctgaacaccatcggctcagcgcctccacaggaccacgtgttcaaggtggacaactttgcagcccttagcagcatccagaagcagctgcaggagaagatctatgcagttga

SEQ ID NO: 34590 - DNA, 726 bp, Macaca Mulatta
tgctttaatctgagtagtctgtagcttgagcagcctcccttgtcctccttcaaataaatgctttgtgcgcagcgtccagtttgcccaccttgttcaactcactataggttcaagatggatatcactttacctgcctggcctttgctcgcagagctatgcttgaaggcttctggaaggattcccttgagtgtgacgccatctgcctccctagggtcacctgctcttgggtttgtcaacataaaagtgctgtggaggcaaaagcagtgctcgtggcatgcaggattgccgcagtctgggacaaaaaacaacgctcttgctcgagaggggattaatgtggtgctttattgcatgtttcataattacaggcatcatggagcattcagacctctttaatatactctgcatgcatattcatgtgcagacacacacatttcacttgctattggcagagcacctctcaatcagttaaaagggaacttcagtctcagcccaatctaaacccattcaatctaagtgggggattaattacactgtggttgctcaccccacttacagcctcagaattttcttccagggtcctttccccagttctctcagggcctaagccggccaaatatagttcatgcatctgccacctacccagccaagactctcttgccttctgattaaaattgaaaccaccacctgtgtcctaccacaggttctcagtgtctctaaaactgaaag

SEQ ID NO: 34591 - DNA, 2180 bp, Macaca Mulatta
  misc_feature (1)...(2180): n = A,T,C or G
gccatgccttgtgttcaggcgcagtatgggtcctcgcctcaaggagccagccccgcttctcagagctacagttaccactcttcgggagaatacagctccgatttcttaactccagagtttgtcaagtttagcatggacctcaccaacactgaaatcactgccaccacttctctccccagcttcagtacctttatggacaactacagcacaggctacgacgtcaagccaccttgcttgtaccaaatgcccctgtccggacagcagtcctccattaaggtagaagacattcagatgcacaactaccagcaacacagccacctgcccccccagtctgaggagatgatgccgcactccggttcggtttactacaagccctcctcgcccccgacgcccaccaccccgggcttccaggtgcagcacagccccatgtgggacgacccggggtctctccacaacttccaccagaactacgtggccactacgcacatgatcgagcagaggaaaactccagtttcccgcctctccctcttctcctttaagcaatcgccccctggcaccccggtgtctagttgccagatgcgcttcgacgggcccctgcacgtccccatgaacccggagcccgccagcagccaccacgtggtggacgggcagacctttgctgtacccaaccccattcgcaagcccgcgtccatgggcttcccggnnnnnnnnnnnnnnnnnngtcgcagctgcttgacacgcaggtgccctcgccgccttcacggggctccccctccaacgaggggctgtgcgctgtgtgtggggacaacgcggcctgccaacactacggcgtgcgcacctgtgagggctgcaaaggcttctttaagnnnnnnnnnnnnnnnnnnnnnnnnnnnnnnnnnnnnnnnnnnnnnnnnnnnnnnnnnnnnnnnnnnnnnnnnnnnnnnnnnnnnnnnnnnnnnnnnnnnnnnnnnnnnnnnnnnnnnnnnnnnnnnnnagtggttcgcacagacagtttaaaaggccggagaggtcgtttgccctcgaaaccgaagagcccacaggagccctctcccccttcgcccccggtgagtctgatcagtgccctcgtcagggcccatgtcgactccaacccggctatgaccagcctggactattccagnnnnnnnnnnnnnnnnnnnnnnnnnnnnnnnnnnnnnnnnnnnnnnnnnnnnnnnnnnnnnnnnnnnnnnnnnnnnnnnnnnnnnnnnnnnnnnnnnnnnnnnnnnnnnnnnnnnnnnnnnnnnnnnnnnnnnnnnnnnnnnnnnnnnnnnnnnnnnnnnnnnnnnnnnnnnnnnnnnnnnnnnnnnnnnnnnnnnnnnnnnnnnnnnnnnnnnnnnnnnnnnnnnnnnnnnnnnnnnnnnnnnnnnnnnnnnnnnnnnnnnnnnnnnnnnnnnnnnnnnnnnnnnnnnnnnnnnnnnnnnnnnnnnnnnnnnnnnnnnnnnnnnnnnnnnnnnnnnnnnnnnnnnnnnnnnnnnnnnnnnnnnnnnnnnnnnnnnnnnnagagagacacgggctcaaggaacccaagagagtggaagaactgcaaaacaagattgtaaattgtctcaaagaccatgtgactttcaacaatggggggttgaaccgccccaattatttgtccaaactgttggggaagctcccagaacttcgtaccctttgcacacaggggctacagcgcattttctacctgaaattggaagacttggtgccaccgccagcaataattgacaaacttttcctggacactttacctttctaagacctcctcccaagcacttcaaaggaactggaaagataacggaaactgtccagagggggcaagtcacatgggcagagatagccctgtgagctgtctcagctcaagctgcccctcatttctgtaaccctcccccagcccccttgatccctaaagaaaacaaacaaacaaaaactgttgctatttcataacctgcaggcagaacctgaaagggcattttggctccggggcatcctggatttaaaacatggactacacacaatacagtggtataaactttttattatcagtttaaaaatcagtttattgttcagaagaaaggttgatatactgtataatgggaaatgtttggccatgcttggttgttgcagttcagacaaatgta

SEQ ID NO: 34592 - DNA, 621 bp, Macaca Mulatta
gcagaacagcctgcttggacacagctcggtggaagatgcaaaggcaacaatggagctctaccaaatctcccagagaatccgagcccgccgagggctgccccgcctggctgtgtcagactgaagccccgtccagcccattccccagggactagaggctttcggctttgtgggacagcaactaccttgcttttggaaaatacatttttaatagtaaagtggctctatattttctctacgccatcactgggtcctcttcttattcttctctccgagctgggttaacagtagacaggacccatttctgtgtgatgttaggagggaatgaagtcttatgctggggaagtgggcaagtgtcaatttccttaatatcttgaatcctgagggtccaaaatgcagcttgggaatctaagtagcatgtggcttaattactaatcccaccctttgctgttgcattctagccctattcctggtgcatttatgcctagaaaggtgatgttatttcctggggtggcattcagctcctcttgattttggtgccacagcatttgtggactttgaagtgaaagtataggaaatgtcaagggtgccaccccagcaaccttgagccagtcacccctcctc

SEQ ID NO: 34593 - DNA, 1296 bp, Macaca Mulatta
  misc_feature (1)...(1296): n = A,T,C or G
aaaaggtatagtttggcagtggggcctccaaaaaaagacccaaaagttaaaggtgtccaatcagcagctgtacaagcttttcttaaaaggaaagaagaggagcttagacgaaaagnnnnnnnnnnnnnnnnnnnnnnnnnnnnnnnnnnnnnnnnnnnnnnnnnnnnnnnnnnnnnnnnnnnnnnnnnnnnnnnnnnnnnnnnnnnnnnnnnnnnnnnnnnnnnnnnnnnnnnnnnnnnnnnnnnnnnnnnnnnnnnnnnnnnnnnnnnnnnnnnnnnnnnnnnnnnnnnnnnnnnnnnnnnnnnnnnnnnnnnnnnnnnnnnnnnnnnnnnnnnnnnnnnnnnnnnnnnnnnnnnnnnnnnnnnnnnnnnnnnnnnnnnnnnnnnnnnnnnnnnnnnnnnnnnnnnnnnnnnnnnnnnnnnnnnnnnnnnnnnnnnnnnnnnnnnnnnnnnnnnnnnnnnnnnnnnnnnnnnnnnnnnnnnnnnnnnnnnnnnnnnnnnnnnnnnnnnnnnnnnnnnnnnnnnnnntatgactgcagaagaacttagggagcgagaattccttgaacgaaagcatcggagaaaaaaacttgagacagatggaaaactacctccaactgtgtccaaaaaggcaccctctcagaaagaaagtgtgggcacaaaactaagcaaaggttctggagacaggcatccttcttccaaaggaatgccccttcctcatgctgaaaagaaatcaagacccagcatggccaatgagaaacaccttgcttggtcttcatcaaaatccatgccaggagagaggatcaaggcaggatctggcaatagctcccaaccctcacttcgtgagggccacgacagacctgttttcaatggagctggaaagcctcattccagcacctcttcaccaagtgtcccaaagactcctgctagcaggactcagaaatctgctattgagcacaaagccaaaaaatctccatcccatcctagccattccaggcctgggcccatggtcaccccacacaataaggctaagagtccaggtgtcaggcagccaggcagcagctctagctcagcccctgggcagcccagcacaggggttgctcgacccacagttagttctggccctgtgcctaagcgccagaatggcagctccagctcaggacctgagcgatcaatcaatgggtccaagaagccaaccaatgactcaaatccctctaggcggacagtcagtggtacatgtggccctggacaacctgcaagcagctcaagtggccctaggcaacccatcagtggttca

SEQ ID NO: 34594 - DNA, 115 bp, Macaca Mulatta
gggttcacacctccaggaatggatagatcctctccagataacagcccagtgcacgggatgttacgtcaaccatccatcacaactggggtcaacatccccatcatcactgaactag

SEQ ID NO: 34595 - DNA, 814 bp, Macaca Mulatta
  misc_feature (1)...(814): n = A,T,C or G
actgaaatcagatagtcggggaaaaacatgacccaatgcgagagaggtatcccaggctaggatcttaatgcagccatatgcatgaggtcccaagtactcaggctcctgcgaggcatccattgagtgatggccaatggaatttggtgggatggaaatgtttctcgaattatctgaggtggtttcaatggctgaatatataacctttcctctttcatttcagttcaacgaggatctgtataaacaggtaatattcctgctttgatttcctcgtggggtgggttgcaggaggatatgagtcctttctgtgcaatgtgacactgaggctcctctaggaagagaatctcaggcctgaacccctctttcaacctcagccttcgggtgagtggggaaagagcattgcatggctccattgctgaaggaagcagagatcaactctgttctttatcagcctgagactcagcctctcaccataatttttctctcttggacttaaagaaaggaggcccacaacctgggataacttgtcctttacccccacaaggttcctgaccgcaccgaaaagactaatgtgccttagaacaagcatttgctgtttcgttagcacctggttccaggacagacctccagcttcccaagaggatactgctgccaagaagctgctctgaagtcagtttctatcgttttgctctttgatccaaagtactgtttctctcattgngcctccnaccatgttcccttcttcttagcaccacaaataatcaaaatccaacatgagtgtttgttttcctttaaaatatgcacaaatcatctctcg

SEQ ID NO: 34596 - DNA, 109 bp, Macaca Mulatta
ttcgagtgtacgtgctccgggatcttcagcacccgcggccgccatcgccgtcgcttgccttcctctggactcatctgcgccacttctccgctccacactccgccgccat

SEQ ID NO: 34597 - DNA, 715 bp, Macaca Mulatta
  misc_feature (1)...(715): n = A,T,C or G
ggggtgttccagtgcggccccgcttcagtcattggtattcgagagggtgatgtgaacctgaacttcgacatgccctttatcttcgcggaggtgaatgccgaccgcatcacctggctgtannnnnnnnnnnnnnnnnnnnnnnnnnnnnnnnnnnnnnnnnnnnnnnnnnnnnnnnnnnnnnnnnnnnnnnnnnnnnnnnnnnnnnnnnnnnnnnnnnnnnnnnnnnnnnnnnnnnnnnnnnnnnnnnnnnnnnnnnnnnnnnnnnnnnnnnnnnnnnnnnnnnnnnnnnnnnnnnnnnnnnnnnnnnnnnnnnnnnnnnnnnnnnnnnnnnnnnnnnnnnnnnnnnnnnnnnnnnnnnnnnnnnnnnnnnnnnnnnnnnnnnnnnnnnnnnnnnnnnnnnnnnnnnnnnnnnnnnnnnnnnnnnnnnnnnnnnnnnnnnnnnnnnnnnnnnnnnnnnnnnnnnnnnnnnnnnnnnnnnnnnnnnnnnnnnnnnnnnnnnnnnnnnnnnnnnnnnnnnnnnnnnnnnnnnnnnnnnnnnnnnnnnnnnnnnnnnnagaggcagagcatcctgtaaagatctcgtacgctcagtatgaaaagtacctgaagtccgacaacatgatccggatcacagccgtgtgcaaggtcccagatgaacctggggtggtggtggagcgggacatcatcctggacaaccccaccttgactctggagg

SEQ ID NO: 34598 - DNA, 223 bp, Macaca Mulatta
tgacgtgcctggctgggagttgggcccttggagatcagaccctgcctctctccaggagaaccgggaatggaaaacagggaggcagcacagaggcaggaagcccaggtgtcacagcttggctcaggtgagaaggaggagctgggcagcgatctcagacatggggcagggggtaatgaagaagattagagtggctatggtctagtgctgtgtggaagactagtga

SEQ ID NO: 34599 - DNA, 572 bp, Macaca Mulatta
ccacatacactttcagagtcaaggctgtggatgggggagatcctcccaggtcttccacagctacagtttcgctttttgtgatggatgaaaatgacaatgctcccatggttacccttcccaaatacatttcctacactttactgccaccttcgagtaatgtcaggacagtagtagctacagtgttggcaacagacagtgacgatggcatcaatgcagacctgaactacagcattgtgggagggaatcccttcaagctgtttgaaattgatcccactagtggtgtggtttccttagtgggaaaactcacccaaaagcattatggcttgcacaggttggtggtgcaagtgaatgaaagtgggcagccttcccagtccaccacgactctggtgcatgtgtttgtcaatgaaagtgtttctaatgcaactgtgattgactcccagatagctagaagtttgcacaccccactcacccaggatatagctggcgacccaagctatgaaattagcaaacagagactcagtattgtcattggtgtggttgctggcattatgacagtgattctaatcatctta

SEQ ID NO: 34600 - DNA, 232 bp, Macaca Mulatta
  misc_feature (1)...(232): n = A,T,C or G
agaccgtgtggtgcgagctttccgctgggaggagctaggtgtgggtcccgaacatctcacagggcagctggtgtccctcaagaaatggatgctggagggtcaggtncaggtggacagcctctcagtgactctgggaccactgggtgttcctgaactcatggtgtctcagccaggctgtgcttatgcaattctactgtgtacctggaaaaaggacactgggtcccctcctgcc

SEQ ID NO: 34601 - DNA, 339 bp, Macaca Mulatta
  misc_feature (1)...(339): n = A,T,C or G
ggatgtcttcgcgggagtcttctctctggctcaggtgtgggtgggaggggcccacaggaagctcagccttctcctctcaaagttggagtgcctccaaagggctgtgggtgggggagcgggagctttgggtgaccagtcactcaaaggaacattctggtcccttcggttatcttcaagatttggaaactgcaaatgtgtcctcgatgtggaatccttatgtatgcgtgtgtgtnnnnnnnnnnnnnnnnnnngtgtgtgtggtttctcctagacccgtgacctgagatgtgtgatttttagtcattaaatggaagtgtctgaccagctccgcccagcacc

SEQ ID NO: 34602 - DNA, 701 bp, Macaca Mulatta
  misc_feature (1)...(701): n = A,T,C or G
nnnnnnnnnnnnnnnnnnnnnnnnnnnnnnnnnnnnnnnnnnnnnnnnnnnnnnnnnnnnnnnnnnnnnnnnnnnnnnnnnnnnnnnnnnnnnnnnnnnnnnnnnnnnnnnnnnnnnnnnnnnnnnnnnnnnnnnnnnnnnnnnnnnnnnnnnnnnnnnnnnnnnnnnnnnnnnnnnnnnnnnnnnnnnnnnnnnnnnnnnnnnnnnnnnnnnnnnnnnnnnnnnnnnnnnnnnnnnnnnnnnnnnnnnnnnnnnnnnnnnnnnnnnnnnnnnnnnnnnnnnnnnnnnnnnnnnnnnnnnnnnnnnnnnnnnnnnnnnnnnnnnnnnnnnnnnnnnnnnnnnnnnnnnnnnnnnnnnnnnnnnnnnnnnnnnnnnnnnnnnnnnnnnnnnnnnnnnnnnnnnnnnnnnnnnnnnnnnnnnnnnnnnnnnnnnnnnnnnnnnnnnnnnnnnnnnnnnnnnngtcactatatgggcgaacttgggtannnnnnnnnnnnnnnnnnnnnnnnnnnnnnnnnnnnnnnaacttgatttcttttgtttggcttgttgttttctttaaagctcaatttgctgagtttttctggtgtttctaaaaagccaattatttttaagagggttgttgtggtgggggggaagggggttagtttaagttttgattttttatgtgtggggataattggtatatttggagggagggt

SEQ ID NO: 34603 - DNA, 310 bp, Macaca Mulatta
ccccattatctactctctgaggaatgaagatgttaaatcagccatgtggaagctgagaaaccgtcatgtgaactcctggaaaaactaagattgctatgaagaagcataatcctgaattagaatgaagatcctccagtgtatcacagtgtcatgtcaaccatctttgccagcgatatgggttgttgagttacagaattggctttttgttttaaatcaagggaattgcatcaagtcagtctctgattctatttatatataatgttaactatttttttcattgtttataattctaaagtataaattgtcttga

SEQ ID NO: 34604 - DNA, 622 bp, Macaca Mulatta
  misc_feature (1)...(622): n = A,T,C or G
ggacgagggtgctatatatgtcacgacaaatgctcttctgtagagtgaccctcgnggaaatcctttctgcagtttagcaccatgaaaatggcccacgcgcctccagggcaccactcagtcattggtcgaccgagcgtcaatgggctggcatatgctgagtacgtcatctacagaggagaacaggcatacccagagtatctcatcacttaccagatcatgaagccagaggccccttcccagactgcaacagccgcagagcagaagacctagtgaatgcctgctggtgaagccggatcagattcagcctgggactggattacagaggattgtttctcacaacaacatcaatattcgagaagtccctgacagcctagaaataagctgtttgtcttttataaagcattgctatagtgatgaatagtatgagtaactgatacatactcaactgctactgttccctttgaggaaatgtttacaggggcgggcttttaacatatctcaggctcattttcattgccattatcccatttctaaaacaagatcactttgatctagacttggaaatgggaaattagaaaacataacccatgcgttttccgatgttcacgaatcacacactaca

SEQ ID NO: 34605 - DNA, 188 bp, Macaca Mulatta
attttgcagttcttcttaaagcaggcatgactgtaaagcaagcaattgtatacaacctcctgtctgccatgatggcttacataggcatgctcataggcacagctgttggtcagtatgccaataacatcacactttggatctttgcagtcactgcaggcatgttcctctatgtagccttggtggatatg

SEQ ID NO: 34606 - DNA, 112 bp, Macaca Mulatta
tgacagtgaccaacccaaagcgtattgagcgggcagtggaagaaaaggcctgcaactgtctgctgctctaggtcaaccagatcggctcggtcactgaagccatccaagcgtg

SEQ ID NO: 34607 - DNA, 4995 bp, Macaca Mulatta
  misc_feature (1)...(4995): n = A,T,C or G
aggcctgaagaccattgtgggggccctgatccagtcagtgaagaagctttctgatgtcatgatcttgactgtgttctgtctaagcgtgtttgcgctaataggattacagttgttcatgggcaacctacgaaataaatgtttgcaatggcctccagataactcttcctttgaaataaatattacttccttctttaacaactcattggatgggaatggtaccactttcaacaggacagtgagcatgtttaactgggatgaatatattgaggataaaagnnnnnnnnnnnnnnnnnnnnnnnnnnnnnnnnnnnnnnnnnnnnnnnnnnnnnnnnnnnnnccagtgtcctgaaggatacatctgtgtgaaggctggtagaaaccccaactatggctacacgagctttgatacctttagttgggcctttttgtccttatttcgtctcatgactcaagacttctgggaaaacctttatcaactgngacactacgtgctgctgggaaaacgtacatgatattttttgtgctggtcattttcttgggctcattctatctaataaatctgatcttggctgtggtggccatggcctatgaggaacagaatcaggccacattggaagaggctgaacagaaggaagctgaatttcagcagatgctcgaacagttgaaaaagcaacaagaagaagctcaggnnnnnnnnnnnnnnnnnnnnnnnnnnnnnnnnnnnnnnnnnnnnnnnnnnnnnnnnnnnnnnnnnnnnnnnnnnnnnnnnnnnnnnnnnnnnnnnnnnnnnnnnnnnnnnnnnnnnnnnnnnnnnnnnnnnnnnnnnnnnnnnnnnnnnnnnnnnnnnnnnnnnnnnnnnnnnnnnngacagagtccgaaaatcggaatctgaagacagcataagaagaaaaggtttccgtttttccttggaatgaagtaggctgacatatgaaaagagattttcttctccacaccannnnnnnnnnnnnnnnnnnnnnnnnnnnnnnnnnnnnnnnnnnnnnnnnnnnnnnnnnnnnnnnnnnnnnnnnnnnnnnnnnnnnnnnnnnnnnnnnnnnnnnnnnnnnnnnnnnnnnnnnnnnnnnnnnnnnnnnnnnnnnnnnnnnnnnnnnnnnnnnnnnnnnnnnnnnnnnnnnnnnnnnnnnnnnnnnnnnnnnnnnnnnnnnnnnnnnnnnnnnnnnnnnnnnnnnnnnnnnnnnnnnnnnnnnnnnnnnnnnnnnnnnnnnnnnnnnnnnnnnnnnnnnnnnnnnnnnnnnnnnnnnnnnnnnnnnnnnnnnnnnnnnnnnnnnnnnnnnnnnnnnnnnnnnnnnnnnnnnnnnnnnnnnnnnnnnnnnnnnnnnnnnnnnnnnnnnnnnnnnnnnnnnnnnnnnnnnnnnnnnnnnnnnnnnnnnnnnnnnnnnnnnnnnnnnnnnnnnnnnnnnnnnnnnnnnnnnnnnnnnnnnnnnnnnnnnnnnnnnnnnnnnnnnnnnnnnnnnnnnnnnnnnnnnnnnnnnnnnnnnnnnnnnnnnnnnnnnnnnnnnnnnnnnnnnnnnnnnnnnnnnnnnnnnnnnnnnnnnnnnnnnnnnnnnnnnnnnnnnnnnnnnnnnnnnnnnnnnnnnnnnnnnnnnnnnnnnnnnnnnnnnnnnnnnnnnnnnnnnnnnnnnnnnnnnnnnnnnnnnnnnnnnnnnnnnnnnnnnnnnnnnnnnnnnnnnnnnnnnnnnnnnnnnnnnnnnnnnnnnnnnnnnnnnnnnnnnnnnnnnnnnnnnnnnnnnnnnnnnnnnnnnnnnnnnnnnnnnnnnnnnnnnnnnnnnnnnnnnnnnnnnnnnnnnnnnnnnnnnnnnnnnnnnnnnnnnnnnnnnnnnnnnnnnnnnnnnnnnnnnnnnnnnnnnnnnnnnnnnnnnnnnnnnnnnnnnnnnnnnnnnnnnnnnnnnnnnnnnnnnnnnnnnnnnnnnnnnnnnnnnnnnnnnnnnnnnnnnnnnnnnnnnnnnnnnnnnnnnnnnnnnnnnnnnnnnnnnnnnnnnnnnnnnnnnnnnnnnnnnnnnnnnnnnnnnnnnnnnnnnnnnnnnnnnnnnnnnnnnnnnnnnnnnnnnnnnnnnnnnnnnnnnnnnnnnnnnnnnnnnnnnnnnnnnnnnnnnnnnnnnnnnnnnnnnnnnnnnnnnnnnnnnnnnnnnnnnnnnnnnnnnnnnnnnnnnnnnnnnnnnnnnnnnnnnnnnnnnnnnnnnnnnnnnnnnnnnnnnnnnnnnnnnnnnnnnnnnnnnnnnnnnnnnnnnnnnnnnnnnnnnnnnnnnnnnnnnnnnnnnnnnnnnnnnnnnnnnnnnnnnnnnnnnnnnnnnnnnnnnnnnnnnnnnnnnnnnnnnnnnnnnnnnnnnnnnnnnnnnnnnnnnnnnnnnnnnnnnnnnnnnnnnnnnnnnnnnnnnnnnnnnnnnnnnnnnnnnnnnnnnnnnnnnnnnnnnnnnnnnnnnnnnnnnnnnnnnnnnnnnnnnnnnnnnnnnnnnnnnnnnnnnnnnnnnnnnnnnnnnnnnnnnnnnnnnnnnnnnnnnnnnnnnnnnnnnnnnnnnnnnnnnnnnnnnnnnnnnnnnnnnnnnnnnnnnnnnnnnnnnnnnnnnnnnnnnnnnnnnnnnnnnnnnnnnnnnnnnnnnnnnnnnnnnnnnnnnnnnnnnnnnnnnnnnnnnnnnnnnnnnnnnnnnnnnnnnnnnnnnnnnnnnnnnnnnnnnnnnnnnnnnnnnnnnnnnnnnnnnnnnnnnnnnnnnnnnnnnnnnnnnnnnnnnnnnnnnnnnnnnnnnnnnnnnnnnnnnnnnnnnnnnnnnnnnnnnnnnnnnnnnnnnnnnnnnnnnnnnnnnnnnnnnnnnnnnnnnnnnnnnnnnnnnnnnnnnnnnnnnnnnnnnnnnnnnnnnnnnnnnnnnnnnnnnnnnnnnnnnnnnnnnnnnnnnnnnnnnnnnnnnnnnnnnnnnnnnnnnnnnnnnnnnnnnnnnnnnnnnnnnnnnnnnnnnnnnnnnnnnnnnnnnnnnnnnnnnnnnnnnnnnnnnnnnnnnnnnnnnnnnnnnnnnnnnnnnnnnnnnnnnnnnnnnnnnnnnnnnnnnnnnnnnnnnnnnnnnnnnnnnnnnnnnnnnnnnnnnnnnnnnnnnnnnnnnnnnnnnnnnnnnnnnnnnnnnnnnnnnnnnnnnnnnnnnnnnnnnnnnnnnnnnnnnnnnnnnnnnnnnnnnnnnnnnnnnnnnnnnnnnnnnnnnnnnnnnnnnnnnnnnnnnnnnnnnnnnnnnnnnnnnnnnnnnnnnnnnnnnnnnnnnnnnnnnnnnnnnnnnnnnnnnnnnnnnnnnnnnnnnnnnnnnnnnnnnnnnnnnnnnnnnnnnnnnnnnnnnnnnnnnnnnnnnnnnnnnnnnnnnnnnnnnnnnnnnnnnnnnnnnnnnnnnnnnnnnnnnnnnnnnnnnnnnnnnnnnnnnnnnnnnnnnnnnnnnnnnnnnnnnnnnnnnnnnnnnnnnnnnnnnnnnnnnnnnnnnnnnnnnnnnnnnnnnnnnnnnnnnnnnnnnnnnnnnnnnnnnnnnnnnnnnnnnnnnnnnnnnnnnnnnnnnnnnnnnnnnnnnnnnnnnnnnnnnnnnnnnnnnnnnnnnnnnnnnnnnnnnnnnnnnnnnnnnnnnnnnnnnnnnnnnnnnnnnnnnnnnnnnnnnnnnnnnnnnnnnnnnnnnnnnnnnnnnnnnnnnnnnnnnnnnnnnnnnnnnnnnnnnnnnnnnnnnnnnnnnnnnnnnnnnnnnnnnnnnnnnnnnnnnnnnnnnnnnnnnnnnnnnnnnnnnnnnnnnnnnnnnnnnnnnnnnnnnnnnnnnnnnnnnnnnnnnnnnnnnnnnnnnnnnnnnnnnnnnnnnnnnnnnnnnnnnnnnnnnnnnnnnnnnnnnnnnnnnnnnnnnnnnnnnnnnnnnnnnnnnnnnnnnnnnnnnnnnnnnnnnnnnnnnnnnnnnnnnnnnnnnnnnnnnnnnnnnnnnnnnnnnnnnnnnnnnnnnnnnnnnnnnnnnnnnnnnnnnnnnnnnnnnnnnnnnnnnnnnnnnnnnnnnnnnnnnnnnnnnnnnnnnnnnnnnnnnnnnnnnnnnnnnnnnnnnnnnnnnnnnnnnnnnnnnnnnnnnnnnnnnnnnnnnnnnnnnnnnnnnnnnnnnnnnnnnnnnnnnnnnnnnnnnnnnnnnnnnnnnnnnnnnnnnnnnnnnnnnnnnnnnnnnnnnnnnnnnnnnnnnnnnnnnnnnnnnnnnnnnnnnnnnnnnnnnnnnnnnnnnnnnnnnnnnnnnnnnnnnnnnnnnnnnnnnnnnnnnnnnnnnnnnnnnnnnnnnnnnnnnnnnnnnnngcctcctgctcttcctggtcatgttcatctacgccatctttagggatgtccaactttgcctatgttaagagggaagttgggatcgatgacatgttcaactttgagacctttggcaacagcatgatctgcctgtttcaaattacaacctctgctggttgggatggattgctagcgcctattcttaatagtggacctccagactgtgaccctgaaaaagatcaccctggaagctcagttaagggagattgtgggaacccatctgttgggattttcttttttgtcagttacatcatcatatccttcctggttgtggtgaacatgtacatcgcggtcatcctggagaacttcagtgttgctactgaagaaagtgcagagcccctgagtgaggatgactttgagatgttctatgaggtttgggagaagtttgatcccgatgcgacccagtttatagagtttgccaagctctctgattttgcagatgccctggatcctcctcttctcatagcaaaacccaacaaagtccagctcattgccatggatctgcccatggtcagcggtgaccggatccactgcctcgacatcttatttgcttttacaaagcgtgttttgggtgagagtggagagatggatgcccttcgaatacagatggaagagcgattcatggcatcaaacccctc

SEQ ID NO: 34608 - DNA, 438 bp, Macaca Mulatta
  misc_feature (1)...(438): n = A,T,C or G
tttggttccgtggctccagacagacagtaccattcccctacgaggaacaagagcgcaagattcagtgccatgctggcagcactgatcccttcgagattagctgtggctttccaagctatgggtgccatgaagnnnnnnnnnnnnnnnnnnnnnnnnnnnnnnnnnnnnnnnnnnnnnnnnnnnnnnnnnnnnnnnnnnnnnnnnnnnnnnnnnnnnnnnnnnnnnnnnnnnnnnnnnnnnnnnnnnnnnnnnnnnnnnnnnnnnnnnnnnnnnnnnnnnngcaggtatgccggggccctcgtggatgaggatgtcttccagggaaaggagctggtcaacaatcactcactgcaggctctggtggcggggctgaaggcctacagcacctgggagaacatccgctgcctgcaggactgccgcgagtgcactggaggcatg

SEQ ID NO: 34609 - DNA, 1377 bp, Macaca Mulatta
  misc_feature (1)...(1377): n = A,T,C or G
ggacagggaataattcttccaggaaggttagaatgcatgttcataacatcaataaaattacaaggatttacaatgtaattggaactatcagaggatctgtggaacctgacaggtatgttattctgggaggtcaccgggactcctgggtatttggagctattgacccaaccagtggggttgctgttttgcaagaaattgcccggagttttggaaaactgatgagtaaaggctggagacctagaagaactatcatttttgccagctgggatgcagaagaatttggacttctgggttccacagaatgggctgaggagaatgtcaaaatactccaggagagaagcattgcttatatcaactcagattcatctatagaaggcaattatactctcagagttgactgtacaccccttctttaccaattagtgtataaactgacaaaagagatccccagccctgatgatgggtttgagagtaaatcactgtatgaaagctggttggaaaaagatccttcacctgaaagtaaaaatttgcctagaatcaataagctgggatctggaagtgactttgaagcttattttcagagacttggaattgcttcaggcagagcccgttacactaagaataagagaacagataagtacagcagctacccagtgtaccacacaatttatgagaaatttgaaattgttagagaaattttttgaccccccatttaaaaaacaccgttgggggggctctttttcaagaacccctggtaaataaccttgggggacccaaaacctttccttttcatttttcaaaaatatgcnnnnnnnnnnnnnnnnnnnngcccccggttttttttttcttttccgaaaaaccctgcccccaaacttggaaaaaacttgggggaaaccttttaaaccccctatttttccccccgggaaaaaatttccaaaaaannnnnnnnnnnnnnnnnnnnnnnnngcagccctcttcaaaaggagggnnnnnnnnnnnnnnnnnnnnnttttctttacttaaagagtttaataagagaacacaatttattattctcccccgcgaaaaaaaaaagacaacaccccacaccccctttttgtttaactataaaagagggccgcgctataaagccatcattatattttgtctcccgatccaccgcgtattatgagaggagggagggtataaattcaacccaagcccaaaaatgccaaaatttcccaccacnataatattttgcccgttcctcccctcccccttttttttaccacccaacacccacaccccaattgtaaaaaaacgacacccccccccccgtggaaggatccaacatcaacaagaggaaatgaaacaccagctgcccncccaccnccccgg

SEQ ID NO: 34610 - DNA, 666 bp, Macaca Mulatta
  misc_feature (1)...(666): n = A,T,C or G
ctggaaatcaaggggattctgtgtgtccaagggcattggtgggctccaggcccctgacctgcatctgggaggtgtctaggggaagccagatccgaggctcatgcttgcatattntcagatgaggtccagagatatatccagagaagagtggaagggctcggagacctacagccccaatactgcatatggtaaggccccagccctgagcccacccgcaggagcttcagcccttaggcccagcctccacgtgaccctcccagattccggccatggcattctggctgggaagccttctcttccgctcctgcctagagggtcggggagcacatgggcccctagagagggagggacacctcgctggtacagggatgcgagtgcagaccctgccatcccgtcctacaggtgtggacttcctggtacccgtgatgggctacgtctgccgcatctgccacaagttctatcacagcaactcaggggcacagctctcccactgcaagtccttgggccactttgagaacctgcaggtgagccggacatcctgccctgtcctcccctggccacagactcagtcgtatccaagctgatccgggtggctagtggccaccccttcttgtgctgggcctcaaccccaagacaccacccctgcaccaatagggagaaaattag

SEQ ID NO: 34611 - DNA, 85 bp, Macaca Mulatta
gggtaagtgagttactgtgggcaagcacactgtttcctggaagacacctacgtgcttatgaccacaagactgccaggaaaatttc

SEQ ID NO: 34612 - DNA, 785 bp, Macaca Mulatta
  misc_feature (1)...(785): n = A,T,C or G
ggagaccacactgggtcagaggacacacagtccacctaggacccagaccgcagagggagcaggaagagaggctgatagtttgatccagaaaccagcaggtactagctcaaattcaggttctggagtcaaataggggcatttccagtttctcttaaaaaccatgtttggtttcagttgggataggattgttttgtctgttgaaaatgtttctnnnnnnnnnnnnnnnnnnatttttctctcattccatttctgccttagctgtagtttcttagcggggaggaaagctcacattcaccttctgccgtgggacttcagaccacattggcttggaggcattcgtctccttctggggtggggacaggctctcacggcaggcttgttcccatggctctgagtgaggcctcttcctgctgggctgccagactcctgcacccgggcccccaccttctcggcttttggtttttctttctttttggtagaacacaacatctgccattcggttcaaccttctttatctcctcccctgtcatcccgttttttccaagaaattaagaagtcgagtccctgtggaggttctggtaacttgaaaaacctgttccgaaagggtggttctcgatcaagggttttgccttattcctccccccttaatccccaaagggcggaaaacccacttgaaaaatattcctttcaccatcctaagagaaaaaaccccgttcgaaacacccggagaaacccacctcacacccctggggctcacacacctataactagtctttatgggcttc

SEQ ID NO: 34613 - DNA, 1258 bp, Macaca Mulatta
  misc_feature (1)...(1258): n = A,T,C or G
gggggctctttcccatcttgcaagatggcgggtgaaaaagttgagaagccagatactaaagagaagaaacccgaagccaagaaggctgatgctggtggcaaggtgaaaaagggtaacctcaaggctaagaagcccaagaaggggaagccccattgcagccgcaaccctgtccttgtcagaggaattggcaggtattcccgatctgccatgtattccagaaaggccatgtacaagaggaagtactcagccgctaaatccaagnnnnnnnnnnnnnnnnnnnngaaggttcttgcaactcttacaaaaccagttggtggtgacaagaacggcggtacccgggtggttaaacttcgcaaaatgcctagatattatcctactgaagatgtgcctcgaaagctgttgagccacggcaaaaaacccttcagtcagcacgtgagaaaactgcgagccagcattacccccgggaccattctgatcatcctcactggacgccacaggggcaagagggtggttttcctgaagcagctggctagtggcttgttacttgtgactggacctctggtcctcaatcgagttcctctacgaagaacacaccagaaatttgtcattgccacctcaaccaaaatcgatatcagcagtgtcaaaatcccaaaacatcttaccgatgcttacttcaagaagaagaagctgcggaagcccagacaccaggaaggtgagatcttcgaccacagaaaaagagaaatacgagattacagagcagcgcaagattgatcagaaagctgtggactcacaaattctaccaaaaatcaaagctgttcctcagctccagggctacctgcgatctgtgtttgccctgacgaatggaatttatcctcacaaattggtgttctaaatgtcttaagaacctcattaaatagctaagtacaaattaaaaaagaaaaaggagaggaggcgaggcaacagggagaagcggggaggaaaaaaggggagaaatttttgggaaaacaaaggccgaaggaagaaaaaaggcttggcgggcccccctcggccctcccgccccccaaaaactttttaaaacgtttttttgggccggcgggcccggtaagggaaagggaaacggggcacaaagcgttttcccacgggaaaaacccggggccaagaaccaaggggcttggagatccccccccagaaagaaaaaaccccgcggggggcacagtcacatcagatagctcgataaaagaaaatcgccagggagggc

SEQ ID NO: 34614 - DNA, 4497 bp, Macaca Mulatta
  misc_feature (1)...(4497): n = A,T,C or G
caaggagctgaggctagtggatggtgaaaacaagtgtagtgggagagtggaagtgaaagtccaggaggagtggggaacggtgtgtaataatggctggagcatggaagcggtctctgtgatttgtaaccagctgggatgtccaactgctatcaaagccactggatgggctaattccagtgcaggttctggacgcatttggatggatcatgtttcttgtcgtgggaatgagtcagctctttgggactgcaaacatgatggatggggaaagcatagtaactgtactcaccaacaagatgctggagtgacttgctcannnnnnnnnnnnnnnnnnnnnnnnnnnnnnnnnnnnnnnnnnnnnnnnnnnnnnnnnnnnnnnnnnnnnnnnnnnnnnnnnnnnnnnnnnnnnnnnnnnnnnnnnnnnnnnnnnnnnnnnnnnnnnnnnnnnnnnnnnnnnnnnnnnnnnnnnnnnnnnnnnnnnnnnnnnnnnnnnnnnnnnnnnnnnnnnnnnnnnnnnnnnnnnnnnnnnnnnnnnnnnnnnnnnnnnnnnnnnnnnnnnnnnnnnnnnnnnnnnnnnnnnnnnnnnnnnnnnnnnnnnnnnnnnnnnnnnnnnnnnnnnnnnnnnnnnnnnnnnnnnagggagcagatctgagcctgagactggtagatggagtcactgaatgttcaggaagattagaagtgagattccaaggagaatgggggacaatatgtgatgatggctgggacagtcatgatgctgctgtggcatgcaagcaactgggatgtccaactgctatcaccgccattggtcgagttaacgccagtgagggattcggacacatctggcttgacagtgtttcttgccagggacatgaacctgcggtctggcaatgtaaacaccatgaatggggaaagcattattgcaatgacaatgaagatgctggcgnnnnnnnnnnatggatcagatctggagctaagacttagaggtggaggcagccggtgtgctgggacagttgaggtggagattcagagactgttagggaaggtgtgtgacagaggctggggactgaaagaagctgatgtggtttgcaggcagctgggatgtggatctgcactcaaaacatcctatcaagtatactccaaaatccaggcaacaaacacgtggctgtttctaagtagctgtaacggaaatgaaacttctctttgggactgcaagaactggcagtggggtggacttacctgtgatcactatgaagaagccaaaattacttgctcagnnnnnnnnnnnnnnnnnnnnnnnnnnnnnnnnnnnnnnnnnnnnnnnnnnnnnnnnnnnnnnnnnnnnnnnnnnnnnnnnnnnnnnnnnnnnnnnnnnnnnnnnnnnnnnnnnnnnnnnnnnnnnnnnnnnnnnnnnnnnnnnnnnnnnnnnnnnnnnnnnnnnnnnnnnnnnnnnnnnnnnnnnnnnnnnnnnnnnnnnnnnnnnnnnnnnnnnnnnnnnnnnnnnnnnnnnnnnnnnnnnnnnnnnnnnnnnnnnnnnnnnnnnnnnnnnnnnnnnnnnnnnnnnnnnnnnnnnnnnnnnnnnnnnnnnnnnnnnnnnnnnnnnnnnnnnnnnnnnnnnnnnnnnnnnnnnnnnnnnnnnnnnnnnnnnnnnnnnnnnnnnnnnnnnnnnnnnnnnnnnnnnnnnnnnnnnnnnnnnnnnnnnnnnnnnnnnnnnnnnnnnnnnnnnnnnnnnnnnnnnnnnnnnnnnnnnnnnnnnnnnnnnnnnnnnnnnnnnnnnnnnnnnnnnnnnnnnnnnnnnnnnnnnnnnnnnnnnnnnnnnnnnnnnnnnnnnnnnnnnnnnnnnnnnnnnnnnnnnnnnnnnnnnnnnnnnnnnnnnnnnnnnnnnnnnnnnnnnnnnnnnnnnnnnnnnnnnnnnnnnnnnnnnnnnnnnnnnnnnnnnnnnnnnnnnnnnnnnnnnnnnnnnnnnnnnnnnnnnnnnnnnnnnnnnnnnnnnnnnnnagagagtggtcaacttcgcttggtaaatggaggaggtcgctgtgctgggagagtagagatttatcatgagggctcctggggcaccatctgtgatgacagctgggacctgagcgatgcccatgtggtgtgcagacagctgggctgtggagaggccattaatgccactggttctgctcattttggagaaggaacagggcccatctggctggatgagatgaaatgcaatggaaaagaatcccgcatttggcagtgccattcacatggctgggggcagcaaaactgcaggcacaaggaggatgcaggagttatctgctcannnnnnnnnnnnnnnnnnnnnnnnnnnnnnnnnnnnnnnnnnnnnnnnnnnnnnnnnnnnnnnnnnnnnnnnnnnnnnnnnnnnnnnnnnnnnnnnnnnnnnnnnnnnnnnnnnnnnnnnnnnnnnnnnnnnnnnnnnnnnnnnnnnnnnnnnnnnnnnnnnnnnnnnnnnnnnnnnnnnnnnnnnnnnnnnnnnnnnnnnnnnnnnnnnnnnnnnnnnnnnnnnnnnnnnnnnnnnnnnnnnnnnnnnnnnnnnnnnnnnnnnnnnnnnnnnnnnnnnnnnnnnnnnnnnnnnnnnnnnnnnnnnnnnnnnnnnnnnnnnnnnnnnnnnnnnnnnnnnnnnnnnnnnnnnnnnnnnnnnnnnnnnnnnnnnnnnnnnnnnnnnnnnnnnnnnnnnnnnnnnnnnnnnnnnnnnnnnnnnnnnnnnnnnnnnnnnnnnnnnnnnnnnnnnnnnnnnnnnnnnnnnnnnnnnnnnnnnnnnnnnnnnnnnnnnnnnnnnnnnnnnnnnnnnnnnnnnnnnnnnnnnnnnnnnnnnnnnnnnnnnnnnnnnnnnnnnnnnnnnnnnnnnnnnnnnnnnnnnnnnnnnnnnnnnnnnnnnnnnnnnnnnnnnnnnnnnnnnnnnnnnnnnnnnnnnnnnnnnnnnnnnnnnnnnnnnnnnnnnnnnnnnnnnnnnnnnnnnnnnnnnnnnnnnnnnnnnnnnnnnnnnnnnnnnnnnnnnnnnnnnnnnnnnnnnnnnnnnnnnnnnnnnnnnnnnnnnnnnnnnnnnnnnnnnnnnnnnnnnnnnnnnagtttcctcaagaggagagaacttagtccaccaaattcaataccgggagatgaattcttgcctgaatgcagatgatctggacctaatgaattcctcaggtctgtggggttcttggagggtctattgcccannnnnnnnnnnnnnnnnnnnnnnnnnnnnnnnnnnnnnnnnnnnnnnnnnnnnnnnnnnnnnnnnnnnnnnnnnnnnnnnnnnnnnnnnnnnnnnnnnnnnnnnnnnnnnnnnnnnnnnnnnnnnnnnnnnnnnnnnnnnnnnnnnnnnnnnnnnnnnnnnnnnnnnnnnnnnnnnnnnnnnnnnnnnnnnnnnnnnnnnnnnnnnnnnnnnnnnnnnnnnnnnnnnnnnnnnnnnnnnnnnnnnnnnnnnnnnnnnnnnnnnnnnnnnnnnnnnnnnnnnnnnnnnnnnnnnnnnnnnnnnnnnnnnnnnnnnnnnnnnnnnnnnnnnnnnnnnnnnnnnnnnnnnnnnnnnnnnnnnnnnnnnnnnnnnnnnnnnnnnnnnnnnnnnnnnnnnnnnnnnnnnnnnnnnnnnnnnnnnnnnnnnnnnnnnnnnnnnnnnnnnnnnnnnnnnnnnnnnnnnnnnnnnnnnnnnnnnnnnnnnnnnnnnnnnnnnnnnnnnnnnnnnnnnnnnnnnnnnnnnnattagacctctagactcgttcatcctacatagctgctactttgtatcttctgacctatgtatgtctttctcagtttcttccattcccatttcctgtcactttttttctctagcttgatatttattatatttttccctaaaagtcgaaaaccttaaactttccatatctctattgcatgagaagccatcaaaatccacaggactagccttctttctcatcacatcgtgctgttgtgtccttgaacttctgtttagcaccaatgcactaattgtgcctctggggcaggataactttactgggttggaagaaatatcccaaaaaccattgtctttatccatgaagggtccctgaccttctgagaggggcctgcctcacttcttcaatccaaagaattatgcatctgccactgtgtcagggaatatatttaaggtataagaaacatgtactgtgtcaggaaacatatttaaggaataggaaagactttctctgccctgtgactcacccatgcttgccttcctagttatgggtagtgttttcagttgctcaaagagcctcacagttacgtgaggagaggtctggtttatttcccagtaattattttcttcctttcagaaaattccaatgagtcagctgatttcaatgctgctgaactaatttctgtgtctaaatttcttcctatttctggaatggaaaaggaggccattctgagacacactgaaaaggaaaatgggaatttataacccagtga

SEQ ID NO: 34615 - DNA, 379 bp, Macaca Mulatta
actaaccaaactaatggtgcagaagttttacaggttactaacactgatgatgaggtgatgccagaaaatcataaagagaatttgaataagaataataataacaattatgtagcagtctcatatctgaataattgcaggcagaagacatctattttagaatttcctgatctattacccttgtcgagtgaagcaaatgacactgcaaatgaatatcaaatcaagaagttagaaaatacatctagaatctcagagttacttgatatatttgaatctgagaagacttactcgaggaatgtactaggaatggctctgaagaagcagactgacagagcagctgctggcagtcctgtgcagcatggtccaaaaccaagcctcagca

SEQ ID NO: 34616 - DNA, 1517 bp, Macaca Mulatta
  misc_feature (1)...(1517): n = A,T,C or G
ggttcatcatgaaggagaaatgggacacaaactcttcaggaaactggcatctcatctggagtgtcaatgacacaaaggatcatctgcactcagatattattattacctatgtgaactactatcttcaccagcctcgagtggcagcaatcttcattatttcctactttctgatcttctttttgtgcatggtgggaaataccgtggtttgctttattgtaatgagaaacaaacatatgcacacagtcactaatctcttcatcttaaacctggccataagtgatttactagttggcatattctgcatgcctataacactgctggacaatattatagcaggnnnnnnnnnnnnnnnnnnnnnnnnnnnnnnnnnnnnnnnnnnnnnnnnnnnnnnnnnnnnnnnnnnnnnnnnnnnnnnnnnnnnnnnnnnnnnnnnnaggttccggtgtgtggtctacccttttaaaccaaagctcactatcaagacagcgtttgtgattattatgatcatctgggtcctagccatcaccattatgtctccatctgcagtaatgttacatgtgcaagaagaaaaatattaccgagtgagactcaactcccagaatgaaaccagtccagtctactggtgtcgggaagactggccaaatcaggaaatgaggaagatctacaccactgtgctgtttgccaacatctacctggctccactctccctcatcgtcgtcatgtatggaaggattggagtgtcactcttcagggctgcagttcctcacacaggcaggcagaaccaggaacagtggcacatggtgtccaagaagaagcagaaggtcattaagatgctcctgattgtggccctgctttttattctctcctggctgcccctgtggactctaatgatgctctcagactatgctgacctttctccaaatgaactgcagatcatcaacatctacatctaccctttagcacactggctggcatttggcaacagccagtgtcaaccccatcgtttatggtttcttcaacnnnnnnnnnnnnnnnnnnnnnnnnnnnnnnnnnnnnnnnngctctgccaaaaaagagcaaagcctatggaagcctatgccctaaaagctaaaagccacatgctcataaacacatctaatcagcttgtccaggaatctacatttcaaaacccacatggggaaaacttgctttataggaaaagtgctgaaaaaccccaacaggaattagtgatggaagaattaaaagaagctactaacagcagtgagatttaaaaagagctagtgtgatagtcctaactctactatgcattagaaatttaaataccattgttttttgtggctttgcacttcaattttttcaaagaatgttctaaataaaacatttactgaaagccctctctggnnnnnnnnnnnnnnnnnnnnnnnntggtcataagatcataaacaatcttatgttgtataaaaatacagagtgacttatacatgtttgcatgaataaatgtatttctagagaacagt

SEQ ID NO: 34617 - DNA, 788 bp, Macaca Mulatta
  misc_feature (1)...(788): n = A,T,C or G
gggtgcaagtatgaactggacttctcccatttccgtctttttgatgagaacaatgatgctgccattcttgttcttctggagcccattgagaaaaaagccattccccagcgcttctgcaagctgcggaagataatgaacaccaagacctacctggagtggcccatggatgaggctcggcaggaagggttttgggtaaatctgagagctgcgataaagtcttaagttcccacatttaaagccagtctttgtctagttgggatctttatatcactagttgtagataagttaattcagacataattatataaaagctacatggatgtaccgtcatttgaggacttccttactaaaactacaaaacttcaaattttgtatagggtgctgttttgtaaacatatgccagatttaaaaattggtttttggtttttagtttttactatgagataaccatgataattagtctattattgatatctgaatatattcccttggtatccaagggaattggttggcggatcctcctggatatcgaaattcatagatggatcaattccttataagagtggcatagtatttgcatataaccaatttacattctcctgtatacctttaaataatctctagaattacttatgaatccccataaaaaggaaatactatgcaaaataatctggtactggcccttttaaattagaattaataagcggaataattttttataattttnnnnnnnnnnnnnnnnnnnnnctttttgattcacaaatttggtttgaacttccatggaaagn

SEQ ID NO: 34618 - DNA, 224 bp, Macaca Mulatta
caggaactgacaatggcgaagcccttcctgagtccatcccatcagctcccgggacactgcctcatttcatagaggagccagatgatgcttatattatcaagagcaaccctattgcactcaggtgcaaagcgaggccagccatgcagatattcttcaaatgcaacggcgagtgggtccatcagaacgagcatgtctctgaagagagtctggacgagagctcaggt

SEQ ID NO: 34619 - DNA, 1331 bp, Macaca Mulatta
  misc_feature (1)...(1331): n = A,T,C or G
gccttggggagcccaggatggaggtggcggtcgcggcggcgggccgagccctgcggcgggcgggaggnnggaggtgagcaccaggtccgctgagcctctgcagagccgccagccatgcccgggatcgtggtgttccggcggcgttggtctgtgggcagcgatgacctcgtcctaccggccatcttcctcttcctcctgcataccacctggtnnnnnnnnnnnnnnnnnnnnnnnnnnnnnnnnnnnnnnnnnnnnnnnnnnnnnnnnnnnnnnnnnnnnnnnnnnnnnnnnnnnnnnnnnnnnnnnnnnnnnnnnnnnnnnnnnnnnnnnnnnnnnnnnnnnnnnnnnnnnnnnnnnnnnnnnnnnnnnnnnnnnnnnnnnnnnnnnnnnnnnnnnnnnnnnnnnnnnnnnnnnnnnnnnnnnnnnnnnnnnnnnnnnnnnnnnnnnnnnnnnnnnnnnnnnnnnnnnnnnnnnnnnnnnnnnnnnnnnnnnnnnnnnnnnnnnnnnnnnnnnnnnnnnnnnnnnnnnnnnnnnnnnnnnnnnnnnnnnnnnnnnnnnnnnnnnnnnnnnnnnnnnnnnnnnnnnnnnnnnnnnnnnnnnnnnnnnnnnnnnnnnnnnnnnnnnnnnnnnnnnnnnnnnnnnnnnnnnnnnnnnnnnnnnnnnnnnnnnnnnnnnnnnnnnnnnnnnnnnnnnnnnnnnnnnnnnnnnnnnnnnnnnnnnnnnnnnnnnnnnnnnnnnnnnnnnnnnnnnatgcctactcagaaattgcctacctctttgcggagttcttccgggaccttgacattgtgccgtccgacatcattgctggcctggtgctgctccggcagcggcagcgggccaagcgcaatgccgtgctggacgaggnnnnnnnnnnnnnnnnnnnnnnnnnnnnnnnnnnnnnnnnnnnnnnnnnnnnnnnnnnnnnnnnnnnnnnnnnnnnnnnnnnnnnnnnnnnnnnnnnnnnnnnnnnnnnnnnnnnnnnnnnnnnnnnnnnnnnnnnnnnnnnnnnnnnnnnnnnnnnnnnnnnnnnnnnnnnnnnnnnnnnnnnnnnnnnnnnnnnnnnnnnngtgttgcctgtgtcctgcgaggccgcggttcgcccctggagtcaccatcgaggaagacaactgctgtggctgtaacgccattgccatccggcgccacttcctggatgagaacatgactgcggtggacatcgtctatacctcctgccacgatgcggnngtctacgaaacgcccttctacgtggcggtggaccatgacaagaagaaggtggtgatcagtatccgggggaccctgtcccccaaggn

SEQ ID NO: 34620 - DNA, 251 bp, Macaca Mulatta
cagcaaggacctcctgtagctgagatgatgttgtccttgggaccaaaggaagtgcgggaacggatccagaaggtggtttccagctagggagaggatgtgtcgggcaatggagatcgccctgagaacctgtgagcttagaaacagctttcagagaccagaaggaggactggggcctgttgggaagtttgccgaaggaactaagagtggaaacaatttctggctgcacacaagtgcatttatggatccaccac

SEQ ID NO: 34621 - DNA, 662 bp, Macaca Mulatta
ctgcgctgctgtagccggaccctttgccttcgccactgctcagcgtctgcacatccctacaatggctaaaacagcaatggcctacaaggaaaaaatgaaggagctgtccatgctgtcactgatctgctcttgcttttacccggaacctcgcaacatcaacatctatacttatgatgatatggaagtgaagcaaatcaacaaacgtgcctctggccaggcttttgagctgatcttgaagccaccatctcctatctcagaagccccacgaactttagcttctccaaagaagaaagacctgtctctggaggagatccagaagaaactggaggctgcagaggaaagaagaaagtctcaggaggcccaggtgctgaaacaattggcagagaagagggaacacgagcgagaagtccttcagaaggctttggaggagaacaacaacttcagcaagatggcggaggaaaagctgatcctaaaaatggaacaaattaaggaaaaccgtgaggctaatctagctgctattattgaacgtctgcaggaaaaggagaggcatgctgcggaggtgcgcaggaacaaggaactccaggttgaactgtctggctgaagcaagggagggtctggcacgccccacaatagtaaatccccctgcctatattataatggat

SEQ ID NO: 34622 - DNA, 639 bp, Macaca Mulatta
agagcaaagattgataacgataaagagcttggcttctttgcaaatgctttggaagaagtctgtattgagacaactgaggctggtttcatgaccgaggacttggctgctagcattaaaggtttacccagtgtgcaatgttctgactacttgaatatgtttgagttcatggacaaacttggagaaaacttgaagatcaaactggctcaggccaaacttgaaattcatacctgggctgatgaggagaagtatcttttggcaactaggtctacaggtttacatttttctgtgtcacactcaaggctaaaggcaaaatctattttgtaatttgtttagaagccagagtttatcttttctataagtttatagtctttttcttatatatagttattgccacctttgtgaatgtggcaagggactttacattttattttctggtagcagcctaggaatttggttagtactcatttgtattcactgtcactgtttctcatgttctattataaatgaccaaaatcaagagtgctcaaaagggtcaatgatagccacagtattgttccctagaatatgcataaagtagaaatttacacccttctcctcctgtccatgaccttgggcacggggaggttttgttgttaaaga

SEQ ID NO: 34623 - DNA, 549 bp, Macaca Mulatta
  misc_feature (1)...(549): n = A,T,C or G
gtaaactttgtctgtgggaggactgatctcttagtgaaatacagaaaaaccatctcggaaaaaggaaaatgggcaatcatcatnnnnnnnnnnnnnnnnnnnnnnnnnnnnnnnnnnnnnnnnnnnnnnnnnnnnnnnnnnnnnnnnnnnnnnnnnnnnnnnnnnnnnnnnnnnnnnnnnnnnnnnnnnnnnnnnnnnnnnnnnnnnnnnnnnnnnnnnnnnnnnnnnnnnnnnnnnnnnnnnnnnnnnnnnnnnnnnnnnnnnnnnnnnnnnnnnnnnnnnnnnnnnnnnnnnnnnnnnnnnnnnnnnnnnnnnnnnnnnnnnnnnnnnnnnnnnnnnnnnnnnnnnnnnnnnnnnnnnnnnnnnnnnnnnnnnnnnnnnnnnnnnnnnnnnnnnnnnnnnnnnnnnnnnnnnnnnnnnagaagacagcgttggcccttctggaccgccccagcgagtatgccgcccggcagctgcagaaggctatgaagggtttggggacagatgagtctgtgctcattgaggtcctgtgcacgaggaccaataagg

SEQ ID NO: 34624 - DNA, 578 bp, Macaca Mulatta
cctatgatcgctatgtggccatctgctcacccctggtgtactccacctacttgtcccccagagtctgcatcctcttagtggtggcttgctacctgggtggatgtgtgaatgcctcaacatttactagttgtttattgaatctgtctttctgtggaccaaatcatatagatcattttttctgtgatttctctcctttgttgaaactttcctgctcagatatctccattcctgaaatgataccttccatctcttctggatctatcattgtggtcacagtatttgttatagccatctcctacatctacatcctcatcaccatcctgaagatgcgctccaacgaggggcgccacaaggctttctccacctgcacctcccacctcacagcggttactctctactatggaacgattaccttcatttatgtgatgcccaagtccagctactcaactagccagaacacattgatatctctgtcctacacagtggtaatccccataacgaacccctttatctatagtctgaggaacagagatgtaaaggaggcactaagaaaggcagctgtcagaatatattcttag

SEQ ID NO: 34625 - DNA, 510 bp, Macaca Mulatta
  misc_feature (1)...(510): n = A,T,C or G
aggtcacgttcacgctgtaacacaagcagtggtagtgaatcggaaaattctaatagagaacaccggaaaaagagaaacannnnnnnnnnnnnnnnnnnnnnnnnnnnnnnnnnnnnnnnnnnnnnnnnnnnnnnnnnnnnnnnnnnnnnnnnnnnnnnnnnnnnnnnnnnnnnnnnnnnnnnnnnnnnnnnnnnnnnnnnnnnnnnnnnnnnnnnnnnnnnnnnnnnnnnnnnnnnnnnnnnnnnnnnnnnnnnnnnnnnnnnnnnnnnnnnnnnnnnnnnnnnnnnnnnnnnnnnnnnnnnnnnnnnnnnnnnnnnnnnnnnnnnnnnnnnnnnnnnnnnnnnnnnnnnnnnnnnnnnnnnnnnnnnnnnnnnnnnnnnnnnnnnnnnnnnnnnnnnnnnnnnnnnnnnnnnnnnnnnnnnnnnnntcaaaaactgatcttgtaccaccgcttccagtgactcgttcttcggatgctcagggttctggggacgctacagttcatcaggt

SEQ ID NO: 34626 - DNA, 2046 bp, Macaca Mulatta
  misc_feature (1)...(2046): n = A,T,C or G
gcatgacccacgagtccttccgggagagctctgtgaaggagctgacgcggctggaggaccagctggccggcctgcagcaggagctggcggctctggcgctgaagcagagcttagtagcagatgaagtgggcttgctgccccagcagatccaggccgtgcgggacgacgtgnnnnnnagntcccagccgggatcagncagttccttgcccgaggnggagggggccgcggggggctccttcagagagaggagatgcaagctcagcttcgagagctggagagcaagatcctcacccatgtggcagagatgcagggcaagtcggccagggaagccgcagcctccctgggcatgacactgcagaaagaaggtgtgattggagtgacagannagcaggtgcaccgcatcgtgaagcaggccctgcagcgctacagtgacgaccgcatcgggctggcagactacgccctggagtcaggaggnnnaggggccagcgtcatcagcacccgatgttccgagacttacgagaccaagacggccctcctcagcctcttcggcatcaaaaaaaagtaccactcccagtcaccccgagtcatccnnnnnnnnnnnnnnnnnnnnnnnnnnnnnnnnnnnnnnnnnnnnnnnnnnnnnnnnnnnnnnnnnnnnnnnnnnnnnnnnnnnnnnnnnnnnnnnnnnnnnnnnnnnnnnnnnnnnnnnnnnnnnnnnnnnnnnnnnnnnnnnnnnnnnnnnnnnnnnnnnnnnnnnnnnnnnnnnnnnnnnnnnnnnnnnnnnnnnnnnnnnnnnnnnnnnnnnnnnnnnnnnnnnnnnnnnnnnnnnnnnnnnnnnnnnnnnnnnnnnnncaggccccttcgatggccacataccaggtggtggagctgcggatcctgactaactggggccaccctgaaaacacctgcatctaccgcttcagagtgcatggggagcctgcccactagccccgctttctggtgcctgctgccagccacctgggagtgggtgaacagcaccccaccgcttcccccacacgcttgctcggcgctctgacttccaggagcacaagagaggagcctgtggccccatgcagatgagaaggatgggcagagtcnnnnnnnnnnnnnnnnnnnnnnnnnnnnnnnnnnnnnnnnnnnnnnnnnnnnnnnnnnnnnnnnnnnnnnnnnnnnnnnnnnnnnnnnnnnnnnnnnnnnnnnnnnnnnnnnnnnnnnnnnnnnnnnnnnnnnnnnnnnnnnnnnnnnnnnnnnnnnnnnnnnnnnnnnnnnnnnnnnnnnnnnnnnnnnnnnnnnnnnnnnnnnnnnnnnnnnnnnnnnnnnnnnnnnnnnnnnnnnnnnnnnnnnnnnnnnnnnnnnnnnnnnnnnnnnnnnnnnnnnnnnnnnnnnnnnnnnnnnnnnnnnnnnnnnnnnnnnnnnnnnnnnnnnnnnnnnnnnnnnnnnnnnnnnnnnnnnnnnnncctacaagtttagtgtcctccacttagggaagcctgaacccagggtgcctgaggggcttcgacaaaaagtatttgtcccgggtagagtagcagtgcgccatggcgcttcttgtgccctaaaggggactggctcctgtgatcttctaaggggcccagggccaaccctgtaggcttcccctctgctggggacagtcgttgcttttctctctcctgatgctaggttgggagcaccctgctccccattcctgctaggacctgccagtgcccaagcttgctttccacattctcctgggatacagagacctagacctgtctttggggccattagcatctggggttagcaagaagagtggggagcatggaactcctgggctctcgtggggacgttcagggtatcggggtgggaggtctgtctgcactggcctccccgatctaaccaggccctgatgtaggggccctctgctcaggctgcccccttgggctcttgcagctcttgttcaggtagtggcccttctggtttgttctctgtggggcagttggtgggggctgggggaagaggctggcagaa

SEQ ID NO: 34627 - DNA, 356 bp, Macaca Mulatta
  misc_feature (1)...(356): n = A,T,C or G
agatttggaggccaatcactgccaccttttatttccctgtgggtccaggaactggatttctttatttggtcaatttgtatttcttatatcagtattctacacgacttgaaacaggnnnnnnnnnnnnnnnnnnnnnnnnnnnnnnnnnnnnnnnnnnnnnnnnnnnnnnnnnnnnnnnnnnnnnnnnnnnnnnnnnnnnnnnnnnnnnnnnnnnnnnnnnnnnnnnnnnnnnnnnnnnnnnnnnnnnnnnnnnnnnnnnnnnnnnnnnnnnnnnnnnnnnnnnnnnnnnnnnnnnnnnnnnggcctgctatttaccctgggttatccttggattcaactatatcatcggaggctcg

SEQ ID NO: 34628 - DNA, 473 bp, Macaca Mulatta
cggggaggtggcggcgaaagggagggggctgagcctggaggtccctgcggcttttccctgcagcagggctgcccgcgaatgccagcatgctggggcggggcgagtcggattccgtcgtggggagtcccctcccttcttccccactgctccagactctgaatcctacccaggagagcacgggagttgtggcctgggggtgccacccgttcagtggatggcagtgctcttgagccaaccgtagacccctgtcactgagggaaaaatccttcccgattccccaaaccccaccaatgccgcgctgcagcccccagatggtctctggttgactctggggagctggatctcccctggagattcgggccgcttagagatttaggtagatcccaggatgggaggctgtttcctgagggggccgtccgaagacgccccgaactgcagagcgctggtctggccgccgcgaggaccgaggagtt

SEQ ID NO: 34629 - DNA, 109 bp, Macaca Mulatta
ggttaccttacagaaagtggttatgtcaatctgcaaagagtacagatgatcatgttagcagttggtgaagttgaggatagcatttttaaaaagagaaaggatgatgagg

SEQ ID NO: 34630 - DNA, 109 bp, Macaca Mulatta
ttaagtggttatttgtttaactgatggtgaatactttcttaacactggtttgtctgcatgtctaaagatttttacaaggaaataaaatacaaatcttgttttttctaaa

SEQ ID NO: 34631 - DNA, 398 bp, Macaca Mulatta
  misc_feature (1)...(398): n = A,T,C or G
atcagatgattctaacttactaggctgccaggttgggccatgccatgtgatcctgcgtgccacctcccctgccttcagcaaggcctactaggcataagtactgatagcaaagttgggagtcaattctatacccccaacccatttcttagtttggaaatcagtggggacaattggtaccaaccaccgtctaccatgtatggccaaaataaatagaactagctatgccagcctggcgccaagatggttggtgccctgccatgtccagccccttaggaaaatagtcccctccnttggtacatctctccctcagaagatcttcccccactanccttgacacccttgtagccaactgagcactacttnatttggactcattaccacctgtaaactttccagga

SEQ ID NO: 34632 - DNA, 86 bp, Macaca Mulatta
aggtgataatggtattgtggtttatgcagcagaatgtctttgttcctatgaaatacatgctgaaatactttgggataaagtggctt

SEQ ID NO: 34633 - DNA, 817 bp, Macaca Mulatta
  misc_feature (1)...(817): n = A,T,C or G
ggactccagaatctaaagccagtggcttgaggctacagggagtgtagtaaagccgttgtttacttaaagatttatcaaatcagtcagtgcaaatgtcagatacaatgtatttatttaaaagattcatttttaatcatgaaattacttatcatccacattgttttaaaaagaaacaagatgctggatgtctgccaatttttgccttcattaccttttttgataaagtttctcagatccttgtttcaaacacaaatgcagggattgctgccactttttaactattaagaggcagaaaattgcacaatattgaacttttttccactaaagtagtgtgcagttatagtttgcattcctgatatgatttaaaacatgtaatataaagannnnnnnnnnnnnnnnnnnntgtgcagagtctagaagttctctgtcaatcttccgcttgtgcacaattctgttttnnnnnnnnnnnnnnnnnnnnnattgttttgagctgtcccatctccactgttatccctttgtggttttttaatataaattattaatttatgccatttttgtatctacatcttttttccacaaatttggccttgccttattaaaagtttctgttaaaaaaataacnnnnnnnnnnnnnnnnnnnnttccaatttaaatgaaaaatttttcctccaaagggattgaaaaattgcatctcatcgttggggttttaaaatgaacaaggggcgccccaaaaaatacacctgagtgggatttgtttaaaaaaaacaattttttatccttccggggaaacaatttttggcggggataccatagaaac

SEQ ID NO: 34634 - DNA, 2029 bp, Macaca Mulatta
  misc_feature (1)...(2029): n = A,T,C or G
ggaatcctgcctccacaccatgagtcccatgccaaggtgatgatgtatcgtaaggagcagtactcggatgtccttcatgccctgaaagtcgttcgctttgttagtgatgccacacctcaggctgaagtctgtctccgcatgtatcagctggagtctgggaagttacctcgaagtccctcttttccactggnggagccagaagatgaagtatttcttgctatagctaaagccatggaggaaatggtggaagacagcgtcgactgttactggatcacccgacgctttgtgaaccaattaaataccaagtaccgggattctttaccccagttnnnnnnnnnnnnnnnnnnnnnnnnnnnnnnnnnnnnnnnnnnnnnnnnnnnnnnnnnnnnnnnnnnnnnnnnnnnnnnnnnnnnnnnnnnnnnnnnnnnnnnnnnnnnnnnnnnnnnnnnnnnnnnnnnnnnnnnnnnnnnnnnnnnnnnnnnnnnnnnnnnnnnnnnnnnnnnnnnnnnnnnnnnnnnnnnnnnnnnnnnnnnnnnnnnnnnnnnnnnnnnnnnnnnnnnnnnnnnnnnnnnnnnnnnnnnnnnnnnnnnnnnnnnnnnnnnnnnnnnnnnnnnnnnnnnnnnnnnnnnnnnnnnnnnnnnnnnnnnnnnnnnnnnnnnnnnnnnnnnnnnnnnnnnnnnnnnnnnnnnnnnnnnnnnnnnnnnnnnnnnnnnnnnnnnnnnnnnnnnnnnnnnnnnnnnnnnnnnnnnnnnnnnnnnnnnnnnnnnnnnnnnnnnnnnnnnnnnnnnnnnnnnnnnnnnnnnnnnnnnnnnnnnnnnnnnnnnnnnnnnnnnnnnnnnnnnnnnnnnnnnnnnnnnnnnnnnnnnnnnnnnnnnnnnnnnnnnnnnnnnnnnnnnnnnnnnnnnnnnnnnnnnnnnnnnnnnnnnnnnnnnnctggatcagcagtttccaaggactggcgtgtaataaaatatcctcaaaacaacaagcaagttgggcatgacttagactttcactgcccatgtggaaggcactgttcattcttgcagcatctcagttggccatcaagagctgagtcagacaaaaaccattcagcagccacacggaagtggggctggctgggcacaaggcaaaactgtgaaggagataaagtgtctgtggttctgccttgactctactccctggagtcctcccctctcgagttcctagaattctgtcatcactcttgctctatctcattcctgtcaagacttgttttagaaatgggtgccagagactcagctacattcaaatgtaaacccattcattcatttagcaagttacttattagtgccagtgctgtgtcaggttctatgttaggtaccagggtacagtgatgagcaaaaccagtccctgcccttctggaacagagaagattggaagaggatggggggtagccattaatcaaacagtcacagaaatgagtgtaaaaggaagctggagtaagggcttccatggtgaggtacttggtgcagggatctctggatctgaccaaatcggaaggtcaggaaaggcttccaggaggaagcgacactgtgctcagagctcagggatggaagaaggacgctctctctgggcagagaggaaggagagaaggttggtgggaaggagggcaggggccagatgctgtgggtgtgatttggatctgtgtccccgcccaaatcacatgttgaattgtaatccccagtgttggaggtgaagcctagtgggaggtgattggatcatggggggtagtttttcatgaacggtttagcaccaaccccttggtgctgttctggtgagagtgagtgcattctcgcgagatctggttgtttaaaggtgtgtagacccttcccccttgcttctgctcctccaatgtaagacaccttgctttccctttgttttccaccatgactggaagcttcctgaggcctcaccagaagcagatgccagcatcatgcttcctgtacagcctgcagaactgtgagccaattaaacctcttttctttat

SEQ ID NO: 34635 - DNA, 3144 bp, Macaca Mulatta
  misc_feature (1)...(3144): n = A,T,C or G
ggtggacatcaatgataatgcccctgagtttgagcagcccatctacaaagtgcggattccagagaacagctcccttggctccctggttgccaccgtctccgccagggatttagacagcggagccaacggaaaaatatcatactcactctttcagccttcagaggatattagtaaaacgttggaggtaaatgctatgacaggggaaattcgactgagaaaacaagtagatttcgaaggggttacgtcttatgaagtgcacatcaaagccacagatggaggaggtctttcaggaaagtgcactcttctcctgcaggtggtggacgtgaatgacaatcccccacaggtgaccatgtctgcactcaccagccccatcccagagaactcgcctgagattgtagttgctgttttcagcgtttcagatcctgactccggaaacaatgggaagacgatttcctccatccaggaagaccttccctttcttctaaaaccttcagtcaagaacttttacaccttggtaacagagcgagcactcgacagagaagcaagagctgaatataatatcacccttaccgtcacagatatggggactccaaggctganaacggagcacaacataacagtgcagatatcagatgttaatgataacgcccccgctttcacccaannnnnnnnnnnnnnnnnnnnnnnnnnnnnnnnnnnnnnnnnnnnnnnnnnnnnnnnnnnnnnnnnnnnnnnnnnnnnnnnnnnnnnnnnnnnnnnnnnnnnnnnnnnnnnnnnnnnnnnnnnnnnnnnnnnnnnnnnnnnnnnnnnnnnnnnnnnnnnnnnnnnnnnnnnnnnnnnnnnnnnnnnnnnnnnnnnnnnnnnnnnnnnnnnnnnnnnnnnnnnnnnnnnnnnnnnnnnnnnnnnnnnnnnnnnnnnnnnnnnnnnnnnnnnnnnnnnnnnnnnnnnnnnnnnnnnnnnnnnnnnnnnnnnnnnnnnnnnnnnnnnnnnnnnnnnnnnnnnnnnnnnnnnnnnnnnnnnnnnnnnnnnnnnnnnnnnnnnnnnnnnnnnnnnnnnnnnnnnnnnnnnnnnnnnnnnnnnnnnnnnnnnnnnnnnnnnnnnnnnnnnnnnnnnnnnnnnnnnnnnnnnnnnnnnnnnnnnnnnnnnnnnnnnnnnnnnnnnnnnnnnnnnnnnnnnnnnnnnnnnnnnnnnnnnnnnnnnnnnnnnnnnnnnnnnnnnnnnnnnnnnnnnnnnnnnnnnnnnnnnnnnnnnnnnnnnnnnnnnnnnnnnnnnnnnnnnnnnnnnnnnnnnnnnnnnnnnnnnnnnnnnnnnnnnnnnnnnnnnnnnnnnnnnnnnnnnnnnnnnnnnnnnnnnnnnnnnnnnnnnnnnnnnnnnnnnnnnnnnnnnnnnnnnnnnnnnnnnnnnnnnnnnnnnnnnnnnnnnnnnnnnnnnnnnnnnnnnnnnnnnnnnnnnnnnnnnnnnnnnnnnnnnnnnnnnnnnnnnnnnnnnnnnnnnnnnnnnnnnnnnnnnnnnnnnnnnnnnnnnnnnnnnnnnnnnnnnnnnnnnnnnnnnnnnnnnnnnnnnnnnnnnnnnnnnnnnnnnnnnnnnnnnnnnnnnnnnnnnnnnnnnnnnnnnnnnnnnnnnnnnnnnnnnnnnnnnnnnnnnnnnnnnnnnnnnnnnnnnnnnnnnnnnnnnnnnnnnnnnnnnnnnnnnnnnnnnnnnnnnnnnnnnnnnnnnnnnnnnnnnnnnnnnnnnnnnnnnnnnnnnnnnnnnnnnnnnnnnnnnnnnnnnnnnnnnnnnnnnnnnnnnnnnnnnnnnnnnnnnnnnnnnnnnnnnnnnnnnnnnnnnnnnnnnnnnnnnnnnnnnnnnnnnnnnnnnnnnnnnnnnnnnnnnnnnnnnnnnnnnnnnnnnnnnnnnnnnnnnnnnnnnnnnnnnnnnnnnnnnnnnnnnnnnnnnnnnnnnnnnnnnnnnnnnnnnnnnnnnnnnnnnnnnnnnnnnnnnnnnnnnnnnnnnnnnnnnnnnnnnnnnnnnnnnnnnnnnnnnnnnnnnnnnnnnnnnnnnnnnnnnnnnnnnnnnnnnnnnnnnnnnnnnnnnnnnnnnnnnnnnnnnnnnnnnnnnnnnnnnnnnnnnnnnnnnnnnnnnnnnnnnnnnnnnnnnnnnnnnnnnnnnnnnnnnnnnnnnnnnnnnnnnnnnnnnnnnnnnnnnnnnnnnnnnnnnnnnnnnnnnnnnnnnnnnnnnnnnnnnnnnnnnnnnnnnnnnnnnnnnnnnnnnnnnnnnnnnnnnnnnnnnnnnnnnnnnnnnnnnnnnnnnnnnnnnnnnnnnnnnnnnnnnnnnnnnnnnnnnnnnnnnnnnnnnnnnnnnnnnnnnnnnnnnnnnnnnnnnnnnnnnnnnnnnnnnnnnnnnnnnnnnnnnnnnnnnnnnnnnnnnnnnnnnnnnnnnnnnnnnnnnnnnnnnnnnnnnnnnnnnnnnnnnnnnnnnnnnnnnnnnnnnnnnnnnnnnnnnnnnnnnnnnnnnnnnnnnnnnnnnnnnnnnnnnnnnnnnnnnnnnnnnnnnnnnnnnnnnnnnnnnnnnnnnnnnnnnnnnnnnnnnnnnnnnnnnnnnnnnnnnnnnnnnnnnnnnnnnnnnnnnnnnnnnnnnnnnnnnnnnnnnnnnnnnnnnnnnnnnnnnnnnnnnnnnnnnnnnnnnnnnnnnnnnnnnnnnnnnnnnnnnnnnnnnnnnnnnnnnnnnnnnnnnnnnnnnnnnnnnnnnnnnnnnnnnnnnnnnnnnnnnnnnnnnnnnnnnnnnnnnnnnnnnnnnnnnnnnnnnnnnnnnnnnnnnnnnnnnnnnnnnnnnnnnnnnnnnnnnnnnnnnnnnnnnnnnnnnnnnnggtatctagccctttctctgtaaaacatccctgtgtttaatctgtatttcttacttattatgtgaaaaattgagtttctttctagatattagccctttgaataaaattctgtgtgagtcagatttaataatttgttctcactttcaatagtgttaggataagtgttagtttgatctgttctttacctccccttatttggttcagagaaattagggcctactagattttcattaaaagggacctgaaaataaaagccagtcccttctttaactctgcaagttattttaaagctaatataa

SEQ ID NO: 34636 - DNA, 242 bp, Macaca Mulatta
ttcttgaaatggcgttgtagagacacaccctttagagcatacatttcctgtttaagaattgaaatttgcttggggtaggtacatccatatcatcagtggaagtgtgttgtgccctagttttagaaatgcatgctgaagtcatgaccggttgtgtggggacagagcagcctgacccgtgtgctgccctttctgaagactactgacgtaacctgccactctgcttctctcttgatggaaagttt

SEQ ID NO: 34637 - DNA, 472 bp, Macaca Mulatta
  misc_feature (1)...(472): n = A,T,C or G
gggtctgcttggtgagctcattctcttacaacaacaaattcaagagcatgaagaggaagcgcgcagagccgctggccaatatagcacgagctatgcccaacagaagcgcaaggtgnnnnnnnnnnnnnnnnnnnnnnnnnnnnnnnnnnnnnnnnnnnnnnnnagttaaagtatcagagaatcttggaacgattagaaaaggagaacaaagaattgagaaaattagtattgcagaaagatgacaaaggcattcatcatagaaagcttaagnnnnnnnnnnnnnnnnnnnnnnnnnnnnnnnnnnnnnnnnnnnnnnnnnnnnnnnnnnnnnnnnnnnnnnnnnnnnnnnnnnnnnnggttgttgtggttggagatcagagcgctgggaagactagtgtgttggaaatgattgcccaagctcgaatattcccgagaggatcgggggagatgatgacgcgttctccagttaagg

SEQ ID NO: 34638 - DNA, 809 bp, Macaca Mulatta
  misc_feature (1)...(809): n = A,T,C or G
gggggtagtctggtgggggttcccgtctggataccagcttccttcagcagtgcaggcggtggtccctgaggctagtggaaggagtgaaacttgcgggaattttgcaggtctgttgtttctagcaagacccaaagctagaaaaggaggaggaagaaactgacccgatcagtgccagaagttattgtattccaagaagaataagcaaaaaaataaaagaaggaaggaagagaggtagagatacaagatgaaatcctgtcaaaaaattgaaggaaaaccagaaaatgagagtgaaccaaagcatgaggaagagccaaagcctgaggaaaagccagaggaggaggaggagaagctagaggaggaggccaaagcaaaaggaacttttagagaaaggctgattcaatctctccaggagtttaaagaagatatacacaacaggcatttaagcaatgaagatatgtttagagagtggatgaatagacgagataggagagtcgaacaactattgtgctgagtacgacgcttcatagaatctgtacttacccctatttaatgtagtttaccttgatttttatctgatattaacaataaccatatagctttgctttttaatagccatttcctgataatccctttgtccctattttctactttataaccctgttgctaataaatggtttttagaatgaatccccttgttatcctgcctccccaatggttaattggaattttgaaccaatcctacaagtctcctggtnnnnnnnnnnnnnnnnnntttaactccttttggtaaaaaaaaaaggttcctgggg

SEQ ID NO: 34639 - DNA, 655 bp, Macaca Mulatta
  misc_feature (1)...(655): n = A,T,C or G
ggttttcaagcctatggctgatgctgctgtgaagattgtggagaaaaatggctttagtgnnnnnnnnnnnnnnnnnnnnnnnnnnnnnnnnnnnnnnnnnnnnnnnncagagggtgacatgccgtgccgtgccaacatcctggtcacagagttgtttgacacagagctgataggggagggggcgctgccctcctatgagcacgcacacaggcatctcgtggagnnaggaaaattgtgaggccgtaaaccacagagcctccatctatgctcagctggcggagtccaggaggatgtggtcgtggaacaagctgtttcccatccacctgcagaccagcctcggagagcaggtcatcgtccctcctgtggacctggagaactgccctggcgcaccctctgtctgtgacattcagctgaaccaggtgtcaccagccgactttacagtcctcagcgatgtgctgcccatgttcagntcagcatagacttcagcaagcaagtcagtagctcagcagcctgccatagcaggcaatttgaacctctgacatctggccgagctcaggtggttctctcgtggtgggacattgaaatggaccctgaggggaagatcaggtgcactacggcccccttctgggcacactcagacccagaggagatgcag

SEQ ID NO: 34640 - DNA, 600 bp, Macaca Mulatta
actgggtgtgcagcccctgtccttgttagctgatgtgatgggggcccccgtgggggtctgaagaggggttctggagtcctgcagggaggggtccccctcggcaggcagggcacatgctggctcaccccacgtccccctgtatcccctttgcagagatctaccgcatcgtgtctcagaaacagattgcagaccgcgctgcccacgacgagtccccggggaacaacgtggtggacatcagcgtgccgcccaccacggacggacagaagcccaacaagctgcagtgctgccagaacctgtgacccccgcgcctccgcccagcgtgcgtgcacgtcctccgcccgcccccgccacgatgtcctccggcccctccctgctgtccctctgtggccggctcgctccagccctcccagtgagctctgcacggccgggccggggcccaggaaggacaggagccagtgctacccccgtcctgcccggggaaaagctagaagccccggtttgctgcacccatgaaactcgggtccccgccgacatcttggcggggttgcgggggaagacggcaggatggaccgggctggccagaggtgaggaggacgggcg

SEQ ID NO: 34641 - DNA, 632 bp, Macaca Mulatta
  misc_feature (1)...(632): n = A,T,C or G
atgcgggccgcaggccagggcacagggggtgcggcggggcgatgctgatggcccaggaggccctggcgttcctggcggcccagnnnnnnnnnnnnnnnnnnnnnnnnnnnnnnnnnnnnnnnnnnnnnnnnnnnnnnnnnnnnnnnnnnnnnnnnnnnnnnnnnnnnnnnnnnnnnnnnnnnnnnnnnnnnnnnnnnnnnnnnnnnnnnnnnnnnnnnnnnnnnnnnnnnnnnnnnnnnnnnnnnnnnnnnnnnnnnnnnnnnnnnnnnnnacatcacgatgcctttctcatcgcccatggaagcggagctggtccgcagggtcctgtccccggatgccacaccgctcccccgaccaggggcggttctgaaggacttcaccgtgtccggcaacctactgtttatgtcggttcgggaccaggacagggaagggactgggcggacgatggtggtgggttgggggctgggatccgcctccccggaggggtagaaagctagagacctgggaacacccaagcacagggtctcagaacagagacctggtacaccaggtccgccgccacccgagggagcccggggagatgggtgcagaggtgtcgcctttaacctgatgttcttcgcccctcacattta

SEQ ID NO: 34642 - DNA, 803 bp, Macaca Mulatta
  misc_feature (1)...(803): n = A,T,C or G
agctccaggactgagatattttttactataccttctctatcttcttgtacccccaaaatagcttccagggcactcgtatttgtttttgtggaaagactggcaattagagatagaaaagtgaaataaatggaaatagtactactcagggctgtcacatctacatctgtgtttttgcaatgccagtttgcattttctgagtgagttacttctacgcatcttcacagcagccagtactgcagtgccttgcatatattatatgctcaatgagtacttgtcaattgattttgtacatgcatgtgacagtataaatatattatgaaaaatgaggaggccaggcaaaaaagagtcaggattnnnnnnnnnnnnnnnnnnnnnnnnnnnnnnnnnnnnnnnnnnnnnnnnnnnnnnnnnnnnnnnnnnnnnnnnnnnnnnnnnnnnnnnnnnnnnnnnnnnnnnnnnnnnnnnnnnnnnnnnnnnnnnnnnnnnnnnnnnnnnnnnnnnnnnnnnnnnnnnnnnnnnnnnnnnnnnnnnnnnnnnnnnnnnnnnnnnnnnnnnnnnnnnnnnnnnnnnnnnnnnnnnnnnnnnnnnnnnnnnnnnnnnnnnnnnnnnnnnnnnnnnnnnnnnnnnnnnnnnnnnnnnnnnnnnnnnnnnnnnnnnnnnnnnggtgtggacaaccactacataataaagtgcagctgaagggccatgaccttctcactctaaaaaactttactggagaagaaattaaatatatgctatggctatcagcagatctgaaatttaggataaaacagaaaggagag

SEQ ID NO: 34643 - DNA, 1843 bp, Macaca Mulatta
  misc_feature (1)...(1843): n = A,T,C or G
ggagttatgcgccaatgccccagtgacagcgggacacggagaggggaagtctgcgttgtacataaggacctagggactccgagcttggcctgagaacccttggacgccgagtgcttcccttatgggctgcgctcctcaactctgctccaaagcagccgctgagctcaactcctgcgtccagggcgnnnnnnnnnnnnnnnnnnnnnnnnnnnnnnnnnnnnnnnnnnnnnnnnnnnnnnnnnnnnnnnnnnnnnnnnnnnnnnnnnnnnnnnnnnnnnnnnnnnnnnnnnnnnnnnnnnnnnnnnnnnnnnnnnnnnnnnnnnnnnnnnnnnnnnnnnnnnnnnnnnnnnnnnnnnnnnnnnnnnnnnnnnnnnnnnnnnnnnnnnnnnnnnnnnnnnnnnnnnnnnnnnnnnnnnnnnnnnnnnnnnnnnnnnnnnnnnnnnnnnnnnnnnnnnnnnnnnnnagtggtaacgcgtcgctgccgtttccggacttgtggtgggagctggggctggagttgccctatggcgcgccgccaggacatcctccgggcagcggcggggcagagagcgtggacaccgagtcccgggtgcggattcttatcagcgtagtgtactgggtggtgtgcgccctggggttggcgggcaacctgctggtgctctacctgatgaagaacatgcagggctggcgcaagtcctctatcaaccttttcatcaccaacctggcactgacggactttcagtttgtgctcaccctgcccttctgggcggtggagaacgctcttgacttcaaatggcccttcggcaaggccatgtgtaagatcgtgtccatggtaacgtccatgaatgtgtacgccagcgtcttcttcctcactgccatgagtgtgacacgctaccactcggtggcctcggctctgaagagccaccggacgcgaggacacggtcagggctactgctgcggccggagcctgggggacagctgctgcttctcggttcaggtgctgtgtgtgtgcatctgggcnnnnnnnnnnnnnnnnnnnnnnnnnnnnnnnnnnnnnnnnnnnnnnnnnnnnnnnnnnnnnnnnnnnnnnnnnnnnnnnnnnnnnnnnnnnnnnnnnnnnnnnnnnnnnnnnnnnnnnnnnnnnnnnnnnnnnnnnnnnnnnnnnnnnnnnnnnnnnnnnnnnnnnnnnnnnnnnnnnnnnnnnnnnnnnnnnnnnnnnnnnnnnnnnnnnnnnnnnnnnnnnnnnnnnnnnnnnnnnnnnnnnnnnnnnnnnnnnnnnnnnnnnnnnnnnnnnnnnnnnnnnnnnnnnnnnnnnnnnnnnnnnnnnnnnnnnnnnnnnnnnnnnnnnnnnnnnnnnnnnnnnnnnnnnnnnnnnnnnnnnnnnnnnnnnnnnnnnnnnnnnnnnnnnnnnnnnnnnnnnnnnnnnnnnnnnnnnnnnnnnnnnnnnnnnnnnnnnnnnnnnnnnnnnnnnnnnnnnnnnnnnnnnnnnnnnnnnnnnnnnnnnnnnnnnnnnnnnnnctgcctcgtgcgccgcgagttccgcaaggcgctcgagagcctgctgtggcgcatcgcgtctccttcgcttaccagcatgcgccccttcaccgccactaccaagccggagcccgaggatcaggggctgcaggccctggcgccgctccgagcggccacggagccggacctgctctactacccacctggcgtcgtggtctacagcggggggcgctacgacctgctgcccagcagataagcctactgatgcgggcctcaggcccagggcacgccgtcgcggcaaggtggccttccctgggcggtgaaggaggggaacggattaaggagg

SEQ ID NO: 34644 - DNA, 215 bp, Macaca Mulatta
gttggtcacagagttcatgtcacaccagtgctagaagtttcatgattttatttcccagcagtgctgatgacaagactgaatgttaccttttctttctgacagattttaaaaaatgatatgataaaagcacaactgctatagattctgctgagacctctcatagtaggtatatatacgttttcacagaggactgaaaaataatgcatgatatttgt

SEQ ID NO: 34645 - DNA, 516 bp, Macaca Mulatta
  misc_feature (1)...(516): n = A,T,C or G
aggacacctacagctccgaggagaccgtggaccaccagnnnnnnnnnnnnnnnnnnnnnnnnnnnnnnnnnnnnnnnnnnnnnnnnnnnnnnnnnnnnnnnnnnnnnnnnnnnnnnnnnnnnnnnnnnnnnnnnnnnnnnnnnnnnnnnnnnnnnnnnnnnnnnnnnnnnnnnnnnnnnnnnnnnnnnnnnnnnnnnnnnnnnnnnnnnnnnnnnnnnnnnnnnnnnnnnnnnnnnnnnnnnnnnnnnnnnnnnnnnnnnnnaggcaagtcaccaaggcggagggtgtggctttggcaggcaggtttgggtgcctgtttttcgaggtctctgcctgtctggactttgagcacgtgcagcacgtcttccatgaggcagtgcgagaggcacggcgggagctggagaagagccccctgacccggcccctcttcatctccgaggagagggccctgccccaccaggccccactcaccgcccggcatgggctggccagctgcaccttcaacacactctccac

SEQ ID NO: 34646 - DNA, 3797 bp, Macaca Mulatta
  misc_feature (1)...(3797): n = A,T,C or G
gaaattcattgagtttgaagatgctctggagcaagagaagaaagagctgcaaatccaggtggagcactacgagttccagacgcgccagctggagctgaaggccaagaactatgccgatcagannnnnnnnnnnnnnnnnnnnnnnnnnnnnnnnnnnnnnnnnnnnnnnnnnnnnnnnnnnnnnnnnnnnnnnnnnnnnnnnnnnnnnnnnnnnnnnnnnnnnnnnnnnnnnnnnnnnnnnnnnnnnnnnnnnnnnnnnnnnnnnnnnnnnnnnnnnnnnnnnnnnnnnnnnnnnnnnnnnnnnnnnnnnnnnnnnnnnnnnnnnnnnnnnnnnnnnnnnnnnnnnnnnnnnnnnnnnnnnnnnnnnnnnnnnnnnnnnnnnnnnnnnnnnnnnnnnnnnnnnnnnnnnnnnnnnnnnnnnnnnnnnnnnnnnnnnnnnnnnnnnnnnnnnnnnnnnnnnnnnnnnnnnnnnnnnnnnnnnnnnnnnnnnnnnnnnnnnnnnnnnnnnnnnnnnnnnnnnnnnnnnnnnnnnnnnnnnnnnnnnnnnnnnnnnnnnnnnnnnnnnnnnnnnnnnnnnnnnnnnnnnnnnnnnnnnnnnnnnnnnnnnnnnnnnnnnnnnnnnnnnnnnnnnnnnnnnnnnnnnnnnnnnnnnnnnnnnnnnnnnnnnnnnnnnnnnnnnnnnnnnnnnnnnnnnnnnnnnnnnnnnnnnnnnnnnnnnnnnnnnnnnnnnnnnnnnnnnnnnnnnnnnnnnnnnnnnnnnnnnnnnnnnnnnnnnnnnnnnnnnnnnnnnnnnnnnnnnnnnnnnnnnnnnnnnnnnnnnnnnnnnnnnnnnnnnnnnnnnnnnnnnnnnnnnnnnnnnnnnnnnnnnnnnnnnnnnnnnnnnnnnnnnnnnnnnnnnnnnnnnnnnnnnnnnnnnnnnnnnnnnnnnnnnnnnnnnnnnnnnnnnnnnnnnnnnnnnnnnnnnnnnnnnnnnnnnnnnnnnnnnnnnnnnnnnnnnnnnnnnnnnnnnnnnnnnnnnnnnnnnnnnnnnnnnnnnnnnnnnnnnnnnnnnnnnnnnnnnnnnnnnnnnnnnnnnnnnnnnnnnnnnnnnnnnnnnnnnnnnnnnnnnnnnnnnnnnnnnnnnnnnnnnnnnnnnnnnnnnnnnnnnnnnnnnnnnnnnnnnnnnnnnnnnnnnnnnnnnnnnnnnnnnnnnnnnnnnnnnnnnnnnnnnnnnnnnnngacaaaatccccatggcccagcgccgccgcttcacgcgggtagagatggcccgtgtgctcatggagcggaaccagtacaaggagcggctgatggagctgcaggaggccgtgcggtggaccgagatgatcagnnnnnnnnnnnnnnnnnnnnnnnnnnnnnnnnnnnnnnnnnnnnnnnnnnnnnnnnnnnnnnnnnnnnnnnnnnnnnnnnnnnnnnnnnnnnnnnnnnnnnnnnnnnnnnnnnnnnnnnnnnnnnnnnnnnnnnnnnnnnnnnnnnnnnnnnnnnnnnnnnnnnnnnnnnnnnnnnnnnnnnnnnnnnnnnnnnnnnnnnnnnnnnnnnnnnnnnnnnnnnnnnnnnnncgactgcacgtcctccgcccgtcgagagcagaagcgcgagcagtaccgccaggtgcgtgagcacgtgcgtaacgacgacggccgacttcaggcctgcggctggagcctgcccgccaagtacaagcannnnnnnnnnnnnnnnnnnnnnnnnnnnnnnnnnnnnnnnnnnnnnnnnnnnnnnnnnnnnnnnnnnnnnnnnnnnnnnnnnnnnnnnnnnnnnnnnnnnnnnnnnnnnnnnnnnnnnnnnnnnnnnnnnnnnnnnnnnnnnnnnnnnnnnnnnnnnnnnnnnnnnnnnnnnnnnnnnnnnnnnnnnnnnnnnnnnnnnnnnnnnnnnnnnnnnnnnnnnnnnnnnnnnnnnnnnnnnnnnnnnnnnnnnnnnnnnnnnnnnnnnnnnnnnnnnnnnnnnnnnnnnnnnnnnnnnnnnnnnnnnnnnnnnnnnnnnnnnnnnnnnnnnnnnnnnnnnnnnnnnnnnnnnnnnnnnnnnnnnnnnnnnnnnnnnnnnnnnnnnnnnnnnnnnnnnnnnnnnnnnnnnnnnnnnnnnnnnnnnnnnnnnnnnnnnnnnnnnnnnnnnnnnnnnnnnnnnnnnnnnnnnnnnnnnnnnnnnnnnnnnnnnnnnnnnnnnnnnnnnnnnnnnnnnnnnnnnnnnnnnnnnnnnnnnnnnnnnnnnnnnnnnnnnnnnnnnnnnnnnnnnnnnnnnnnnnnnnnnnnnnnnnnnnnnnnnnnnnnnnnnnnnnnnnnnnnnnnnnnnnnnnnnnnnnnnnnnnnnnnnnnnnnnnnnnnnnnnnnnnnnnnnnnnnnnnnnnnnnnnnnnnnnnnnnnnnnnnnnnnnnnnnnnnnnnnnnnnnnnnnnnnnnnnnnnnnnnnnnnnnnnnnnnnnnnnnnnnnnnnnnnnnnnnnnnnnnnnnnnnnnnnnnnnnnnnnnnnnnnnnnnnnnnnnnnnnnnnnnnnnnnnnnnnnnnnnnnnnnnnnnnnnnnnnnnnnnnnnnnnnnnnnnnnnnnnnnnnnnnnnnnnnnnnnnnnnnnnnnnnnnnnnnnnnnnnnnnnnnnnnnnnnnnnnnnnnnnnnnnnnnnnnnnnnnnnnnnnnnnnnnnnnnnnnnnnnnnnnnnnnnnnnnnnnnnnnnnnnnnnnnnnnnnnnnnnnnnnnnnnnnnnnnnnnnnnnnnnnnnnnnnnnnnnnnnnnnnnnnnnnnnnnnnnnnnnnnnnnnnnnnnnnnnnnnnnnnnnnnnnnnnnnnnnnnnnnnnnnnnnnnnnnnnnnnnnnnnnnnnnnnnnnnnnnnnnnnnnnnnnnnnnnnnnnnnnnnnnnnnnnnnnnnnnnnnnnnnnnnnnnnnnnnnnnnnnnnnnnnnnnnnnnnnnnnnnnnnnnnnnnnnnnnnnnnnnnnnnnnnnnnnnnnnnnnnnnnnnnnnnnnnnnnnnnnnnnnnnnnnnnnnnnnnnnnnnnnnnnnnnnnnnnnnnnnnnnnnnnnnnnnnnnnnnnnnnnnnnnnnnnnnnnnnnnnnnnnnnnnnnnnnnnnnnnnnnnnnnnnnnnnnnnnnnnnnnnnnnnnnnnnnnnnnnnnnnnnnnnnnnnnnnnnnnnnnnnnnnnnnnnnnnnnnnnnnnnnnnnnnnnnnnnnnnnnnnnnnnnnnnnnnnnnnnnnnnnnnnnnnnnnnnnnnnnnnnnnnnnnnnnnnnnnnnnnnnnnnnnnnnnnnnnnnnnnnnnnnnnnnnnnnnnnnnnnnnnnnnnnnnnnnnnnnnnnnnnnnnnnnnnnnnnnnnnnnnnnnnnnnnnnnnnnnnnnnnnnnnnnnnnnnnnnnnnnnnnnnnnnnnnnnnnnnnnnnnnnnnnnnnnnnnnnnnnnnnnnnnnnnnnnnnnnnnnnnnnnnnnnnnnnnnnnnnnnnnnnnnnnnnnnnnnnnnnnnnnnnnnnnnnnnnnnnnnnnnnnnnnnnnnnnnnnnnnnnnnnnnnnnnnnnnnnnnnnnnnnnnnnnnnnnnnnnnnnnnnnnnnnnnnnnnnnnnnnnnnnnnnnnnnngagacggagaggacgacgagacggaggacccttaagggacataagccaggtgaagcccgtgctgtccaaggcggagcgcagtcacagtcatcgtgtggcaggtgtcctagaggcccgagtgaggccgctgccctgcctggcccgacctgtacataggacccccgaccacctgacccccgcctggcctgcggggtagccagccaggcgcc

SEQ ID NO: 34647 - DNA, 787 bp, Macaca Mulatta
  misc_feature (1)...(787): n = A,T,C or G
tgactgagaaggcagagatggtgtgtgccctctgcccagcacctgccccaccccctaagcctgcctcacctgggcccccgcaggtggaggaggtgggccaccgaggaggctcctcgccccccaggctgccacctggtgtaccagtgatcagcctgggccacagcaggcccccaggggcagccatgcccaccacagagctgggcaccctgcggcccccactgctgcaactctccaccctgagaactgccccacccactttggccctgcactaccaccctcaccccttcctcaacagnnnnnnnnnnnnnnnnnnnnnnnnnnnnnnnnnnnnnnnnnnnnnnnnnnnnnnnnnnnnnnnnnnnnnnnnnnnnnnnnnnnnnnnnnnnggcaccagccccagaaggtggcccggcgcgtgttcaccaacagccgggagcgctggcggcagcagaacgttaacggcgccttcgccgagctgaggaagctgctgcctacgcacccgcccgaccggaagctgagcaagaacgaggtgctccgcctagccgtgaagtacattggcttcctggtgcggctgctgcgcgaccaagcggcagctctggccgcaggccccaccccgcccgggccgcgctaacggccggtgcaccgggtcccagacgacgacgcccgccggggatccggacgcaaggccgaggtggcagcgcgctcgcagcccgcgcccccggccgaccccgacggcaacccctgtgcgggcggcccggccattaaagagggagcaaaccgccttgaa

SEQ ID NO: 34648 - DNA, 751 bp, Macaca Mulatta
  misc_feature (1)...(751): n = A,T,C or G
ggagactaatgagcaaaaacttcacaaaatagccaatgaacttttgcttaccgaaagagcttatgtcaaccgacttgacctcttagatcaggtannnnnntcaggtattttattgcaaactgttggaagaagcaaaccgaggctcgtttccagcagagatggtgaataaaatcttttctaatatttcatcaataaatgccttccatagtaaattcctcttgccagagctggagaaacgaatgcaagaatgnnnnnnnnnnnnnnnntggagacatccttcagaaattggcaccattccttaagatgtatggagaatatgtgaaaggatttgataacgcaatggaattggttaaaaacatgacagaacgtattccccaattcaaatcagtggttgaagaaattcagnnnnnnnnnnnnnnnnnnnnnnnnnnnnnnnnnnnnnnnnnnnnnnnnnnnnnnnnnnnnnnnnnnnnnnnnnnnnnnnnnnnnnnnnnnnnnnnnnnnnnnnnnnnnnnnnnnnnnnnnnnnnnnnnnnnnnnnnnnnaatcacttgaaattatatctacagcagcaagccattctaatagtgcaataagaaaaatgnggagaacctaaagaaactcttagagatttatgaaatgttgggagaagaagaagacattgtaaacccttcaaatgaactaataaaagaaggacagatcctcaaactagctgctcggaacacatcagcacaagaacgctaccttttctt

SEQ ID NO: 34649 - DNA, 415 bp, Macaca Mulatta
aaaccccctcccggtccgtgttgcatgcactctgttcaaatgtgaggtctgaaatggctggcacacgggaaaagctgcttgtgtcattcgtttctgggagtgggatggctctgagcagccttgcctccctgtttgtactatttgaactttgcagatctctgttctctcaagcagaactcccagaccggatccattcttgaccagtgaccggctcgaatctggccttttgtgtgagatgatcacagtttcttttgtttatcacgccatatgcaaatcagagcaaaagctctttctcaagagcaagaaacgcaagcaagaaatatttgtgagatgaaagttgtcaattggattttcttcctaaacaaccaaccaactactagaagtctgcctgagtccactcgcttggatttctgac

SEQ ID NO: 34650 - DNA, 112 bp, Macaca Mulatta
tgtctgaacggctcccagctgctggtcaattttggcctgagccccgctgctcctctgacccctcgtcagtttgctctgatgtgcccagccctgctttatcagattgacagcc

SEQ ID NO: 34651 - DNA, 329 bp, Macaca Mulatta
gcggcgccaggactgattgcaccctggcggctgctggcgtgttgtgagctgggagctcggcatggcggtgcccactgcagccatggggccctcggcgttgggccagagcggccccggctcgatggcgccgtggtgctcagtgagcagcggcccgtcgcgctacgtgcttgggatgcaggagctgttccggggccacagcaagacgcgcgagttcctggcgcacagcgccaaggtgcactcggtggcctggagttgcgacgggcgtcgcctagcctcggggtccttcgacaagacggccagtgtcttcttgctggagaaggaccggttgg

SEQ ID NO: 34652 - DNA, 890 bp, Macaca Mulatta
  misc_feature (1)...(890): n = A,T,C or G
aggaagtctctacagcctggaaggtcctccggacagaacctattgtgttgaggctgcgattttctctctcccagtacctagatggaccagncagaaccatcaattgaggttttccagccatcaaataaggaaggatttgggctgggtcttcagttgaaaaagnnnnnnnnnnnnnnnnnnnnnnnnnnnnnnnnnnnnnnnnnnnnnnnnnnnnnnnnnnnnnnnnnnnnnnnnnnnnnnnnnnnnnnnnnnnnnnnnnnnnnnnnnnnnnnnnnnnnnnnnnnnnnnnnnnnnnnnnnnnnnnnnnnnnnnnnnnnnnnnnnnnnnnnnnnnnnnnnnnnnnnnnnnnnnnnnnnnnnnnnnnnnnnnnnnnnnnnnnnnnnnnnnnnnnnnnnnnnnnnnnnnnnnnnnnnnnnnnnnnnnnnnnnnnnnnnnnnnnnnnnnnnnnnnnnnnnnnnnnnnnnnnnnnnnnnnnnnnnnnnnnnnnnnnnnnnnnnnnnnnnnnnnnnnnnnnnnnnnnnnnnnnnnnnnnnnnnnnnnnnnnnnnnnnnnnnnnnnnnnnnnnnnnnnnnnnnnnnnnnnnnnnnnnnnnnnnnnnnnnnnnnnnnnnnnnnnnnnnnnnnnnnnnnnnnnnnnnnnnnnnnnnnnnnnnnnnnnnnnnnnnnnnnnnnnnnnnnnnnnnnnnnnnnnnnnnnnnnnnnnnnnnnnnnnnnnnnnnnnnnnnnnnnnnnnnnnnnnnnnnnnnnnnnnnnnnnnnnnnnnnaggtggtggatctgctggtggccatgtgtagggcagctttagagtcccctagaaagagcatcatctttgagccttatccctctgtggtggaccccactgatcccaagactctggcctttaaccctaa

SEQ ID NO: 34653 - DNA, 1137 bp, Macaca Mulatta
  misc_feature (1)...(1137): n = A,T,C or G
gccccacagaggaggtgttgccaatgctgcggttcgtgcagaagcggggaaactcaacggtgtatgagtggaggacagggacagagccctctgtggtggagcgaccccacctcgaggaacttcctgagcagnnnnnnnnnnnnnnnnnnnnnnnnnnnnnnnnnnnnnnnnnnnnnnnnnnnnnnnnnnnnnnnnnnnnnnnnnnnnnnnnnnnnnnnnnnnnnnnnnnnnnnnnnnnnnnnnnnnnnnnnnnnnnnnnnnnnnnnnnnnnnnnnnnnnnnnnnnnnnnnnnnnnnnnnnnnnnnnnnnnnnnnnnnnnnnnnnnnnnnnnnnnngctccagaaggtgttgccaggggcccagatgctctgacacttcttgagtacactgagacccggaatcagttccttgatgagctcatggannnnnnnnnnnnnnnnnnnnnnnnnnnnnnnnnnnnnnnnnnnnnnnnnnnnnnnnnnnnnnnnnnnnnnnnnnnnnnnnnnnnnnnnnnnnnnnnnnnnnnnnnnnnnnnnnnnnnnnnnnnnnnnnnnnnnnnnnnnnnnnnnnnnnnnnnnnnnnnnnnnnnnnnnnnnnnnnnnnnnnnnnnnnnnnnnnnnnnnnnnnnagtgccccgcacaggtatgtggaccgagtgactgaattcctccagcaaaagctgaagcagtcccagctgctggctttgaagaaagagctgatggtgcagaagcagcaggaggcacttggggagcaggcggctctggagcccaagctggacctgctgctggagaagagcaaggagcnnnnttcagattgaagctgacatctccaagaggtacagcgggcgccctgtgaacctgatgggaacctctctgtgacaccctccgtgttcttgcctgcccatcttctcagcctttgggctgaagatgatagccagggctgatgttttgaggcccttcaaggcaaaagatcaggccgactggaagatggaaagccacaggaaggaagcagtacctgatggtgatcttggcattcttcatgttccctacaagaagctgtggtgattggccctgtggcctgtcaggcaaaaaccacagctgctccttctagttagtatagcagacttaataaaagagg

SEQ ID NO: 34654 - DNA, 695 bp, Macaca Mulatta
gaactcttaacttttatcaagccacatgcttggctgtgtcattgtttaacttggatattttatgattttacttgaatgtgcctaatggaaccattcgatgtgagaaataattcttcttaatttacagcaaagtattgaataaccattgagaaaaacactattattttttgtaccaaaaatacttaaagacctcagaagcactcttttacttttaaaaaattgctttttttgaactttattcagaagcagttatcaataaattccataaaataatttcattggtatttaaaaatgaatattagtataatgaaatgatttgcctttttgtaggcataataagccaaatacttttttacccaaaataatttttagagaaaatgatgtaatgaaaaattgtaccatgaattaggagcgtagtttttttccatttaaatgtcaccattacttaaaagatgattgattgattattgctataccaaatcagatgaaccctgttcatcacttttcttctctgtccccaaacaatttggttcgagactgaaatgtttgtgtcttcagcatattagaatggaagataatacagatatttctgtgggaaataaaataactaattttgaggtaccaaatagtgcaattgggtaaaacagggtttattcagttgcatctgtctccagtgttgtattgacagctctggg

SEQ ID NO: 34655 - DNA, 10366 bp, Macaca Mulatta
  misc_feature (1)...(10366): n = A,T,C or G
aatgccatcaatgactttgccacgcgtagtcggtccgtggtgggggacgcactggagtttgggaacagttggaagctctccccgtcctgcccagacgccctggcgccgaaggacccctgcacggccaaccccttccgcaagtcctgggcccagaagcagtgcagcatcctccacggtcctaccttcgccgcctgccgctcccaggnnnnnnnnnnnngtactacgaggcctgtgtgaacgacgcatgtgcctgcgactcagggggtgactgcgagtgtttctgcacggctgtggccgcctatgcccaggcctgccatgaagcgggcctgtgtgtgtcctggcggannnnnnnnnnnnnnnnntgttctgtgacttctacaacccacacgggggctgtgagtggcactaccagccctgcggggcaccctgcctaaaaacctgccggaaccccagtgggcactgcctggtggacctgcctggcctggaaggnnnnnnnnnnnnnnnnnnnnnnnnnnnnnnnnnnnnnnnnnnnnnnnnnnnnnnnnnnnnnnnnnnnnnnnnnnnnnnnnnnnnnnnnnnnnnnnnnnnnnnnnnnnnnnnnnnnnnnnnnnnnnnnnnnnnnnnnnnnnnnnnnnnnnnnnnnnnnnnnnnnnnnnnnnnnnnnnnnnnnnnnnnngcctgcacctgcacctatgaggacaggacctacggctaccaggacgtcatctacaacaccaccgatgggcttggtgcctgtttgatcgccatctgtggaagcaacggcaccatcgtcaggaaggctgtggcatgtcctggaactccggccacaacgccattcaccttcaccactagctgggtcccccactccacgacaannnnnnnnnnnnnnnnnnnnnnnnnnnnnnnnnnnnnnnnnnnnnnnnnnnnnnnnnnnnnnnnnnnnnnnnnnnnnnnnnnnnnnnnnnnnnnnnnnnnnnnnnnnnnnnnnnnnnnnnnnnnnnnnnnnnnnnnnnnnnnnnnnnnnnnnnnnnnnnnnnnnnnnnnnnnnnnnnnnnnnnnnnnnnnnnnnnnnnnnnnnnnnnnnnnnnnnnnnnnnnnnnnnnnnnnnnnnnnnnnnnnnnnnnnnnnnnnnnnnnnnnnnnnnnnnnnnnnnnnnnnnnnnnnnnnnnnnnnnnnnnnnnnnnnnnnnnnnnnnnnnnnnnnnnnnnnnnnnnnnnnnnnnnnnnnnnnnnnnnnnnnnnnnnnnnnnnnnnnnnnnnnnnnnnnnnnnnnnnnnnnnnnnnnnnnnnnnnnnnnnnnnnnnnnnnnnnnnnnnnnnnnnnnnnnnnnnnnnnnnnnnnnnnnnnnnnnnnnnnnnnnnnnnnnnnnnnnnnnnnnnnnnnnnnnnnnnnnnnnnnnnnnnnnnnnnnnnnnnnnnnnnnnnnnnnnnnnnnnnnnnnnnnnnnnnnnnnnnnnnnnnnnnnnnnnnnnnnnnnnnnnnnnnnnnnnnnnnnnnnnnnnnnnnnnnnnnnnnnnnnnnnnnnnnnnnnnnnnnnnnnnnnnnnnnnnnnnnnnnnnnnnnnnnnnnnnnnnnnnnnnnnnnnnnnnnnnnnnnnnnnnnnnnnnnnnnnnnnnnnnnnnnnnnnnnnnnnnnnnnnnnnnnnnnnnnnnnnnnnnnnnnnnnnnnnnnnnnnnnnnnnnnnnnnnnnnnnnnnnnnnnnnnnnnnnnnnnnnnnnnnnnnnnnnnnnnnnnnnnnnnnnnnnnnnnnnnnnnnnnnnnnnnnnnnnnnnnnnnnnnnnnnnnnnnnnnnnnnnnnnnnnnnnnnnnnnnnnnnnnnnnnnnnnnnnnnnnnnnnnnnnnnnnnnnnnnnnnnnnnnnnnnnnnnnnnnnnnnnnnnnnnnnnnnnnnnnnnnnnnnnnnnnnnnnnnnnnnnnnnnnnnnnnnnnnnnnnnnnnnnnnnnnnnnnnnnnnnnnnnnnnnnnnnnnnnnnnnnnnnnnnnnnnnnnnnnnnnnnnnnnnnnnnnnnnnnnnnnnnnnnnnnnnnnnnnnnnnnnnnnnnnnnnnnnnnnnnnnnnnnnnnnnnnnnnnnnnnnnnnnnnnnnnnnnnnnnnnnnnnnnnnnnnnnnnnnnnnnnnnnnnnnnnnnnnnnnnnnnnnnnnnnnnnnnnnnnnnnnnnnnnnnnnnnnnnnnnnnnnnnnnnnnnnnnnnnnnnnnnnnnnnnnnnnnnnnnnnnnnnnnnnnnnnnnnnnnnnnnnnnnnnnnnnnnnnnnnnnnnnnnnnnnnnnnnnnnnnnnnnnnnnnnnnnnnnnnnnnnnnnnnnnnnnnnnnnnnnnnnnnnnnnnnnnnnnnnnnnnnnnnnnnnnnnnnnnnnnnnnnnnnnnnnnnnnnnnnnnnnnnnnnnnnnnnnnnnnnnnnnnnnnnnnnnnnnnnnnnnnnnnnnnnnnnnnnnnnnnnnnnnnnnnnnnnnnnnnnnnnnnnnnnnnnnnnnnnnnnnnnnnnnnnnnnnnnnnnnnnnnnnnnnnnnnnnnnnnnnnnnnnnnnnnnnnnnnnnnnnnnnnnnnnnnnnnnnnnnnnnnnnnnnnnnnnnnnnnnnnnnnnnnnnnnnnnnnnnnnnnnnnnnnnnnnnnnnnnnnnnnnnnnnnnnnnnnnnnnnnnnnnnnnnnnnnnnnnnnnnnnnnnnnnnnnnnnnnnnnnnnnnnnnnnnnnnnnnnnnnnnnnnnnnnnnnnnnnnnnnnnnnnnnnnnnnnnnnnnnnnnnnnnnnnnnnnnnnnnnnnnnnnnnnnnnnnnnnnnnnnnnnnnnnnnnnnnnnnnnnnnnnnnnnnnnnnnnnnnnnnnnnnnnnnnnnnnnnnnnnnnnnnnnnnnnnnnnnnnnnnnnnnnnnnnnnnnnnnnnnnnnnnnnnnnnnnnnnnnnnnnnnnnnnnnnnnnnnnnnnnnnnnnnnnnnnnnnnnnnnnnnnnnnnnnnnnnnnnnnnnnnnnnnnnnnnnnnnnnnnnnnnnnnnnnnnnnnnnnnnnnnnnnnnnnnnnnnnnnnnnnnnnnnnnnnnnnnnnnnnnnnnnnnnnnnnnnnnnnnnnnnnnnnnnnnnnnnnnnnnnnnnnnnnnnnnnnnnnnnnnnnnnnnnnnnnnnnnnnnnnnnnnnnnnnnnnnnnnnnnnnnnnnnnnnnnnnnnnnnnnnnnnnnnnnnnnnnnnnnnnnnnnnnnnnnnnnnnnnnnnnnnnnnnnnnnnnnnnnnnnnnnnnnnnnnnnnnnnnnnnnnnnnnnnnnnnnnnnnnnnnnnnnnnnnnnnnnnnnnnnnnnnnnnnnnnnnnnnnnnnnnnnnnnnnnnnnnnnnnnnnnnnnnnnnnnnnnnnnnnnnnnnnnnnnnnnnnnnnnnnnnnnnnnnnnnnnnnnnnnnnnnnnnnnnnnnnnnnnnnnnnnnnnnnnnnnnnnnnnnnnnnnnnnnnnnnnnnnnnnnnnnnnnnnnnnnnnnnnnnnnnnnnnnnnnnnnnnnnnnnnnnnnnnnnnnnnnnnnnnnnnnnnnnnnnnnnnnnnnnnnnnnnnnnnnnnnnnnnnnnnnnnnnnnnnnnnnnnnnnnnnnnnnnnnnnnnnnnnnnnnnnnnnnnnnnnnnnnnnnnnnnnnnnnnnnnnnnnnnnnnnnnnnnnnnnnnnnnnnnnnnnnnnnnnnnnnnnnnnnnnnnnnnnnnnnnnnnnnnnnnnnnnnnnnnnnnnnnnnnnnnnnnnnnnnnnnnnnnnnnnnnnnnnnnnnnnnnncacggccacctccaggaccacggccacggccacaaccagcaagacccacacctcaaccctgctgcccagcagccccacatcggcccccacaaccccggtggtgtccacgggctgtgagccccagtgtgcctggtcagactggctggactacagctaccccatgtcggggccctctggcggggacttggagacctactccaacatccgcgcggctggaggggccgtctgtgagcagcccctgggcctcgagtgccgcgcccaggcccagcctggtgtccccctgcgggagttgggccaggtcgtggaatgcagcctggacttcggcttggtctgcaggaaccgtcagcaggtggggaagttcaagatgtgcttcaactacgaaatccgtgtgttctgctgcaactacggccgctgccccagcaccccggccaccagctccaaggccacaccctcctccactctggggtcaacctggattctcacagagccaaccactacagccatcacaacagtggccacgggctccacgaccatcccctcctccactccagggaccaccgcgatcctcacagagccaaccactacagccnnnnnnnnnnnnnnnnnnnnnnnnnnnnnnnnnnnnnnnnnnnnnnnnnnnnnnnnnnnnnnnnnnnnnnnnnnnnnnnnnnnnnnnnnnnnnnnnnnnnnnnnnnnnnnnnnnnnnnnnnnnnnnnnnnnnnnnnnnnnnnnnnnnnnnnnnnnnnnnnnnnnnnnnnnnnnnnnnnnnnnnnnnnnnnnnnnnnnnnnnnnnnnnnnnnnnnnnnnnnnnnnnnnnnnnnnnnnnnnnnnnnnnnnnnnnnnnnnnnnnnnnnnnnnnnnnnnnnnnnnnnnnnnnnnnnnnnnnnnnnnnnnnnnnnnnnnnnnnnnnnnnnnnnnnnnnnnnnnnnnnnnnnnnnnnnnnnnnnnnnnnnnnnnnnnnnnnnnnnnnnnnnnnnnnnnnnnnnnnnnnnnnnnnnnnnnnnnnnnnnnnnnnnnnnnnnnnnnnnnnnnnnnnnnnnnnnnnnnnnnnnnnnnnnnnnnnnnnnnnnnnnnnnnnnnnnnnnnnnnnnnnnnnnnnnnnnnnnnnnnnnnnnnnnnnnnnnnnnnnnnnnnnnnnnnnnnnnnnnnnnnnnnnnnnnnnnnnnnnnnnnnnnnnnnnnnnnnnnnnnnnnnnnnnnnnnnnnnnnnnnnnnnnnnnnnnnnnnnnnnnnnnnnnnnnnnnnnnnnnnnnnnnnnnnnnnnnnnnnnnnnnnnnnnnnnnnnnnnnnnnnnnnnnnnnnnnnnnnnnnnnnnnnnnnnnnnnnnnnnnnnnnnnnnnnnnnnnnnnnnnnnnnnnnnnnnnnnnnnnnnnnnnnnnnnnnnnnnnnnnnnnnnnnnnnnnnnnnnnnnnnnnnnnnnnnnnnnnnnnnnnnnnnnnnnnnnnnnnnnnnnnnnnnnnnnnnnnnnnnnnnnnnnnnnnnnnnnnnnnnnnnnnnnnnnnnnnnnnnnnnnnnnnnnnnnnnnnnnnnnnnnnnnnnnnnnnnnnnnnnnnnnnnnnnnnnnnnnnnnnnnnnnnnnnnnnnnnnnnnnnnnnnnnnnnnnnnnnnnnnnnnnnnnnnnnnnnnnnnnnnnnnnnnnnnnnnnnnnnnnnnnnnnnnnnnnnnnnnnnnnnnnnnnnnnnnnnnnnnnnnnnnnnnnnnnnnnnnnnnnnnnnnnnnnnnnnnnnnnnnnnnnnnnnnnnnnnnnnnnnnnnnnnnnnnnnnnnnnnnnnnnnnnnnnnnnnnnnnnnnnnnnnnnnnnnnnnnnnnnnnnnnnnnnnnnnnnnnnnnnnnnnnnnnnnnnnnnnnnnnnnnnnnnnnnnnnnnnnnnnnnnnnnnnnnnnnnnnnnnnnnnnnnnnnnnnnnnnnnnnnnnnnnnnnnnnnnnnnnnnnnnnnnnnnnnnnnnnnnnnnnnnnnnnnnnnnnnnnnnnnnnnnnnnnnnnnnnnnnnnnnnnnnnnnnnnnnnnnnnnnnnnnnnnnnnnnnnnnnnnnnnnnnnnnnnnnnnnnnnnnnnnnnnnnnnnnnnnnnnnnnnnnnnnnnnnnnnnnnnnnnnnnnnnnnnnnnnnnnnnnnnnnnnnnnnnnnnnnnnnnnnnnnnnnnnnnnnnnnnnnnnnnnnnnnnnnnnnnnnnnnnnnnnnnnnnnnnnnnnnnnnnnnnnnnnnnnnnnnnnnnnnnnnnnnnnnnnnnnnnnnnnnnnnnnnnnnnnnnnnnnnnnnnnnnnnnnnnnnnnnnnnnnnnnnnnnnnnnnnnnnnnnnnnnnnnnnnnnnnnnnnnnnnnnnnnnnnnnnnnnnnnnnnnnnnnnnnnnnnnnnnnnnnnnnnnnnnnnnnnnnnnnnnnnnnnnnnnnnnnnnnnnnnnnnnnnnnnnnnnnnnnnnnnnnnnnnnnnnnnnnnnnnnnnnnnnnnnnnnnnnnnnnnnnnnnnnnnnnnnnnnnnnnnnnnnnnnnnnnnnnnnnnnnnnnnnnnnnnnnnnnnnnnnnnnnnnnnnnnnnnnnnnnnnnnnnnnnnnnnnnnnnnnnnnnnnnnnnnnnnnnnnnnnnnnnnnnnnnnnnnnnnnnnnnnnnnnnnnnnnnnnnnnnnnnnnnnnnnnnnnnnnnnnnnnnnnnnnnnnnnnnnnnnnnnnnnnnnnnnnnnnnnnnnnnnnnnnnnnnnnnnnnnnnnnnnnnnnnnnnnnnnnnnnnnnnnnnnnnnnnnnnnnnnnnnnnnnnnnnnnnnnnnnnnnnnnnnnnnnnnnnnnnnnnnnnnnnnnnnnnnnnnnnnnnnnnnnnnnnnnnnnnnnnnnnnnnnnnnnnnnnnnnnnnnnnnnnnnnnnnnnnnnnnnnnnnnnnnnnnnnnnnnnnnnnnnnnnnnnnnnnnnnnnnnnnnnnnnnnnnnnnnnnnnnnnnnnnnnnnnnnnnnnnnnnnnnnnnnnnnnnnnnnnnnnnnnnnnnnnnnnnnnnnnnnnnnnnnnnnnnnnnnnnnnnnnnnnnnnnnnnnnnnnnnnnnnnnnnnnnnnnnnnnnnnnnnnnnnnnnnnnnnnnnnnnnnnnnnnnnnnnnnnnnnnnnnnnnnnnnnnnnnnnnnnnnnnnnnnnnnnnnnnnnnnnnnnnnnnnnnnnnnnnnnnnnnnnnnnnnnnnnnnnnnnnnnnnnnnnnnnnnnnnnnnnnnnnnnnnnnnnnnnnnnnnnnnnnnnnnnnnnnnnnnnnnnnnnnnnnnnnnnnnnnnnnnnnnnnnnnnnnnnnnnnnnnnnnnnnnnnnnnnnnnnnnnnnnnnnnnnnnnnnnnnnnnnnnnnnnnnnnnnnnnnnnnnnnnnnnnnnnnnnnnnnnnnnnnnnnnnnnnnnnnnnnnnnnnnnnnnnnnnnnnnnnnnnnnnnnnnnnnnnnnnnnnnnnnnnnnnnnnnnnnnnnnnnnnnnnnnnnnnnnnnnnnnnnnnnnnnnnnnnnnnnnnnnnnnnnnnnnnnnnnnnnnnnnnnnnnnnnnnnnnnnnnnnnnnnnnnnnnnnnnnnnnnnnnnnnnnnnnnnnnnnnnnnnnnnnnnnnnnnnnnnnnnnnnnnnnnnnnnnnnnnnnnnnnnnnnnnnnnnnnnnnnnnnnnnnnnnnnnnnnnnnnnnnnnnnnnnnnnnnnnnnnnnnnnnnnnnnnnnnnnnnnnnnnnnnnnnnnnnnnnnnnnnnnnnnnnnnnnnnnnnnnnnnnnnnnnnnnnnnnnnnnnnnnnnnnnnnnnnnnnnnnnnnnnnnnnnnnnnnnnnnnnnnnnnnnnnnnnnnnnnnnnnnnnnnnnnnnnnnnnnnnnnnnnnnnnnnnnnnnnnnnnnnnnnnnnnnnnnnnnnnnnnnnnnnnnnnnnnnnnnnnnnnnnnnnnnnnnnnnnnnnnnnnnnnnnnnnnnnnnnnnnnnnnnnnnnnnnnnnnnnnnnnnnnnnnnnnnnnnnnnnnnnnnnnnnnnnnnnnnnnnnnnnnnnnnnnnnnnnnnnnnnnnnnnnnnnnnnnnnnnnnnnnnnnnnnnnnnnnnnnnnnnnnnnnnnnnnnnnnnnnnnnnnnnnnnnnnnnnnnnnnnnnnnnnnnnnnnnnnnnnnnnnnnnnnnnnnnnnnnnnnnnnnnnnnnnnnnnnnnnnnnnnnnnnnnnnnnnnnnnnnnnnnnnnnnnnnnnnnnnnnnnnnnnnnnnnnnnnnnnnnnnnnnnnnnnnnnnnnnnnnnnnnnnnnnnnnnnnnnnnnnnnnnnnnnnnnnnnnnnnnnnnnnnnnnnnnnnnnnnnnnnnnnnnnnnnnnnnnnnnnnnnnnnnnnnnnnnnnnnnnnnnnnnnnnnnnnnnnnnnnnnnnnnnnnnnnnnnnnnnnnnnnnnnnnnnnnnnnnnnnnnnnnnnnnnnnnnnnnnnnnnnnnnnnnnnnnnnnnnnnnnnnnnnnnnnnnnnnnnnnnnnnnnnnnnnnnnnnnnnnnnnnnnnnnnnnnnnnnnnnnnnnnnnnnnnnnnnnnnnnnnnnnnnnnnnnnnnnnnnnnnnnnnnnnnnnnnnnnnnnnnnnnnnnnnnnnnnnnnnnnnnnnnnnnnnnnnnnnnnnnnnnnnnnnnnnnnnnnnnnnnnnnnnnnnnnnnnnnnnnnnnnnnnnnnnnnnnnnnnnnnnnnnnnnnnnnnnnnnnnnnnnnnnnnnnnnnnnnnnnnnnnnnnnnnnnnnnnnnnnnnnnnnnnnnnnnnnnnnnnnnnnnnnnnnnnnnnnnnnnnnnnnnnnnnnnnnnnnnnnnnnnnnnnnnnnnnnnnnnnnnnnnnnnnnnnnnnnnnnnnnnnnnnnnnnnnnnnnnnnnnnnnnnnnnnnnnnnnnnnnnnnnnnnnnnnnnnnnnnnnnnnnnnnnnnnnnnnnnnnnnnnnnnnnnnnnnnnnnnnnnnnnnnnnnnnnnnnnnnnnnnnnnnnnnnnnnnnnnnnnnnnnnnnnnnnnnnnnnnnnnnnnnnnnnnnnnnnnnnnnnnnnnnnnnnnnnnnnnnnnnnnnnnnnnnnnnnnnnnnnnnnnnnnnnnnnnnnnnnnnnnnnnnnnnnnnnnnnnnnnnnnnnnnnnnnnnnnnnnnnnnnnnnnnnnnnnnnnnnnnnnnnnnnnnnnnnnnnnnnnnnnnnnnnnnnnnnnnnnnnnnnnnnnnnnnnnnnnnnnnnnnnnnnnnnnnnnnnnnnnnnnnnnnnnnnnnnnnnnnnnnnnnnnnnnnnnnnnnnnnnnnnnnnnnnnnnnnnnnnnnnnnnnnnnnnnnnnnnnnnnnnnnnnnnnnnnnnnnnnnnnnnnnnnnnnnnnnnnnnnnnnnnnnnnnnnnnnnnnnnnnnnnnnnnnnnnnnnnnnnnnnnnnnnnnnnnnnnnnnnnnnnnnnnnnnnnnnnnnnnnnnnnnnnnnnnnnnnnnnnnnnnnnnnnnnnnnnnnnnnnnnnnnnnnnnnnnnnnnnnnnnnnnnnnnnnnnnnnnnnnnnnnnnnnnnnnnnnnnnnnnnnnnnnnnnnnnnnnnnnnnnnnnnnnnnnnnnnnnnnnnnnnnnnnnnnnnnnnnnnnnnnnnnnnnnnnnnnnnnnnnnnnnnnnnnnnnnnnnnnnnnnnnnnnnnnnnnnnnnnnnnnnnnnnnnnnnnnnnnnnnnnnnnnnnnnnnnnnnnnnnnnnnnnnnnnnnnnnnnnnnnnnnnnnnnnnnnnnnnnnnnnnnnnnnnnnnnnnnnnnnnnnnnnnnnnnnnnnnnnnnnnnnnnnnnnnnnnnnnnnnnnnnnnnnnnnnnnnnnnnnnnnnnnnnnnnnnnnnnnnnnnnnnnnnnnnnnnnnnnnnnnnnnnnnnnnnnnnnnnnnnnnnnnnnnnnnnnnnnnnnnnnnnnnnnnnnnnnnnnnnnnnnnnnnnnnnnnnnnnnnnnnnnnnnnnnnnnnnnnnnnnnnnnnnnnnnnnnnnnnnnnnnnnnnnnnnnnnnnnnnnnnnnnnnnnnnnnnnnnnnnnnnnnnnnnnnnnnnnnnnnnnnnnnnnnnnnnnnnnnnnnnnnnnnnnnnnnnnnnnnnnnnnnnnnnnnnnnnnnnnnnnnnnnnnnnnnnnnnnnnnnnnnnnnnnnnnnnnnnnnnnnnnnnnnnnnnnnnnnnnnnnnnnnnnnnnnnnnnnnnnnnnnnnnnnnnnnnnnnnnnnnnnnnnnnnnnnnnnnnnnnnnnnnnnnnnnnnnnnnnnnnnnnnnnnnnnnnnnnnnnnnnnnnnnnnnnnnnnnnnnnnnnnnnnnnnnnnnnnnnnnnnnnnnnnnnnnnnnnnnnnnnnnnnnnnnnnnnnnnnnnnnnnnnnnnnnnnnnnnnnnnnnnnnnnnnnnngctccacggccacgcccacctccactccagggacgactgggatcctcacagggccgaccaccactgccaccataactgtggccactggctccacggccatcccctcctccactccagggatgacctcgatcctcacagagccaaccactacagccatcacaacagtgaccacaggctccatggccacgccctcctccactccagggaagacctcaatcctcacagagttgaccactacagccatcacgacagtggccacgggctccacagccacgccctcctccactccggggacgactgggatcctcacagagccaaccactacagccat

SEQ ID NO: 34656 - DNA, 768 bp, Macaca Mulatta
ttggtaatggcattggcccagagatttcagccatactgtgacactggtctgatgtctccctgaaaagttctcgcttgtcacaagaacacttagacttgccttgtgccttagagtcagagcttacacaagaaaatgtggatgctatcctagttgagtagcagcttctctttcagaatttttataccaattctgaaaaagaaaattcgcatggcattttttattcataaattattttcctcctcaagtttggttgactttttttcttcacagcttatccatggttttaaggttgtatatattagatcttctcataagacatattaatatgtggctattaaaatgtaacattcaattactactgtgaacttttcacaaatgaaattacaatttagaaatcagaaatcaatgtagaaatatggaaactttaaatagttatttatagaatttctgtttttccagttacagaaccagtaatatcagattgaatataaagtaaatgaaatctgttttaaagcatattctaaactatcacttctgcctacatttcacatgaattcactcctacaaggattatttttaaatattttcttccatataggaaattaatacttattttagtgcataactatatgttatacatatgttataatgtataaaaatttattttaagatataccaaatcatgagtagttttattttttaacaactagctctacaacatcttacctacatggcttctctttactttttaacattgagtatacctca

SEQ ID NO: 34657 - DNA, 1239 bp, Macaca Mulatta
  misc_feature (1)...(1239): n = A,T,C or G
gggaaaaatgggataatggatacagtacaatttggaaaagatgcttatgtctatctgaagaatcctcctcgagactttcttccgaaaatggcagttattacagtttcaggattggcgggcttggtttcagcgagaaaagtgttccaagtttaagaaaattacttatcctctgggactggccactttaggagcaactgtttgctacccagttcagtccataataattgctaaggtaacagggaaaaagatatatgctacaagccagcaaatttttggagcagttaaatcactgtggacaaaaagcagcaaagaagagtcactccctaaacataaagaaaaaactaagctaggatcctctgtcgaaatagaagtacctgcaaaaacaactgacgtcttgaaacactcagtgcccttgccaacagaactcagctctgaagcgaagaccaaatcagaatccacttcaggtgcaacacagtttatgcctgaccccaagctcatggatcacgggcagtcccacccagaagatatagatatgtacagcactagaagctgaagtagactgcatacagagactacatagaaaacttacaagatgtgtgacgttgcaaataattgatgaaaaaaaatcatgttaaagtgggtaaactgcataccattgaaggtatttacctttaaacccttaagtttttttcccttacatatccaaatgtgcaatttgataaattacataagtggttaacagacaaactgaatgcaatgcaaacaatattaaatgattgatgaggagacttaggtagaagtattagcttgcatttgatgacctttaagggcnnnnnnnnnnnnnnnnnngacatgaactccagtgagattaaaatctgaaaatacatatatgtatgtataaagacatacatatttatacaaataaacatatatttctgctctagcgttcccagactaatgtcagttaaattagaatgatatgtggaaagacgtgtttccctnnnnnnnnnnnnnnnnnnnnnntcctagagctggaataaaatatccatgttttatnnnnnnnnnnnnnnnnnnnnnnnnnnnnnatccatccccctcagcatttatccttcgagttacaaacaattcaatccccaccctttaagttgttttaaaatgtacaattaaggttattattgaactatagtccccccgttggggctatcaaatagtaggttcctattccattctttccaaatt

SEQ ID NO: 34658 - DNA, 141 bp, Macaca Mulatta
tcaggcttgggatcatgtagttcgtaaagaaaaacctaaagaggatgcatattagtataaaaagcatttaacattagtccatgagaagagtaaattgagcattgctgaaatttatgaacaggaggacaccaaactcaacca

SEQ ID NO: 34659 - DNA, 690 bp, Macaca Mulatta
atctctcatgtttagtaataagaattttgcagttagataaggggttttgttaagtattcaaagttattgtaattataattgttttagcatttgagtgacttaaggttttatacctaacaaactccttgaaatatttatatatgttattcaaaagcattcaaggaattttaacgaggtgttcatgtcatattagattattaaaacagaaaacaaatgaaaacgtttacgggtttaaatacccttcatgtggctttacaaatgcattaaatgttaaagcactgtagttcctctcaaaagtatttgagtaggagatataatacaggtgacagaatggtatggtctggaaacacatcacatttaactgcattgtggtggcaggtttgtgtttagttgagctgatcaagatctcaggaatccgctatccctcaaaaggtctttcactgcagactattggaaatggtgaatttcacttcttataggaatttaactcatatatcacttgaagcaataaatagaatggaaaatgcaatcataaaataagaagtgagttaaaactgccaagcaaggccaaactctaaaaggatacttttacctctattcatttctattagtaataagaagaggcaagttgcctctctttacttatgatgccttcagaggcctattacagttgtatttgtatgatactgg

SEQ ID NO: 34660 - DNA, 791 bp, Macaca Mulatta
  misc_feature (1)...(791): n = A,T,C or G
ggggcaaatagtggtccgagtacaaatggctgtcagttctttatcacctgctctaagtgcgattggctggatgggaagcatgtggtgtttggaaaaatcatcgatggacttctagtgatgagaaagattgagaatgttcccacaggccccaacaataagcccaagctgcctgtggtgatctcacagtgtggggagatgtagtccaaagactgaatcagtatagcttgctcgacttcaaggctataaaccgagaatgtggactgccctttctcttacctctgggaccgaaacctgcaaggaagaaggattactttttgttctggacctccacagagagccatcagagtctgacaaaaagaacaaagactttggagccaagtagaccaggaagccccaccactgtctaattctgtgactttagtcaagccgtgaaaccccttgggaccgtactcctttgcataattagataatatataatgcatggagttgtgaagggcaaataaatgagacagtatgcttgacnnnnnananannnnnnannnnnnnaannnnnnnnnnnnnnnnnnnnnnnnnnnnnnnnnnnnnnnnnnnnnnnnnnnnnnnnnanannnnnnnnnnnnnnnnnnnnnnnnnnnnnnnnnnnnnnnnnnnnnnnnnnnnccccccagggccccnnnnnnnnnnnnnnnnnnnnnngtttcctttggggccggcacgggcaccaaaaatggggaggacacacccgggcccaaccaccgggtgttcccaggggaaaaacccgggggtgtggg

SEQ ID NO: 34661 - DNA, 347 bp, Macaca Mulatta
  misc_feature (1)...(347): n = A,T,C or G
caggaagcacaccgtgctgcaggagtgcaaggagagaatttctgctctaagcttgcagattgaagaagagaagaacaaacagagacagctgannnnnnnnnnnnnnnnnnnnnnnnnnnnnnnnnnnnnnnnnnnnnnnnnnnnnnnnnnnnnnnnnnnnnnnnnnnnnnnnnnnnnnnnnnnnnnnnnnnnnnnnnnnnnnnnnnnnnnnnnnnnnnnnnagagaaactggtcaaggcaacactggaagatgtgaagcatcagctgtgctccctgtgtggggctgagggcccctccaccctcgatgagggactctttctccgcagccaggaggctgcagccacagt

SEQ ID NO: 34662 - DNA, 672 bp, Macaca Mulatta
tggagtgccacagcagattccaattgctgttcctaataccgagagcctggagtcattaacacagatagagctaagctttgaggctggacagaatggctttattccctctaatgaagtgagcttagcacccatagcaagtggctcaaacacggaatttgaaacacatgctccagatcaaaaactcttagaagaagatggaacaatcataacattatgaaaccattgtttgaatgttttcagagtgaggatgccatgagaacttgtacatttggctagtttaaaagcatatatacctctgaccagtgacgtggaataggcatgaggcgagtaacgttgcaagcttacaatattattaaagtagtagtctggtaattgttaatataaactttggtggatcagaggtgaatttaagtccaaaacaaaggggcctttgctgatgaagttacgtgcttttacttttttgtctgtggagaatcagatgttaaagcacattcttggaactatgcgagaagactagatcatttctgttggaagtggttgcatatttaacctgctgtgcagagcccagttaatttttcctttaactgtatttttaaaattctaatgtgaagtctgattctctcttttggtacactggggacctcagctcttaaaggtcttatgttcccaata

SEQ ID NO: 34663 - DNA, 726 bp, Macaca Mulatta
ttcccacagggaagaaagacatgaatgtagtgaatgtggtaaaaccttcatttataactcacatcttgttgtccaccagagggttcattctggagagaaaccctataagtgtagtgactgtgggaaaactttcaaacagagctcaaacctcggtcagcatcagagaattcatacaggagagaaacccttcgaatgtaacgaatgtgggaaggccttcaggtggggtgctcatctggttcagcatcagaggattcactcaggagagaagccctatgagtgtaatgagtgtgggaaggcctttagtcaaagctcgtatctcagtcagcatcggagagttcacagtggagagagaccttttatatgtaaagaatgtgggaaagcttatggatggtgctcagaactcattagacatcggagagttcatgccagaaaagagccttcccattgaattgaaggggagaacgtctccagacaggattctacgtcggtctaatctactttaggactggatcccataaaagttataagctccttaagatttttcctgtgtctttcttgatttaggaaaaactgtttacttagttctgcctgtagatcatcccttcatgtcctttgattaagatactgatattcattaggatgcctttggctgcaagtagtagccaagttggtttacttctcctttctagcatgatctgcctagtttgcctaccaataatgtctact

SEQ ID NO: 34664 - DNA, 105 bp, Macaca Mulatta
agtttagagatgaaatagagtttatgtggcgatttgctcgtgcttatggagacatgtatgaactatctacaaacacacaagaaaagaaacattatgctaatattg

SEQ ID NO: 34665 - DNA, 692 bp, Macaca Mulatta
  misc_feature (1)...(692): n = A,T,C or G
ggggaacaaactgtcatacgtatgggacctacacttaatctatatgctttacactagctttctgcatttaataggttagaatgtaaattaaagtgtagcaatagcaacaaaatatttattctactgtaaatgacnnnnnnnnnnnnnnnnnngagccttgggacgtgcccatttttactgtaaattatgattccataactgacttgtagtaagcagtgtttctggcccctaagtattgctgccttgtgtattttatttagtgtacagtactacaggtgcatactctggtcatttttcaagccatgttttatcgtatctgttttctactttatgtgagcaaggtttgctgtccaaggtgtaaatattcaacgggaataaaactggcatggtnnnnnnnnnnnnnnnnnnnnnnnnnnnnnnnnnnnnnnnnntctttcaaagataatggcccatcaatgagcatttttaacatactccatagtcttttcctgtggtgttaggtctttattatattttttttcctgtgggctggttggggggttgtcatgggggaactgccctttaaattttaagtgacactatagaaatacataaaaaggtgatgggttgtgttgtgcttgtattgaatgctgtcttgacatctgttgcctcgtcctccagtatgttctaaagctgtgtctgagatctggatc

SEQ ID NO: 34666 - DNA, 109 bp, Macaca Mulatta
gtctctgcatgactatggtgagaaagagctctgcactgggcagggaagttgaccgtcgagtgaaggaaatggtgatgctggtggcccctttcctgcagtcaagttccct

SEQ ID NO: 34667 - DNA, 820 bp, Macaca Mulatta
ttttctcatcagtcacaagcaggaagccaagccctgttcctgtgacgccccatggaggctctgagaccatctgttggcctcacggaggctcaggacacggccgcagcaagggtagccctgggtctgcaccgggcagctcctgcccactctcctccacctgcctcctcctccttatcaagatggggcagaaaacttccagatgtttataaagaaagtctgtcaccacagcggtctggctgtgtttccccacgctgggtgctctcagctctgttctctagcccctggcagaggtccggcagggcgggaatgagaggagattttccccaggtgacccagctcactccctcctcccttgggaccagcagaggttcagcacagccaggcagagggtgtgccagggtggctgtccccgtggcccagtaagaagtggctctaggcccaaggagcccaagggctccatctgccatccccgccctgaaagaatccacagcccccatgtctgcccatgctgagctgctgcccaagtgttttggatggcacagctggggcatgggagcggggtctccagccttgagggcgtagagaagtgagaggacacaggagggcaggccctgggctgagagagtggcctggcgcagcctcttggcactgactgtgcggggctatgccagtttcttggcccagaaggtagtacaggggccctcctcaggttcagccctggaggagccccctggccggaggctgctcagagccttcaggccccagctctgcctccttcctcagctggactacagttctaggctctaggctggggtggtgg

SEQ ID NO: 34668 - DNA, 1291 bp, Macaca Mulatta
  misc_feature (1)...(1291): n = A,T,C or G
atggctgcaagtggccgaggtctctgcagggctgtggctgcctctcccttcccagcttggagaggagctcacacagaagccgggggaggtctgaagcctgagtatgatgcggtggtgataggagcagnnnnnnnnnnnnnnnnnnnnnnnnnnnnnnnnnnnnnnnnnnnnnnnnnnnnnnnnnnnnnnnnnnnnnnnnnnnnnnnnnnnnnnnnnnnnnnnnnnnnnnnnnnnnnnnnnnnnnnnnnnnnnnnnnnnnnnnnnnnnnnnnnnnnnnnnnnnnnnnnnnnnnnnnnnnnnnnnnnnnnnnnnnnnnnnnnnnnnnnnnnnnnnnnnnnnnnnnnnnnnnnnnnnnnnnnnnnnnnnnnnnnnnnnnnnnnnnnnnnnnnnnnnnnnnnnnnnnnnnnnnnnnnnnnnnnnnnnnnnnnnnnnnnnnnnnnnnnnnnnnnnnnnnnnnnnnnnnnnnnnnnnnnnnnnnnnnnnnnnnnnnnnnnnnnnnnnnnnnnnnnnnnnnnnnnnnnnnnnnnnnnnnnnnnnnnnnnnnnnnnnnnnnnnnnnnnnnnnnnnnnnnnnnnnnnnnnnnnnnnnnnnnnnnnnnnnnnnnnnnnnnnnnnnnnnnnnnnnnnnnnnnnnnnnnnnnnnnnnnnnnnnnnnnnnnnnnnnnnnnnnnnnnnnnnnnnnnnnnnnnnnnnnnnnnnnnnnnnnnnnnnnnnnnnnnnnnnnnnnnnnnnnnnnnnnnnnnnnnnnnnnnnnnnnnnnnnnnnnnnnnnnnnnnnnnnnnnnnnnnnnnnnnnnnnnnnnnnnnnnnnnnnnnnnnnnnnnnnnnnnnnnnnnnnnnnnnnnnnnnnnnnnnnnnnnnnnnnnnnnnnnnnnnnnnnnnnnnnnnnnnnnnnnnnnnnnnnnnnnnnnnnnnnnnnnnnnnnnnnnnnnnnnnnnnnnnnnnnnnnnnnnnnnnnnnnnnnnnnnnnnnnnnnnnnnnnnnnnnnnnnnnnnnnnnnnnnnnnnnnnnnnnnnnnnnnnnnnnnnnnnnnnnnnnnnnnnnnnnnnnnnnnnnnnnnnnnnnnnnnnnnnnnnnnnnnnnnnnnnnnnnnnnnnnnnnnnnnnnnnnnnnnnnnnnnnnnnnnnnnnnnnnngtggctgtagacaggctgcccagcttcctggcggcccccaatgctcccaggggccacccactgccccatcaccagtgctccatccacctgaactgtgaagacaccctccttcttcatcaggcctttgaagacgccatggatggcctgccttcccacag

SEQ ID NO: 34669 - DNA, 507 bp, Macaca Mulatta
gtgtctactggaccctgggacttgcactgctccctgacagttgcttcatcgcctcaactttaaatgatatatgcttgtcagagtactgtgaggaatcaggaatgacttgtgtgccccaaacttactaactttccaaggaactcaccatgtcatggcactgggacctatgtaagggggcttgaagccttatgtaggggcaaagttgaatgtcgcttatggaatgtatcgtggcacaggaggtagtgaatatctctgggcactcgcattaaatccaggctaagttaaaaagcacatccatagcttgccgtaaaggttttctatttctaaatgggaatgcacagagtgactgctatgtactctgatgccgtttccagtggtgcagttactctaggacgaaagtaaaggtaaaatgcttaggtatcattttagaaaggctacctcagggtcaaatcttgggagaaattctcagtttaggtggcttaaaggaaggcactaatatattgaaaa

SEQ ID NO: 34670 - DNA, 755 bp, Macaca Mulatta
ggatacttgtacttacaaaacccggaaccgagccttgcatccactctgggagagcgtggacctggttcccgggggtgatcgacagtcacccatcaacattcggtggagggacagtgtttatgatcccgacttaaaaccgctcaccatctcttatgacccagccacctgcctccacgtctggaataatgggtactctttcctcgtggaatttgaagattctacagataaatcagtgatcaagggaggacccctggaacacaactaccgattgaagcagttccattttcactggggggccatcgatgcctggggttctgagcacaccgtggacagcaaatgcttcccagcagagctgcacttagtgcattggaatgcagtcaaatttgaaaactttgaggatgcagcactggaagaaaatggtttggccgtgataggagtatttttaaagctaggcaaacatcataaagagctacagaaattagtggatactttgccgtcaataaagcataaggacacccttgtggaatttgggtcatttgacccttcctgcctgatgcctaccctgccagattactggacctactcagggtctctgactaccccacccctctccgagtctgtcacctggatcattaagaagcacccagtagaagttgatcacgatcagctttgagcaattttcgaaccctgcttttcactttctgaaaggggaggaaggagaaaaagaagggttggaacaactttccgcccctcct

SEQ ID NO: 34671 - DNA, 94 bp, Macaca Mulatta
acattccaaggtgattctaaatggcactttgcactgtcattttaaaagaatttctcagatatttgctgggcactttatggaaggagacactgag

SEQ ID NO: 34672 - DNA, 139 bp, Macaca Mulatta
aggtttgtggataccggataaagcttcactttgatgggtattctgattgctatgacttctgggtgaatgcagacgctctggatatccacccagttgggtggtgtgagaaaactggccacaaactccatcctccaaaagg

SEQ ID NO: 34673 - DNA, 376 bp, Macaca Mulatta
actatctctgtttgctcttggttcccttcagtaacaatgaatggtgctttcttctgaaagactcggcctaattaaaggattaagaggcaatagcttggattcagattgttctttttgttctatagccaaccaacatttttgccaagtggaaattatatgattacattcccaaatcagagaggttttttgttgtgttttggtttgatggggaaacgttttaccgccctcccctccactaagcagtggcagccgactgctctgaggtcctccccccgcctctgccaagcttcagcagtggacagactcagggccagtgtcctctctcagctctcacaggaggactcttgctgttccctgtgcgagtgtgggtactctg

SEQ ID NO: 34674 - DNA, 988 bp, Macaca Mulatta
  misc_feature (1)...(988): n = A,T,C or G
aattttgaacaagggactagcctgttaaagagaaattgcaaaacagagatgtgctccggcatctattcgcctcatggacaacaagcagtttcgaggttggtcatgctcttaaacctcaggtttcctctatttttacatcatttttggatggattaaaaaagttttatattacaaagtttaaaggatttgacccaaatcagctaagtgtagccacattgctctttgagggggaccgtgagaaggttcttcaacatgaaaaacaagtgtatgatattgctgcaaaatttggtgggttggcagctggagaagataatggacagagaggttatttgctgacctatgtcattgcatacattcgagacttggctttggaatactatgtattaggagaatcttttgagacctctgctccttgggacagagtggtagatctctgtagaaatgtaaaagaaagaataacaagggaatgcaaagagaagggtgtacagtttgctcctttttctacatgcagggtgacgcagacttacgatgcaggtgcatgtatctacttctattttgcctttaactacaggggaattagtgacccactgaccgtgtttgaacaaactgaggcagctgctagagaagaaatccttgctaatggagggagcctgtcacatcaccatggagtgggcaagttacggaagcagtggctaaaggaaagtatctctgatgtcggctttgggatgctgaagtctgtcaaggaatatgtggaccccaataacatctttggaaacagaaaccttttataaatccattagtatcattacaaaaaaatgtnnnnnnnnnnnnnnnnnnntttcaactgtggttataatcgtaatcaaatatatcatggactatattttggatactttgtttgttggtttaaaataagtttgtttccattctgtagtttgtcttgtttctacatctatgcattgacagatggtattcctaaatctctctc

SEQ ID NO: 34675 - DNA, 868 bp, Macaca Mulatta
  misc_feature (1)...(868): n = A,T,C or G
cccttctccagcgccctgtggacccgcagaaggcgctcgccttcctagcccacaaacgcgtaatcgatttttctcgctgtggcaacggggacgtcccgaaagatcctctgctccgacaggcaacttcggccttccctgccctgacctggaacctctgggagggctgcagagtaagtgccgcctctgcgctctgacggaggcacgaggcctgcggagtaggtccctctgttccgacaggtgcgacacttagcgctccatgcctgcggactccgggaggcatggcctcccccagggccgccacctctgctggttgctctgtgctttcaccttaaagctctgtcaagcagaggctcccgtgcaggaggagaagctgtcagcgagcacctcaaatttgccatgctggctggtggaagagtttgtggtaacaacagagtgctctccatgctctaatttccaggctaaaactacccctgagtgtggtcccacagggtatgtagagaaaatcacatgcagctcatctaagagaattgagttcaaaagctgccgctcagctttgatggaacaacacttgttctggaagttcgaaggggctgttgtgtttgtggccctgatcttcgcttgtcttgtcatcattcgtcagcgacaactggacagaaacgctctggaaaaagtncggaagccaattgagtccatatagctacatttccaccttntatcctgggtcttataaaccaattccaacgtgacgtgactggctgttggccctggggcttggacctgggggggtcccttcccggcttttgagatatgggcaaagagaaggtctcccctgttggcgaccgggcgcgggggctggccaattacccct

SEQ ID NO: 34676 - DNA, 116 bp, Macaca Mulatta
gtggcacctatcactctcgcgatgagagtacagacagtggactaagcatgagcagctacagtgtccctcgcaccccagatgacttcctgaacagcgttgatgagatggatacaggt

SEQ ID NO: 34677 - DNA, 645 bp, Macaca Mulatta
  misc_feature (1)...(645): n = A,T,C or G
gggggagatcaccaggccttctctggaccggcgggtgcggggcccggtcccagagtacagggtgaaagtcgtttggaaaccccagcgccaacaggaccctttggcagctgaggctggaagcagcggaaccaaaggcagacggtcctgagttgctggggcggacgtggacccaatctgtccgtccttgcaagtttcccccaggggcaggacctagacgtgcggcacattcaggttcttcaggaccgtagtggtagtcactgggccaagttagaggccagctgagaagtcttcctgcctcagatttgtttacctacagaatgcttcggtatccgtatttttgtagaatgtataaagaatgtctttcatgttggttggcatctggcatacctaatttaggtgtctggccaaagagaatacatactacagcagaaaaatatggagaatatgaagcccaggagcaaacagatcaaactcaagcccaggagttacacagatctcaagatagagattttgaaactatggctaaattacatattccagtaatggtggatgaagttgtgcattgtttgtcaccacaaaaaggacagtcgattcagagttggnnnnnnnnnnnnnnnnnnnnnnnnnnnnnnnnnnnnntcggcc

SEQ ID NO: 34678 - DNA, 645 bp, Macaca Mulatta
  misc_feature (1)...(645): n = A,T,C or G
gcctatgacctgtgtacctattatagggcagctgattattgtgcttgcaggatggttttgaaacagaaacaatacttgtttactataagagtcctatttatattatttttcagtcctgtgaatgctgtgaaatgatttattcctttgaggccaggaagctcccaggcatatatgcttctaggttaggattgtcctaactcactaaagatgccaggatattggggctgagaggagtttgagannnnnnnnnnnnnnnnnnntttttctgtcaaactggtggccaagaaatggctaagacaattttggtgctttagctgtctctgcaaagactggagaatttggcataccattaattacaacctccaatcatatccaacaaaactaccctaaaagaaggaccagtggccactcttgaaaaagtttaagtatcagaagattaaaaagattttaggatttggaagcttgtattgtctttccccaataatcattgtttgatctccaaatagtagccttatattagcaatggacagatcattggttctccatatctgatcatatgttattactttgaatcagtatttgggaaattcaagtatttatgcagtggatataaatagaaatatacaaatgtgtgccaatctgtct

SEQ ID NO: 34679 - DNA, 948 bp, Macaca Mulatta
  misc_feature (1)...(948): n = A,T,C or G
tttgatgaacacaatctgccctgcgatgtcatccgtctggacattgaacatgctgatggcaagcggtatttcacctgggaccccagtcgcttccctcagccccgcaccatgcttgagcgcttggcttctaagaggcggaagnagctggtggccatcgtagacccccacatcaaggtggactccggctaccgagttcacgacgagctgcggaacctggggctgtatgttaaaacccgggatggctctgactatgagggctggtgctggccaggnccaggctcagctggttaccctgacttcactaatcccacgatgagggcctggtgggctaacatgttcagctatgacaattatgaggnagggctcagctcccaacctctttgtctggaatgacatgaacgaaccatctgtgttcaatggtcctgaggtcnnnnnnnnnnnnnnnnnnnnnnnnnnnnnnnnnnnnnnnnnnnnnnnnnnnnnnnnnnnnnnnnnnnnnnnnnnnnnnnnnnnnnnnnnnnnnnnnnnnnnnnnnnnnnnnnnnnnnnnnnnnnnnnnnnnnnnnnnnnnnnnnnnnnnnnnnnnnnnnnnnnnnnnnnnnnnnnnnnnnnnnnnnnnnnnnnnnnnnnnnnnnnnnnnnnnnnnnnnnnnnnnnnnnnnnnnnnnnnnnnnnnnnnnnnnnnnnnnnnnnnnnnnnnnnnnngcggatgtgggtggcttcttcaaaaacccagagccagagctgcttgtgcgctggtaccagatgggtgcctaccagccattcttccgggcacatgcccacttggacactgggcggcgagagccatggctgttaccatctcagcacaatgatataatccgagatgccttgggccagcgatattctttgctgcctttctggtacaccctcttctatcaggcccatcgggaaggcattcctatcatgag

SEQ ID NO: 34680 - DNA, 389 bp, Macaca Mulatta
tgtcgaaacgagaagaagaggcacagggctgtgaggcttatcttcaccatcatgattgtttattttctgttctgggctccctacaacattgtccttctcctgaacaccttccaggagttctttggcctgaataattgcagtagctctaacaggttggaccaagccatgcaggtgacagagactcttgggatgacacactgctgcatcaaccccatcatctatgccttcgtcggggagaagttcagaaactacctcttagtcttcttccaaaagcacattgccaaacgcttctgcaaatgctgttccattttccagcaagaggctcccgagcgagcaagttcagtttacacccgatccactggggagcaggaaatatctgtgggcttgtg

SEQ ID NO: 34681 - DNA, 165 bp, Macaca Mulatta
tgaactttgattattcatatggttatcaagaacatggtgaaaggactgatcaaccatttcaaacagagcttaataccagtatgatgtattactatgatgatggtacaggtgtacaggtgtatcctgtggaagaagcattgcttaaagagtatattaagcgtcaaa

SEQ ID NO: 34682 - DNA, 842 bp, Macaca Mulatta
  misc_feature (1)...(842): n = A,T,C or G
gtccttctccatggctaagggcctgaatgccaggatgacgcgaggcctctcctactccctcaccaccagctccacccacaaaaggagcagcctctgcaaagtgaagatcgtctgcccaccccagagcccacccaaaaactgcaccagaaacaactgcaaaatttcttaaggaaggcaccaaaaggaaacaagctggaatcgctccaggaagaactctggttacacctggaagagggaagatgcattccagattcaaagaaataacgttttcagtttctcatgggaacagtgctgcttgggaatgtgtgtgatgccttctgtcgataaaagcactttatgcagtttgactttgaatttctacatggatgtgcatgtgtttataaagggaaaattagtactctgctcaactcttgataacatgaaattttgaatgttacttataatcacactgcatctttttccttaactgcttttgtaagaatggtgatatggcagtgatgagtataaattcaaggaaatttgagatgcaatgatagtgagatcattctgagtcattgatattacaagaggggcctttttgtatacttcctttttgatgtcaaagcaccaatttataaaacactgcagatgcatatagagattatatgtaacagatctgtccagtttgtgcacgaaatggatttgataaagtttttgctatgttattttactacatttggngattaataatgatttatatgtgtggttttctggaatttacttttttgtacaagatgttttacaagaatatgaagcctaagggaagaaaatgccaaagatattctctagttatggtgaacatt

SEQ ID NO: 34683 - DNA, 180 bp, Macaca Mulatta
caggagaggagccagcagcccctctccgcagagggtccccacctctccgtgcctgcctcggtcatagtcagcgccccgcctcccgcccaagacccagccccggccacccccgtcgccaaaggagctggccttggccctcaggcccccgacggccaggcttccccggctccggccccccag

SEQ ID NO: 34684 - DNA, 358 bp, Macaca Mulatta
  misc_feature (1)...(358): n = A,T,C or G
ggagaagtacagcatcggggagcccacagtgccatccaccctggcagaggagttcacctacaaccccttcatgagagtgaggnnnnnnnnnnnnnnnnnnnnnnnnnnnnnnnnnnnnnnnnnnnnnnnnnnnnnnnnnnnnnnnnnnnnnnnnnnnnnnnnnnnnnnnnnnnnnnnnnnnnnnnnnnnnnnnnnnnnnnnnnnnnnnnnnnnnnnnnnnnnnnnnnnnnnnnnnnnnnnnnnnnnnnnnnnnnnnnnnnnnnnnnnnnnnnnnnnnnnnnnnnnnnnnccttcgcttgtgttattggatgttctaatgcatatttataagagaagtttaaaaagtatttattcccat

SEQ ID NO: 34685 - DNA, 288 bp, Macaca Mulatta
acatctcccgaacctctccagctggatgtcccacagacaacttatggcaaaccgaacacgtttctcccagctctgagtctctacaactgtattcccgtgttgaagtgatgatcgattaactacttcctcaatttggaaacttggggacagcctcaccatcttctgaagtaaactgatctgcccttttctcaacaatgccagtgctttcgccctgctttgggatttggcgtctcttccccaggctgtttcactggattcctatctcgttactctgtctccattatctct

SEQ ID NO: 34686 - DNA, 705 bp, Macaca Mulatta
ttcagcacatgccaaagctgtcctcacagcctgtgagacaagagcatcttggatgtaggacaatggaagaattagatgccttattggaggaactggaacgctccacccttcaggacagtgatgaatattccaacccagctcctcttcccctggatcagcattccagaaaggagagtaaccttgacgagacttcagagatcctttctgttcaggataacacaagtcccttgccggcgcagctcgtgtataccaccaatatccaggagctcaatgtctacagtgaagcccaagagccaaaggtatcaccaccaccttctaaaacgtcagcagctgctcagttagatgagctcatggctcacctgactgagatgcaggccaaggttgcagtgagagcagatgctggcaagaaacacttaccagacaagcaggatcacaaggcctccctggactcaatgcttgggggtctggagcaggaattgcaggaccttggcattgccacagtgcccaagggccattgtgcatcctgccggaaaccgattgctgggaaggtgatccatgctctagggcaagcatggcatcctgaacattttgtctgtactcactgcaaagaagagatcggctccagtcccttctttgagcggaatggcttggcctactgccccaacgactaccagcaactttgttctccacgctgcgcttactgtg

SEQ ID NO: 34687 - DNA, 2753 bp, Macaca Mulatta
  misc_feature (1)...(2753): n = A,T,C or G
gctggtccccgcagacgccttgccatttctgtgaccggatgctgggaagcctgctggtcaacaggtccacacatgaagtcannnnnnngagccctggcctccttgcagaaacatcgaggtgacatgtagcatgaccgagctcgctggcgcctcttcatcgtgctgccaccgccctgcaggaagaggggccatgcagtcagtcttgcaccactttcaacgtttacgagggagagnnnnnnnnnnnnnnnnnnnnnnnnnnnnnnnnnnnnnnnnnnnnnnnnnnnnnnnnnnnnnnnnnnnnnnnnnnnnnnnnnnnnnnnnnnnnnnnnnnnnnnnnnnnnnnnnnnnnnnnnnnnnnnnnnnnnnnnnnnnnnnnnnnnnnnnnnnnnnnnnnnnnnnnnnnnnnnnnnnnnnnnnnnnnnnnnnnnnnnnnnnnnnnnnnnnnnnnnnnnnnnnnnnnnnnnnnnnnnnnnnnnnnnnnnnnnnnnnnnnnnnnnnnnnnnnnnnnnnnnnnnnnnnnnnnnnnnnnnnnnnnnnnnnnnnnnnnnnnnnnnnnnnnnnnnnnnnnnnnnnnnnnnnnnnnnnnnnnnnnnnnnnnnnnnnnnnnnnnnnnnnnnnnnnnnnnnnnnnnnnnnnnnnnnnnnnnnnnnnnnnnnnnnnnnnnnnnnnnnnnnnnnnnnnnnnnnnnnnnnnnnnnnnnnnnnnnnnnnnnnnnnnnnnnnnnnnnnnnnnnnnnnnnnnnnnnnnnnnnnnnnnnnnnnnnnnnnnnnnnnnnnnnnnnnnnnnnnnnnnnnnnnnnnnnnnnnnnnnnnnnnnnnnnnnnnnnnnnnnnnnnnnnnnnnnnnnnnnnnnnnnnnnnnnnnnnnnnnnnnnnnnnnnnnnnnnnnnnnnnnnnnnnnnnnnnnnnnnnnnnnnnnnnnnnnnnnnnnnnnnnnnnnnnnnnnnnnnnnnnnnnnnnnnnnnnnnnnnnnnnnnnnnnnnnnnnnnnnnnnnnnnnnnnnnnnnnnnnnnnnnnnnnnnnnnnnnggaacactcttggctacaggttcatatgacggttttgcaagaatatggacggaagatggtnggtaacctggccagcaccttaggccaacataaaggccccatctttgccttgaaatggaacagaaaggggaattacattttgagtgctggtgtagacaaannnnnnnnnnnnnnnnnnnnnnnnnnnnnnnnnnnnnnnnnnnnnnnnnnnnnnnnnnnnnnnnnnnnnnnnnnnnnnnnnnnnnnnnnnnnnnnnnnnnnnnnnnnnnnnnnnnnnnnnnnnnnnnnnnnnnnnnnnnnnnnnnnnnnnnnnnnnnnnnnnnnnnnnnnnnnnnnnnnnnnnaacgaggtcaacgccatcaaatgggatccttctggaatgttgctggcctcctgctcagatgacatgacattgaagnagatctggagcatgaaacaggaggtgtgcatccacgatcttcaggctcacaataaagagatctacaccatcaagtggagccccaccgggcccgccaccagcaacccaaactccaacatcatgttggcaagnagtgcttcgtttgattctacggtgcgactgtgggacatagagcgaggcgtctgcacccacacgctcacgaagcatcaggagcccgtctacagcgtagctttcagccctgatgggaggtacttggccagcggatcctttgacaaatgcgtccatatctggaatactcagnnnnnnnnnnnnnnnnnnnnnnnnnnnnnnnnnnnnnnnnnnnnnnnnnnnnnnnnnnnnnnnnnnnnnnnnnnnnnnnnnnnnnnnnnnnnnnnnnnnnnnnnnnnnnnnnnnnnnnnnnnnnnnnnnnnnnnnnnnnnnnnnnnnnnnnnnnnnnnnnnnnnnnnnnnnnnnnnnnnnnnnnnnnnnnnnnnnnnnnnnnnnnnnnnnnnnnnnnnnnnnnnnnnnnnnnnnnnnnnnnnnnnnnnnnnnnnnnnnnnnnnnnnnnnnnnnnnnnnnnnnnnntaatcttcatcaagaggttttttaaaggcaagcaaaaacagaagcaaatcatatcacacggggatagaatggtttccactgaggatattcagcctgggaagcagaaagtcaccagctcgaggcgtgtggattggtttccacccggaacaggctctgtgatgactgaatggaaagaaatgtaaaaagctgtgcnnnnnnnnngcaaaatgctgtgataaaccaaacagggaagggggaaaacctcctccttnnnnnnnnnnnnnnngttttccctaacgatttggacactacagttgctctcacaaaggatgttcaaagaccagtttgtaccgatgacgtgtaactttgtaatcccaacactttctattttctagaatcttctttgttcattgggtggtttttctatcggctggaattctatcttctgggggccttccgtctgagatgaaagctgtcttgggcttgttgtctcttccctgtgttgcctctccccctacccctgcctttccactctgtctggtcagctctgctttttcagtgcagcctcaagagacgcagcccagttcacatgaagacacagtctcccatggacagctttcccccttccgccttctcccacnnnnnnnnnnnnnnnnnnnnnnnnnnnnnnnnnnnnnnnnnnnnnnnnnnnnnnnnnnnnnnnnnnctccctctgtacctttctcatagggcatcagatcttagg

SEQ ID NO: 34688 - DNA, 443 bp, Macaca Mulatta
atgatcacagtgtaatgctgcagtgtcagcctgggaaagctgtgtggtgctgggtcggtgccaccagtggggatgagaggtgtcacccgaagatggagacctcagggacgaaagtgggaatcatgagtgaataggggaaggaaagaaagttccaggcagagggatctgtgagaaggtggctttgcggtgtgtaaaaagagaaggtcaaggggtctgatcacccaaaccatgccaagccttgagactgtaggcctcttaccattggggcccaaagatgagctaaggggagggtttccggccaggtagcaagaacagccaacccagagctctgcctgggctctggtcctggccctcggtgggtgggctgtgttttagcaagccccttgcaggtttaagcaatagtcacatcccctcagattaatgcaaatggcatttcctgtgtg

SEQ ID NO: 34689 - DNA, 633 bp, Macaca Mulatta
ggactgattccgtccgtccagtccacaaacacgccaattccatctactaagactgggaactgggacgctccagtggatactactacaggtggacttaaacaagatgtggcacgaactaaatataactgaacagaattggagtccggggcagccttctttcctgtaaccacgggaactttgaggtatgcccaaccatattcacatgggagcaggacctccacctcagtttaaccggatggaagaaatgggcgtccagggtggtcgagccaaacgctattcatcccagcggcaaagacctgtgccagagcccgccgcccctccaggtgcatatcagtatcatggagggacattactatgatccactgctgttccagggacgaatctatacccatggtgacagccctgccccgctgcctccacagggcatgcttgtgcagccagaaatgcaccttccccacccaggtttacatccccaccagacaccagctcctctgcccaatccaggcctctatcccccaccagtgtccatgtctccaggacagccaccacctcagcagttgcttgctcctacttacttttctgctccaggcgtcatgaactttggtaatcccagttacccttatgctccagggg

SEQ ID NO: 34690 - DNA, 773 bp, Macaca Mulatta
  misc_feature (1)...(773): n = A,T,C or G
ggcacaccggcagcacagaaaaataaagttaaacaagactctgaaagccctaaatcaactagtccgtcggctgcaggtggccagcaaaaaaccaggaaaccaaaactttcagctggctttgactttaagcaactttactgtaaactttgtaaacgtcagtttacttccaaacagaacttgactaaacacatcgagttgcacacagatggaaataacatttatgttaaattctacaagtgtcctctttgcacttatgaaactcgtcggaagcgcgatgtgatacgacatataactgtggttcataaaaagtcatctcgttatcttgggaaaataacagccagcttagagatcagagctataaaaaagcctattgattttgttctaaataaagtggcaaaaagaggcccttcgagggacgaagcaaaacatagtgattcaaaacatgatggcacttctaactctcctagtaaaaagtatgaagtagctgacgtcggtattgaagtaaaagtcacaaaaaacttttctcttcacagatgcaataaatgtggaaaggcatttgccaaaaagacttatcttgaacatcataaganaactcataaggcaaatgcttccaattcacctgaaggaaacaaaaccaaaggccgaagtacaagatctaaggctcttgtctggtgaggaacagttacagagttttgcttttttccccccatcgaacnnnnnnnnnnnnnnnnnnnnnnnnnnnnnnnnatgtcnggcccgccttcggccctcga

SEQ ID NO: 34691 - DNA, 720 bp, Macaca Mulatta
  misc_feature (1)...(720): n = A,T,C or G
agtcctaaactgagccctgtgagtgctcctgtgtatatttgagaatgaatattaagtgatgagattcaagcccaagtattgtctaggttacgaagtaggccatggaaaaccaatgacagtattctggatttggatgccacatgcagcatttctagtcagttttacagaggcacgattttctgtgaaaatcaggtctgactgacctttttatccttgtcaatctgtgtttattttgcagagttgttccatgatggacgtgactcttttggatgaacatgggaaacccttttggtgtttcagttccccggtgtgcatgagatcgcctgccacacccgctgatggccctagcttcttgggacagacgtacagcgtggactacgtcgatgcggaaggaagagtgcacgtggagctggtgtggatcagagagaccgaagaataccttattgtcaacctggtcctttaccttagtatcgcaaaaatcaaccgttggtttgggactgaatattagcagtaggtggcaatttattgttgttatctagttgtttatttttgactggctttgttcttcgtgttgaaagttaaaataaagcaaatctgcagagtgctgtgtgatgcctttcatctcacattagaaattacgatttatgggtcatttttaagttaatgtttganagattcagttaaattttaaaaataaaaataacagtgaaacttcatata

SEQ ID NO: 34692 - DNA, 197 bp, Macaca Mulatta
  misc_feature (1)...(197): n = A,T,C or G
nagtgcagtttcaaaggaactcaccagacttttgaaaatgccagttgacacttacaataatattttaacagtcttgaaattaaaacattttcatccactctttgagtactttgactatgagtccagaaagagcatgagttgttatgtgcttagtaatgttctggattataacacagaaattgtctctcaagaccagg

SEQ ID NO: 34693 - DNA, 97 bp, Macaca Mulatta
ggaatgcaaagtgtgatagcatttgctacagtactaactcgaaaccaagcaattaaggcaataaacctaaaccgacctatactgtatggtgaacagg

SEQ ID NO: 34694 - DNA, 2455 bp, Macaca Mulatta
  misc_feature (1)...(2455): n = A,T,C or G
ggctggatgacaccaaaatcctcccaggcaacatgaaggataacttctgggagatgggtgacacaggcccctgcggtccttgcagtgagatacactacnnnnnnnnnnnnnnnnnnnnnnnnnnnnnnnnnnnnnnnnnnnnnnnnnnnnnnnnnnnnnnnnnnnnnnnnnnnnnnnnnnnnnnnnnnnnnnnnnnnnnnnnnnnnnnnnnnnnnnnnnnnnnnnnnnnnnnnnnnnnnnnnnnnnnnnnnnnnnnnnnnnnnnnnnnnnnnnnnnnnnnnnnnnnnnnnnnnnnnnnnnnnnnnnnnnnnnnnnnnnnnnnnnnnnnnnnnnnnnnnnnnnnnnnnnnnnnnnnnnnnnnnnnnnnnnnnnnnnnnnnnnnnnnnnnnnnnnnnnnnnnnnnnnnnnnnnnnnnnnnnnnnnnnnnnnnnnnnnnnnnnnnnnnnnnnnnnnnnnnnnnnnnnnnnnnnnnnnnnnnnnnnnnnnnnnnnnnnnnnnnnnnnnnnnnnnnnnnnnnnnnnnnnnnnnnnnnnnnnnnnnnnnnnnnnnnnnnnnnnnnnnnnnnnnnnnnnnnnnnnnnnnnnnnnnnnnnnnnnnnnnnnnnnnnnnnnnnnnnnnnnnnnnnnnnnnnnnnnnnnnnnnnnnnnnnnnnnnnnnnnnnnnnnnnnnnnnnnnnnnnnnnnnnnnnnnnnnnnnnnnnnnnnnnnnnnnnnnnnnnnnnnnnnnnnnnnnnnnnnnnnnnnnnnnnnnnnnnnnnnnnnnnnnnnnnnnnnnnnnnnnnnnnnnnnnnnnnnnnnnnnnnnnnnnnnnnnnnnnnnnnnnnnnnnnnnnnnnnnnnnnnnnnnnnnnnnnnnnnnnnnnnnnnagctgaaatcacagggcaagggagccggtggggaagatctcattatgctggacatttacgctatcgaagagctccgggcacggggtctggaggttacagatgattccccaaagtacaattaccatttggacttcagtggtagctannnnnnnnnnnnnnnnnnnnnnnnnnnnnnnnnnnnnnnnnnnnnnnnnnnnnnnnnnnnnnnnnnnnnnnnnnnnnnnnnnnnnnnnnnnnnnnnnnnnnnnnnnnnnnnnnnnnnnnnnnnnnnnnnnnnnnnnnnnnnnnnnnnnnnnnnnnnnnnnnnnnnnnnnnnnnnnnnnnnnnnnnnnnnnnnnnnnnnnnnnnnnnnnnnnnnnnnnnnnnnnnnnnnnnnnnnnnnnnnnnnnnnnnnnnnnnnnnnnnnnnnnnnnnnnnnnnnnnnnnnnnnnnnnnnnnnnnnnnnnnnnnnnnnnnnnnnnnnnnnnnnnnnnnnnnnnnnnnnnnnnnnnnnnnnnnnnnnnnnnnnnnnnnnnnnnnnnnnnnnnnnnnnnnnnnnnnnnnnnnnnnnnnnnnnnnnnnnnnnnnnnnnnnnnnnnnnnnnnnnnnnnnnnnnnnnnnnnnnnnnnnnnnnnnnnnnnnnnnnnnnnnnnnnnnnnnnnnnnnnnnccgtctacactcaggattgccccctggcggcagcaaaagccatccagggcctacgggctgtgtttgatgagacttatcctgaccctgtgcgagtcgtctccattggagtcccggtgtctgagctgctggatgacccctctgggcctgccggctccctgacttctgttgagttttgtgggggaacgnnnnnnnnnnnnnnnnnnnnnnnnnnnnnnnnnnnnnnnnnnnnnnnnnnnnnnnnnnnnnnnnnnnnnnnnnnnnnnnnnnnnnnnnnnnnnnnnnnnnnnnnnnnnnnnnnnnnnnnnnnnnnnnnnnnnnnnnnnnnnnnnnnnnnnnnnnnnnnnnnnnnnnnnnnnnnnnnnnnnnnnnnnnnnnnnnnnnnnnnnnnnnnnnnnnnnnnnnnnnnnnnnnnnnnnnnnnnnnnnnnnnnnnnnnnnnnnnnnnnnnnnnnnnnnnnnnnnnnnnnnnnnnnnnnnnnnnnnnnnnnnnnnnnnnnnnnnnnnnnnnnnnnnnnnnnnnnnnnnnnnnnnnnnnnnnnnnnnnnnnnnnnnnnnnnnnnnnnnnnnnnnnnnnnnnnnnnnnnnnnnnnnnnnnnnnnnnnnnnnnnnnnnnnnnnnnnnnnnnnnnnnngtcctccccacaggccctgaatgaagccttgaagctcttcaagacacactcccctcagacatctgccatgctcttcacggtggacaacgaggctggcaagatcacttgcctgtgtcaagtnnnnngaatgcagccaatcggggcttaaaagccagcgagtgggtacagcaggtgtcaggcctgatggacggtaaaggtgggggcaaggatgtgtctgcacaggccacaggcaaaaacattggctgcctgcaggaggcgctgcagctggccacttccttcgcccagctgcgcctcggggatgtaaagaactga

SEQ ID NO: 34695 - DNA, 488 bp, Macaca Mulatta
  misc_feature (1)...(488): n = A,T,C or G
ggctgcatggctgagaggttgaaggaggagatcctcaacagggagaaaatggtggatgttttgcctggtcctgatgcctaccgtgaccttccccggnnnnnnnnnnnnnnnnnnnnnnnnnnnnnnnnnnnnnnnnnnnnnnnnnnnnnnnnnnnnnnnnnnnnnnnnnnnnnnnnnnnnnnnnnnnnnnnnnnnnnnnnnnnnnnnnnnnnnnnnnnnnnnnnnnnnnnnnnnnnnnnnnnnnnnnnnnnnnnnnnnnnnnnnnnnnnnnnnnnnnnnnnnnnnnnnnnnnnnnnnnnnnnnnnnnnnnnnnnnnnnnnnnnnnnnnnnnnnnnnnnnnnnnnnnnnnnnnnnnnnnnnnnnnnnnnnnnnnnnnnnnnnnnnnnnnnnnnnnnnnnnnnnnnnnnnnnnnnnnnnnnnnnnnnnnnnnatattcaagagaagcttatgtggagttagttcaccatatcagagaatctattccaggt

SEQ ID NO: 34696 - DNA, 2347 bp, Macaca Mulatta
  misc_feature (1)...(2347): n = A,T,C or G
atttcaaaatggacccggttctgtggcgggtccgagagtgaggctgtgggggacctccaggcagaacctccacggagtctcgcggctgctgcgtgccccgggaggatacggatttcccttccctcctacttgcgcgcggagcccagctcttgttgaggtgcgggttccgggagcccacgcagctccgccggtcggtagtggccgcggctgccctgcgggggcgggtgtgcccggccggggtcggagccgcgcgtgtgcccggcagacggcggtgcccgcgtgcccctccctccgcgcccgcggtgacagcccagacgccagcccgggcgctgacagacgacttttctcacttgtcagttttctcgtttgtcagcagagctgctgnnnnnnnnnnnnnnnnnnnnnnnnnnnnnnnnnnnnnnnnnnnnnnnnnnnnnnnnnnnnnnnnnnnnnnnnnnnnnnnnnnnnnnnnnnnnnnnnnnnnnnnnnnnnnnnnnnnnnnnnnnnnnnnnnnnnnnnnnnnnnnnnnnnnnnnnnnnnnnnnnnnnnnnnnnnnnnnnnnnnnnnnnnnnnnnnnnnnnnnnnnnnnnnnnnnnnnnnnnnnnnnnnnnnnnnnnnnnnnnnnnaggagactcctggatacagaggatgagctcagtgacattcagtcagatgctgtgccttctgaggtccgagactggctggcctccaccttcacacggcagatggggatgatgctcaggaggagcgaggagaagccccggttcaagagcatcgttcacgcggtgcaggctgggatatttgtggagagnnnnnnnnnnnnnnnnnnnnnnnnnnnnnnnnnnnnnnnnnnnnnnnnnnnnnnnnnnnnnnnnnnnnnnnnnnnnnnnnnnnnnnnnnnnnnnnnnnnnnnnnnnnnnnnnnnnnnnnnnnnnnnnnnnnnnnnnnnnnnnnnnnnnnnnnnnnnnnnnnnnnnnnnnnnnnnnnnnnnnnnnnnnnnnnnnnnnnnnnnnnnnnnnnnnnnnnnnnnnnnnnnnnnnnnnnnnnnnnnnnnnnnnnnnnnnnnnnnnnnnnnnnnnnnnnnnnnnnnnnnnnnnnnnnnnnnnnnnnnnnnnnnnnnnnnnnnnnnnnnnnnnnnnnnnnnnnnnnnnnnnnnnnnnnnnnnnnnnnnnnnnnnnnnnnnnnnnnnnnnnnnnnnnnnnnnnnnnnnnnnnnnnnnnnnnnnnnnnnnnnnnnnnnnnnnnnnnnnnnnnnnnnnnnnnnnnnnnnnnnnnnnnnnnnnnnnnnnnnnnnnnnnnnnnnnnnnnnnnnnnnnnnnnnnnnnnnnnnnnnnnnnnnnnnnnnnnnnnnnnnnnnnnnnnnnnagggagtttcgaaccttggtcattgaaatggtgatggccacggatatgtcttgtcacttccaacaaatcaaagcaatgaagactgctctgcagcagccagaagcncattgaaaagccaaaagccttatcccttatgctgcatacggcagatattagccatccagcaaaagcgtgggacctccatcatcgctgnnnnnnnnnnnnnnnnnnnnnnnnnnnnnnnnnnnnnnnnnnnnnnnnnnnnnnnnnnnnnnnnnnnnnnnnnnnnnnnnnnnnnnnnnnnnnnnnnnnnnnnnnnnnnnnnnnaggtttcattgatttcatcgtggaacccaccttcactgtgcttacggacatgaccgagaagattgtgagtccattaattgatgaaacctctcaaactggcgggacaggacagagacgttcnnnnnnnnnnnnnnnnnnnnnnnnnnnnnnnnnnnnnnnnnnnnnnnnnnnnnnnnnnnnnnnnnnnnnnnnnnnnnnnnnnnnnnnnnnnnnnnnnnnnnnnnnnnnnnnnnnnnnnnnnnnnnnnnnnnnnnnnnnnnnnnnnnnnnnnnnnnnnnnnnnnnnnnnnnnnnnnnnnnnnnnnnnnnnnnnnnnnnnnnnnnnnnnnnnnnnnnnnnnnnnnnnnnnnnnnnnnnnnnnnnnnnnnnnnnnnnnnnnnnnnnnnnnnnnnnnnnnnnnnnnnnnnnnnnnnnnnnnnnnnnnnnnnnnnnnnnnnnnnnnnnnnnnnnnnnnnnnnnnnnnnnnnnnnnnnnnnnnnnnnnnnnnnnnnnnnnnnnnnnnnnnnnnnnnnnnnnnnnnnnnnnnnnnnnnnnnnnnnnnnnnnnnnnnnnnnnnnnnnnnnnnnnnnnnnnnnnnnnnnnnnnnnnnnnnnnnnnnnnnnnnnnnnggcataaaacggcgttctcacagctcaccagccccaagcaccagctccacgagtcgccttacattgccag

SEQ ID NO: 34697 - DNA, 633 bp, Macaca Mulatta
  misc_feature (1)...(633): n = A,T,C or G
gggcattcgaatagagttcaagaagcattatggctattccctgtattcagcaattaaatcggatacttctggagactatgaaatcacactcttaaaaatctgtggtggagatgactgaaccaagaagataatctccaaaggtccacgatgggctttcccaacagctccaccttacttctttctcatactatttaagagaacaagcaaatgtaaacagtaacctgtgttcctaacaggaattctcattgttctataacaacaacaaaaacgattattattttagagcatctcatttataatgtagcgggtcataaatgaaatttaaaatggtattaaggatctgcaaatactatccaacttatatttctgcttacaaagtaagaatctttttatagttctaatccattaaatataaagcaagataataaaaattgttgcttttgttnnnnnnnnnnnnnnnnnnnnnnnnnnnnnnnnnnnnnnnnnnnnnnnnnnnnnnnnnnnnnnnnnnnnnnnnnnnnnnnnnnnnnnnnnnnnnnnnnnnnnnnnnnnnnnnnnnnnnnnnnnnnnnnnnnnnnnnnnnnnnccttttttggcgcggggcccaaaagaaaagaaaatggccaacctttt

SEQ ID NO: 34698 - DNA, 192 bp, Macaca Mulatta
ggggaaaggagattccccagaggctcgagccttggccaaacaggtggccacggccctacagaacctgcagaccaaaaccaaccgggctgtggccaacagcagacccgctaaagcagctgtacaccttgagggcaagattgagcaagcacagcggtggattgataatcccacagtggatgaccgtggagtcgg

SEQ ID NO: 34699 - DNA, 2185 bp, Macaca Mulatta
  misc_feature (1)...(2185): n = A,T,C or G
gtgacctggtgattctcgatggcgttcccactgcaggctggctgcagggccgaagctgctggggcgcacggggcttcttcccgtcttcatgtgtccgtgagctctgcctctcctcacagagccggcagtggcactcccagagtgccctgtttcagattccggaatattccgtgggacaagcccgggccctgatggggctttctgcacagctggatgaagagctggacttcagggaaggggatgtgatcaccattattggagttcctgaaccaggctggtttgaaggggagttagagggccgaagaggcatttttccagaaggttttgtagagctgttggggcccctcaggactgtggatgagtcagtaagttctggaaatcccgatgactgcattgttaatggtgaagtagatacccctgtaggagaggaagagatagggccggatgaggatgaggaagagccagggacctacggggtcgccctctacagattccaagccctggagccaaatgagctggaattggaggtcggagataaaatccnnnnnnnnnnnnnnnnnnnnnnnnnnnnnnnnnnnnnnnnnnnnnnnnnnnnnnnnnnnnnnnnnnnnnnnnnnnnnnnnnnnnnnnnnnnnnnnnnnnnnnnnnnnnnnnnnnnnnnnnnnnnnnnnnnnnnnnnnnnnnnnnnnnnnnnnnnnnnnnnnnnnnnnnnnnnnnnnnnnnnnnnnnnnnnnnnnnnnnnnnnnnnnnnnnnnnnnnnnnnnnnnnnnnnnnnnnnnnnnnnnnnnnnnnnnnnnnnnnnnnnnnnnnnnnnnnnnnnnnnnnnnnnnnnnnnnnnnnnnnnnnnnnnnnnnnnnnnnnnnnnnnnnnnnnnnnnnnnnnnnnnnnnnnnnnnnnnnnnnnnnnnnnnnnnnnnnnnnnnnnnnnnnnnnnnnnnnnnnnnnnnnnnnnnnnnnnnnnnnnnnnnnnnnnnnnnnnnnnnnnnnnnnnnnnnnnnnnnnnnnnnnnnnnnnnnnnnnnnnnnnnnnnnnnnnnnnnnnnnnnnnnnnnnnnnnnnnnnnnnnnnnnnnnnnnnnnnnnnnnnnnnnnnnnnnnnnnnnnnnnnnnnnnnnnnnnnnnnnnnnnnnnnnnnnnnnnnnnnnnnnnnnnnnnnnnnnnnnnnnnnnnnnnnnnnnnnnnnnnnnnnnnnnnnnnnnnnnnnnnnnnnnnnnnnnnnnnnnnnnnnnnnnnnnnnnnnnnnnnnnnnnnnnnnnnnnnnnnnnnnnnnnnnnnnnnnnnnnnnnnnnnnnnnnnnnnnnnnnnnnnnnnnnnnnnnnnnnnnnnnnnnnnnnnnnnnnnnnnnnnnnnnnnnnnnnnnnnnnnnnnnnnnnnnnnnnnnnnnnnnnnnnnnnnnnnnnnnnnnnnnnnnnnnnnnnnnnnnnnnnnnnnnnnnnnnnnnnnnnnnnnnnnnnnnnnnnnnnnnnnnnnnnnnactctaactctgagaaggatattgttcgatgttcctcaaagttaatcaccgagcaggagctgccagaaaggagaaaggccctaaggccaccgccacctcgaccctgtactccagtatccacttctccccatttgctggttgaccagaacctaaaacctgcaccacccttggtggtgcgaccctctcgcccagctcccctgcctccctcagcacagcagagaacgaatgcggtatcccccaagctcctatctcgacaccatcctacctgtgagaccttagaaaaggagggccacggacatatgggaaggagtctggaccagacctccccatgccccttagtgctggtgaggattgaggaaatggagcaggacttggatatgtacagtagagctcaagaagagctaaatctcatgctggaggagaagcaggatgaatcatcaagggcagagaccctcgaggatctcaagttctgtgaaagtaacattgaaagtttgaatatggaactccagcaactaagagnnnnnnnnnnnnnnnnnnnnnnnnnnnnnnnnnnnnnnnnnnnnnnnnnnnnnnnnnnnnnnnnnnnnnnnnnnnnnnnnnnnnnnnnnnnngagccaaggtcgtagaagaacttcttcagacagaaagagactacattcgggatctggaaatgtgcattgagaagatcatggtacccctgcagcaggcacaggt

SEQ ID NO: 34700 - DNA, 469 bp, Macaca Mulatta
atgcaaaaccaaagcttcgtaactgagtttgtcctcctgggactttcacagaatccaaatgttcaggaaatagtatttgctgtatttttgtttgtctacattgcaactgttgggggcaacatgctaattgtagtaaccatactcggcagccctgctcttctggggtcccctatgtacttcttcttgggcttcctgtccttcctggatgcgtgcttctcctctgtcatcaccccaaagatgattgtggactccctctatgtcacgaaaaccatctcttttgaaggctgcatgatgcagctctttgctgaacacttctttgctggggtggaggtgattgtcctcacagtcatggcctatgatcgttatgtggccatttgcaagcccttgcattactcttctatcatgaaccggaggttctgtggcattctcatggggatagcctggacagggggcctcttgcattccatga

SEQ ID NO: 34701 - DNA, 567 bp, Macaca Mulatta
ctgctaacctaaccatgctgattcccttatgctgcagccttgttaacgaggtacacgaggttgacgacaccatccagaccctgcagcagcgcctgagggatgcagaggacaccctgcagtcgctggtccacaccaaagccaccctcgagcatgacctggctgtcaaagccaattccctgtacatcgaccaggaaaaatgcatgagcatgcgcaagagctaccccaacaccctccggctggtcggcttctgctagggagcccaccgggtgttgttttgatacccctaagttaaggctgagccagagcactgtctcagcatttgaaccgagtgctaatatagtcacttattaaaggattatgctgatggaaatgtaccaacgtcctgtctcagaaagccttttgttcgaatccaaaccttaattttctactatttactaggcgtctgggttacgggaaggatatgaagaaatataatcaatctagtagagaaggtaaaaatgataactggtgtgattcttgtcattgtgtgtgtaatccgaatagactggaaaggaggactctattctc

SEQ ID NO: 34702 - DNA, 1344 bp, Macaca Mulatta
  misc_feature (1)...(1344): n = A,T,C or G
agctggatggctggatccatgagaagatgctgatggcgcgggatggcacgcgggaggacagccacaagctgcataagagatggctccggcaccaggcattcatggccgagctggctcagaataaggagtggctggagaagatnnnnnnnnnnnnnnnnnnnnnnnnnnnnnnnnnnnnnnnnnnnnnnnnnnccgtgcggaagaagctgggcgagatccgccagtgctgggcggagctggagagcaccacncaggccaaggcacggcagctctttgaggccagcaaagcagaccagctggtgcagagctttgctgagctggacaagaagctccttcacatggagagccagctgcaagacgtggaccctggaggggacctggccaccgtcaacagtcagctcaagaagctgcannnnnnnnnnnnnnnnnnnnnnnnnnnnnnnnnnnnnnnnnnnnnnnnnnnnnnnnnnnnnnnnnnnnnnnnnnnnnnnnnnnnnnnnnnnnnnnnnnnnnnnnnnnnnnnnnnnnnnnnnnnnnnnnnnnnnnnnnnnnnnnnnnnnnnnnnnnnnnnnnnnnnnnnnnnnnnnnnnnnnnnnnnnnnnnnnnnnnnnnnnnnnnnnnnnnnnnnnnnnnnnnnnnnnnnnnnnnnnnnnnnnnnnnnnnnnnnnnnnnnnnnnnnnnnnnnnnnnnnnnnnnnnnnnnnnnnnnnnnnnnnnnnnnnnnnnnnnnnnnnnnnnnnnnnnnnnnnnnnnnnnnnnnnnnnnnnnnnnnnnnnnnnnnnnnnnnnnnnnnnnnnnnnnnnnnnnnnnnnnnnnnnnnnnnnnnnnnnnnnnnnnnnnnnnnnnnnnnnnnnnnnnnnnnnnnnnnnnnnnnnnnnnnnnnnnnnnnnnnnnnnnnnnnnnnnnnnnnnnnnnnnnnnnnnnnnnnnnnnnnnnnnnnnnnnnnnnnnnnnnnnnnnnnnnnnnnnnnnnnnnnnnnnnnnnnnnnnnnnnnnnnnnnnnnnnnnnnnnnnnnnnnnnnnnnnnnnnnnnnnnnnnnnnnnnnnnnnnnnnnnnnnnnnnnnnnnnnnnnnnnnnnnnnnnnnnnnnnnnnnnnnnnnnnnnnnnnnnnnnnnnnnnnnnnnnnnnnnnnnnncagcgagcagatcagccggcggcagtctcaggtggaccgcctgtacgtggcgctcaaggagctgggtgaggagcgccgggtggctctggaacagcagtactggctgtaccagctcagccgccaggtgagcgagcttgagcactggatcgccgagaaggaggtggtggctggttcaccggagctcggccaggactttgagcatgtctcggt

SEQ ID NO: 34703 - DNA, 712 bp, Macaca Mulatta
gacacggacgaagctgaggagcttagcgtccatagcggctcctctgatggaagcgacacagaagccccaggcgcctcctggcggaatgagaggaccctgcccggggttggaaacagttcgccggaggaagatgggaagacagcggaactgagcgacagtgtcggagagatcctagatgtcataagccaaaccgaggaggtcctcttcggggtgagggacatcagggggactcaacagggaaataggaagaggcagtgagaggccccttcttgtatttgagtccccaacacatccatccttgggtccactggtccccattcttccccagacttcctttgcttctcttttccttgtatccttacccatacctattcccatccttgaaatataaatgaaaggaagggaagcatatgcccattaatgattttgtttcaggagaggtgagaatcagcagtagatttaattaatgtctgttatgttcaggacacaagggtgagctcttcgcagctgatgcactgggtgcggagctgagcagagaggcctaacaaggatcaggcaggagggcaggggtggtggcagctataggagggcagtgtagggcaaggcctctgaggaggagggaaaaagtgaaggagaggctttggacccggtggcagagtgaccagatgacagaggggttcttggcagaagaggaataggtccagcaacaacc

SEQ ID NO: 34704 - DNA, 568 bp, Macaca Mulatta
  misc_feature (1)...(568): n = A,T,C or G
caggtagtcttctccctggcctctggcaacatcgcgggcgcctttgagatcgtcaccaccaatgactccattggcgaagtgtttgtggccaggcccctggacagagaggagctggaccactacatcctcaaggnnnncaggttgtggcttctgaccgaggcacccctccacggaagaaggaccacatcctgcaggtgaccatcctagatgtcaatgacaaccctccagtcatcgagagcccctttggatacaatgtcagtgtgaatganagaacgtgggtggaggtactgctgtggtccaggtgagagccactgaccgtgacatcgggatcaacagtgtcctgtcctactacatcactgagggcaacaaggacatgaccttccgcatggatcgcgtcagcggtgagatcgccacacggcccgccccgcctgaccgcgagcgccagagcttctaccacctggtggtcactgtggaggacgagggcacccccaccctgtcggtgagcgaggggggtggccagtggccacagggaggagcacttgggccagagcggctccgcctccgagtg

SEQ ID NO: 34705 - DNA, 196 bp, Macaca Mulatta
ccctgtgaggtgtgggagccctgatgctgccatgtgatgtttcaataaaggtggatctgagtgttggacgtgtcccccgggctgaggtccctgtcgcaaagaaacactactggctgtccctgatatgggtggtcgccgaggttgggcagtccccagccatcctcaaatgaccccactgctggggcctgagagcccc

SEQ ID NO: 34706 - DNA, 166 bp, Macaca Mulatta
cccccacgggtcccagcagggccagagcaggttcagagcctggagcccctgccgtgtgcacatgggccctagggagcttgtgctgggcaggcctctggcgttccgtggccttctgtctgtgcctttgagggtctcaggtctcctggaacgtgagctgggtgtgggg

SEQ ID NO: 34707 - DNA, 446 bp, Macaca Mulatta
  misc_feature (1)...(446): n = A,T,C or G
cagcacagacggatattgtttcacgatgatagaagaagatgactctgggatgcctgtcgtcacttctggatgcctaggactagaaggctcggattttcagtgtcgggnnnnnnnnnnnnnnnnnnnnnnnnnnnnnnnnnnnnnnnnnnnnnnnnnnnnnnnnnnnnnnnnnnnnnnnnnnnnnnnnnnnnnnnnnnnnnnnnnnnnnnnnnnnnnnnnnnnnnnnnnnnnnnnnnnnnnnnnnnnnnnnnnnnnnnnnnnnnnnnnnnnnnnnnnnnnnnnnnnnnnnnnnnnnnnnnnnnnnnnnnnnnnngacaagaaaccagacctctatccagcattgggttagaacaggatgaaacttacattcctcctggagaatccctgagagacttaattgagcagtctcagagctcaggaagtggatcaggcctccctctgctggt

SEQ ID NO: 34708 - DNA, 1022 bp, Macaca Mulatta
  misc_feature (1)...(1022): n = A,T,C or G
gcttgctggtatgttcttatctgaggatgaaaactttcttctggtctttcgtcgggaaaacccactggacagcagcgtggagtttatgcagnnagatttggcgcaaatatgacgctgacagcagtggctttatatcagctgctgagctccgcnnnnnnnnnnnnnnnnnnnnnnnnnnnnnnnnnnnnnnnnnnnnnnnnnnnnnnnnnnnnnnnnnnnnnnnnnnnnnnnnnnnnnnnnnnnnnnnnnnnnnnnnnnnnnnnnnnnnnnnnnnnnnnnnnnnnnnnnnnnnnnnnnnnnnnnnnnnnnnnnnnnnnnnnnnnnnnnnnnnnnnnngttctactgaagaaaggaaaagggactttgagaaaatctttgcccactatgatgtnnnnnnnnnnnnnnnnnnnnnnnnnnnnnnnnnnnnnnnnnnnnnnnnnnnnnnnnnnnnnnnnnncagcccagcatcagcggggtggaccttgataagttccgcgagattctcttgcgtcactgcgatgtgaacaaggatggaaaaattcagaagtctgagctggctttgtgtcttgggctgaaaatcaacccataatcccaaactgctttgccttttgctcttactgtgtttctgtgctcttgctggtagaattgtatctgtgcattgctgttggggacacagtgggcaaactcacaaatggtgtgctattattgggcaagaggagggacgctagggccttccttccactggcatgatctatccctgcctcactgtgcagtgtctgtgttgttttcgccttgaccctgggctttcctatcctcccaaagagtcagctcccctgttacatggctctgcctgtccttccctggtcaccagggggacaggggcagctgagtgcattcattttgtgcttttcttgtgggctttctgctgagtctgaatggtgtgtagcgttcatggcaattctgtaacttcaacatagatttttttagtgtgtgtggaaataaatctgcaattggaaacaaaa

SEQ ID NO: 34709 - DNA, 378 bp, Macaca Mulatta
  misc_feature (1)...(378): n = A,T,C or G
agagcggatcatgcaaaccgtggagatcactaagcatgcagtggacatagaagagaagggtgtgaggctgcggctcaccattgtggacacaccaggttttggggatgcagtcaacaacacagagtnnnnnnnnnnnnnnnnnnnnnnnnnnnnnnnnnnnnnnnnnnnnnnnnnnnnnnnnnnnnnnnnnnnnnnnnnnnnnnnnnnnnnnnnnnnnnnnnnnnnnnnnnnnnnnnnnnnnnnnnnnnnnnnnnnnnnnnggctccggccattggatgttgaattcatgaaggccctgcatcagcgggtcaacatcgtgcctatcctggctaaggcagacacactgacacctccagaagtggaccgaaagaaacgcaa

SEQ ID NO: 34710 - DNA, 18875 bp, Macaca Mulatta
  misc_feature (1)...(18875): n = A,T,C or G
ctggaccaatcaaatttgatgaannnnnnnnnnnnnnnnnnnnnnnnnnnnnnnnnnnnnnnnnnnnnnnnnnnnnnnnnnnnnnnnnnnnnnnnnnnnnnnnnnnnnnnnnnnnnnnnnnnnnnnnnnnnnnnnnnnnnnnnnnnnnnnnnnnnnnnnnnnnnnnnnnnnnnnnnnnnnnnnnnnnnnnnnnnnnnnnnnnnnnnnnnnnnnnnnnnnnnnnnnnnnnnnnnnnnnnnnnnnnnnnnnnnnnnnnnnnnnnnnnnnnnnnnnnnnnnnnnnnnnnnnnnnnnnnnnnnnnnnnnnnnnnnnnnnnnnnnnnnnnnnnnnnnnnnnnnnnnnnnnnnnnnnnnnnnnnnnnnnnnnnnnnnnnnnnnnnnnnnnnnnnnnnnnnnnnnnnnnnnnnnnnnnnnnnnnnnnnnnnnnnnnnnnnnnnnnnnnnnnnnnnnnnnnnnnnnnnnnnnnnnnnnnnnnnnnnnnnnnnnnnnnnnnnnnnnnnnnnnnnnnnnnnnnnnnnnnnnnnnnnnnnnnnnnnnnnnnnnnnnnnnnnnnnnnnnnnnnnnnnnnnnnnnnnnnnnnnnnnnnnnnnnnnnnnnnnnnnnnnnnnnnnnnnnnnnnnnnnnnnnnnnnnnnnnnnnnnnnnnnnnnnnnnnnnnnnnnnnnnnnnnnnnnnnnnnnnnnnnnnnnnnnnnnnnnnnnnnnnnnnnnnnnnnnnnnnnnnnnnnnnnnnnnnnnnnnnnnnnnnnnnnnnnnnnnnnnnnnnnnnnnnnnnnnnnnnnnnnnnnnnnnnnnnnnnnnnnnnnnnnnnnnnnnnnnnnnnnnnnnnnnnnnnnnnnnnnnnnnnnnnnnnnnnnnnnnnnnnnnnnnnnnnnnnnnnnnnnnnnnnnnnnnnnnnnnnnnnnnnnnnnnnnnnnnnnnnnnnnnnnnnnnnnnnnnnnnnnnnnnnnnnnnnnnnnnnnnnnnnnnnnnnnnnnnnnnnnnnnnnnnnnnnnnnnnnnnnnnnnnnnnnnnnnnnnnnnnnnnnnnnnnnnnnnnnnnnnnnnnnnnnnnnnnnnnnnnnnnnnnnnnnnnnnnnnnnnnnnnnnnnnnnnnnnnnnnnnnnnnnnnnnnnnnnnnnnnnnnnnnnnnnnnnnnnnnnnnnnnnnnnnnnnnnnnnnnnnnnnnnnnnnnnnnnnnnnnnnnnnnnnnnnnnnnnnnnnnnnnnnnnnnnnnnnnnnnnnnnnnnnnnnnnnnnnnnnnnnnnnnnnnnnnnnnnnnnnnnnnnnnnnnnnnnnnnnnnnnnnnnnnnnnnnnnnnnnnnnnnnnnnnnnnnnnnnnnnnnnnnnnnnnnnnnnnnnnnnnnnnnnnnnnnnnnnnnnnnnnnnnnnnnnnnnnnnnnnnnnnnnnnnnnnnnnnnnnnnnnnnnnnnnnnnnnnnnnnnnnnnnnnnnnnnnnnnnnnnnnnnnnnnnnnnnnnnnnnnnnnnnnnnnnnnnnnnnnnnnnnnnnnnnnnnnnnnnnnnnnnnnnnnnnnnnnnnnnnnnnnnnnnnnnnnnnnnnnnnnnnnnnnnnnnnnnnnnnnnnnnnnnnnnnnnnnnnnnnnnnnnnnnnnnnnnnnnnnnnnnnnnnnnnnnnnnnnnnnnnnnnnnnnnnnnnnnnnnnnnnnnnnnnnnnnnnnnnnnnnnnnnnnnnnnnnnnnnnnnnnnnnnnnnnnnnnnnnnnnnnnnnnnnnnnnnnnnnnnnnnnnnnnnnnnnnnnnnnnnnnnnnnnnnnnnnnnnnnnnnnnnnnnnnnnnnnnnnnnnnnnnnnnnnnnnnnnnnnnnnnnnnnnnnnnnnnnnnnnnnnnnnnnnnnnnnnnnnnnnnnnnnnnnnnnnnnnnnnnnnnnnnnnnnnnnnnnnnnnnnnnnnnnnnnnnnnnnnnnnnnnnnnnnnnnnnnnnnnnnnnnnnnnnnnnnnnnnnnnnnnnnnnnnnnnnnnnnnnnnnnnnnnnnnnnnnnnnnnnnnnnnnnnnnnnnnnnnnnnnnnnnnnnnnnnnnnnnnnnnnnnnnnnnnnnnnnnnnnnnnnnnnnnnnnnnnnnnnnnnnnnnnnnnnnnnnnnnnnnnnnnnnnnnnnnnnnnnnnnnnnnnnnnnnnnnnnnnnnnnnnnnnnnnnnnnnnnnnnnnnnnnnnnnnnnnnnnnnnnnnnnnnnnnnnnnnnnnnnnnnnnnnnnnnnnnnnnnnnnnnnnnnnnnnnnnnnnnnnnnnnnnnnnnnnnnnnnnnnnnnnnnnnnnnnnnnnnnnnnnnnnnnnnnnnnnnnnnnnnnnnnnnnnnnnnnnnnnnnnnnnnnnnnnnnnnnnnnnnnnnnnnnnnnnnnnnnnnnnnnnnnnnnnnnnnnnnnnnnnnnnnnnnnnnnnnnnnnnnnnnnnnnnnnnnnnnnnnnnnnnnnnnnnnnnnnnnnnnnnnnnnnnnnnnnnnnnnnnnnnnnnnnnnnnnnnnnnnnnnnnnnnnnnnnnnnnnnnnnnnnnnnnnnnnnnnnnnnnnnnnnnnnnnnnnnnnnnnnnnnnnnnnnnnnnnnnnnnnnnnnnnnnnnnnnnnnnnnnnnnnnnnnnnnnnnnnnnnnnnnnnnnnnnnnnnnnnnnnnnnnnnnnnnnnnnnnnnnnnnnnnnnnnnnnnnnnnnnnnnnnnnnnnnnnnnnnnnnnnnnnnnnnnnnnnnnnnnnnnnnnnnnnnnnnnnnnnnnnnnnnnnnnnnnnnnnnnnnnnnnnnnnnnnnnnnnnnnnnnnnnnnnnnnnnnnnnnnnnnnnnnnnnnnnnnnnnnnnnnnnnnnnnnnnnnnnnnnnnnnnnnnnnnnnnnnnnnnnnnnnnnnnnnnnnnnnnnnnnnnnnnnnnnnnnnnnnnnnnnnnnnnnnnnnnnnnnnnnnnnnnnnnnnnnnnnnnnnnnnnnnnnnnnnnnnnnnnnnnnnnnnnnnnnnnnnnnnnnnnnnnnnnnnnnnnnnnnnnnnnnnnnnnnnnnnnnnnnnnnnnnnnnnnnnnnnnnnnnnnnnnnnnnnnnnnnnnnnnnnnnnnnnnnnnnnnnnnnnnnnnnnnnnnnnnnnnnnnnnnnnnnnnnnnnnnnnnnnnnnnnnnnnnnnnnnnnnnnnnnnnnnnnnnnnnnnnnnnnnnnnnnnnnnnnnnnnnnnnnnnnnnnnnnnnnnnnnnnnnnnnnnnnnnnnnnnnnnnnnnnnnnnnnnnnnnnnnnnnnnnnnnnnnnnnnnnnnnnnnnnnnnnnnnnnnnnnnnnnnnnnngccacctactggaccaatcaaatttgatgaaccttttctgattttgtaaccttctcttgggatccccctgagaacgatggtggtgtaccaataagcaactacgtagtggagatgcggcagactgacagtactacctgggttgagttagcaaccaccgttatacgtactacctataaagccacccgccttactactggattagagtatcagttccgtgtaaaagctcagaatagatatggagtcggaccaggcatcacatcagcatgtatagttgccaactatccatttaaggttcctggacctcctggtacccctcaggtaactgcagttaccaaggattcaatgaccattagctggcatgagccactttctgatggtggaagccctattttaggatatcacgttgaaagaaaagaacgaaatggtattctctggcagactgtgagcaaagctttagtaccaggcaacattttcaaatcaagtggacttacagatggtattgcttatgaattccgggtgattgcagaaaacatggcaggcaaaagcaagccaagcaagccatcggagcctatgttggctctggatcccatcgacccacctggaaaaccaatacctctaaatattacaagacacacagtgacacttaaatgggctaagcctgaatatactgggggctttaaaattaccagttatattgttgaaaagagagaccttcctaatggacggtggctgaaggccaacttcagcaacattttggagaatgaatttacagtcagtggcctaacagaagatgctgcatatgaattccgtgtgattgccaaaaatgctgcaggtgccatcagtccaccttctgagccatctgatgctatcacttgcagggatgacattgaagcaccaaagataaaggtggatgttaaatttaaggacacagttatattaaaagcaggtgaaacattcagactggaagctgatgtttcaggccgcccacctccaacaatggaatggaccaaagatggaaaagagctggaaggcacagcaaagttagaaataaaaattgcagatttctctactcatctggtaaacaaagattcaacaagaagggatagtggtgcctatacccttacagcaactaatcctggtggctttgctaaacacattttcaatgtcaaagttcttgacagaccaggcccacctgaaggacctttggctgtaactgaagtgacatcagaaaagtgnnnnnnnnnnnnnnnnnnnnnnnnnnnnnnnnnnnnnnnnnnnnnnnnnnnnnnnnnnnnnnnnnnnnnnnnnnnnnnnnnnnnnnnnnnnnnnnnnnnnnnnnnnnnnnnnnnnnnnnnnnnnnnnnnnnnnnnnnnnnnnnnnnnnnnnnnnnnnnnnnnnnnnnnnnnnnnnnnnnnnnnnnnnnnnnnnnnnnnnnnnnnnnnnnnnnnnnnnnnnnnnnnnnnnnnnnnnnnnnnnnnnnnnnnnnnnnnnnnnnnnnnnnnnnnnnnnnnnnnnnnnnnnnnnnnnnnnnnnnnnnnnnnnnnnnnnnnnnnnnnnnnnnnnnnnnnnnnnnnnnnnnnnnnnnnnnnnnnnnnnnnnnnnnnnnnnnnnnnnnnnnnnnnnnnnnnnnnnnnnnnnnnnnnnnnnnnnnnnnnnnnnnnnnnnnnnnnnnnnnnnnnnnnnnnnnnnnnnnnnnnnnnnnnnnnnnnnnnnnnnnnnnnnnnnnnnnnnnnnnnnnnnnnnnnnnnnnnnnnnnnnnnnnnnnnnnnnnnnnnnnnnnnnnnnnnnnnnnnnnnnnnnnnnnnnnnnnnnnnnnnnnnnnnnnnnnnnnnnnnnnnnnnnnnnnnnnnnnnnnnnnnnnnnnnnnnnnnnnnnnnnnnnnnnnnnnnnnnnnnnnnnnnnnnnnnnnnnnnnnnnnnnnnnnnnnnnnnnnnnnnnnnnnnnnnnnnnnnnnnnnnnnnnnnnnnnnnnnnnnnnnnnnnnnnnnnnnnnnnnnnnnnnnnnnnnnnnnnnnnnnnnnnnnnnnnnnnnnnnnnnnnnnnnnnnnnnnnnnnnnnnnnnnnnnnnnnnnnnnnnnnnnnnnnnnnnnnnnnnnnnnnnnnnnnnnnnnnnnnnnnnnnnnnnnnnnnnnnnnnnnnnnnnnnnnnnnnnnnnnnnnnnnnnnnnnnnnnnnnnnnnnnnnnnnnnnnnnnnnnnnnnnnnnnnnnnnnnnnnnnnnnnnnnnnnnnnnnnnnnnnnnnnnnnnnnnnnnnnnnnnnnnnnnnnnnnnnnnnnnnnnnnnnnnnnnnnnnnnnnnnnnnnnnnnnnnnnnnnnnnnnnnnnnnnnnnnnnnnnnnnnnnnnnnnnnnnnnnnnnnnnnnnnnnnnnnnnnnnnnnnnnnnnnnnnnnnnnnnnnnnnnnnnnnnnnnnnnnnnnnnnnnnnnnnnnnnnnnnnnnnnnnnnnnnnnnnnnnnnnnnnnnnnnnnnnnnnnnnnnnnnnnnnnnnnnnnnnnnnnnnnnnnnnnnnnnnnnnnnnnnnnnnnnnnnnnnnnnnnnnnnnnnnnnnnnnnnnnnnnnnnnnnnnnnnnnnnnnnnnnnnnnnnnnnnnnnnnnnnnnnnnnnnnnnnnnnnnnnnnnnnnnnnnnnnnnnnnnnnnnnnnnnnnnnnnnnnnnnnnnnnnnnnnnnnnnnnnnnnnnnnnnnnnnnnnnnnnnnnnnnnnnnnnnnnnnnnnnnnnnnnnnnnnnnnnnnnnnnnnnnnnnnnnnnnnnnnnnnnnnnnnnnnnnnnnnnnnnnnnnnnnnnnnnnnnnnnnnnnnnnnnnnnnnnnnnnnnnnnnnnnnnnnnnnnnnnnnnnnnnnnnnnnnnnnnnnnnnnnnnnnnnnnnnnnnnnnnnnnnnnnnnnnnnnnnnnnnnnnnnnnnnnnnnnnnnnnnnnnnnnnnnnnnnnnnnnnnnnnnnnnnnnnnnnnnnnnnnnnnnnnnnnnnnnnnnnnnnnnnnnnnnnnnnnnnnnnnnnnnnnnnnnnnnnnnnnnnnnnnnnnnnnnnnnnnnnnnnnnnnnnnnnnnnnnnnnnnnnnnnnnnnnnnnnnnnnnnnnnnnnnnnnnnnnnnnnnnnnnnnnnnnnnnnnnnnnnnnnnnnnnnnnnnnnnnnnnnnnnnnnnnnnnnnnnnnnnnnnnnnnnnnnnnnnnnnnnnnnnnnnnnnnnnnnnnnnnnnnnnnnnnnnnnnnnnnnnnnnnnnnnnnnnnnnnnnnnnnnnnnnnnnnnnnnnnnnnnnnnnnnnnnnnnnnnnnnnnnnnnnnnnnnnnnnnnnnnnnnnnnnnnnnnnnnnnnnnnnnnnnnnnnnnnnnnnnnnnnnnnnnnnnnnnnnnnnnnnnnnnnnnnnnnnnnnnnnnnnnnnnnnnnnnnnnnnnnnnnnnnnnnnnnnnnnnnnnnnnnnnnnnnnnnnnnnnnnnnnnnnnnnnnnnnnnnnnnnnnnnnnnnnnnnnnnnnnnnnnnnnnnnnnnnnnnnnnnnnnnnnnnnnnnnnnnnnnnnnnnnnnnnnnnnnnnnnnnnnnnnnnnnnnnnnnnnnnnnnnnnnnnnnnnnnnnnnnnnnnnnnnnnnnnnnnnnnnnnnnnnnnnnnnnnnnnnnnnnnnnnnnnnnnnnnnnnnnnnnnnnnnnnnnnnnnnnnnnnnnnnnnnnnnnnnnnnnnnnnnnnnnnnnnnnnnnnnnnnnnnnnnnnnnnnnnnnnnnnnnnnnnnnnnnnnnnnnnnnnnnnnnnnnnnnnnnnnnnnnnnnnnnnnnnnnnnnnnnnnnnnnnnnnnnnnnnnnnnnnnnnnnnnnnnnnnnnnnnnnnnnnnnnnnnnnnnnnnnnnnnnnnnnnnnnnnnnnnnnnnnnnnnnnnnnnnnnnnnnnnnnnnnnnnnnnnnnnnnnnnnnnnnnnnnnnnnnnnnnnnnnnnnnnnnnnnnnnnnnnnnnnnnnnnnnnnnnnnnnnnnnnnnnnnnnnnnnnnnnnnnnnnnnnnnnnnnnnnnnnnnnnnnnnnnnnnnnnnnnnnnnnnnnnnnnnnnnnnnnnnnnnnnnnnnnnnnnnnnnnnnnnnnnnnnnnnnnnnnnnnnnnnnnnnnnnnnnnnnnnnnnnnnnnnnnnnnnnnnnnnnnnnnnnnnnnnnnnnnnnnnnnnnnnnnnnnnnnnnnnnnnnnnnnnnnnnnnnnnnnnnnnnnnnnnnnnnnnnnnnnnnnnnnnnnnnnnnnnnnnnnnnnnnnnnnnnnnnnnnnnnnnnnnnnnnnnnnnnnnnnnnnnnnnnnnnnnnnnnnnnnnnnnnnnnnnnnnnnnnnnnnnnnnnnnnnnnnnnnnnnnnnnnnnnnnnnnnnnnnnnnnnnnnnnnnnnnnnnnnnnnnnnnnnnnnnnnnnnnnnnnnnnnnnnnnnnnnnnnnnnnnnnnnnnnnnnnnnnnnnnnnnnnnnnnnnnnnnnnnnnnnnnnnnnnnnnnnnnnnnnnnnnnnnnnnnnnnnnnnnnnnnnnnnnnnnnnnnnnnnnnnnnnnnnnnnnnnnnnnnnnnnnnnnnnnnnnnnnnnnnnnnnnnnnnnnnnnnnnnnnnnnnnnnnnnnnnnnnnnnnnnnnnnnnnnnnnnnnnnnnnnnnnnnnnnnnnnnnnnnnnnnnnnnnnnnnnnnnnnnnnnnnnnnnnnnnnnnnnnnnnnnnnnnnnnnnnnnnnnnnnnnnnnnnnnnnnnnnnnnnnnnnnnnnnnnnnnnnnnnnnnnnnnnnnnnnnnnnnnnnnnnnnnnnnnnnnnnnnnnnnnnnnnnnnnnnnnnnnnnnnnnnnnnnnnnnnnnnnnnnnnnnnnnnnnnnnnnnnnnnnnnnnnnnnnnnnnnnnnnnnnnnnnnnnnnnnnnnnnnnnnnnnnnnnnnnnnnnnnnnnnnnnnnnnnnnnnnnnnnnnnnnnnnnnnnnnnnnnnnnnnnnnnnnnnnnnnnnnnnnnnnnnnnnnnnnnnnnnnnnnnnnnnnnnnnnnnnnnnnnnnnnnnnnnnnnnnnnnnnnnnnnnnnnnnnnnnnnnnnnnnnnnnnnnnnnnnnnnnnnnnnnnnnnnnnnnnnnnnnnnnnnnnnnnnnnnnnnnnnnnnnnnnnnnnnnnnnnnnnnnnnnnnnnnnnnnnnnnnnnnnnnnnnnnnnnnnnnnnnnnnnnnnnnnnnnnnnnnnnnnnnnnnnnnnnnnnnnnnnnnnnnnnnnnnnnnnnnnnnnnnnnnnnnnnnnnnnnnnnnnnnnnnnnnnnnnnnnnnnnnnnnnnnnnnnnnnnnnnnnnnnnnnnnnnnnnnnnnnnnnnnnnnnnnnnnnnnnnnnnnnnnnnnnnnnnnnnnnnnnnnnnnnnnnnnnnnnnnnnnnnnnnnnnnnnnnnnnnnnnnnnnnnnnnnnnnnnnnnnnnnnnnnnnnnnnnnnnnnnnnnnnnnnnnnnnnnnnnnnnnnnnnnnnnnnnnnnnnnnnnnnnnnnnnnnnnnnnnnnnnnnnnnnnnnnnnnnnnnnnnnnnnnnnnnnnnnnnnnnnnnnnnnnnnnnnnnnnnnnnnnnnnnnnnnnnnnnnnnnnnnnnnnnnnnnnnnnnnnnnnnnnnnnnnnnnnnnnnnnnnnnnnnnnnnnnnnnnnnnnnnnnnnnnnnnnnnnnnnnnnnnnnnnnnnnnnnnnnnnnnnnnnnnnnnnnnnnnnnnnnnnnnnnnnnnnnnnnnnnnnnnnnnnnnnnnnnnnnnnnnnnnnnnnnnnnnnnnnnnnnnnnnnnnnnnnnnnnnnnnnnnnnnnnnnnnnnnnnnnnnnnnnnnnnnnnnnnnnnnnnnnnnnnnnnnnnnnnnnnnnnnnnnnnnnnnnnnnnnnnnnnnnnnnnnnnnnnnnnnnnnnnnnnnnnnnnnnnnnnnnnnnnnnnnnnnnnnnnnnnnnnnnnnnnnnnnnnnnnnnnnnnnnnnnnnnnnnnnnnnnnnnnnnnnnnnnnnnnnnnnnnnnnnnnnnnnnnnnnnnnnnnnnnnnnnnnnnnnnnnnnnnnnnnnnnnnnnnnnnnnnnnnnnnnnnnnnnnnnnnnnnnnnnnnnnnnnnnnnnnnnnnnnnnnnnnnnnnnnnnnnnnnnnnnnnnnnnnnnnnnnnnnnnnnnnnnnnnnnnnnnnnnnnnnnnnnnnnnnnnnnnnnnnnnnnnnnnnnnnnnnnnnnnnnnnnnnnnnnnnnnnnnnnnnnnnnnnnnnnnnnnnnnnnnnnnnnnnnnnnnnnnnnnnnnnnnnnnnnnnnnnnnnnnnnnnnnnnnnnnnnnnnnnnnnnnnnnnnnnnnnnnnnnnnnnnnnnnnnnnnnnnnnnnnnnnnnnnnnnnnnnnnnnnnnnnnnnnnnnnnnnnnnnnnnnnnnnnnnnnnnnnnnnnnnnnnnnnnnnnnnnnnnnnnnnnnnnnnnnnnnnnnnnnnnnnnnnnnnnnnnnnnnnnnnnnnnnnnnnnnnnnnnnnnnnnnnnnnnnnnnnnnnnnnnnnnnnnnnnnnnnnnnnnnnnnnnnnnnnnnnnnnnnnnnnnnnnnnnnnnnnnnnnnnnnnnnnnnnnnnnnnnnnnnnnnnnnnnnnnnnnnnnnnnnnnnnnnnnnnnnnnnnnnnnnnnnnnnnnnnnnnnnnnnnnnnnnnnnnnnnnnnnnnnnnnnnnnnnnnnnnnnnnnnnnnnnnnnnnnnnnnnnnnnnnnnnnnnnnnnnnnnnnnnnnnnnnnnnnnnnnnnnnnnnnnnnnnnnnnnnnnnnnnnnnnnnnnnnnnnnnnnnnnnnnnnnnnnnnnnnnnnnnnnnnnnnnnnnnnnnnnnnnnnnnnnnnnnnnnnnnnnnnnnnnnnnnnnnnnnnnnnnnnnnnnnnnnnnnnnnnnnnnnnnnnnnnnnnnnnnnnnnnnnnnnnnnnnnnnnnnnnnnnnnnnnnnnnnnnnnnnnnnnnnnnnnnnnnnnnnnnnnnnnnnnnnnnnnnnnnnnnnnnnnnnnnnnnnnnnnnnnnnnnnnnnnnnnnnnnnnnnnnnnnnnnnnnnnnnnnnnnnnnnnnnnnnnnnnnnnnnnnnnnnnnnnnnnnnnnnnnnnnnnnnnnnnnnnnnnnnnnnnnnnnnnnnnnnnnnnnnnnnnnnnnnnnnnnnnnnnnnnnnnnnnnnnnnnnnnnnnnnnnnnnnnnnnnnnnnnnnnnnnnnnnnnnnnnnnnnnnnnnnnnnnnnnnnnnnnnnnnnnnnnnnnnnnnnnnnnnnnnnnnnnnnnnnnnnnnnnnnnnnnnnnnnnnnnnnnnnnnnnnnnnnnnnnnnnnnnnnnnnnnnnnnnnnnnnnnnnnnnnnnnnnnnnnnnnnnnnnnnnnnnnnnnnnnnnnnnnnnnnnnnnnnnnnnnnnnnnnnnnnnnnnnnnnnnnnnnnnnnnnnnnnnnnnnnnnnnnnnnnnnnnnnnnnnnnnnnnnnnnnnnnnnnnnnnnnnnnnnnnnnnnnnnnnnnnnnnnnnnnnnnnnnnnnnnnnnnnnnnnnnnnnnnnnnnnnnnnnnnnnnnnnnnnnnnnnnnnnnnnnnnnnnnnnnnnnnnnnnnnnnnnnnnnnnnnnnnnnnnnnnnnnnnnnnnnnnnnnnnnnnnnnnnnnnnnnnnnnnnnnnnnnnnnnnnnnnnnnnnnnnnnnnnnnnnnnnnnnnnnnnnnnnnnnnnnnnnnnnnnnnnnnnnnnnnnnnnnnnnnnnnnnnnnnnnnnnnnnnnnnnnnnnnnnnnnnnnnnnnnnnnnnnnnnnnnnnnnnnnnnnnnnnnnnnnnnnnnnnnnnnnnnnnnnnnnnnnnnnnnnnnnnnnnnnnnnnnnnnnnnnnnnnnnnnnnnnnnnnnnnnnnnnnnnnnnnnnnnnnnnnnnnnnnnnnnnnnnnnnnnnnnnnnnnnnnnnnnnnnnnnnnnnnnnnnnnnnnnnnnnnnnnnnnnnnnnnnnnnnnnnnnnnnnnnnnnnnnnnnnnnnnnnnnnnnnnnnnnnnnnnnnnnnnnnnnnnnnnnnnnnnnnnnnnnnnnnnnnnnnnnnnnnnnnnnnnnnnnnnnnnnnnnnnnnnnnnnnnnnnnnnnnnnnnnnnnnnnnnnnnnnnnnnnnnnnnnnnnnnnnnnnnnnnnnnnnnnnnnnnnnnnnnnnnnnnnnnnnnnnnnnnnnnnnnnnnnnnnnnnnnnnnnnnnnnnnnnnnnnnnnnnnnnnnnnnnnnnnnnnnnnnnnnnnnnnnnnnnnnnnnnnnnnnnnnnnnnnnnnnnnnnnnnnnnnnnnnnnnnnnnnnnnnnnnnnnnnnnnnnnnnnnnnnnnnnnnnnnnnnnnnnnnnnnnnnnnnnnnnnnnnnnnnnnnnnnnnnnnnnnnnnnnnnnnnnnnnnnnnnnnnnnnnnnnnnnnnnnnnnnnnnnnnnnnnnnnnnnnnnnnnnnnnnnnnnnnnnnnnnnnnnnnnnnnnnnnnnnnnnnnnnnnnnnnnnnnnnnnnnnnnnnnnnnnnnnnnnnnnnnnnnnnnnnnnnnnnnnnnnnnnnnnnnnnnnnnnnnnnnnnnnnnnnnnnnnnnnnnnnnnnnnnnnnnnnnnnnnnnnnnnnnnnnnnnnnnnnnnnnnnnnnnnnnnnnnnnnnnnnnnnnnnnnnnnnnnnnnnnnnnnnnnnnnnnnnnnnnnnnnnnnnnnnnnnnnnnnnnnnnnnnnnnnnnnnnnnnnnnnnnnnnnnnnnnnnnnnnnnnnnnnnnnnnnnnnnnnnnnnnnnnnnnnnnnnnnnnnnnnnnnnnnnnnnnnnnnnnnnnnnnnnnnnnnnnnnnnnnnnnnnnnnnnnnnnnnnnnnnnnnnnnnnnnnnnnnnnnnnnnnnnnnnnnnnnnnnnnnnnnnnnnnnnnnnnnnnnnnnnnnnnnnnnnnnnnnnnnnnnnnnnnnnnnnnnnnnnnnnnnnnnnnnnnnnnnnnnnnnnnnnnnnnnnnnnnnnnnnnnnnnnnnnnnnnnnnnnnnnnnnnnnnnnnnnnnnnnnnnnnnnnnnnnnnnnnnnnnnnnnnnnnnnnnnnnnnnnnnnnnnnnnnnnnnnnnnnnnnnnnnnnnnnnnnnnnnnnnnnnnnnnnnnnnnnnnnnnnnnnnnnnnnnnnnnnnnnnnnnnnnnnnnnnnnnnnnnnnnncagaaggagccatttattacttcagagtcatggctgaaaatgaatttggagttggtgttccagtggaaactgttgatgccgtgaaagctgctgaacctccttccccaccaggaaaggttacactcactgatgtgtcccagaccagtgcatcacttatgtgggagaaacctgaacatgatggtggtagcagaatcctggggtatgttgttgaaatgcagcccaaaggaactgaaaaatggagcattgtggcggaatccaaagtctgtaatgcagttgttactggtttgagttctggacaagaatatcagttccgtgtcaaagcttataatgagaaaggaaaaagcgatccaagagtgctgggtgttcctgtcatagccaaggacttgactatacagcctagtttaaagttaccatttaacacatatagtatccaagctggagaagatcttaaaatagaaattccagttataggccgaccaagacctaacgtttcttgggtcaaagatggtgagcctcttaaacagacaacaagagtaaacgttgaagaaacagctacctcaactgttttgcacattaaagaaggtaacaaagatgactttggaaaatacaccataacagcaacaaatagtgcaggcacagcaacagaaaatctcagtgttatcgttttagaaaagcctggacctccagttggcccagttcggtttgacgaagttagtgcagactttgtagtcatatcttgggaacctccagcctatactggtggctgccaaataagcaactacattgtagagaagcgagatacaaccaccaccacttggcacatggtatcagcaacagttgcaagaacaacaattaaaataaccaaactgaaaacaggcacggagtaccagtttagaatttttgctgaaaacaggtatggaaaaagtgccccactggattctaagccagttattgtacagtatccatttaaagaacctggaccacctggaactccttttgtgacatcaatctcaaaagatcaaatgcttgtgcactggcannnnnnnnnnnnnnnnnnnnnnnnnnnnnnnnnnnnnnnnnnnnnnnnnnnnnnnnnnnnnnnnnnnnnnnnnnnnnnnnnnnnnnnnnnnnnnnnnnnnnnnnnnnnnnnnnnnnnnnnnnnnnnnnnnnnnnnnnnnnnngagtatgagttcaaagtttctgctgaaaatattgttggcattggcaagcctagcaaagtgtcggaatgctatattgctcgtgatccatgtgacccacctggtcgccctgaagccattgttattacaagaaacaatgtcacactgaaatggaagaaacctgcctatgatggtggtagcaaaataacaggttaccttgtagaaaagaaagatctacctgatggccgctggatgaaaaccagctttaccaacgtattagaaactgaatttacagtgagtggacttgtagaagaccaaagatatgaatttagagtaattgcaagaaatgcagctggaaactttagtgaaccatctgaaagtagtggtgccattactgcaagagatgaaattgatgcaccaaatgcctctctggatccaaaatataaagatgtcatcgttgttcatgcaggagagacttttgttcttgaagccgacatccgtggcaaacctatacccgatgttgtttggtcaaaagatgnnnnnnnnnnnnnnnnnnnnnnnnnnnnnnnnnnnnnnnnnnnnnnnnnnnnnnnnnnnnnnnnnnnnnnnnnnnnnnnnnnnnnnnnnnnnnnnnnnnnnnnnnnnnnnnnnnnnnnnnnnnnnnnnnnnnnnnnnnnnnnnnnnnnnnnnnnnnnnnnnnnnnnnnnnnnnnnnnnnnnnnnnnnnnnnnnnnnnnnnnnnnnnnnnnnnnnnnnnnnnnnnnnnnnnnnnnnnnnnnnnnnnnnnnnnnnnnnnnnnnnnnnnnnnnnnnnnnnnnnnnnnnnnnnnnnnnnnnnnnnnnnnnnnnnnnnnnnnnnnnnnnnnnnnnnnnnnnnnnnnnnnnnnnnnnnnnnnnnnnnnnnnnnnnnnnnnnnnnnnnnnnnnnnnnnnnnnnnnnnnnnnnnnnnnnnnnnnnnnnnnnnnnnnnnnnnnnnnnnnnnnnnnnnnnnnnnnnnnnnnnnnnnnnnnnnnnnnnnnnnnnnnnnnnnngaagtctcagcaatcaccaaagattctatggtagtaacatgggcacgcccagtagacgatggaggtgctgaaattgagggctacattcttgaaaaacgagataaggaaggcgttagatggaccaagtgcaacaagaaaacattaacggatctccggctcagggtaactggtcttaccgaaggccattcctatgaattcagagttgctgctgaaaatgcagctggtgtgggagaacctagtgagccatctgttttctaccgtgcatgtgatgccttgtatccaccaggtccaccaagcaatccaaaagtgacggacacttccagatcttctgtctccctggcatggagtaagccaatttatgatggtggtgcacctgttaaaggctatgttgtagaggtcaaagaagctgctgcagatgaatggacaagtagtactccaccaacaggnnnnnnnnnnnnnnnnnnnnnnnnnnnnnnnnnnnnnnnnnnnnnnnnnnnnnnnnnnnnnnnnnnnnnnnnnnnnnnnnnnnnnnnnnnnnnnnnnnnnnnnnnnnnnnnnnnnnnnnnnnnnnnnnnnnnnnnnnnnnnnnnnnnnnnnnnnnnnnnnnnnnnnnnnnnnnnnnnnnnnnnnnnnnnnnnnnnnnnnnnnnnnnnnnnnnnnnnnnnnnnnnnnnnnnnnnnnnnnnnnnnnnnnnnnnnnnnnnnnnnnnnnnnnnnnnnnnnnnnnnnnnnnnnnnnnnnnnnnnnnnnnnnnnnnnnnnnnnnnnnnnnnnnnnnnnnnnnnnnnnnnnnnnnnnnnnnnnnnnnnnnnnnnnnnnnnnnnnnnnnnnnnnnnnnnnnnnnnnnnnnnnnnnnnnnnnnnnnnnnnnnnnnnnnnnnnnnnnnnnnnnnnnnnnnnnnnnnnnnnnnnnnnnnnnnnnnnnnnnnnnnnnnnnnnnnnnnnnnnnnnnnnnnnnnnnnnnnnnnnnnnnnnnnnnnnnnnnnnnnnnnnnnnnnnnnnnnnnnnnnnnnnnnnnnnnnnnnnnnnnnnnnnnnnnnnnnnnnnnnnnnnnnnnnnnnnnnnnnnnnnnnnnnnnnnnnnnnnnnnnnnnnnnnnnnnnnnnnnnnnnnnnnnnnnnnnnnnnnnnnnnnnnnnnnnnnnnnnnnnnnnnnnnnnnnnnnnnnnnnnnnnnnnnnnnnnnnnnnnnnnnnnnnnnnnnnnnnnnnnnnnnnnnnnnnnnnnnnnnnnnnnnnnnnnnnnnnnnnnnnnnnnnnnnnnnnnnnnnnnnnnnnnnnnnnnnnnnnnnnnnnnnnnnnnnnnnnnnnnnnnnnnnnnnnnnnnnnnnnnnnnnnnnnnnnnnnnnnnnnnnnnnnnnnnnnnnnnnnnnnnnnnnnnnnnnnnnnnnnnnnnnnnnnnnnnnnnnnnnnnnnnnnnnnnnnnnnnnnnnnnnnnnnnnnnnnnnnnnnnnnnnnnnnnnnnnnnnnnnnnnnnnnnnnnnnnnnnnnnnnnnnnnnnnnnnnnnnnnnnnnnnnnnnnnnnnnnnnnnnnnnnnnnnnnnnnnnnnnnnnnnnnnnnnnnnnnnnnnnnnnnnnnnnnnnnnnnnnnnnnnnnnnnnnnnnnnnnnnnnnnnnnnnnnnnnnnnnnnnnnnnnnnnnnnnnnnnnnnnnnnnnnnnnnnnnnnnnnnnnnnnnnnnnnnnnnnnnnnnnnnnnnnnnnnnnnnnnnnnnnnnnnnnnnnnnnnnnnnnnnnnnnnnnnnnnnnnnnnnnnnnnnnnnnnnnnnnnnnnnnnnnnnnnnnnnnnnnnnnnnnnnnnnnnnnnnnnnnnnnnnnnnnnnnnnnnnnnnnnnnnnnnnnnnnnnnnnnnnnnnnnnnnnnnnnnnnnnnnnnnnnnnnnnnnnnnnnnnnnnnnnnnnnnnnnnnnnnnnnnnnnnnnnnnnnnnnnnnnnnnnnnnnnnnnnnnnnnnnnnnnnnnnnnnnnnnnnnnnnnnnnnnnnnnnnnnnnnnnnnnnnnnnnnnnnnnnnnnnnnnnnnnnnnnnnnnnnnnnnnnnnnnnnnnnnnnnnnnnnnnnnnnnnnnnnnnnnnnnnnnnnnnnnnnnnnnnnnnnnnnnnnnnnnnnnnnnnnnnnnnnnnnnnnnnnnnnnnnnnnnnnnnnnnnnnnnnnnnnnnnnnnnnnnnnnnnnnnnnnnnnnnnnnnnnnnnnnnnnnnnnnnnnnnnnnnnnnnnnnnnnnnnnnnnnnnnnnnnnnnnnnnnnnnnnnnnnnnnnnnnnnnnnnnnnnnnnnnnnnnnnnnnnnnnnnnnnnnnnnnnnnnnnnnnnnnnnnnnnnnnnnnnnnnnnnnnnnnnnnnnnnnnnnnnnnnnnnnnnnnnnnnnnnnnnnnnnnnnnnnnnnnnnnnnnnnnnnnnnnnnnnnnnnnnnnnnnnnnnnnnnnnnnnnnnnnnnnnnnnnnnnnnnnnnnnnnnnnnnnnnnnnnnnnnnnnnnnnnnnnnnnnnnnnnnnnnnnnnnnnnnnnnnnnnnnnnnnnnnnnnnagtaactgaacttactgaagatcagcgttatgaattccgggtttttgcaattaatgctgctgactcaattagtgagccatctgaatccactgggcctattacagttaaagatgatgttgaggctccaagaattatgatggatgtcaagttccgagatgttattgttgtcaaagctggagaggtccttaagataaatgcagacattgcagggcgacctctgccagtaatttcctgggccaaggatggtgtagaaattgaagaaagagcaagaacagaaataatctcaacagacaatcatactttgttaacagttaaagactgtgtaagacgagacactgggcaatatgtactaacactgaagaatgttgccggcactcggtctgtggccattaattgcaaggtacttgataagcctggtccaccagcaggaccacttgaaataaatggcctcactgctgagaaatgctctctttcctggggacgcccccaagaagatggtggtgcagatatcgactattacatcgtagaaaaacgtgaaacaagccaccttgcatggacaatatgtgaaggagagttacggacgacatcctgtaaagtaaccaagttactcaaaggcaatgaatatatatttagagtaactggtgttaataaatacggtgttgnnnnnnnnnnnnnnnnnnnnnnnnnnnnnnnnnnnnnnnnnnnnnnnnnnnnnnnnnnnnnnnnnnnnnnnnnnnnnnnnnnnnnnnnnnnnnnnnnnnnnnnnnnnnnnnnnnnnnnnnnnnnnnnnnnnnnnnnnnnnnnnnnnnnnnnnnnnnnnnnnnnnnnnnnnnnnnnnnnnnnnnnnnnnnnnnnnnnnnnnnnnnnnnnnnnnnnnnnnnnnnnnnnnnnnnnnnnnnnnnnnnnnnnnnnnnnnnnnnnnnnnnnnnnnnnnnnnnnnnnnnnnnnnnnnnnnnnnnnnnnnnnnnnnnnnnnnnnnnnnnnnnnnnnnnnnnnnnnnnnnnnnnnnnnnnnnnnnnnnnnnnnnnnnnnnnnnnnnnnnnnnnnnnnnnnnnnnnnnnnnnnnnnnnnnnnnnnnnnnnnnnnnnnnnnnnnnnnnnnnnnnnnnnnnnnnnnnnnnnnnnnnnnnnnnnnnnnnnnnnnnnnnnnnnnnnnnnnnnnnnnnnnnnnnnnnnnnnnnnnnnnnnnnnnnnnnnnnnnnnnnnnnnnnnnnnnnnnnnnnnnnnnnnnnnnnnnnnnnnnnnnnnnnnnnnnnnnnnnnnnnnnnnnnnnnnnnnnnnnnnnnnnnnnnnnnnnnnnnnnnnnnnnnnnnnnnnnnnnnnnnnnnnnnnnnnnnnnnnnnnnnnnnnnnnnnnnnnnnnnnnnnnnnnnnnnnnnnnnnnnnnnnnnnnnnnnnnnnnnnnnnnnnnnnnnnnnnnnnnnnnnnnnnnnnnnnnnnnnnnnnnnnnnnnnnnnnnnnnnnnnnnnnnnnnnnnnnnnnnnnnnnnnnnnnnnnnnnnnnnnnnnnnnnnnnnnnnnnnnnnnnnnnnnnnnnnnnnnnnnnnnnnnnnnnnnnnnnnnnnnnnnnnnnnnnnnnnnnnnnnnnnnnnnnnnnnnnnnnnnnnnnnnnnnnnnnnnnnnnnnnnnnnnnnnnnnnnnnnnnnnnnnnnnnnnnnnntgggatgttcctgaaaacgatggtggagcaccagtgaagaattaccacatagaaaaacgtgaggccagcaagaaagcatgggtctctgtgaccaacaactgtaaccgcctctcctacaaagttaccaatttacaagaaggagctatctactacttcagagtctctggagaaaatgagtttggtgttggtataccagctgaaacaaaggaaggagtaaaaataaca

SEQ ID NO: 34711 - DNA, 615 bp, Macaca Mulatta
gcgcagagccccgtggtgtcctcaacctgtactatgagcggcgctgggagcagtccctgagggctctacgggaggagctgggcattacggcaccacccgtgcatatccagggcttggcctgagttcctgagccagcggggcctggcctacctcccccatctactgcttcccttgggggcagagggctcccttgactacctttgttcctcttctttgaacactgacccttggacaacatttatcataatttatcatagccactgctgagtggccttgaggatgaaccccacagggagcaagcagtacagtggcactcccagggggaccagcagctgtccaaggagaaccatgcgtgaacagtatcagtcgtctgggctcatgctgggatgtcgcagcactcctgttgcgactccttccaaccagccaggtttgctggaggccaggctgggtgtcctcacgggagtgagggctacacccaattccaaaagcccgagaagagagaagtggaggggggaggcgagtgtgtgaataaaggctcccatcaggtcaagtgtctgcttgtcctttcccccagggatgcccctgactttggcactcttgcgacttccaagcact

SEQ ID NO: 34712 - DNA, 834 bp, Macaca Mulatta
  misc_feature (1)...(834): n = A,T,C or G
aggaaccagtgacattcaaagatgtggttgtggaattcagcaaggaagagtgggggcaactggactctgctgtaaagaacctgtacaggaatgtgatgctggaaaactttaggaacctgaattcattgcgtaaagnnnnnnnnnnnnnnnnnnnnnnnnnnnnnnnnnnnnnnnnnnnnnnnnnnnnnnnnnnnnnnnnnnnnnnnnnnnnnnnnnnnnnnnnnnnnnnnnnnnnnnnnnnnnnnnnnnnnnnnnnnnnnnnnnnnnnnnnnnnnnnnnnnnnnnnnnnnnnnnnnnnnnnnnnnnnnnnnnnnnnnnnnnnnnnnnnnnnnnnnnnnnnnnnnnnnnnnnnnnnnnnnnnnnnnnnnnnnnnnnnnnnnnnnnnnnnnnnnnnnnnnnnnnnagtgattctcctgcctcagcctcctgagtagctgggattataggcacccccccaccacacccagctaattttttgtgtttttagtagagatgggatttcaccatattggccaggctgatcttgaactcctgacctcaggtgatccgcccgcctcggcctcctaaagtgctgggattactggtgtgagccaccacgcctggctgtcccttaacattttaaatgtgtctatgacctcctttannnnnnnnnnnnnnnnnnnnnnnnnnnnnnnnnnnnnnnnnnnnnnnnnnnnnnnnnnnntatgcatgaagatatttgccacagccttggttgtaataacaatatggaattaggtcaaatatttatcagtaagagactaagtcatattgtgcatatattgaaatatgtgataaaactaaatttactgacaa

SEQ ID NO: 34713 - DNA, 791 bp, Macaca Mulatta
gggtagctctaaaagatcctttttatccttttaaaattcagtcctaagaatgagtgcttgtcccctaacagtgtttaatggcaaggcagccttgtccgaaggacacctcctgcctaaaggagagtggtatttgcagactagaattctagtgctgctgaagatgaatcaatgggaaatactactcctgtaattcctacctccctgcaaccaactacaaccaagctctctgcatctactcccacgtacgggattcaagagagtaatgggtttcatatttcttatcaccacagtaagttcccactaggcaaaatgagagggcaatgtttcctttttggtacttattactgctaagtattttccagcacgtgaaaccttatttttccccaaagccagaaccagatgagtaaaggagtaagaacccttgcctgaacatccttccagctcacccatcactgtgtgttagttcccaacatcgaatgtgtaaaacttaagttggtcctgtacactcaggctttcactatttccttttaaaatgaggatgtttattttcaaggccctcagcatatttgtatagttgcttgcctgatataaatgccatattaatgcctttaaagtatgaatctatgccaaagatcccttggttgttttactaaagatttacttagagggaataaggaaaaatcatgtttggctctccccggttcttcccatgggttttaaaaacctgggtttaacactttatgcccggaagggctttttctcccaataatcagggctcaaaaaaacagggg

SEQ ID NO: 34714 - DNA, 626 bp, Macaca Mulatta
  misc_feature (1)...(626): n = A,T,C or G
tttttgcttaacattagatgtcatgaggaaactactgaactagcaattggttgtttaacacttctgtatgcatcagataacaaccgtgagtagcctatgaatgaaattcttttataaacataaataataggcataaattaaaatgtaaaactccattcatagtggattaatgcattttgctgcctttattagggtacttttattttgctcttcagaagtcagcctacataacacattttttaaagtccaaactgttaaaacaactctttaaaggataattatccaattaagaaaaaacctagtgctgattcacagcttattatccaattcaaaaataaattagaaaaatatatgcttacattttttcacttttgcnnnnnnnnnnnnnnnnnnnntttatttttaactcttggaagaggttttgtggttcccagtgtgtctgtcccacgctgatccttttcaatatagatttctttaaaccttgtactacttagtaaaaattgattacaattgagggaagtttgatagatcctttaaaaaaaaggcagatttccattntttgtattttaactactttactaaattaatactcctccttttacagaattagaaaagttaacatttat

SEQ ID NO: 34715 - DNA, 217 bp, Macaca Mulatta
aaaggtgaatttcataaatgtaatactagtaacgtgaatgaattactgagtttatactgaaatttagataacttctcctttagtcttgagtgcgagtcttgctttttaatcggtgccgtttatgttgctgcccgccctgtgtgcctggctcctctgggtgccttggtgtctgctgggggctggcagtaagcgcagtggaggagagtcgtgctgcagc

SEQ ID NO: 34716 - DNA, 723 bp, Macaca Mulatta
ttcacttgtaggtatctaggaaacaagctaagggaaataagacggaaacccgcttcaaccagctgccttgaacaatataagcagaaattattgggaccttctaaaggagcacctcttgcaaagaggagcaaatggtttgacaattgatgatgccagcgggctgggtaagaagctgggttgtgtgctttctggtgacactcctgggctcctccccatcccctatgtctctcaccgagggaaagaaaatccccgagggcactgccactgtgctgggaggcaccctggactgtgtacatctgaactttggtccatcctttgatgagtggttcgttagccacaaagagaaatatctgaaagacatcatgatgcttcttgcatattatccagattattgtatgaagttgtgtctataattattaccaatttttgttctttatttctcaaatggaaacaattgaaaaagcattctggagtgctgaatttttaagatgtatattttgttaagcatattctctaaatgagatattgtgtggctctttagtaacaatgtcatttctaatatgtgtgactcctttattatgtatgaacatcctttgacagtcctaattcagctctgtagtcttacacgctgcaggaactaagtgacagcagagagaaatgctttctaacctaatcactgcaggcggagacacttggaaaagaatggggggaggtggggcctgg

SEQ ID NO: 34717 - DNA, 3040 bp, Macaca Mulatta
  misc_feature (1)...(3040): n = A,T,C or G
aaagcgctgctgccgcggttgccgcaaccgggccagtcctggaccatggccgggccaccccccagcctcgcgcctcccgtctcgtcgccgccctaggcctgcgctgcgagnnnnnnnnnnnnnnnnnnnnnnnnnnnnnnnnnnnnnnnnnnnnnnnnnnnnnnnnnnnnnnnnnnnnnnnnnnnnnnnnnnnnnnnnnnnnnnnnnnnnnnnnnnnnnnnnnnnnnnnnnnnnnnnnnnnnnnnnnnnnnnnnnnnnnnnnnnnnnnnnnnnnnnnnnnnnnnnnnnnnnnnnnnnnnnnnnnnnnnnnnnnnnnnnnnnnnnnnnnnnnnnnnnnnnnnnnnnnnnnnnnnnnnnnnnnnnnnnnnnnnnnnnnnnnnnnnnnnnnnnnnnnnnnnnnnnnnnnnnnnnnnnnnnnnnnnnnnnnnnnnnnnnnnnnnnnnnnnnnnnnnnnnnnnnnnnnnnnnnnnnnnnnnnnnnnnnnnnnnnnnnnnnnnnnnnnnnnnnnnnnnnnnnnnnnnnnnnnnnnnnnnnnnnnnnnnnnnnnnnnnnnnnnnnnnnnnnnnnnnnnnnnnnnnnnnnnnnnnnnnnnnnnnnnnnnnnnnnnnnnnnnnnnnnnnnnnnnnnnnnnnnnnnnnnnnnnnnnnnnnnnnnnnnnnnnnnnnnnnnnnnnnnnnnnnnnnnnnnnnnnnnnnnnnnnnnnnnnnnnnnnnnnnnnnnnnnnnnnnnnnnnnnnnnnnnnnnnnnnnnnnnnnnnnnnnnnnnnnnnnnnnnnnnnnnnnnnnnnnnnnnnnnnnnnnnnnnnnnnnnnnnnnnnnnnnnnnnnnnnnnnnnnnnnnnnnnnnnnnnnnnnnnnnnnctggagcactgaggccaccttcagacctggacccgagccccctccgccatttcctcgccgccgggcctcggcaccccacgggcccctggacgtggcccccttcgcccggctgcacgagtgctatggccaggagatccgggccctgcgcggccagtggctcagcagccgggtccagccctgaggccaccagggcacctgttttagggggacgcaagctccacgccttctgggacaggccgggtcctggagagactgggggagctggtcctgagggaaatcatgggcaaagctggcctccagtccctgaatggcctggttttgggggatgcaggctctgagaaggtgctggattctgaatgggcctttaggaccatgtgattcagaaggcctacccttgagaggacgtcacacgtgacactaaagagaatccagggcctgagggggaggtttcctgagaactccggccccaggctggcctgagctgcctggcagaggcctttgctggcaacaggccttgctgggcctgcagctcagagggtcactgggactgaggnnnnnnnnnnnnnnnnnnnnnnnnnnnnnnnnnnnnnnnnnnnnnnnnnnnnnnnnnnnnnnnnnnnnnnnnnnnnnnnnnnnnnnnnnnnnnnnnnnnnnnnnnnnnnnnnnnnnnnnnnnnnnnnnnnnnnnnnnnnnnnnnnnnnnnnnnnnnnnnnnnnnnnnnnnnnnnnnnnnnnnnnnnnnnnnnnnnnnnnnnnnnnnnnnnnnnnnnnnnnnnnnnnnnnnnnnnnnnnnnnnnnnnnnnnnnnnnnnnnnnnnnnnnnnnnnnnnnnnnnnnnnnnnnnnnnnnnnnnnnnnnnnnnnnnnnnnnnnnnnnnnnnnnnnnnnnnnnnnnnnnnnnnnnnnnnnnnnnnnnnnnnnnnnnnnnnnnnnnnnnnnnnnnnnnnnnnnnnnnnnnnnnnnnnnnnnnnnnnnnnnnnnnnnnnnnnnnnnnnnnnnnnnnnnnnnnnnnnnnnnnnnnnnnnnnnnnnnnnnnnnnnnnnnnnnnnnnnnnnnnnnnnnnnnnnnnnnnnnnnnnnnnnnnnnnnnnnnnnnnnnnnnnnnnnnnnnnnnnnnnnnnnnnnnnnnnnnnnnnnnnnnnnnnnnnnnnnnnnnnnnnnnnnnnnnnnnnnnnnnnnnnnnnnnnnnnnnnnnnnnnnnnnnnnnnnnnnnnnnnnnnnnnnnnnnnnnnnnnnnnnnnnnnnnnnnnnnnnnnnnnnnnnnnnnnnnnnnnnnnnnnnnnnnnnnnnnnnnnnnnnnnnnnnnnnnnnnnnnnnnnnnnnnnnnnnnnnnnnnnnnnnnnnnnnnnnnnnnnnnnnnnnnnnnnnnnnnnnnnnnnnnnnnnnnnnnnnnnnnnnnnnnnnnnnnnnnnnnnnnnnnnnnnnnnnnnnnnnnnnnnnnnnnnnnnnnnnnnnnnnnnnnnnnnnnnnnnnnnnnnnnnnnnnnnnnnnnnnnnnnnnnnnnnnnnnnnnnnnnnnnnnnnnnnnnnnnnnnnnnnnnnnnnnnnnnnnnnnnnnnnnnnnnnnnnnnnnnnnnnnnnnnnnnnnnnnnnnnnnnnnnnnnnnnnnnnnnnnnnnnnnnnnnnnnnnnnnnnnnnnnnnnnnnnnnnnnnnnnnnnnnnnnnnnnnnnnnnnnnnnnnnnnnnnnnnnnnnnnnnnnnnnnnnnnnggaacagttgtcactgctcctggggagaggggcagcttgggctggagaagcacagccagagatggagcccctcgagagggatccttggctgcttcattgtcttccccccagcaagccctgctctcctccacaggcacctctggggtcttggtacggtccccgctcacctccttccagagtcctgagcggtgtgggtgggggtggcacaggatctggggcttgggaggggttcggagccgcccagagccccgtgtcctggcagactcagctggtggggtgaggtataaaaaccagtcctggcgtaggtttacagactctcaaggtacgctggccctggactcctgggagagaggggtgggggatgtcccctaccaaagcacaaggtggggtcaggctgcctcccaggttgggtgtcgggggagctttccggcagcctgggagggagatgcaagggctaaaataaaattttgtcaagta

SEQ ID NO: 34718 - DNA, 859 bp, Macaca Mulatta
gggggcctttttcctctcttaagcgcggggagcccacaacttgtgcgctctctttctgctgtttcccagctctcggatacagccgacaccatgggtttcggagacctgaaaagccccgccggcctccaggtgctcaacgattacctggcggacaagagctacatcgaggggtatgtgccatcacaagcagatgtggcagtatttgaagccgtgtccgggccaccgcctgctgacttgtgtcatgccctacgttggtataatcacatcaagtcctacgaaaaggaaaaggccagcctgccaggagtgaagaaagctttgggcaagtatggtcctgctgatgtggaagacactacaggaagtggagctacagatagtaaagatgatgatgatattgatctctttggatctgatgatgaggaggaaagtgaagaggctaagagactaagagaagaacgtcttgcacaatatggaatcaaagaaagccaaaaaacctgcacttgttgccaagtcttccatcttactagatgtgaaacccttggggatgatgagaacagataatgggcaaatattagagggagtgggttcataagaccatttcaagtccagaactggttttagttttggggggctcattctatatactaaatttccagttgggggataattggcgtttaatataaaaacttttaataaaacgtgggggtaaatttgtaaaatgattattaagttgtgggaatagaaattgtctgggaaggagacaaaattacctgggtattttgagggaaattatgtggcgcgtccaatggaattggggcctggctttttctaacgagtatataagatcccagtcttggaactt

SEQ ID NO: 34719 - DNA, 906 bp, Macaca Mulatta
  misc_feature (1)...(906): n = A,T,C or G
ggggcctttccgccatctttccgcgccgccacaatggtgcgcatgaatgtcctggctgatgctctcaagagcatcaacaatgccgaaaagagaggcaaacgccaggtgcttattaggccgtgctccaaagtcatcgtccggtttctcactgtaatgatgaagcatggttacattggcgaatttgaaatcattgatgatcacagagctgggaaaatcgttgtgaaccttacaggcaggctaaacaagtgtggagtgatcagccccagatttgatgtgcaactcaaagatctagaaaaatggcagaataacctgcttccatcccgccagtttggtttcattgtactgacaacctcagctggcatcatggaccatgaagaagcaagacgaaaacacacaggagggaaaatcctgggattctttttctagggatgtaatacatacatttacaaataaaatgcctcacgggaccgtataataaaaaagcttctccaacgaacaacggggaagaaaactcttggttcggggcgcagcacttaagtggcacctctcgcagaaaaaaaagcttttttnnnnnnntttaataaacccaatatacagttttttggggagcccggcggggggaccccaattattagggttacaagttgtgatacatattggggcataagaaactcgtttttccccctgagggaaagaattgtcttggggtttcatagaaacataattgcgccatgtggagataatctccccccccnnnnnnnnnnnnnnnnnnnnnnnccccctggggatgggggtaatcaagaaaacattttattttggggagaccaattttcccaaaagtgggtgagtttctttataagtggtcaatttgataagggggggataacttgaacgtgggtcgcgggc

SEQ ID NO: 34720 - DNA, 214 bp, Macaca Mulatta
  misc_feature (1)...(214): n = A,T,C or G
aggccacctacatttacatgaaggccgcctacctcagcatgtttggtaaggaggagtacaagccattcggggacgacgaagtggaattattngagctgtgccaggcctgaagctcaagattgctgggaaatctctacccacagagaagtttgccatccggaagtcccggcgctacctctcctccaaacctatctcgctgccagtgcctgctctg

SEQ ID NO: 34721 - DNA, 705 bp, Macaca Mulatta
gggggtggagcttttgaaatctgaggggaaaagactgtagtcagcccctagtggatgagagcacctatgccccagaaagagcaggctcccaggatggacacctcgccccctgaagaacgcttagagaagcaaaatgaaaaactgaacaaccaggaagaggagatggagtttaaggaactggacgatctgagggaagccttggcaaacctgcggggactgtcagaggaggagaggagcgagaaggctatgcttcgctcccgcattgaagatcagtcccagctcatctgcatcctgaagcggaggtcagatgaggccctggagcgctgccagatcctagagctgctcaatgcagagctggaggagaagatgatgcaggaggctgagaagctcaaggcccagggtgagtacactcggaaggtagaggaacgctttatgaccctagcagccaaccacgagttgatgatccgcttcaaggatgaaatacagagtgagaacattcaactgagggaggagaatgagaaactgaagctggagaatagcagcctcttcagcccagctctgaagaatgagaggcaaattattacagctcccagtccggtgtgaagctctccctggggagctaaaaccctgaaagagagggtgctcggatgctgccagcacggcccacaaaggactgctgactacaaacacggctggcccccacaa

SEQ ID NO: 34722 - DNA, 304 bp, Macaca Mulatta
cactattttaagttaactcatcagaaggtcttttttctttgggtcatgaatatttgaacatataatttgtagaaattttatactttgacctaaatgtgaatactgcaaaaataactagagaactaaagtgaaagctttgataccttttgattggtatttgcatagtcagtgactactatgtaacaagattgcctacacatgagaattttctgcttcacatccagggtctgttttaacgaatagctcacggctataacttcctagtcctattccattaattttacacaaataagaagaagtattg

SEQ ID NO: 34723 - DNA, 1699 bp, Macaca Mulatta
  misc_feature (1)...(1699): n = A,T,C or G
tagttgaacggcaataggagggcagtctctccgtctttttaaactcttttttaagtttcccctcccctttcatattttttttttcgccatttcttttagtattggactttggggtcgaaagcatttctttttatttgcttcttttaagccgagcacagtttaggtttcgtgctgtcttaagagaactatccagcagcttcttgctcatccttattgggagaactgcaccgttattttaaannnnnnnnnnnnnaaaaccttaagggagaaaggtannnnnnnnnnnnnnnnnnnnnnnnnnnnnnnnnnnnnnnnnnnnnnnnnnnnnnnnnnnnnnnnnnnnnnnnnnnnnnnnnnnnnnnnnnnnnnnnnnnnnnnnnnnnnnnnnnnnnnnnnnnnnnnnnnnnnnnnnnnnnnnnnnnnnnnnnnnnnnnnnnnnnnnnnnnnnnnnnnnnnnnnnnnnnnnnnnnnnnnnnnnnnnnnnnnnnnnnnnnnnnnnnnnnnnnnnnnnnnnnnnnnnnnnnnnnnnnnnnnnnnnnnnnnnnnnnnnnnnnnnnnnnnnnnnnnnnnnnnnnnnnnnnnnnnnnnnnnnnnnnnnnnnnnnnnnnnnnnnnnnnnnnnnnnnnnnnnnnnnnnnnnnnnnnnnnnnnnnnnnnnnnnnnnnnnnnnnnnnnnnnnnnnnnnnnnnnnnnnnnnnnnnnnnnnnnnnnnnnnnnnnnnnnnnnnnnnnnnnnnnnnnnnnnnnnnnnnnnnnnnnnnnnnnnnnnnnnnnnnnnnnnnnnnnnnnnnnnnnnnnnnnnnnnnnnnnnnnnnnnnnnnnnnnnnnnnnnnnnnnnnnnnnnnnnnnnnnnnnnnnnnnnnnnnnnnnnnnnnnnnnnnnnnnnnnnnnnnnnnnnnnnnnnnnnnnnnnnnnnnnnnnnnnnnnnnnnnnnnnnnnnnnnnnnnnnnnnnnnnnnnnnnnnnnnnnnnnnnnnnnnnnnnnnnnnnnnnnnnnnnnnnnnnnnnnnnnnnnnnnnnnnnnnnnnnnnnnnnnnnnnnnnnnnnnnnnnnnnnnnnnnnnnnnnnnnnnnnnnnnnnnnnnnnnnnnnnnnnnnnnnnnnnnnnnnnnnnnnnnnnnnnnnnnnnnnnnnnnnnnnnnnnnnnnntgacagtatcctgtggcaaatgtttgggccttttggagctgtcaccaacgtgaaggtcatccgtgactttaacaccaataaatgcaaaggttttggatttgtgactatgacaaactatgatgaggctgccatggcgatagctagcctcaatggataccgtctgggagacagagtactgcaggtctcctttaagacaaacaaaacgcacgaagcctaatgagctcttgtcctcagtccatttatatatgaaaactatacaacaaaggcaagttaagagaaactttatacattaataaatgtctttgtaagtcagtgttgagatggggataaaacgactacttagcatcctaagaaatatgtgagattttttattgctagtatttgaattaaaacttcttacatatcttttatgtttgaatatggacaagaggcacagggtttttacctgtcacattgcattctattgccttctttgaagaacgtggaccttttatagtgtatcagctaagggaagacatttcttttctttttacataactgccttgaacctgtga

SEQ ID NO: 34724 - DNA, 714 bp, Macaca Mulatta
ccctgcctggccttatctgaggacctgagaactgtgaaattgaggcatgggcagcaggatggggctggcgacccaggaagattggacttcagtgccatggtgctggctgcggagagcttcacctcagggcggcactactgggaggtggacgtggaaaaggcaaccaggtggcaagtgggcatattccacggctctgcagacacgaagggcagcacggccagagcttccggagagaaagtcttgctcacagggtcggtgatggggacggagtggaccctctgggtcttcccccctctgaaaaggcttttcctgaaaaagaagttggacacagttgggattttccttgactacgaacacgggcagatatcattctacaatgtgaccgagacgtccctcatttacagtttctcccattgcgccttccaaggagctctcaggcctgtgttttccctctgtatcccaaacggagacacaagtccagactccctcaccatctccccgcaacacggtccttcttgtgatgctgctgttagcccttaatcttctgtgtgcaaactccagcaccacaagagaccagaaagttggagaacaggacattgaaataatttttgtaaactaacccaataaaaagcattccgggagtcggagcctgatttaatatctggagccgttgcatttatgtaactgtcaacacaaatgtgtgtagtggaagaa

SEQ ID NO: 34725 - DNA, 347 bp, Macaca Mulatta
agtgagaggctcaactggctagcaggatcagactattcttggaagcttaaaatgatggatgataataataatcctagaggaacaaagtgaggagtgggtgaaagttcgacagaaaaaaacaggaatagctgaaaattatggagcttttctatttcacatattggtgtagtgcaaagtatgtaaatattgaataagagtagggtcagattcatcagggatttcccatatatactaagttttaaaggaggaaaagtacaaactaggggtatgcagcactggaattaaagttctgtgagaggcatacaagtagttttgtataaattggcaataaagagcaatgtcatgct

SEQ ID NO: 34726 - DNA, 317 bp, Macaca Mulatta
tatttcaaagtggttgcagtcaatttttaggaaaagcagactccgcaggtccaaccgctggcacataagaacggaacaaagatgaatcctcattcctataaaggtttgaacataattcagaaaatttaaacttcatgttagcagtctacatggtctttgaggcaagtcaagggtatttaattctgcaaagcagttctcaccagaagaacttaactcacaactagcattcctcagaggttgaaagttttggggtggtcggtctggaagcattcataaacataaccataaagttggccctactaaacatttcaactgct

SEQ ID NO: 34727 - DNA, 400 bp, Macaca Mulatta
gctcggcaagatgtcggtgaaggagggcgcacagcgcaagtgggcagcgctgaaggagaagctggggccacaggactcggaccccacagaggccaacctggagagcgcggaccctgagctgtgcatccggctgctccagatgccctctgtggtcaactactccggcctgcgcaagcgcctggagggcagcgacggcagctggatggtgcaattcctggagcagagcggcctggacctgctgctcgaggcgctggcgcggctgtcgggccgcggcgtggcacgcatataggatgccctgctgcagctcacctgcgtgagctgcgtgcgcgctgtcatgaactcgcggcagggcatcgagtacatcctcagcaaccagggctacgtgcgccagctctcccag

SEQ ID NO: 34728 - DNA, 2035 bp, Macaca Mulatta
  misc_feature (1)...(2035): n = A,T,C or G
atggcaaaaagtcttttgaagacatcctctctgtctggaaggacaaaattgctacatcaaacaggattgtcactttatagtacatcccatggattttatgaggaagaagtgaaaaaaaaacttcagcagtttcctggtggatccattgaccttcagaaagaagacagtggcattggcattcttnnnnnnnnnnnnnnnnnnnnnnnnnnnnnnnnnnnnnnnnnnnnnnnnnnnnnnnnnnnnnnnnnnnnnnnnnnnnnnnnnnnnnnnnnnnnnnnnnnnnnnnnnnnnnnnnnnnnnnnnnnnnnnnnnnnnnnnnnnnnnnnnnnnnnnnnnnnnnnnnnnnnnnnnnnnnnnnnnnnnnnnnnnnnnnnnnnnnnnnnnnnnnnnnnnnnnnnnnnnnnnnnnnnnnnnnnnnnnnnnnnnnnnnnnnnnnnnnnnnnnnnnnnnnnnnnnnnnnnnnnnnnnnnnnnnnnnnnnnnnnnnnnnnnnnnnnnnnnnnnnnnnnnnnnnnnnnnnnnnnnnnnnnnnnnnnnnnnnnnnnnnnnnnnnnnnnnnnnnnnnnnnnnnnnnnnnnnnnnnnnnnnnnnnnnnnnnnnnnnnnnnnnnnnnnnnnnnnnnnnnnnnnnnnnnnnnnnnnnnnnnnnnnnnnnnnnnnnnnnnnnnnnnnnnnnnnnnnnnnnnnnnnnnnnnnnnnnnnnnnnnnnnnnnnnnnnnnnnnnnnnnnnnnnnnnnnnnnnnnnnnnnnnnnnnnnnnnnnnnnnnnnnnnnnnnnnnnnnnnnnnnnnnnnnnnnnnnnnnnnnnnnnnnnnnnnnnnnnnnnnnnnnnnnnnnnnnnnnnnnnnnnnnnnnnnnnnnnnnnnnnnnnnnnnnnnnnnnnnnnnnnnnnnnnnnnnnnnnnnnnnnnnnnnnnnnnnnnnnnnnnnnnnnnnnnnnnnnnnnnnnnnnnnnnnnnnnnnnnnnnnnnnnnnnnnnnnnnnnnnnnnnnnnnnnnnnnnnnnnnnnnnnnnnnnnnnnnnnnnnnnnnnnnnnnnnnnnnnnnnnnnnnnnnnnnnnnnnnnnnnnnnnnnnnnnnnnnnnnnnnnnnnnnnnnnnnnnnnnnnnnnnnnnnnnnnnnnnnnnnnnnnnnnnnnnnnnnnnnnnnnnnnnnnnnnnnnnnnnnnnnnnnnnnnnnnnnnnnnnnnnnnnnnnnnnnnnnnnnnnnnnnnnnnnnnnnnnnnnnnnnnnnnnnnnnnnnnnnnnnnnnnnnnnnnnnnnnnnnnnnnnnnnnnnnnnnnnnnnnnnnnnnnnnnnnnnnnnnnnnnnnnnnnnnnnnnnnnnnnnnnnnnnnnnnnnnnnnnnnnnnnnnnnnnnnnnnnnnnnnnnnnnnnnnnnnnnnnnnnnnnnnnnnnnnnnnnnnnnnnnnnnnnnnnnnnnnnnnnnnnnnnnnnnnnnnnnnnnnnnnnnnnnnnnnnnnnnnnnnnnnnnnnnnnnnnnnnnnnnnnnnnnnnnnnnnnnnnnnnnnnnnnnnnnnnnnnnnnnnnnnnnnnnnnnnnnnnnnnnnnnnnnnnnnnnnnnnnnnnnnnnnnnnnnnnnnnnnnnnnnnnnnnnnnnnnnnnnnnnnnnnnnnnnnnnnnnnnnnnnnnnnnnnnnnnnnnnnnnnnnnnnnnnnnnnnnnnnnnnnnnnnnnnnnnnnnnnnnnnnnnnnnnnnnnnnnnnnnnnnnnnnnnnnnnnnnnnnnnnnnnnnnnnnnnnnnnnnnnnnnnnnnnnnnnnnnnnnnnnnnnnnnnnnnnnnnnnnnnnnnnnnnnnnnnnnnnnnnnnnnnnnnnnnnnnnnnnctactgtaacattcaattcacatttgagaatcatggtaaaaataacttgcatttgccttatacatgatcctactgttgagttcggaaaatatggttagacagactcacgttactttttntcagaggtaaattctagattactgtgtcaacctaatattttctatttggccatagatgtaaaatctaccaaataaaagtggattttgtggtctacaac

SEQ ID NO: 34729 - DNA, 134 bp, Macaca Mulatta
  misc_feature (1)...(134): n = A,T,C or G
aggatttcaaggaacagatcatccaccatgtggccaccatcatcctcatcagcttttcctggtttgccaattacatccgagctgggactctcatcatggctctgcatgactcttccgattacctgctggagnca

SEQ ID NO: 34730 - DNA, 275 bp, Macaca Mulatta
gccatagcagaagcaattgttcctgaattcttcacattcatctttgctgtatccatttagtgcttgggagagtccgaagataattcagtcactgtcagattaataattttgtcagaacaaagaacaccgttgtgaatatttaatcctttaaaattgtgatcttcagagcttgttctcagaatggcgcagacgaagccttaattgtgatagtgaacattaatggtcactttaaagagaaattataggccaaaatgaaatgaacagaaacctgtttg

SEQ ID NO: 34731 - DNA, 343 bp, Macaca Mulatta
cacatctatgcttttggtggagtccctttggcatcactgttttaaggatgattaaaaaaataacaactagggacaatacagaacctattccatttatctttctacagggctgacattgcggcacgttcttagagttaccacaccccatgagggaagctctaaatggccaacactcatctgtttttgtaaaaacagcatagctaatacatggacatgtctctgccttaactcttcctgactcccactctaggctattgtttgcatgtctacctacttttagcctttatgcaagaaaagaaaaaaatgaccatagaaaatgccacaatgaggtgcccaaatttca

SEQ ID NO: 34732 - DNA, 704 bp, Macaca Mulatta
tctctggtagaaaaacatccagtttttagccaaagcagattctcctattaagacttagcaggattaatttaatattcattcaaaaagggtgtttatatcgacactctgggctgcctctcctattcaggtattgggacatccctgttcctttctttccagactgactacaactcacatttcaaaacatcttttttatgcgttaataaaagaaccacatttatcttcagcaactctgattccctgccttcatttacatgatctccatacattctacctaaaacatttcagtagatccaaatcatctgtctgtttatccctattctctcacagtgtggaaatcgttaaaaaactaaaggaaaggctttcaaagtcacttaagagtctctccctccccacaaaatgcagaccttgtagatgagaaatgatgcttgcttaagatcctgcttgtgtcaccaaatttggaggtaatactgacttttccctacacgaaataggaagcaaaaagaactttgtctcccagtagacacagctggaaagctagtcccttgcttagcttctctaaggtcacagattccactttatttcattagactatttcttcatagagcattttcaggtaaaatgcatcctcagttccaaaaaaaaagggggttatctctcattgtggaaaaggtaatgtgttccttctctctgttattcaggtg

SEQ ID NO: 34733 - DNA, 883 bp, Macaca Mulatta
  misc_feature (1)...(883): n = A,T,C or G
cagggtcctgtcggtggtgctaatagagatatttctattctccagtgccacggggattgtgaccctttagttcccctgatgtttggttctcttacggttgaaaaactaaaaacattggtgaatccagtcaatgtgacctttaaaacctatgaaggtatgatgcacagttcgtgtcaacagnnnnnnnnnnnnnnnnnnnnnnnnnnnnnnnnnnnnnnnnnnnnnnnnnnnnnnnnnnnnnnnnnnnnnnnnnnnnnnnnnnnnnnnnnnnnnnnnnnnnnnnnnnnnnnnnnnnnnnnnnnnnnnnnnnnnnnnnnnnnnnnnnnnnnnnnnnnnnnnnnnnnnnnnnnnnnnnnnnnnnnnnnnnnnnnnnnnnnnnnnnnnnnnnnnnnnnnnnnnnnnnnnnnnnnnnnnnnnnnnnnnnnnnnnnnnnnnnnnnnnnnnnnnnnnnnnnnnnnnnnnnnnnnnnnnnnnnnnnnnnnnnnnnnnnnnnnnnnnnnnnnnnnnnnnnnnnnnnnnnnnnnnnnnnnnnnnnnnnnnnnnnnnnnnnnnnnnnnnnnnnnnnnnnnnnnnnnnnnnnnnnnnnnnnnnnnnnnnnnnnnnnnnnnnnnnnnnnnnnnnnnnnnnnnnnnnnnnnnnnnnnnnnnnnnnnnnnnnnnnnnnnnnnnnnnnnnnnnnnnnnnnnnnnnnnnnnnnnnnnnnnnnnnnnnnnnnnnnnnnnnnnnnnnnnnnaggtggtattacatatttcctaataataggggtaatgctgtttgttatcaagaaagagtaaaattttctctccaattaatggcccttttattttggggccaggcttttatttcccctgatattatttctatttaatactcttttctctcaa

SEQ ID NO: 34734 - DNA, 850 bp, Macaca Mulatta
  misc_feature (1)...(850): n = A,T,C or G
ggagtggcgagctaggaaccaatctatatacgattgaagatatgtagcaatatatggcccgcgattcgaaatccgaaatataaatctacccacataaccacaacacgccaaanncaaatccgtcgctccggaggtctaaatataacggaaggccagaaacaaaaatagaagaaaaaatcgacgggagaaaagacaacaaaaagaagataggattaacacaaaataaaaatattttatttataaaaaaacgtaaaaataattaaaaatatttcgcttagatattcataccaatannataaccaaaaaagtaacgcaatatcctacatgcagacactcaaaaaatanngggcaaaatacaccataaaaaaaaangagagtataggggaacaaaaaaagaaataaagnaacnnnnnnnnnnnnnnnnnnttgtgtcctataataaaaactttatttcaactagaaggtacaatctctcaggggtttcatagtttaaaaagctacaatcacatcaggttgtaactacataaaaaacagtgctgtaaatggaactgcttggctttgaccatacacatttctgcacagcccttacagaatctgcacaaagaagtatctccctttgctccagttaattgttcttgtacgtaagttgctttctattccagtatatccagagtggtgaaataacaaggccagccacgtagccaaaggtcgctccaagcgtacaggagatggtccatacctgccatggtctttcccaatccagcggaataggaagtgctccaagccatgctcctacaaaactagaaatggtnnnnncntgtcgcgtcatgtcccatatggatgaaactcc

SEQ ID NO: 34735 - DNA, 1020 bp, Macaca Mulatta
  misc_feature (1)...(1020): n = A,T,C or G
aggcctcgtgtgcttacgtgctgatcgtgactgctgtgtactgggtgtcggaggcagtgcctctgggagctgcagccctggtgccggccttcctctacccattcttcggagtcctccgatccaatgaggtnnnnnnnnnnnnnnnnnnnnnnnnnnnnnnnnnnnnnnnnnnnnnnnnnnnnnnnnnnnnnnnnnnnnnnnnnnnnnnnnnnnnnnnnnnnnnnnnnnnnnnnnnnnnnnnnnnnnnnnnnnnnnnnnnnnnnnnnnnnnnnnnnnnnnnnnnnnnnnnnnnnnnnnnnnnnnnnnnnnnnnnnnnnnnnnnnnnnnnnnnnnnnnnnnnnnnnnnnnnnnnnnnnnnnnnnnnnnnnnnnnnnnnnnnnnnnnnnnnnnnnnnnnnnnnnnnnnnnnnnnnnnnnnnnnnnnnnnnnnnnnnnnnnnnnnnnnnnnnnnnnnnnnnnnnnnnnnnnnnnnnnnnnnnnnnnnnnnnnnnnnnnnnnnnnnnnnnnnnnnnnnnnnnnnnnnnnnnnnnnnnnnnnnnnnnnnnnnnnnnnnnnnnnnnnnnnnnnnnnnnnnnnnnnnnnnnnnnnnnnnnnnnnnnnnnnnnnnnnnnnnnnnnnnnnnnnnnnnnnnnnnnnnnnnnnnnnnnnnnnnnnnnnnnnnnnnnnnnnnnnnnnnnnnnnnnnnnnnnnnnnnnnnnnnnnnnnnnnnnnnnnnnnnnnnnnnnnnnnnnnnnnnnnnnnnnnnnnnnnnnnnnnnnnnnnnnnnnnnnnnnnnnnnnnnnnnnnnnnnnnnnnnnnnnnnnnnnnnnnnnnnnnnnnnnnnnnnnnnnnnnnnnnnnnnnnnnnnnnnnnnnnnnnnnnnnnnnnnnnnnnnnnnnnnnnnnnnnnnnnnnnnnnnnnnnnnnnnnnnnnnnnnnnnnttttaaagagacctgctctctgagcaagaagaagaagaccaaaagggaacagttgtcagagaagaggatccaagaagaatatgaaaagctgggagacatta

SEQ ID NO: 34736 - DNA, 1714 bp, Macaca Mulatta
  misc_feature (1)...(1714): n = A,T,C or G
gaaagcccgcttatctaccattttatttactgacaactgtgaagtaacccatgaccagctgtgtgaattgcttaagtatgcagttctgggcaaatccaatgttccaaaacccagnnnnnnnnnnnnnnnnnnnnnnnnnnnnnnnnnnnnnnnnnnnnnnnnnnnnnnnnnnnnnnnnnnnnnnnnnnnnnnnnnnnnnnnnnnnnnnnnnnnnnnnnnnnnnnnnnnnnnnnnnnnnnnnnnnnnnnnnnnnnnnnnnnnnnnnnnnnnnnnnnnnnnnnnnnnnnnnnnnnnnnnnnnnnnnnnnnnnnnnnnnnnnnnnnnnnnnnnnnnnnnagggcctttaccttctaatgcaaaagccaccatcaaccttcagaatgaccccatcattcaaaagtatggctgtaagaaagtgggcttgaccagatgccttctgacaaaggaggaaatgagaacgtttcactttccattacaaggnnnnnnnnnnnnnnnnnnnnnnnnnnnnnnnnnnnnnnnnnnnnnnnnnnnnnnnnnnnnnnnnnnnnnnnnnnnnnnnnnnnnnnnnnnnnnnnnnnnnnnnnnnnnnnnnnnnnnnnnnnnnnnnnnnnnnnnnnnnnnnnnnnnnnnnnnnnnnnnnnnnnnnnnnnnnnnnnnnnnnnnnnnnnnnnnnnnnnnnnnnnnnnnnnnnnnnnnnnnnnnnnnnnnnnnnnnnnnnagcttttcaggaatcacgaagaagattcttaacccagtgacgaccaaactcaaagatgtacagaggcagttaaaagcactgcttcctcctgatgccgtgttagtgggccactccttagatttggatctcagagcactgaannnnnnnnnnnnnnnnnnnnnnnnnnnnnnnnnnnnnnnnnnnnnnnnnnnnnnnnnnnnnnnnnnnnnnnnnnnnnnnnnnnnnnnnnnnnnnnnnnnnnnnnnnnnnnnnnnnnnnnnnnnnnnnnnnnnnnnnnnnnnnnnnnnnnnnnnnnnnnnnnnnnnnnnnnnnnnnnnnnnnnnnnnnnnnnnnnnnnnnnnnnnnnnnnnnnnnnnnnnnnnnnnnnnnnnnnnnnnnnnnnnnnnnnnnnnnnnnnnnnnnnnnnnnnnnnnnnnnnnnnnnnnnnnnnnnnnnnnnnngtgttttagaatgcttggattcagtgggtcagaagcttctttttttgacccgggagacagatgctggtgaacttgcgtcttccagaaactgtcaaactataaagtgtctttcaaataaagaggtnnnnnnnnnnnnnnnnnnnnnnnnnnnnnnnnnnnnnnnnnnnnnnnnnnnnnnnnnnnnnnnnnnnnnnnnnnnnnnnnnnnnnnnnnnnnnnnnnnnnnnnnnnnnnnnnnnnnnnnnnnnnnnnnnnnnnnnnnnnnnnnnnnnnnnnnnnnnnnnnnnnnnnnnnnnnnnnnnnnnnnnnnnnnnnnnnnnnnnnnnnnnnnnnnnnnnnnnnnnnnnnnnnnnnnnnnnnnnncagcctcatctctgtatacagtatgaagtcctagaagcagcccagctggccatagagtccttggatggtattctggtagatggtacctgcatcaaggnnaggtgcagaggcctgtgacagagctcacgcttgattgtgagaccctcgtgaatgagctggaaggagattctgaaaaccaaggcactatatatctg

SEQ ID NO: 34737 - DNA, 3113 bp, Macaca Mulatta
  misc_feature (1)...(3113): n = A,T,C or G
agatacttgtatcatggcaatactaatccagaattggcttttgaaagtgccaagatcctctgttgtatctcttgcaactctaatattcagataaagttggttggagatttcacacatgaccanncagagtataagtcagaaactaatggctggatttgtggagtgtttggattgtgaagatgcagaagaatttgtacgtctggaagaggnnnnnnnnnnnnnnnnnnnnnnnnnnnnnnnnnnnnnnnnnnnnnnnnnnnnnnnnnnnnnnnnnnnnnnnnnnnnnnnnnnnnnnnnnnnnnnnnnnnnnnnnnnnnnnnnnnnnnnnnnnnnnnnnnnnnnnnnnnnnnnnnnnnnnnnnnnnnnnnnnnnnnnnnnnnnnnnnnnnnnnnnnnnnnnnnnnnnnnnnnnnnnnnnnnnnnnnnnnnnnnnnnnnnnnnnnnnnnnnnnnnnnnnnnnnnnnnnnnnnnnnnnnnnnnnnnnnnnnnnnnnnnnnnnnnnnnnnnnnnnnnnnnnnnnnnnnnnnnnnnnnnnnnnnnnnnnnnnnnnnnnnnnnnnnnnnnnnnnnnnnnnnnnnnnnnnnnnnnnnnnnnnnnnnnnnnnnnnnnnnnnnnnnnnnnnnnnnnnnnnnnnnnnnnnnnnnnnnnnnnnnnnnnnnnnnnnnnnnnnnnnnnnnnnnnnnnnnnnnnnnnnnnnnnnnnnnnnnnnnnnnnnnnnnnnnnnnnnnnnnnnnnnnnnnnnnnnnnnnnnnnnnnnnnnnnnnnnnnnnnnnnnnnnnnnnnnnnnnnnnnnnnnnnnnnnnnnnnnnnnnnnnnnnnnnnnnnnnnnnnnnnnnnnnnnnnnnnnnnnnnnnnnnnnnnnnnnnnnnnnnnnnnnnnnnnnnnnnnnnnnnnnnnnnnnnnnnnnnnnnnnnnnnnnnnnnnnnnnnnnnnnnnnnnnnnnnnnnnnnnnnnnnnnnnnnnnnnnnnnnnnnnnnnnnnnnnnnnnnnnngcttcttcatagggttcttgtagctgaagtaaatgcccttcagggtatggcagccataggacagagacctctactcatggaggnnnnnnnnnnnnnnnnnnnnnnnnnnnnnnnnnnnnnnnnnnnnnnnnnnnnnnnnnnnnnnnnnnnnnnnnnnnnnnnnnnnnnnnnnnnnnnnnnnnnnnnnnnnnnnnnnnnnnnnnnnnnnnnnnnnnnnnnnnnnnnnnnnnnnnnnnnnnnnnnnnnnnnnnnnnnnnnnnnnnnnnnnnnntaagatactggatgatgaagcagcgcaggagttaatgcctgtagtcgctggggcagtgttcacactgactgctcacctgagccaggccgtcctcaccgaacagaagcaaacatcagtcttgggaccagcagatgcccattacgcttttatgcttgatagttccttcacctcacctcctccagaagagaacccattagtgggttttgcttctattggagattcttcactttacatcatattgaagaaactgttagacttcattttgaagacagnnnnnnnnnnnnnnnnnnnnnnnnnnnnnnnnnnnnnnnnnnnnnnnnnnnnnnnnnnnnnnnnnnnnnnnnnnnnnnnnnnnnnnnnnnnnnnnnnnnnnnnnnnnnnnnnnnnnnnnnnnnnnnnnnnnnnnnnnnnnnnnnnnnnnnnnnnnnnnnnnnnnnnnnnnnnnnnnnnnnnnnnnnnnnnnnnnnnnnnnnnnnnnnnnnnnnnnnnnnnnnnnnnnnnnnnnnnnnnnnnnnnnnnnnnnnnnnnnnnnnnnnnnnnnnnnnnnnnnnnnnnnnnnnnnnnnnnnnnnnnnnnnnnnnnnnnnnnnnnnnnnnnnnnnnnnnnnnnnnnnnnnnnnnnnnnnnnnnnnnnnnnnnnnnnnnnnnnnnnnnnnnnnnnnnnnnnnnnnnnnnnnnnnnnnnnnnnnnnnnnnnnnnnnnnnnnnnnnnnnnnnnnnnnnnnnnnnnnnnnnnnnnnnnnnnnnnnnnnnnnnnnnnnnnnnnnnnnnnnnnnnnnnnnnnnnnnnnnnnnnnnnnnnnnnnnnnnnnnnnnnnnnnnnnnnnnnnnnnnnnnnnnnnnnnnnnnnnnnnnnnnnnnnnnnnnnnnnnnnnnnnnnnnnnnnnnnnnnnnnnnnnnnnnnnnnnnnnnnnnnnnnnnnnnnnnnnnnnnnnnnnnnnnnnnnnnnnnnnnnnnnnnnnnnnnnnnnnnnnnnnnnnnnnnnnnnnnnnnnnnnnnnnnnnnnnnnnnnnnnnnnnnnnnnnnnnnnnnnnnnnnnnnnnnnnnnnnnnnnnnnnnnnnnnnnnnnnnnnnnnnnnnnnnnnnnnnnnnnnnnnnnnnnnnnnnnnnnnnnnnnnnnnnnnnnnnnnnnnnnnnnnnnnnnnnnnnnnnnnnnnnnnnnnnnnnnnnnnnnnnnnnnnnnnnnnnnnnnnnnnnnnnnnnnnnnnnnnnnnnnnnnnnnnnnnnnnnnnnnnnnnnnnnnnnnnnnnnnnnnnnnnnnnnnnnnnnnnnnnnnnnnnnnnnnnnnnnnnnnnnnnnnnnnnnnagatttgtgccaatgtaatggaatattgccagtcactcatgttacagagttctcctactttccagcatgctgtgtgtctcttcactcctagcctttcagaaacagttaacagagatggaccgcggcaagnnnnnnnnnnnnnnnnnnnnnnnnnnnnnnnnnnnnnnnnnnnnnnnnnnnnnnnnnnnnnnnnnnnnnnnnnnnnnnnnnnnnnnnnnnnnnnnnnnnnnnnnnnnnnnnnnnnnnnnnnnnnnnnnnnnnnnnnnnnnnnnnnnnnnnnnnnnnnnnnnnnnnnnnnnnnnnnnnnnnnnnnnnnnnnnnnnnnnnnnnnnnnnnnnnnnnnnnnnnnnnnnnnnnnnnnnnnnnnnnnnnnnnnnnnnnnnnnnnnnnnnnnnnnnnnnnnnnnnnnnnnnnnnnnnntatcatagagacctgcctatttattctttggcgccatctggagtactacttgttacattgcatgcccacggattctcaagattccttatttgcctcgagaaccttgtttaaaagcagaagactgcaag

SEQ ID NO: 34738 - DNA, 2814 bp, Macaca Mulatta
  misc_feature (1)...(2814): n = A,T,C or G
tctacgaggagttcaagctgcatcttccagcctgcgtgacagagaaccatcacctgctgttcaccttctaccacgtcagctgccagccccggccgggcactgccctggagacgcccgtgggctttnnnggatcccactgctgcagcatgggcgcctgaggaccggccccttctgtctcccagtgtccgtggaccagccgccgcccagctattccgtgctcacacccgatgtnnnnnnnnnnnnnnnnnnnnnnnnnnnnnnnnnnnnnnnnnnnnnnnnnnnnnnnnnnnnnnnnnnnnnnnnnnnnnnnncccaggacccccacctggacaagttcttcaccctggtgcatgtcctggaggagggggccttcccattccggctcaaggacgctgtgctgagcgagggcaacgtggagcaggagctgcgggccagtcttgcagcactgcgcctggccagccccgaacccctcgtggccttctcccaccacgtgctggacaagctcgtgcgtctggtcgtcaggcccccgatcatcagtggccagattnnnnnnnnnnnnnnnnnnnnnnnnnnnnnnnnnnnnnnnnnnnnnnnnnnnnnnnnnnnnnnnnnnnnnnnnnnnnnnnnnnnnnnnnnnnnnnnnnnnnnnnnnnnnnnnnnnnnnnnnnnnnnnnnnnnnnnnnnnnnnnnnnnnnnnnnnnnnnnnnnnnnnnnnnnnnnnnnnnnnnnnnnnnnnnnnnnnnnnnnnnnnnnnnnnnnnnnnnnnnnnnnnnnnnnnnnnnnnnnnnnnnnnnnnnnnnnnnnnnnnnnnnnnnnnnnnnnnnnnnnnnnnnnnnnnnnnnnnnnnnnnnnnnnnnnnnnnnnnnnnnnnnnnnnnnnnnnnnnnnnnnnnnnnnnnnnnnnnnnnnnnnnnnnnnnnnnnnnnnnnnnnnnnnnnnnnnnnnnnnnnnnnnnnnnnnnnnnnnnnnnnnnnnnnnnnnnnnnnnnnnnnnnnnnnnnnnnnnnnnnnnnnnnnnnnnnnnnnnnnnnnnnnnnnnnnnnnnnnnnnnnnnnnnnnnnnnnnnnnnnnnnnnnnnnnnnnnnnnnnnnnnnnnnnnnnnnnnnnnnnggatgtggagctggccgagcgcctcaacgccagcctggccttcttcctcagtgaccttctgtccctggtggaccggggctttgtcttcagcctggtccgggcccactacaagcaggtngcaggtggccacgcggctccagtcgtcccctaatccagcggccctgctgaccctgcgcatggaattcactcgcatcctatgcagccacgagcactacgtgnaccctcaacctnnnnnnnnnnnnnnnnnnnnnnnnnnnnnnnnnnnnnnnnnnnnnnnnnnnnnnnnnnnnnnnnnnnnnnnnnnnnnnnnnnnnnnnnnnnnnnnnnnnnnnnnnnnnnnnnnnnnnnnnnnnnnnnnnnnnnnnnnnnnnnnnnnnnnnnnnnnnnnnnnnnnnnnnnnnnnnnnnnnnnnnnnnnnnnnnnnnnnnnnnnnnnnnnnnnnnnnnnnnnnnnnnnnnnnnnnnnnnnnnnnnnnnnnnnnnnnnnnnnnnnnnnnnnnnnnnnnnnnnnnnnnnnnnnnnnnnnnnnnnnnnnnnnnnnnnnnnnnnnnnnnnnnnnnnnnnnnnnnnnnnnnnnnnnnnnnnnnnnnnnnnnnnnnnnnnngagggtccaggtcagcggtcaagactggcctcaatgcttgactcagacacagaaggcgaaggggacattgcgggtaccatcaacccctctgtggccatggccattgctggtggccccctagcccctggctcccgggccaagcgtctcccaggggccgccaacgnnnnnnnnnnnnnnnnnnnnnnnnnnnnnnnnnnnnnnnnnnnnnnnnnnnnnnnnnnnnnnnnnnnnnnnnnnnnnnnnnnnnnnnnnnnnnnnnnnnnnnnnnnnnnnnnnnnnnnnnnnnnnnnnnnnnnnnnnnnnnnnnnnnnnnnnnnnnnnnnnnnnnnnnnnnnnnnnnnnnnnnnnnnnnnnnnnnnnnnnnnnnnnnnnnnnnnnnnnnnnnnnnnnnnnnnnnnnnnnnnnnnnnnnnnnnnnnnnnnnnnnnnnnnnnnnnnnnnnnnnnnnnnnnnnnnnnnnnnnnnnnnnnnnnnnnnnnnnnnnnnnnnnnnnnnnnnnnnnnnnnnnnnnnnnnnnnnnnnnnnnnnnnnnnnnnnnnnnnnnnnnnnnnnnnnnnnnnnnnnnnnnnnnnnnnnnnnnnnnnnnnnnnnnnnnnnnnnnnnnnnnnnnnnnnnnnnnnnnnnnnnnnnnnnnnnnnnnnnnnnnnnnnnnnnnnnnnnnnnnnnnnnnnnnnnnnnnnnnnnnnnnnnnnnnnnnnnnnnnnnnnnnnnnnnnnnnnnnnnnnnnnnnnnnnnnnnnnnnnnnnnnnnnnnnnnnnnnnnnnnnnnnnnnnnnnnnnnnnnnnnnnnnnnnnnnnnnnnnnnnnnnnnnnnnnnnnnnnnnnnnnnnnnnnnnnnnnnnnnnnnnnnnnnnnnnnnnnnnnnnnnnnnnnnnnnnnnnnnnnnnnnnnnnnnnnnnnnnnnnnnnnnnnnnnnnnnnnnnnnnnnnnnnnnnnnnnnnnnnnaactttgcccgtgtgaagatgcaggtcaccatgtctctctcgtccctggtggggacaacacagaacttcagtgaagagtacctgcgacgttcactcaaaaccatcctcacctatgctgaggaggacgtggggctgcgggacagcaccttcgcggagcagg

SEQ ID NO: 34739 - DNA, 800 bp, Macaca Mulatta
ggatccagtcagttcctgtggatgaagttcttgatacagagggaagcattcagaacttttttagaaaatatgcaccaagtgagaatgggccaaatgggattagtgctgaggtcatggacacttacgttaaaagctgtgctggatattgcgtgatcacgtatatacttggagttggagacaggcacttggataaccttttgctaacaaaaacaggcaaactcttccacatagactttggatatattttgggtcgggatccgaagcctcttcctccaccaatgaagctgaataaagaaatggtagaaggaatggggggcacacagagtgagcagtaccaagagttccgtaaacagtgttacacggctttcctccacctgcgaaggtattctaatctgattttgaacttgttttccttgatggttgatgcaaacattccagatattgcacttgaaccagataaaactgtgaaaaaggttcaggataaattccgtttagacctgtcggatgaagaggctgtgcattacatgcagagtctgatcgatgagagcgtccatgctctttttgctgcagtggtggaacagattcacaagtttgcccagtactggagaaaatgaaactgggagtgacgcatcaagatgcttggctcaataagaaaccacgttaggggcaacctatgtatattggagacttaagagtaaccagcaaggaaagagaaaacttaatcctcaagttatcatattttccagatattacatggtacctgaaatctacttccttggatgtcattgctttagaatagg

SEQ ID NO: 34740 - DNA, 150 bp, Macaca Mulatta
gttccaatgacaggatttacacagagagcaactatcgatccagaactgaatgaaatacatgtcttatctggactcagcaaagataaggaaaagagggaagaaaatgttagaaattcattctggatttatgacattgtgaggaatagttgg

SEQ ID NO: 34741 - DNA, 4814 bp, Macaca Mulatta
  misc_feature (1)...(4814): n = A,T,C or G
gaaataagcggattttgaaaacaaaaaaaagaaggagtggaagagggggccaggatccaggcctccatccccacagaagtgaagctacagctgggaggtctcctcccaccccaaccgtcaccctgggtcaagactgcccacctccnnnnnnnnnnnnnnnnnnnnnnnnnnnnnnnnnaacaactccaagcacaccggccataagagcgcgtgtgtccccaacatgaccgaacgaagaagggatgagctctctgaagagatcaacaacctaagagagaaggtcattaagcagtccgaggagaacagcaacctgcagaaccaggtgcagaagctcacagaggagaacaccacccttcgagagcaagtggaacccacccctgaggatgatgatgatgacatcgagctccgcggtgctgcagcagctgctgccccaccccctccaatagaggaagagtgcccagaagaccttccagagaagttcgatggcaacccagacatgctggctcctttcatggcccagtgccagatcttcatggaaaagagcaccagagatttctcagttgatcgtgtccgtgtctgtttcgtgacaagcatgatgaccggccgtgctgcccgctgggcctcagcaaagctggagcgctcccactacctgatgcacaactacccagctttcatgatggaaatgaagcatgtctttgaagaccctcagaggcgagaggctgccaaacgcaagatcagacgcctgcgccaaggcatggggtctgtcatcgactattccaatgctttccagatgattgcccaggacctggattggaacgagcctgcgctgattgaccagtaacaggagggcctcagcgaccacattcaggaggagctctcccaacgcgaggtcgccaagtcgctgtnnnnnnnnnnnnnnnnnnnnnnnnnnnnnnnnnnnnnnnnnnnnnnnnnnnnnnnnnnnnnnnnnnnnnnnnnnnnnnnnnnnnnnnnnnnnnnnnnnnnnnnnnnnnnnnnnnnnnnnnnnnnnnnnnnnnnnnnnnnnnnnnnnnnnnnnnnnnnnnnnnnnnnnnnnnnnnnnnnnnnnnnnnnnnnnnnnnnnnnnnnnnnnnnnnnnnnnnnnnnnnnnnnnnnnnnnnnnnnnnnnnnnnnnnnnnnnnnnnnnnnnnnnnnnnnnnnnnnnnnnnnnnnnnnnnnnnnnnnnnnnnnnnnnnnnnnnnnnnnnnnnnnnnnnnnnnnnnnnnnnnnnnnnnnnnnnnnnnnnnnnnnnnnnnnnnnnnnnnnnnnnnnnnnnnnnnnnnnnnnnnnnnnnnnnnnnnnnnnnnnnnnnnnnnnnnnnnnnnnnnnnnnnnnnnnnnnnnnnnnnnnnnnnnnnnnnnnnnnnnnnnnnnnnnnnnnnnnnnnnnnnnnnnnnnnnnnnnnnnnnnnnnnnnnnnnnnnnnnnnnnnnnnnnnnnnnnnnnnnnnnnnnnnnnnnnnnnnnnnnnnnnnnnnnnnnnnnnnnnnnnnnnnnnnnnnnnnnnnnnnnnnnnnnnnnnnnnnnnnnnnnnnnnnnnnnnnnnnnnnnnnnnnnnnnnnnnnnnnnnnnnnnnnnnnnnnnnnnnnnnnnnnnnnnnnnnnnnnnnnnnnnnnnnnnnnnnnnnnnnnnnnnnnnnnnnnnnnnnnnnnnnnnnnnnnnnnnnnnnnnnnnnnnnnnnnnnnnnnnnnnnnnnnnnnnnnnnnnnnnnnnnnnnnnnnnnnnnnnnnnnnnnnnnnnnnnnnnnnnnnnnnnnnnnnnnnnnnnnnnnnnnnnnnnnnnnnnnnnnnnnnnnnnnnnnnnnnnnnnnnnnnnnnnnnnnnnnnnnnnnnnnnnnnnnnnnnnnnnnnnnnnnnnnnnnnnnnnnnnnnnnnnnnnnnnnnnnnnnnnnnnnnnnnnnnnnnnnnnnnnnnnnnnnnnnnnnnnnnnnnnnnnnnnnnnnnnnnnnnnnnnnnnnnnnnnnnnnnnnnnnnnnnnnnnnnnnnnnnnnnnnnnnnnnnnnnnnnnnnnnnnnnnnnnnnnnnnnnnnnnnnnnnnnnnnnnnnnnnnnnnnnnnnnnnnnnnnnnnnnnnnnnnnnnnnnnnnnnnnnnnnnnnnnnnnnnnnnnnnnnnnnnnnnnnnnnnnnnnnnnnnnnnnnnnnnnnnnnnnnnnnnnnnnnnnnnnnnnnnnnnnnnnnnnnnnnnnnnnnnnnnnnnnnnnnnnnnnnnnnnnnnnnnnnnnnnnnnnnnnnnnnnnnnnnnnnnnnnnnnnnnnnnnnnnnnnnnnnnnnnnnnnnnnnnnnnnnnnnnnnnnnnnnnnnnnnnnnnnnnnnnnnnnnnnnnnnnnnnnnnnnnnnnnnnnnnnnnnnnnnnnnnnnnnnnnnnnnnnnnnnnnnnnnnnnnnnnnnnnnnnnnnnnnnnnnnnnnnnnnnnnnnnnnnnnnnnnnnnnnnnnnnnnnnnnnnnnnnnnnnnnnnnnnnnnnnnnnnnnnnnnnnnnnnnnnnnnnnnnnnnnnnnnnnnnnnnnnnnnnnnnnnnnnnnnnnnnnnnnnnnnnnnnnnnnnnnnnnnnnnnnnnnnnnnnnnnnnnnnnnnnnnnnnnnnnnnnnnnnnnnnnnnnnnnnnnnnnnnnnnnnnnnnnnnnnnnnnnnnnnnnnnnnnnnnnnnnnnnnnnnnnnnnnnnnnnnnnnnnnnnnnnnnnnnnnnnnnnnnnnnnnnnnnnnnnnnnnnnnnnnnnnnnnnnnnnnnnnnnnnnnnnnnnnnnnnnnnnnnnnnnnnnnnnnnnnnnnnnnnnnnnnnnnnnnnnnnnnnnnnnnnnnnnnnnnnnnnnnnnnnnnnnnnnnnnnnnnnnnnnnnnnnnnnnnnnnnnnnnnnnnnnnnnnnnnnnnnnnnnnnnnnnnnnnnnnnnnnnnnnnnnnnnnnnnnnnnnnnnnnnnnnnnnnnnnnnnnnnnnnnnnnnnnnnnnnnnnnnnnnnnnnnnnnnnnnnnnnnnnnnnnnnnnnnnnnnnnnnnnnnnnnnnnnnnnnnnnnnnnnnnnnnnnnnnnnnnnnnnnnnnnnnnnnnnnnnnnnnnnnnnnnnnnnnnnnnnnnnnnnnnnnnnnnnnnnnnnnnnnnnnnnnnnnnnnnnnnnnnnnnnnnnnnnnnnnnnnnnnnnnnnnnnnnnnnnnnnnnnnnnnnnnnnnnnnnnnnnnnnnnnnnnnnnnnnnnnnnnnnnnnnnnnnnnnnnnnnnnnnnnnnnnnnnnnnnnnnnnnnnnnnnnnnnnnnnnnnnnnnnnnnnnnnnnnnnnnnnnnnnnnnnnnnnnnnnnnnnnnnnnnnnnnnnnnnnnnnnnnnnnnnnnnnnnnnnnnnnnnnnnnnnnnnnnnnnnnnnnnnnnnnnnnnnnnnnnnnnnnnnnnnnnnnnnnnnnnnnnnnnnnnnnnnnnnnnnnnnnnnnnnnnnnnnnnnnnnnnnnnnnnnnnnnnnnnnnnnnnnnnnnnnnnnnnnnnnnnnnnnnnnnnnnnnnnnnnnnnnnnnnnnnnnnnnnnnnnnnnnnnnnnnnnnnnnnnnnnnnnnnnnnnnnnnnnnnnnnnnnnnnnnnnnnnnnnnnnnnnnnnnnnnnnnnnnnnnnnnnnnnnnnnnnnnnnnnnnnnnnnnnnnnnnnnnnnnnnnnnnnnnnnnnnnnnnnnnnnnnnnnnnnnnnnnnnnnnnnnnnnnnnnnnnnnnnnnnnnnnnnnnnnnnnnnnnnnnnnnnnnnnnnnnnnnnnnnnnnnnnnnnnnnnnnnnnnnnnnnnnnnnnnnnnnnnnnnnnnnnnnnnnnnnnnnnnnnnnnnnnnnnnnnnnnnnnnnnnnnnnnnnnnnnnnnnnnnnnnnnnnnnnnnnnnnnnnnnnnnnnnnnnnnnnnnnnnnnnnnnnnnnnnnnnnnnnnnnnnnnnnnnnnnnnnnnnnnnnnnnnnnnnnnnnnnnnnnnnnnnnnnnnnnnnnnnnnnnnnnnnnnnnnnnnnnnnnnnnnnnnnnnnnnnnnnnnnnnnnnnnnnnnnnnnnnnnnnnnnnnnnnnnnnnnnnnnnnnnnnnnnnnnnnnnnnnnnnnnnnnnnnnnnnnnnnnnnnnnnnnnnnnnnnnnnnnnnnnnnnnnnnnnnnnnnnnnnnnnnnnnnnnnnnnnnnnnnnnnnnnnnnnnnnnnnnnnnnnnnnnnnnnnnnnnnnnnnnnnnnnnnnnnnnnnnnnnnnnnnnnnnnnnnnnnnnnnnnnnnnnnnnnnnnnnnnnnnnnnnnnnnnnnnnnnnnnnnnnnnnnnnnnnnnnnnnnnnnnnnnnnnnnnnnnnnnnnnnnnnnnnnnnnnnnnnnnnnnnnnnnnnnnnnnnnnnnnnnnnnnnnnnnnnnnnnnnnnnnnnnnnnnnnnnnnnnnnnnnnnnnnnnnnnnnnnnnnnnnnnnnnnnnnnnnnnnnnnnnnnnnnnnnnnnnnnnnnnnnnnnnnnnnnnnnnnnnnnnnnnnnnnnnnnnnnnnnnnnnnnnnnnnnnnnnnnnnnnnnnnnnnnnnnnnnnnnnnnnnnnnnnnnnnnnnnnnnttagagtaattactttccaaatggtgcatttgtgcttctgaactattttgaagcgtcacttctgtttacctcaagtatcaattcatcctccatacctttgaattcaagttgttttgtgtcaaatttacagttgtcaattgatcttcaagctgcagggtgcctagaaatgggccgttgtctgtagccctggcatgtgcacacggacatttgccaccactgcaagcaaaagtctggaaaagttccccaacgacaaaaatgatcagggagaatatgctgctg

SEQ ID NO: 34742 - DNA, 198 bp, Macaca Mulatta
gttgggaggcagtccctgttagctaaaagcccattaagacaagaaacacaggaagccccaggtcccatataagaagcaaagggccaggtagaggccagaagggagtctttggatcctgtccaagagcctgggggccaggcagaggctgaaggagatgttccggggcccagaggggaagctgggggccaggcagaggcc

SEQ ID NO: 34743 - DNA, 773 bp, Macaca Mulatta
gggttaacacatcagttatgaatttcagggaattcatctcgccagattcttgataacatgccattcattgcccttaggggattgaccctatcttcttatatggctcaaataaaactagtgtgctgttgtatgaatcttttactgactacaccgtccaactaaaaaaagataacggggcagctttaaaccaaagatcatgtttagaacaatgaaaaattatttgttgtatctaatacttgcctgtatcatgaaaagcttcattcagcaatgatgtaataatttttaacttccaggaaataatctgtgaatggaaagattttttcaagattttgagatagtatttagtctcatgttgggaacacaagaatgtgatgaacatagtgaatactaaagaaaactcttcagactttcagaatgatggtttagaatttaaatttttaatctttactgatttctttttttcagtatgaaaatagcactttaccaaaagattagccctgaaaagggttattttgccagttgcatttgatttcttttgtatttgcaatgtaatgagtccttttatttcttccgtatttgcagtgtaatgagttttgtgggcaaactgtattaagcaatttttcattatcctgaagttccataaagtggagaaaatttatattctcacatgcatttttaaggccttttgttatgtgaaaaatagatgtattttctgatgcatttgggttataaaatactaaatctgaaaaattttcatgtttcccttggcaaaa

SEQ ID NO: 34744 - DNA, 212 bp, Macaca Mulatta
tgcagcactcccagtagaccaggagctccaggaggcagggccggccccacgtcctctgtgcgccaccctgagttggatcctctgtgcgccacccctgagttggatccagggctagctgctgttctcctccccactctcacgctgccctcctgcctgcagccatgacgcccctgctcaccctgttcctggtggtcctcatgggcttacctctg

SEQ ID NO: 34745 - DNA, 608 bp, Macaca Mulatta
  misc_feature (1)...(608): n = A,T,C or G
actttcaggagcctcaacacgagagctcaacactgcctctgatacaaccctctgaggcccataggtctgtcctgccacaggccaccacacagggagatgctggctgagggtcacttgcttgctctgtgccccatgaggcagcacctgccccagatggacggggctgtgaggggtatctccaggcacaaagcctgaacacaggaagcctatgaccatggcannnnnnnnnnnnnnngcatgtgtgcgtgtgtggcttgttttctgacagctatgagtgtgtgtgagcagggtaaaggtacgtgaggggtctgagagaagtgggtgcttgtcccccaaacctgcatgaagcaagcacaactcctagccaggcactgtcctccccatgtacccctgcatccccagcctcaacccagggacacgcatggctcacaggagacagggctcaggctgctggagctctgaccaaactctgccccacttcatgcacagattgccctgggcaaaggtgttcacctttccaagccttgatttccttatctgtaaagcagagcgacaccagcaagcctgtgagcattgtgtgtgtagcagacatggaagtcctgcagcag

SEQ ID NO: 34746 - DNA, 615 bp, Macaca Mulatta
ctgctgaggcaggatggagctggtgggggatgcaggggtggactggcgctccctggtgaccttgtaccaaagcccaagccccagtgggtggcaaggccccagcagaaactggctgggaatggggcgcctggaagggtgagggtcgtttgaccagcagcagcaagccagggggtctggggcacagggagcgcgtttattcagcaggacggggcggcggaggccgcccgtgagggctagtcctggaagcggttgagcagctcgcaggcctgcttctccagcagctccaagattttcttgacgcgcttctcgctggcggcgcggacgtagctgctggcgtccagcacggccacaccatcgcgcacctcgcccatgatgaccagaggcccatcgcccgccgtcatgttggggcaggggcaggcccagtccatgccactcagcgtcacctctaggtacttggtgcccaagaacttgaggcccatcttgtcatccttgagcacatcctcgagcgccacgcgggcgatgccgccggcagcctcgggctcctccagcacctccgtgagccggcccacgatggcgaagtcgctgcggcacaggctcagcgccagcttgctccgg

SEQ ID NO: 34747 - DNA, 584 bp, Macaca Mulatta
ctgcagacagtgggccatcccatgccgaacctacactgtggctgtttatttcaagggagaaagaataggctgtgggaaaggaccaagtattcagcaagcggaaatgggagcagcaatggatgcccttgaaaaatataattttccccagatggcccatcagaagcggttcatcgaacggaagtacagacaagagttaaaagaaatgaggtgggaaagagagcatcaagagagagagccagatgagactgaagacgtcaagaaataaaggagggcatgcaagtgtggagtatttacttgctcagtactgtgactgttgtctgttgagacctagcctagttttcctacagacaatgaatgaagtgtgctcattgaaataaaatacaagtcaaattgctgttgttttaatgatctgtttttagctggatggtctttattacaaaggattagatttttcttctatttaatggaaaactcgactttggtgaatgtgcattacttccttttgttttgctctttaaataataaaattcaagaagcatattctatgtggaatagatcctgttttgtccatctctgtcccagat

SEQ ID NO: 34748 - DNA, 1589 bp, Macaca Mulatta
  misc_feature (1)...(1589): n = A,T,C or G
gtgattttgcaaggtcaacctgagatgctcttgagtatcaaagctcatgtggttgagcagattattgaattattaaacgtgagtagagacagaaggctggaatgcatacattttggtcctgttttcttcggatcatcaaaaattaaacatgcacgtatacacaataatagcccagagcccataaattgggtggccataatacaagatgatgccgtgggagaagaannnnnnnnnnnnnnnnnnnnnnnnnnnnnnnnnnnnnnnnnnnnnnnnnnnnnnnnnnnnnnnnnnnnnnnnnnnnnnnnnnnnnnnnnnnnnnnnnnnnnnnnnnnnnnnnnnnnnnnnnnnnnnnnnnnnnnnnnnnnnnnnnnnnnnnnnnnnnnnnnnnnnnnnnnnnnnnnnnnnnnnnnnnnnnnnnnnnnnnnnnnnnnnnnnnnnnnnnnnnnnnnnnnnnnnnnnnnnnnnnnnnnnnnnnnnnnnnnnnnnnnnnnnnnnnnnnnnnnnnnnnnnnnnnnnnnnnnnnnnnnnnnnnnnnnnnnnnnnnnnnnnnnnnnnnnnnnnnnnnnnnnnnnnnnnnnnnnnnnnnnnnnnnnnnnnnnnnnnnnnnnnnnnnnnnnnnnnnnnnnnnnnnnnnnnnnnnnnnnnnnnnnnnnnnnnnnnnnnnnnnnnnnnnnnnnnnnnnnnnnnnnnnnnnnnnnnnnnnnnnnnnnnnnnnnnnnnnnnnnnnnnnnnnnnnnnnnnnnnnnnnnnnnnnnnnnnnnnnnnnnnnnnnnnnnnnnnnnnnnnnnnnnnnnnnnnnnnnnnnnnnnnnnnnnnnnnnnnnnnnnnnnnnnnnnnnnnnnnnnnnnnnnnnnnnnnnnnnnnnnnnnnnnnnnnnnnnnnnnnnnnnnnnnnnnnnnnnnnnnnnnnnnnnnnnnnnnnnnnnnnnnnnnnnnnnnnnnnnnnnnnnnnnnnnnnnnnnnnnnnnnnnnnnnnnnnnnnnnnnnnnnnnnnnnnnnnnnnnnnnnnnnnnnnnnnnnnnnnnnnnnnnnnnnnnnnnnnnnnnnnnnnnnnnnnnnnnnnnnnnnnnnnnnnnnnnnnnnnnnnnnnnnnnnnnnnnnnnnnnnnnnnnnnnnnnnnnnnnnnnnnnnnnnnnnnnnnnnnnnnnnnnnnnnnnnnnnnnnnnnnnnnnnnnnnnnnnnnnnnnnnnnnnnnnnnnnnnnnnnnnnnnnnnnnnnnnnnnnnnnnnnnnnnnnnnnnnnnnnnnnnnnnnnnnnnnnnnnnnnnnnnnnnnnnnnnnnnnnnnnnnnnnnnnnnnnnnnnnnnnnnnnnnnnnnnnnnnnnnnnnnnnnnnnnnnnnnnnnnnnnnnnnnnnnnnnnnnnnnnnnnnnnnnnnnnnnnnnnnnnnnnnnnnnnnnnnnnnnnnnnnnnnnnnnnnnnnnnnnnnnnnnnnnnnnnnnnnnnnnnnnnnnnnnnnnnnnnnnnnnnnnnnnnnnnnnnnnnnnnnnnnnnnnnnnnnnnnnnngacttaaatcagaaccatccacaccgcaggaaaaacgtgattgcagcttcattttgacaccaaagcaaattcatcaagtaattgt

SEQ ID NO: 34749 - DNA, 677 bp, Macaca Mulatta
ttcctagacaatgaccactggctgagcaccgtctcccagtacgaccgggacaagtactggaaccgctttcgagacgaagttgaggatgattatttcagaaactggaatcccaacaagccctttgaccaagccctggacccatccaaggacccctgcctgaaggtgaaatgcagccctcacaaagtgtgtgtgacccaggactaccagaccgccctgtgtgtcagtcgtaagcacctgctccccaggcaaaagaaggggaacgtggcccacaaacactgggttggaccttcgaatttggtcaagtgcaagccctgtcctgtggcacagtcagccatggtctgcggctcggatggccactcctacacatccaagtgcaagttggagttccatgcttgttctactggcaaaagcctcaccaccctctgtgacgggccctgtccgtgtctcccagagcctgagccaccaaagcacaaggcagaaaggagtgcctgtacagacaaggagttgcggaaccttgcctcccggctgaaggactggttcggagctcttcacgaggacgcgaacagagtcatcaagcccaccagctccaacacagcccaaggcaggtttgacactagcatcctgcccatctgcaaggactccctgggctggatgttcaacaagttggacatgaacta

SEQ ID NO: 34750 - DNA, 250 bp, Macaca Mulatta
ccccagctgtggtcctgatggtacctcccggttttttacaccgcacgcgccccacgtctctgtctctagtacctcccggtttttcacactgcctggttcccatgtggttgtctctgggcctttgttcccctgtatgcattgcaggcctgctccaccctcctcagcacctgagaatggaggtaaagcgtctggtctgggagctcgttaactatgctgggaaactttgtccaaaagaatcagaatttgaggt

SEQ ID NO: 34751 - DNA, 90 bp, Macaca Mulatta
tccctgtgtctcacagcggtaatcgtgtgttgcatcgatgcgtttgtggtcaccaagatgatgaggactaacttgaaaagatttctggga

SEQ ID NO: 34752 - DNA, 3003 bp, Macaca Mulatta
  misc_feature (1)...(3003): n = A,T,C or G
agatctgttgaccagaaatgtctcagatttggggttgttcatcaagagtaaacagcagctatcagacaaccagaggcagatatctgatgccattgctgctgcaagcatcgtgacaaatggcactgggattgagagcacatctctgggcattttcggggtgggcatacttcagctcaacgatttcctcgtgaattgccaaggagaacactgcacttatgatgaaatcctcagcatcatccagnnnnnnnnnnnnnnnnnnnnnnnnnnnnnnnnnnnnnnnnnnnnnnnnnnnnnnnnnnnnnnnnnnnnnnnnnnnnnnnnnnnnnnnnnnnnnnnnnnnnnnnnnnnnnnnnnnnnnnnnnnnnnnnnnnnnnnnnnnnnnnnnnnnnnnnnnnnnnnnnnnnnnnnnnnnnnnnnnnnnnnnnnnnnnnnnnnnnnnnnnnnnnnnnnnnnnnnnnnnnnnnnnnnnnnnnnnnnnnnnnnnnnnnnnnnnnnnnnnnnnnnnnnnnnnnnnnnnnnnnnnnnnnnnnnnnnnnnnnnnnnnnnnnnnnnnnnnnnnnnnnnnnnnnnnnnnnnnnnnnnnnnnnnnnnnnnnnnnnnnnnnnnnnnnnnnnnnnnnnnnnnnnnnnnnnnnnnnnnnnnnnnnnnnnnnnnnnnnnnnnnnnnnnnnnnnnnnnnnnnnnnnnnnnnnnagactgtgtttggagaaaagctggtggctaaattcttatttgagactgatttctcagatgatccaatgcttccttcacctgaccaactcagaaggaaagtgcttcttaaaaacaagaaactaaaagcccatcagacgccagtggatatcttaaagcaaaaggnnnnnnnnnnnnnnnnnnnnnnnnnnnnnnnnnnnnnnnnnnnnnnnnnnnnnnnnnnnnnnnnnnnnnnnnnnnnnnnnnnnnnnnnnnnnnnnnnnnnnnnnnnnnnnnnnnnnnnnnnnnnnnnnnnnnnnnnnnnnnnnnnnnnnnnnnnnnnnnnnnnnnnnnnnnnnnnnnnnnnnnnnnnnnnnnnnnnnnnnnnnnnnnnnnnnnnnnnnnnnnnnnnnnnnnnnnnnnnnnnnnnnnnnnnnnnnnnnnnnnnnnnnnnnnnnnnnnnnnnnnnnnnnnnnnnnnnnnnnnnnnnnnnnnnnnnnnnnnnnnnnnnnnnnnnnnnnnnnnnnnnnnnnnnnnnnnnnnnnnnnnnnnnnnnnnnnnnnnnnnnnnnnnnnnnnnnnnnnnnnnnnnnnnnnnnnnnnnnnnnnnnnnnnnnnnnnnnnnnnnnnnnnnnnnnnnnnnnnnnnnnnnnnnnnnnnnnnnnnnnnnnnnnnnnnnnnnnnnnnnnnnnnnnnnnnnnnnnnnnnnnnnnnnnnnnnnnnnnnnnnnnnnnnnnnnnnnnnnnnnnnnnnnnnnnnnnnnnnnnnnnnnnnnnnnnnnnnnnnnnnnnnnnnnnnnnnnnnnnnnnnnnnnnnnnnnnnnnnnnnnnnnnnnnnnnnnnnnnnnnnnnnnnnnnnnnnnnnnnnnnnnnnnnnnnnnnnnnnnnnnnnnnnnnnnnnnnnnnnnnnnnnnnnnnnnnnnnnnnnnnnnnnnnnnnnnnnnnnnnnnnnnnnnnnnnnnnnnnnnnnnnnnnnnnnnnnnnnnnnnnnnnnnnnnnnnnnnnnnnnnnnnnnnnnnnnnnnnnnnnnnnnnnnnnnnnnnnnnnnnnnnnnnnnnnnnnnnnnnnnnnnnnnnnnnnnnnnnnnnnnnnnnnnnnnnnnnnnnnnnnnnnnnnnnnnnnnnnnnnnnnnnnnnnnnnnnnnnnnnnnnnnnnnnnnnnnnnnnnnnnnnnnnnnnnnnnnnnnnnnnnnnnnnnnnnnnnnnnnnnnnnnnnnnnnnnnnnnnnnnnnnnnnnnnnnnnnnnnnnnnnnnnnnnnnnnnnnnnnnnnnnnnnnnnnnnnnnnnnnnnnnnnnnnnnnnnnnnnnnnnnnnnnnnnnnnnnnnnnnnnnnnnnnnnnnnnnnnnnnnnnnnnnnnnnnnnnnnnnnnnnnnnnnnnnnnnnnnnnnnnnnnnnnnnnnnnnnnnnnnnnnnnnnnnnnnnnnnnnnnnnnnnnnnnnnnnnnnnnnnnnnnnnnnnnnnnnnnnnnnnnnnnnnnnnnnnnnnnnnnnnnnnnnnnnnnnnnnnnnnnnnnnnnnnnnnnnnnnnnnnnnnnnnnnnnnnnnnnnnnnnnnnnnnnnnnnnnnnnnnnnnnnnnnnnnnnnnnnnnnnnnnnnnnnnnnnnnnnnnnnnnnnnnnnnnnnnnnnnnnnnnnnnnnnnnnnnnnnnnnnnnnnnnnnnnnnnnnnnnnnnnnnnnnnnnnnnnnnnnnnnnnnnnnnnnnnnnnnnnnnnnnnnnnnnnnnnnnnnnnnnnnnnnnnnnnnnnnnnnnnnnnnnnnnnnnnnnnnnnnnnnnnnnnnnnnnnnnnnnnnnnnnnnnnnnnnnnnnnnnnnnnnnnnnnnnnnnnnnnnnnnnnnnnnnnnnnnnnnnnnnnnnnnnnnnnnnnnnnnnnnnnnnnnnnnnnnnnnnnnnnnnnnnnnnnnnnnnnnnnnnnnnnnnnnnnnnnnnnnnnnnnnnnnnnnnnnnnnnnnnnnnnnnnnnnnnnnnnnnnnnnnnnnnnnnnnnnnnnnnnnnnnnnnnnnnnnnnnnnnnnnnnnnnnnnnnnnnnnnnnnnnnnnnnnnnnnnnnnnnnnnnnnnnnnnnnnnnnnnnnnnnnnnnnnnnnnnnnnnnnnnnnnnnnnnnnnnnnnnnnnnnnnnnnnnngcatctcgagaagacaaaaaagaaaggcatttcttttgcaagtgaactcaagaagctcaccaagtcactaaaacagccccgaggacttacatcaccttctcagctcttgacctcagaaagtatccaaaccaaggaggagaaacctgtgggtggcttgtcctccagtgacacaatggattaccgacagtgactaagggcagcatgtttaacccaggt

SEQ ID NO: 34753 - DNA, 471 bp, Macaca Mulatta
  misc_feature (1)...(471): n = A,T,C or G
ggccccaccccggcggcgccgcccgcccgcccgcgcgtccctcggtccacctgcagcaggcaggaaggcaggcagtccctccgactgttcggccgagagacgccggccgagcttgggcttttgctttctggcggagggatccgcggcggctgactaggaggcgctgatcctgggaggaagaggcagctannnnnnnnnnnnnnnnnnnnnnnnnnnnnnnnnnnaataaaggggccgccgccgggtgatgcggtgaccgctgcggcaggcccaggagctgagtgggccccggccctcagcccgtgccgccagacccgctctcctcaactctccatcttctccggcagaccgcgatcgccgaggcggcctcaggctccctannnnnnnnnnnnnnnnnnnnnnnnnnnnnnnnnnnnnnnnggggccgccgccacccgcctcccaccatggctctgaagagaatccacaagg

SEQ ID NO: 34754 - DNA, 1362 bp, Macaca Mulatta
  misc_feature (1)...(1362): n = A,T,C or G
gcatggtggataccagatgaccatcagagtcatgaatgacagtgctgctctaagacatggagctgtcatgtatcagttcttctgtccagctatgcaagtagaagagacccaggggctttcagcatctacaatatgcaagaaggatttcatgtcnnnnnnnnnnnnnnnnnnnnnnnnnnnnnnnnnnnnnnnnnnnnnnnnnnnnnnnnnnnnnnnnnnnnnnnnnnnnnnnnnnnnnnnnnnnnnnnnnnnnnnnnnnnnnnnnnnnnnnnnnnnnnnnnnnnnnnnnnnnnnnnnnnnnnnnnnnnnnnnnnnnnnnnnnnnnnnnnnnnnnnnnnnnnnnnnnnnnnnnnnnnnnnnnnnnnnnnnnnnnnnnnnnnnnnnnnnnnnnnnnnnnnnnnnnnnnnnnnnnnnnnnnnnnnnnnnnnnnnnnnnnnnnnnnnnnnnnnnnnnnnnnnnnnnnnnnnnnnnnnnnnnnnnnnnnnnnnnnnnnnnnnnnnnnnnnnnnnnnnnnnnnnnnnnnnnnnnnnnnnnnnnnnnnnnnnnnnnnnnnnnnnnnnnnnnnnnnnnnnnnnnnnnnnnnnnnnnnnnnnnnnnnnnnnnnnnnnnnnnnnnnnnnnnnnnnnnnnnnnnnnnnnnnnnnnnnnnnnnnnnnnnnnnnnnnnnnnnnnnnnnnnnnnnnnnnnnnnnnnnnnnnnnnnnnnnnnnnnnnnnnnnnnnnnnnnnnnnnnnnnnnnnnnnnnnnnnnnnnnnnnnnnnnnnnnnntagttacaggggagctgtgtacccaggatgggtttatggacttcgaggtctacagctaccaaacacaaccagctcttgacctggatactctgagggtgggaaactcatcctgccagcctgtcttcaaggctcagtctcaggggctggtacggttccacatacccctgaatggatgtggaacgagatataannnnnnnnnnnnnnnnnnnnnnnnnnnnnnnnnnnnnnnnnnnnnnnnnnnnnnnnnnnnnnnnnnnnnnnnnnnnnnnnnnnnnnnnnnnnnnnnnnnnnnnnnnnnnnnnnnnnnnnnnnnnnnnnnnnnnnnnnnnnnnnnnnnnnnnnnnnnnnnnnnnnnnnnnnnnnnnnnnnnnnnnnnnnnnnnnnnnnnnnnnnnnnnnnnnnnncagacaattcctaccaacaaccttatggggaaaacgagtaccctctagtgagattcctccgtcaaccaatttacatggaagtgagagtcataaacagggatgaccccaacatcaagctggtcttagatgactgctgggcgacgtccaccatggatccagactctttcccccagtggaacattgttgtggatg

SEQ ID NO: 34755 - DNA, 299 bp, Macaca Mulatta
taaagtagtagatatcctctattgtacagaaatagacatctaagtgcaaatgtctattggcgacctgtatttttgtctgtaatttagaagcaatactatgaagtgaaagcctggaaacagaagttgtcacataggttgaatagaacgagaaaaagacttaaaatttattcctgcaaacttcaactttaaagggagagaagaaccaggaaagatttggaatggccatgcattgggacaagacagaatgttgttaagagcatatttaaaacactgaaactgcttagaagaatcaatgcatt

SEQ ID NO: 34756 - DNA, 5697 bp, Macaca Mulatta
  misc_feature (1)...(5697): n = A,T,C or G
ctggggacggaaccaggcctgggaggacctcagagcccaggatgcccagctctccagggtcccccgtctgcatctctgtgtgtgctatgtggctctctctgcagaccttgcttggtttgggtggtcccatcaggtccaataagctgtggccagtggtggggttagggctgtgacgagacagggcaggtgcttcaagtggtgcctggtttggctccgccctggggaaggggagccaggccaggtgggtctagcagagtctcgggagagaaggacgctgggagccccactctgccacatagcaactgtgtgcccctcggtgctccccctccctgagtccccgtgttctcacctgcggatggtgagaaatacgccttcctctcggtgcctctaggagggtttgggataggaagttggggtctggcacagaggaggagctctcaaaacagtagcaaaaagacggtggctgagactgggcccagtgagggcctgggctggcatttggggagatggtacggggtctgcacgccacagagttggctccccacagccctcgcctctggtctcccctccttagcccagtcctttgagcccctttcagattattctttgtaaaatctatttctgttgggtcacatctctactcacaaagctccctggctgccctccctcctgcctggttccgagcccaggagctggctgtggcttctccctcnnnnnnnnnnnnnnnnnnnnnnnnnnnnnnnnnnnnnnnnnnnnnnnnnnnnnnnnnnnnnnnnnnnnnnnnnnnnnnnnnnnnnnnnnnnnnnnnnnnnnnnnnnnnnnnnnnnnnnnnnnnnnnnnnnnnnnnnnnnnnnnnnnnnnnnnnnnnnnnnnnnnnnnnnnnnnnnnnnnnnnnnnnnnnnnnnnnnnnnnnnnnnnnnnnnnnnnnnnnnnnnnnnnnnnnnnnnnnnnnnnnnnnnnnnnnnnnnnnnnnnnnnnnnnnnnnnnnnnnnnnnnnnnnnnnnnnnnnnnnnnnnnnnnnnnnnnnnnnnnnnnnnnnnnnnnnnnnnnnnnnnnnnnnnnnnnnnnnnnnnnnnnnnnnnnnnnnnnnnnnnnnnnnnnnnnnnnnnnnnnnnnnnnnnnnnnnnnnnnnnnnnnnnnnnnnnnnnnnnnnnnnnnnnnnnnnnnnnnnnnnnnnnnnnnnnnnnnnnnnnnnnnnnnnnnnnnnnnnnnnnnnnnnnnnnnnnnnnnnnnnnnnnnnnnnnnnnnnnnnnnnnnnnnnnnnnnnnnnnnnnnnnnnnnnnnnnnnnnnnnnnnnnnnnnnnnnnnnnnnnnnnnnnnnnnnnnnnnnnnnnnnnnnnnnnnnnnnnnnnnnnnnnnnnnnnnnnnnnnnnnnnnnnnnnnnnnnnnnnnnnnnnnnnnnnnnnnnnnnnnnnnnnnnnnnnnnnnnnnnnnnnnnnnnnnnnnnnnnnnnnnnnnnnnnnnnnnnnnnnnnnnnnnnnnnnnnnnnnnnnnnnnnnnnnnnnnnnnnnnnnnnnnnnnnnnnnnnnnnnnnnnnnnnnnnnnnnnnnnnnnnnnnnnnnnnnnnnnnnnnnnnnnnnnnnnnnnnnnnnnnnnnnnnnnnnnnnnnnnnnnnnnnnnnnnnnnnnnnnnnnnnnnnnnnnnnnnnnnnnnnnnnnnnnnnnnnnnnnnnnnnnnnnnnnnnnnnnnnnnnnnnnnnnnnnnnnnnnnnnnnnnnnnnnnnnnnnnnnnnnnnnnnnnnnnnnnnnnnnnnnnnnnnnnnnnnnnnnnnnnnnnnnnnnnnnnnnnnnnnnnnnnnnnnnnnnnnnnnnnnnnnnnnnnnnnnnnnnnnnnnnnnnnnnnnnnnnnnnnnnnnnnnnnnnnnnnnnnnnnnnnnnnnnnnnnnnnnnnnnnnnnnnnnnnnnnnnnnnnnnnnnnnnnnnnnnnnnnnnnnnnnnnnnnnnnnnnnnnnnnnnnnnnnnnnnnnnnnnnnnnnnnnnnnnnnnnnnnnnnnnnnnnnnnnnnnnnnnnnnnnnnnnnnnnnnnnnnnnnnnnnnnnnnnnnnnnnnnnnnnnnnnnnnnnnnnnnnnnnnnnnnnnnnnnnnnnnnnnnnnnnnnnnnnnnnnnnnnnnnnnnnnnnnnnnnnnnnnnnnnnnnnnnnnnnnnnnnnnnnnnnnnnnnnnnnnnnnnnnnnnnnnnnnnnnnnnnnnnnnnnnnnnnnnnnnnnnnnnnnnnnnnnnnnnnnnnnnnnnnnnnnnnnnnnnnnntcatctatcgcatgaagaaaaaggatgagggcagctacacgctggaggaacccaagcaggcgagcgtcacataccagaagcctgacaagcaggaggagttctatgcctagtggagccacagtgcctccctgcagcctcaacaccaccctgccgtccagtccccagcctggcctcaccagcccaagcctgggactgggcctggaacctggccccagttcttctctgccctccttcccaaggtctgcccaggctgccagcctcaaaaaaatcttccccgaggaagaggggctactgccatctgccccagactgtgcccttatgagctcatctcttgttcccctcatccctgccaccagtctggggcttcaggacctcatgtcagatggatgagaggaagaaagctcctgattggctggtggtggaagaaagggtggggcttgaaataggcctgagcccctttttggcacaaacagggctcactgagatctcctttttggggcagagaggcactnnnnnnnnnnnnnnnnnnnnnnnnnnnnnnnnnnnnnnnnnnnnnnnnnnnnnnnnnnnnnnnnnnnnnnnnnnnnnnnnnnnnnnnnnnnnnnnnnnnnnnnnnnnnnnnnnnnnnnnnnnnnnnnnnnnnnnnnnnnnnnnnnnnnnnnnnnnnnnnnnnnnnnnnnnnnnnnnnnnnnnnnnnnnnnnnnnnnnnnnnnnnnnnnnnnnnnnnnnnnnnnnnnnnnnnnnnnnnnnnnnnnnnnnnnnnnnnnnnnnnnnnnnnnnnnnnnnnnnnnnnnnnnnnnnnnnnnnnnnnnnnnnnnnnnnnnnnnnnnnnnnnnnnnnnnnnnnnnnnnnnnnnnnnnnnnnnnnnnnnnnnnnnnnnnnnnnnnnnnnnnnnnnnnnnnnnnnnnnnnnnnnnnnnnnnnnnnnnnnnnnnnnnnnnnnnnnnnnnnnnnnnnnnnnnnnnnnnnnnnnnnnnnnnnnnnnnnnnnnnnnnnnnnnnnnnnnnnnnnnnnnnnnnnnnnnnnnnnnnnnnnnnnnnnnnnnnnnnnnnnnnnnnnnnnnnnnnnnnnnnnnnnnnnnnnnnnnnnnnnnnnnnnnnnnnnnnnnnnnnnnnnnnnnnnnnnnnnnnnnnnnnnnnnnnnnnnnnnnnnnnnnnnnnnnnnnnnnnnnnnnnnnnnnnnnnnnnnnnnnnnnnnnnnnnnnnnnnnnnnnnnnnnnnnnnnnnnnnnnnnnnnnnnnnnnnnnnnnnnnnnnnnnnnnnnnnnnnnnnnnnnnnnnnnnnnnnnnnnnnnnnnnnnnnnnnnnnnnnnnnnnnnnnnnnnnnnnnnnnnnnnnnnnnnnnnnnnnnnnnnnnnnnnnnnnnnnnnnnnnnnnnnnnnnnnnnnnnnnnnnnnnnnnnnnnnnnnnnnnnnnnnnnnnnnnnnnnnnnnnnnnnnnnnnnnnnnnnnnnnnnnnnnnnnnnnnnnnnnnnnnnnnnnnnnnnnnnnnnnnnnnnnnnnnnnnnnnnnnnnnnnnnnnnnnnnnnnnnnnnnnnnnnnnnnnnnnnnnnnnnnnnnnnnnnnnnnnnnnnnnnnnnnnnnnnnnnnnnnnnnnnnnnnnnnnnnnnnnnnnnnnnnnnnnnnnnnnnnnnnnnnnnnnnnnnnnnnnnnnnnnnnnnnnnnnnnnnnnnnnnnnnnnnnnnnnnnnnnnnnnnnnnnnnnnnnnnnnnnnnnnnnnnnnnnnnnnnnnnnnnnnnnnnnnnnnnnnnnnnnnnnnnnnnnnnnnnnnnnnnnnnnnnnnnnnnnnnnnnnnnnnnnnnnnnnnnnnnnnnnnnnnnnnnnnnnnnnnnnnnnnnnnnnnnnnnnnnnnnnnnnnnnnnnnnnnnnnnnnnnnnnnnnnnnnnnnnnnnnnnnnnnnnnnnnnnnnnnnnnnnnnnnnnnnnnnnnnnnnnnnnnnnnnnnnnnnnnnnnnnnnnnnnnnnnnnnnnnnnnnnnnnnnnnnnnnnnnnnnnnnnnnnnnnnnnnnnnnnnnnnnnnnnnnnnnnnnnnnnnnnnnnnnnnnnnnnnnnnnnnnnnnnnnnnnnnnnnnnnnnnnnnnnnnnnnnnnnnnnnnnnnnnnnnnnnnnnnnnnnnnnnnnnnnnnnnnnnnnnnnnnnnnnnnnnnnnnnnnnnnnnnnnnnnnnnnnnnnnnnnnnnnnnnnnnnnnnnnnnnnnnnnnnnnnnnnnnnnnnnnnnnnnnnnnnnnnnnnnnnnnnnnnnnnnnnnnnnnnnnnnnnnnnnnnnnnnnnnnnnnnnnnnnnnnnnnnnnnnnnnnnnnnnnnnnnnnnnnnnnnnnnnnnnnnnnnnnnnnnnnnnnnnnnnnnnnnnnnnnnnnnnnnnnnnnnnnnnnnnnnnnnnnnnnnnnnnnnnnnnnnnnnnnnnnnnnnnnnnnnnnnnnnnnnnnnnnnnnnnnnnnnnnnnnnnnnnnnnnnnnnnnnnnnnnnnnnnnnnnnnnnnnnnnnnnnnnnnnnnnnnnnnnnnnnnnnnnnnnnnnnnnnnnnnnnnnnnnnnnnnnnnnnnnnnnnnnnnnnnnnnnnnnnnnnnnnnnnnnnnnnnnnnnnnnnnnnnnnnnnnnnnnnnnnnnnnnnnnnnnnnnnnnnnnnnnnnnnnnnnnnnnnnnnnnnnnnnnnnnnnnnnnnnnnnnnnnnnnnnnnnnnnnnnnnnnnnnnnnnnnnnnnnnnnnnnnnnnnnnnnnnnnnnnnnnnnnnnnnnnnnnnnnnnnnnnnnnnnnnnnnnnnnnnnnnnnnnnnnnnnnnnnnnnnnnnnnnnnnnnnnnnnnnnnnnnnnnnnnnnnnnnnnnnnnnnnnnnnnnnnnnnnnnnnnnnnnnnnnnnnnnnnnnnnnnnnnnnnnnnnnnnnnnnnnnnnnnnnnnnnnnnnnngcatttgctggaagcacagcgagttccaaatgagaggaagcttgtgtggcttgagagcctttggggccttggctgccagagcacgaggcaggccaggacatggagagcccaggccctgtctccagggggccagatggggccttgcctgaaaggctgatccccttgattgctggaggtgtgtgggtggcaaccagggctgggcagggcttagggtgtgtggaccaaacccctctagggttggcaaagctgcctgtcaggcctccaggtgggggcccttggacgcagggagcagaccctctgcctcgcagggcaggagtagctgcctcctgggttctctggatttcttctcccaacaactagaaccctggacttgcctccccaggcctcttgcctgtaaatagaagcccgcaaactgtacagattttcagaggcatcgagactgggccccgggagttgccgtctgagagccgatggccccagcatcccccaggtgcctgcctggcaccacagtgaccctggcctcagcgtggcaaatgcatgtaaatatttttcgt

SEQ ID NO: 34757 - DNA, 552 bp, Macaca Mulatta
tttcccctatggaggcttttggtaataaaacacaaattgagggattttacttaaaagaaatttttttccaagaactggtcatgtactaaattgcttataatcaaataatcaagtagcatttcttttatcataagagcaaaacctataattaagccaaaattcaaatttgttttcaaaggttgaataatcttttgttttggccaatagtatgtggattttttcttttaaggattatctcttcgtagtattttctaatggataggaaatgcctttctctggttgaatgattatttccacatagaattagttcctgcttacgacagtgctccactaatgtaatggctcagtgaattggctttataattcattaatcatagttcacattgagcttctggctccggatgacagtgcccaccacaggccaaataacttctcatttaaaggcaatttgtacgaatagggaaggtgagaattcccacaatccctgagggattgaagagttgttcaaaagccaagataaggcattttatggaaggcaggttggtggaagaa

SEQ ID NO: 34758 - DNA, 98 bp, Macaca Mulatta
agaacaagagaggacaggtccaggatgcccagtctgttctggtcgcatctgccagcaatctggctgctgctgagccaactccttagagaaagtctagc

SEQ ID NO: 34759 - DNA, 781 bp, Macaca Mulatta
caggtggaagtgcccaaactgcttcagtaggaccaggctacgaggcaccatctgccagtgccatgactgctcaggcctcacctcccagggctacacagaccctgcccaccccgtccctggctgacctgctgtggatgtccctattctgccatgggacagtcaaggcctgggtcacgctcaaggaaggatgccttatctcttctcgctttccttttcttgtctctgaggctctccaaattttgctttaatacctggagctcaggtttccggacaagaagagtccttttagcacatcgctgagaagatggcactgtccagggcccatgtaactggcaagctgcaaaagacctgtgatccaggaaagatgtcccacagggaccacatccaccccagccccactgccctctagggccaggattcaggcctctgaggagcccacggggcaaagctgctgggccagtggcattctgtgtgggacaatggcagaaagatggagaggcacgggggcacaaaggggagcatggggaggagctgaggataccccaaagtccaggctaatcagaggatgtggcaggggcagtggcctggatggacagtgcctggtgggagtagactccagacaggaggagggggacagacagcagctggacttgaaggtttgatgccaaagtagacatgttcctcacacccacctgctgctgtataaatagctgtgtatctgtttttccataagattttgataatatatacaaggctttagctgtgaatggctgtgccccac

SEQ ID NO: 34760 - DNA, 777 bp, Macaca Mulatta
  misc_feature (1)...(777): n = A,T,C or G
tggacgaggggagctgatgggccgngtcagacaggcacaaggcaggcgacacaaaacagaggggtccccagctgccacctcacccaccgcaattcatttagtagcaggcacaggggcagctctggcagggctttctcaggcctatgccggagcctcgagggctggagagcgggaagacaggcagtgctcggggagtagcagcaggacgtcaccaggagggcgaagcggccacgggaagggccccgggacattacgcagcaaggaggctgcaggggctcggcctgcgggcgccgttcccacgaggcactgcggcccagggtctggtgcggagagggcccacagtggacttggtgacactgtatgccctcaccgctcagcccctggggctggcttggcaggcagtacagcatccaggggagtcaagggcatggggcgagaccagactaggcgaggcgggcggggcggagtgaatttaatttgcactaagtcatttgcactggttggagttgtggagacggccttgagtctcggtgcgagtgtgtgtgagtgtgagccaccttggcaagtgcccgcccaggacccggccgcccttcatctgggctgggtgactgggcgccggctgtgtgcccgaggcctcactctgccctcgcctagtctggaagctccaacatcacggggcaaccttcaagcattccattacgccccatctcgccctgtgcccctccccaccagggcttcagcaggagccctggactcatcatcaataaacactgttac

SEQ ID NO: 34761 - DNA, 715 bp, Macaca Mulatta
tctgacgcaaaccaaatgaaaaataggcattaatcctgatcttagttcgggatgaaaaattgctctgaaaaaaactcagaagttttccttccagaaaatttgggtgtttttgttttcctagaacagtatctctacccctgtgaagcgtaaccccactacttccagacttgccttcccttgggggacatttgacagagtctcccctgaagtctccggatgggcttgtgtttattaagggatgcaaatcgtgttgagttaatgaaggaattagtagggttgtggcttcacacacattggaatggaaatggtgcgctttctcagtggcaaccgaaggcctcgtgcttaagggcatttagcgtcatccaagcagggtaaactttcgttttgttaaaagaaaaatgtgtttttcaagctggtggtgtccacagtcatagctaacacatctggaatgcactaaccaaaatgctgtgctttggagacctgcttttgtcgccgtgggtaactgttcccgtccggtccagttgcctgtgtttgcctctccacatgtgaagcaagcagcatgcaacgtctttagttttactgagcttgtatgtcttcgtgtcttcacaacccagtgccttaaaaatgaaaggccctaaacgtaagggagatggagtgaaagatttattttgtggagtctttggtcggaattgtgggtgtactgttcccttcacaa

SEQ ID NO: 34762 - DNA, 623 bp, Macaca Mulatta
atcctccgtagatgaggtggtggtgacgaatactgtccctcatgaggttcagaagctgcaatgtcccaagataaagactgtggatatcagtttgattctttctgaagccattcggagaatccacaacggagagtccatggcctaccttttccgaaacatcactgtggatgactaactttcacgagggtctcgaccctggacctcctgagggaaacatggaaaaagcagtgccatgagtgatacagtgtttccttgcaagggaggactggaaacagcctggagttagatagtctctcctgcccggattgatgggtaggagggattgaaagagtcaggaagaagacggagctaatggataaatgtcataacatggccttatatctctgctgtcatcagccctgatccttaaaagttctagctgctttcctgaaaataatctgaaaatcttattgatactaaagaggagttaaaggcacataaagtcttaactctataatgttcatttagttgtttcagctccagggaaatggaggtattgatgttgaacctggttagggaagctgagcgcctgtggctctgttgctatccagttggcctctcccaatcaatttcggtctttataa

SEQ ID NO: 34763 - DNA, 5626 bp, Macaca Mulatta
  misc_feature (1)...(5626): n = A,T,C or G
nnnnctcacggcagttggagtggcagcaatgcccgggggggcagacccagatggcagtgctacagaaaaacttgggcacaagtcagaagacaagcctgacgatccccagccaaaaatggactatgctgggaacgtggcagaggccgagggcctcttggtgcccctgagcagcccgggagacgggctcaagcttccctcatctgacagcaccgaggccagcaacagcagggccgactgctcctggactccactcaacacccaaatgagcaaacaggttgactgctcgcctgctggagtaaaggctttggactctcggcaaggtgttggagagaagaatactttcattttggcaactctgggaaccggagtccctgtggaggggaccctgcctctggttaccactaactttagtcctctgccagcccctatctgtccccctgctcccggttcagcctctgtccccccctctgttccagatgcattccaggttcccctctccgtccctgccccagtcccccattcagggcttgttccagtccaagttgccacttcagttccagctccttcccctcccttagcacctgtcccggctctggctccggcgccaccgtcggtgcccacgctcatctctgactcgaaccccctttccgtttcagcctcggtcttggtgcctgtgccagcttctgctcccccttcgggcccggtccccctgtcggcttcagctcctgccccgctttcagtcccagtttcagctcctcccttggctctcatccaggctcctgtgcccccttcagctccaaccttggttctcgctcctgtccccactccggttctggctcccatgccggcatccacacctccagcggcccctgcccctccgtctgtgctcatgcccactccaacccccgtcttccggcccaccttctacccccaccctcatccccgcctttgctcccacgccggtgcctgcacccaccccagcccccatctttactccagcccccacacccatgcctgctgccacgccagctgccattcccacctctgcacccatcccggcctccttcagtttgagtcgagtgtgctttcctgcagctcaggcaccagctatgcaaaaagtacccctgtcctttcagcccgggacagtgctgaccccgagccagccgctggtatatatcccacctccaagctgtgggcagccgctcagtgtggccacactgccaaccactctaggggtctcctccactcttacgctccctgtcctgccgtcctacctgcaggacaggtgtctcccaggcgtgctagcctccccagagctccgttcttacccgtacgcattttctgtggcccggcctctgacttcggattccaagctggtgtctctggaggtgaacaggctcccttgcacttccccatccggtagcaccaccacccagcctgcacccgacggagtccctgggcctttggcagatacgtccctcgtcactgcttctgccaaggtgcttccaactccacagcctctgctgccagcccccagtgggagctcagccccaccacacccctccaagannnnnnnnnnnnnnnnnnnnnnnnnnnnnnnnnnnnnnnnnnnnnnnnnnnnnnnnnnnnnnnnnnnnnnnnnnnnnnnnnnnnnnnnnnnnnnnnnnnnnnnnnnnnnnnnnnnnnnnnnnnnnnnnnnnnnnnnnnnnnnnnnnnnnnnnnnnnnnnnnnnnnnnnnnnnnnnnnnnnnnnnnnnnnnnnnnnnnnnnnnnnnnnnnnnnnnnnnnnnnnnnnnnnnnnnnnnnnnnnnnnnnnnnnnnnnnnnnnnnnnnnnnnnnnnnnnnnnnnnnnnnnnnnnnnnnnnnnnnnnnnnnnnnnnnnnnnnnnnnnnnnnnnnnnnnnnnnnnnnnnnnnnnnnnnnnnnnnnnnnnnnnnnnnnnnnnnnnnnnnnnnnnnnnnnnnnnnnnnnnnnnnnnnnnnnnnnnnnnnnnnnnnnnnnnnnnnnnnnnnnnnnnnnnnnnnnnnnnnnnnnnnnnnnnnnnnnnnnnnnnnnnnnnnnnnnnnnnnnnnnnnnnnnnnnnnnnnnnnnnnnnnnnnnnnnnnnnnnnnnnnnnnnnnnnnnnnnnnnnnnnnnnnnnnnnnnnnnnnnnnnnnnnnnnnnnnnnnnnnnnnnnnnnnnnnnnnnnnnnnnnnnnnnnnnnnnnnnnnnnnnnnnnnnnnnnnnnnnnnnnnnnnnnnnnnnnnnnnnnnnnnnnnnnnnnnnnnnnnnnnnnnnnnnnnnnnnnnnnnnnnnnnnnnnnnnnnnnnnnnnnnnnnnnnnnnnnnnnnnnnnncaggcgtctctgctttcattggcatttccagtgctgggcagctgacccccagtcagggggcgcccatcaagcccaccagcgttgtttcggagttttctggtgtgccatctctcagctccagcgaagccgtgcacggacttcccgaggggcagccacggcctgggggctcctttgttccagagcaggacactgttacaaagaacaaaacttgccggattgctgccaagccttacgaagaacaagtcaatcctgtcctcttgaccctcagccctcagactgggaccctggcactgtctgttcagcctagcagtggggacattcgaatgaatcaggggcctgaggaatcagagagccacctctgctctgacagcactcctaagatggaaggcccccagggggcttgtggcctgaagctggcaggagacacgaagcctaagaaccaagtgctggccacctacatgtcccatgagctggtcctggccaccccccagaacctgcctaagatgcctgagctgcctttgctacctcacgacagccaccccaaggaacttaccttggacgtggttccgagcagcaggaggggctccagcaccgagcgcccacagcttggaagccaggtggatctggggcgagtgaaaatggagaaggtggatggtgatgtggtcttcaatttagccacctgcttccgggctgatggcctcccagcggctccccaaaggggccaagctgaagttcggggtaagaccgggcaggcgcgagtgaaacaggaaagtgtaggggtctttgcttgcaagaacaagtggcagccagatgatgtgacggaatctctgccgcccaagaagatgaagtgtggcaaagagaaggacggcgaggagcagcagctgcagccccaagccaaggccatggtccggagttcccacagacccaagnagtgccggaagctgcccagtgacccccaggaatccaccaagaaaagccccagggggggcttcagattcaggaaaagagcacaatggagtcaggggaaagcacaagcaccggaagccgacaaagccggagtcccagtctccaggaaaacgagccgtcggccacgaggaaggtnnnntggaaaagaaagcaaagagcagtttcgtgactttatcctgtggttctgagcacccgcacgcgcagtcagtctggnnnnnnnnnnnnnnnnnnnnnnnnnnnnnnnnnnnnnnnnnnnnnnnnnnnnnnnnnnnnnnnnnnnnnnnnnnnnnnnnnnnnnnnnnnnnnnnnnnnnnnnnnnnnnnnnnnnnnnnnnnnnnnnnnnnnnnnnnnnnnnnnnnnnnnnnnnnnnnnnnnnnnnnnnnnnnnnnnnnnnnnnnnnnnnnnnnnnnnnnnnnnnnnnnnnnnnnnnnnnnnnnnnnnnnnnnnnnnnnnnnnnnnnnnnnnnnnnnnnnnnnnnnnnnnnnnnnnnnnnnnnnnnnnnnnnnnnnnnnnnnnnnnnnnnnnnnnnnnnnnnnnnnnnnnnnnnnnnnnnnnnnnnnnnnnnnnnnnnnnnnnnnnnnnnnnnnnnnnnnnnnnnncagatttaaaggcccgtaagcagaagacttcctcctcccaaagtttggagcaccgcctcaggaacaggaaccttctcttgcccaacaaagcccaggggatctcggattcaccaaatggtttcctcccaaataacctggaggagccagcctgccttgaaaattcagaaaagccatcaggaaaacgaaagtgcaagaccaagcacatggcaaccgtctcagaagaggtaaaggnnnnnnnnnnnnnnnnnnnnnnnnnnnnnnnnnnnnnnnnnnnnnnnnnnnnnnnnnnnnnnnnnnnnnnnnnnnnnnnnnnnnnnnnnnnnnnnnnnnnnnnnnnnnnnnnnnnnnnnnnnnnnnnnnnnnnnnnnnnnnnnnnnnnnnnnnnnnnnnnnnnnnnnnnnnnnnnnnnnnnnnnnnnnnnnnnnnnnnnnnnnnnnnnnnnnnnnnnnnnnnnnnnnnnnnnnnnnnnnnnnnnnnnnnnnnnnnnnnnnnnnnnnnnnnnnnnnnnnnnnnnnnnnnnnnnnnnnnnnnnnnnnnnnnnnnnnnnnnnnnnnnnnnnnnnnnnngatcacctctcggatcttcagggccgggcagagggtgatcccggtgtatcctgggatttttacagcagttctgtgttggngaggaaaaagacgggtttgcctgtgacctcctacataatcctcctgggagctctgatcaagaaggagacgatccaatggaggaggatgatttcatgttcgaactctcagacaagcctcttctcccttgctacaacctccaagtgtcagtgtcccgnnnnnnnnnnnnnnnnnnnnnnnnnnnngatgtcttgtagaggctgtagctttcctcgaggatctttcaggcccggttcccgcactttgaaatcaccaccatgcccaaggctgagttctacaggcaggtggcctccagtcagctgctgacccctgctgagaggcctggaggcttggacgacagatcccccccaggctcctctgagactgtggagctggtgcggtacgagccagacctacttcggctcctagggtctgaggtggaattccagtcttgcaacagttgaccgggaaaacagcccctcctcttcttctttctccttccgagttcgcccttcccccacctccttgtctttcccccaccgagcaccagactgcagaatgaggcaataatatggaccaacaagaagccgccttatcaatgccagcattagcgactggactgnnnnnnnnnnnnnggttacaattagttctcatctccctgtcgtcgtcattgttatcgtggttggtgatgggggtggaaagttgaactccacgtctgaggacaagaggtcccgggggtggtgggaggtggcgctggggtcccttggactggcctccttgtttatgaccaagaccaaacctgggccctgggtggccttggcctgtcccgaggagaaatgagaaaatcccagatctctgagcgccccccaactccattcccctgtgttcttctgtcttctgtagtatttattttattagtatttaatttgtattgtttcattggtttctgataagtctgtatcactgtgacgatttgagacaacttgttgtattgagggactttctgtacctccttttctttttctttgttgatgagctctgacaaagctattcccaggtgttttttcccccactggggagggggtggggaggaatggggaggggg

SEQ ID NO: 34764 - DNA, 670 bp, Macaca Mulatta
gaccattcagaaccacagcttcattttcagatggggagactgaggcctagagaggaaaaacgactcccacgttatggctgactttagccagagcttgctagtagtactcaaactcccaactcaactgtaattacttaacgtgaggattagaatagaaagatcttctgattcctgtacttcttacaaacacatgtcgatttattcttgccaaatctcctgtatgattttaacaaaatgcttaccacaagcctagtctccaatactggcctcaaaggccaagagatggattatctggtcagtttgaagaaaaaccacttagtttactcagcaaatgagggaccatctttagtgcttaagactcctcttaaataaatgacctatggttaattattatctacccagctcttatcccttaatctctagtttgaaattctctggtagtaactgctcctaaacctatgcctataatcacaactgcagacaaaagcaggtccttctgtagcaaaaatgtcctcatttttttttcacactaaactatgatatttaattagtgcagtactagttttcctccttatagggataattgcctgtttacacatatttttcaggttggagaacttcgttgtgaaggcattctctagaagactgaatgccaacatgttctgttaac

SEQ ID NO: 34765 - DNA, 664 bp, Macaca Mulatta
gcatgtacggcaaaggcaagagtaacagcagcgccgtcccgtccgacagccaggcccgggagaagttagcactctacgtatatgaatatctgctccatgtaggagctcagaaatcagctcaaacatttttatcagagataagatgggaaaaaaacatcacattgggggaaccaccaggattcttacattcttggtggtgtgtattttgggatctctactgtgcagctccagagagacgtgaaacatgtgaacactcaagtgaagcaaaagccttccatgattatagtgctgcagcagctcccagtccagtgctaggaaacattcccccaggagatggcatgccagtaggtcctgtaccaccagggttctttcagccttttatgtcacctcggtaccctggaggtccaaggcccccattgaggatacctaatcaggcgcttggaggtgtcccaggaagtcagccattactccccagtggaatggatccaactcgacaacaaggacatccaaatatgggtgggccaatgcagagaatgactcctccaagaggaatggtgcccttaggaccacagaactatggaggtgcaatgagacccccactgaatgctttaggtggccctggaatgcctggaatgaacatgggtccaggtggtggtaggccttg

SEQ ID NO: 34766 - DNA, 899 bp, Macaca Mulatta
  misc_feature (1)...(899): n = A,T,C or G
gatcaatgaggtgaagtggactgaatggaagacgcacgtctccttccttaacgaagacccggggnnnnnnnnnnnnnnnnnnnnnnnnnnnnnnnnnnnnnnnnnnnnnnnnnnnnnnnnnnnnnnnnnnnnnnnnnnnnnnnnnnnnnnnnnnnnnnnnnnnnnnnnnnnnnnnnnnnnnnnnnnnnnnnnnnnnnnnnnnnnnnnnnnnnnnnnnnnnnnnnnnnnnnnnnnnnnnnnnnnnnnnnnnnnnnnnnnnnnnnnnnnnnnnnnnnnnnnnnnnnnnnnnnnnnnnnnnnnnnnnnnnnnnnnnnnnnnnnnnnnnnnnnnnnnnnnnnnnnnnnnnnnnnnnnnnnnnnnnnnnnnnnnnnnnnnnnnnnnnnnnnnnnnnnnnnnnnnnnnnnnnnnnnnnnnnnnnnnnnnnnnnnnnnnnnnnnnnnnnnnnnnnnnnnnnngaagcctctggttttaccagttgcaggtgggcttggctgggagagatgggtggcagggaaggggcaggagccttgaggagcagggagaggcgcctttccttctgccagctttcccctgacagccccagccccagcccacacgttgtaccgtctctcctgctgtgactgggttgcctgaatttggggagacccttgatcccatcccagagtgtgcaggggacggagttaagccggatatcctgggggaggaagggaatgagctcgggaaacatccttccggaacccttcagggaaaaggagaccatccttggagtgaacgtcccctgacgccccaaggttcacactgcctcaagctgagacaggtttttagtagcataagtaatacagggtttaaattttcaatatggaaaagacatttcagttaagaatgaaaattactacaat

SEQ ID NO: 34767 - DNA, 232 bp, Macaca Mulatta
  misc_feature (1)...(232): n = A,T,C or G
naggtgggtgacttcgggttggcgcgggagtacggatctcctctgaaggcctacaccccggtcgtggtgaccctgtggtaccgcgccccagagctgctgcttggtgccaaggnaggaatactccacagccgtcgacatgtggtcggtgggctgcatcttcggggagctgctgactcagaagcctctgttcccagggaagtcggacatcgatcagatcaacaaaggttcaagg

SEQ ID NO: 34768 - DNA, 342 bp, Macaca Mulatta
ggccacctggatccctgcccctccccactgggatggaataaatgctctgcagacctggcctgcctgttttcctggggactgggggagagaaggaggagagggcccagctaggcaccaccagctcacatgtagcatggggacggaacagatgcgatacagggtggcctcaaaacacacctaggggctgcccctggatccaccaccagcctcctctctgcctcggatatgcccggactctcctgcctccctgttgaaaccctgcctgtcagcagcccgctcacccctcctggctgggggcccctgggtcagctttgggtcagaccttctccacggaggtctggg

SEQ ID NO: 34769 - DNA, 82 bp, Macaca Mulatta
  misc_feature (1)...(82): n = A,T,C or G
ttatcgtgtcagcttcacggattcaaagagacactcatagcaacttgtcactntgaagctgtggaggatattgtctttccat

SEQ ID NO: 34770 - DNA, 754 bp, Macaca Mulatta
gggaaagatggcagcagcgtgtcggagcgtgaagggcctggtggcggtaataaccggaggagcctcgggcctgggcctggtcacggcggagcgactggtggggcagggagcctccgctgtgcttctggacctgcccaactcgggtggggaggcccaggccaagaagttaggaaacaactgcgttttcgccccagccgacgtgacctctgagaaggatgtgcaaacagctctggctctagcaaaagaaaagtttggccgtgtggatgtagctgtcaactgtgcaggcatcgcggtggctatcaagacatacaacttaaagaagagccaggcccataccttggaagacttccagcgagttcttaatgtgaatctcatgggcaccttcaatgtgatccgcctggtggctggtgagatgggccagaatgaaccggaccagggaggccaacgtggggtcatcatcaacaccgccagtgtggctgccttcgagggtcaggttggacaagctgcgtactctgcttccaagggggggaataatgggcatgaccctgcccattgctcgggatctggctcccataggcatccggggtgatgaccattgctccaagtctgttttgggaccccactgctgaacaaccttcccaaagaaaatgccgaaactttcttgggccaagcccaagtggccctttccctaagccgaattggggtgaacccctggcctgaagatattgccccaccttggggaaacaagggccca

SEQ ID NO: 34771 - DNA, 749 bp, Macaca Mulatta
  misc_feature (1)...(749): n = A,T,C or G
gggaatgtgtggatatccgcttgaagagggtagttcctgaccattattgtcactactaccctgaaaatgtaaaaccaaaaccaaaactgaaggaatgcagcatggatccctgcccatcaagtgatggatttaaagagataatgccctacgaccacttccaacctcttcctcgctgggaacataatccttggactgcatgttccgtgtcctgtggaggagggattcagagacggagctttgtgtgtgtagaggaatccatgcatggagagatattgcaagtggaagaatggaagtgcatgtatgcacccaaacccaaggttatgcaaacttgtaatctgtttgattgccccaagtggattgccatggagtggtctcagtgcacagtgacttgtggccgagggttacggtaccgggttgttctgtgtattaaccaccgtggagagcacgttgggggctgcaatccacaactgaaattacacatcaaagaagaatgtgtcattcccatcccgtgttatnnnnnnnnnnnnnnnnnnncagtggaagcaaaattgccttggctgaaacaagcacaagaactagaagaaaccagaatagcaacagaagaaccaacgttcattccagatccctgggcagccctgtaataccacgtgtggggccggggggttcaagttccgccaaggttgaaatgcccgtgttgctccctccccattccccgcgggacttgagaactggaacttggccctggagga

SEQ ID NO: 34772 - DNA, 1278 bp, Macaca Mulatta
  misc_feature (1)...(1278): n = A,T,C or G
ggccagacacctgctgagtcggatttccgggtgctccaaattgctcgaaagttggaaatgtatggcatcagatttcacatggcttnnnnnnnnnnnnnnnnnnnnnnnnnnnnnnnnnnnnnnnnnnnnnnnnnnnnnnnnnnnnnnnnnnnnnnnnnnnnnnnnnnnnnnnnnnnnnnnnnnnnnnnnnnnnnnnnnnnnnnnnnnnnnnnnnnnnnnnnnnnnnnnnnnnnnnnnnnnnnnnnnnnnnnnnnnnnnnnnnnnnnnnnnnnnnnnnnnnnnnnnnnnnnnnnnnnnnnnnnnnnnnnnnnnnnnnnnnnnnnnnnnnnnnnnnnnnnnnnnnnnnnnnnnnnnnnnnnnnnnnnnnnnnnnnnnnnnnnnnnnnnnnnnnnnnnnnnnnnnnnnnnnnnnnnnnnnnnnnnnnnnnnnnnnnnnnnnnnnnnnnnnnnnnnnnnnnnnnnnnnnnnnnnnnnnnnnnnnnnnnnnnnnnnnnnnnnnnnnnnnnnnnnnnnnnnnnnnnnnnnnnnnnnnnnnnnnnnnnnnnnnnnnnnnnnnnnnnnnnnnnnnnnnnnnnnnnnnnnnnnnnnnnnnnnnnnnnnnnnnnnnnnnnnnnnnnnnnnnnnnnnnnnnnnnnnnnnnnnnnnnnnnnnnnnnnnnnnnnnnnnnnnnnnnnnnnnnnnnnnnnnnnnnnnnnnnnnnnnnnnnnnnnnnnnnnnnnnnnnnnnnnnnnnnnnnnnnnnnnnnnnnnnnnnnnnnnnnnnnnnnnnnnnnnnnnnnnnnnnnnnnnnnnnnnnnnnnnnnnnnnnnnnnnnnnnnnnnnnnnnnnnnnnnnnnnnnnnnnnnnnnnnnnnnnnnnnnnnnnnnnnnnnnnnnnnnnnnnnnnnnnnnnnnnnnnnnnnnnnnnnnnnnnnnnnnnnnnnnnnnnnnnnnnnnnnnnnnnnnnnnnnnnnnnnnnnnnnnnnnnnnnnnnnnnnnnnnnnnnnnnnnnnnnnnnnnnnnnnnnnnnnnnnnnnnnnnnnnnnnnnnnnnnnnnnnnnnnnnnnnnnnnnnnnnnnnnnnnnnnnnnnnnnnnnnnnnnnnnnnnnnnnnnnnnnnnnnnnnnnnnnnnnnnnnnnnnnnnnnnnnnnnnnnnnnatgagttccacagaggctttctcgcgcgaggtggagcagaggctggcactctggnactcagggaagcgccctccaaagcccacacaaaaggcagccatcaacgaatcggggacatcctgctcaggaacatgctccagttaaagg

SEQ ID NO: 34773 - DNA, 691 bp, Macaca Mulatta
  misc_feature (1)...(691): n = A,T,C or G
caaaaatagccagcctatcagtactcttccacctgctacttctaccngagccatctgttatcttatcaaaaagtgattctgacaagagcgcctcccaagtgccgccaactctacaagagacagataaatccaagtcaaataccaagcaaaatagtgtgcctccttcacagaccaagtctgaaactagctgggaatctcccaaacaaataaaaaagaagaaaaaagccagacgagaaacgtgaaattttttttcctgaattggacatgtgtttgcaaacactgtcttgaagattatgctgtttatgcaataatttgtgaacatgtacagagttttatataaatttaaaccaatttttaaaacaaaactgcggacacaaccaccataaaaatggaatcaaaagaaagttaatttatgaaattaagaggtcagcagaatatactcagtgatggaagacacttgggaaagtctttttaattgaacaagaacgatcttaatttaagaatattatcttggcttttacagcaagtgcccgtgtttacaacaaggattgtgccctcatctcatctgcagccgaggaataaaggattctgattagaaagagggttgcctacaaattagtaagcaattccttggatcttatgcacagaacttgtaccatttgacatctgtttatgcttaaatcaaagtgct

SEQ ID NO: 34774 - DNA, 112 bp, Macaca Mulatta
agtgggcggacagaatatcaagctacacatggctccaggttacgaagaaccagcacctttgagaggaagcctagtaaacgttatccatcccggagacattcaacgttcaaag

SEQ ID NO: 34775 - DNA, 830 bp, Macaca Mulatta
cccaagcgcaaggctgtgttttatgaatgggatgaatttccaaatgaatggcacagagagaaagtgccataaggattgtaaggaaagagaaatcctttctgatgattcatttgttgtgcacctactcttgcacaaagccctgcttttttccctctggagtgtgtggaccccggccccgagatggttcccctgtttttttctgtggactcgttcactcgcgaaagagtgtctcaaatagtgactacagaagctgcaccaaggaataggaacaaatctcgttctgtctcctaatctttcttcttctgtccctccttttgttttttacgactccacctcccaggccatgtggaagcctgcgtatgacttcttactcacctggagccatcagatcggggacagctaccgggatgtcatccaggagctgcacctgggcctggacaagatgaaaaaccccatcaccaagcgctggaagcacctcacggggactctgatcttggtgaactccctggacattctgagagcagccgccttcagccccgtggaccaggacgacttcgtgatttgagtgggtcccctcccctcctgctgctctggagtgcaagccctcttctgccctgagtgccgctgtcaccacggagctgaagagggaggaagggacagctgctcagacagatttagggcccgccagctaggcctacacccatcctgtgccaccctcctccatcgagggagaggcctgaagggactgcctattgcagctcgttgccaatcacatagctttctatttgttaagtgtaaattgaaatttaaaatcacttttctaaagaatg

SEQ ID NO: 34776 - DNA, 978 bp, Macaca Mulatta
cagatgatattgtgatcacacctggagcaacagcagatgcaggccctttgttgaattgtcccatttgtgacaagatcttcccagctacagagaagcagatctttgaagaccatgtgttctgccactctctctgagtgtcccaacctcctggatgtatacagagattttatagagtagaacctgtagcttctgccatgagttatatgagtctagatcctgcctaacccaaaattattagggatttactcagccctgctgccactaacagcggagttgtgtcactgatctgaaggtcactgttaaggacttctgctgccatccttgtgggttgctacctttaagtcacataactctagctgtatcatcctctcacctatcattcttccgagggtctcagtacaagggccctgggatggagccaacctgggtattcacaacaggcctgacttgatactaagtgattggttttcctagttgtcccactgccattcaaagtcagcccttgagtgtatttgttctcagtcctaaccctggggccagagattggtccgaggttgagaattcttccacctcatcctcggtgttgctttctccaaatgattgcgttagactagccaaaaatgccatggcaaagagctcagaagtccagtttggataccaaaggtttctcatgttaatttctcagcccccaaagaagcatcttactcctgaaccttagacaggaagtattatttcagtcacagaaagcttttctgggtacctctggttagcactttctactctctgatatttcctatgtacatagcttgtattgttgtaaatcctttcttaatggttaaatacggattgttagcaactctggatttgcagttttctgaataggtgagttttgaatatggataagtcagaataatgagacaacttgttaatctctttaatactaaaaataaattactcttctatttcagggacttaggt

SEQ ID NO: 34777 - DNA, 262 bp, Macaca Mulatta
gattctcgcctctattgagctgctggcccgctcattgccaaaaattcaccgcagtgcatcagaaccctccttgaatcgggctggtttccaaacagaggattttagtctatatgcttgtgcttctccaaaaacacccatccaggcagggggatatggtgcgtttcctgtccactgaaataaatgaatgagagagttcaggagagtagcaacaaaaggaaaataaatgaacatatgtttgcttatatgttaaattgaataaaac

SEQ ID NO: 34778 - DNA, 248 bp, Macaca Mulatta
  misc_feature (1)...(248): n = A,T,C or G
tccaggcccaccccggacgacccatatgaggtgacaagagcccgagagctgaaccagctgctggggcccaaggcctcaggccgggcctttgactttgtccttgacctgcacaacaccacggccaacatgggcacctgcttaatcgcgaagtcctcccacgaagtctttgccatgcacctgtgtcgccacctgcagncagctgcagtaccccgagctgtcctgccaggtcttcctgtgccagcggtctg

SEQ ID NO: 34779 - DNA, 247 bp, Macaca Mulatta
  misc_feature (1)...(247): n = A,T,C or G
agacaattgttattcgatgatgaagaggatatagaaacaaatggaggagcggagaaaaattcttcctgttttattgaatggggacttcctggaactaaaaacaaaaccaaagatttggacttctccacttccagtctttcaagaagtaagnagaccaagactggagtaagaccttttaaccctggtagaatgaatgtggcaggagacttatttcagaatggagaatttgcaactcatcatagtcctg

SEQ ID NO: 34780 - DNA, 152 bp, Macaca Mulatta
tttccttctcgcccaccacgccaatgagcagccacggtcgagtcctgtccctgttggttgccatgctgctttcttgctgtggactggcggccgtctgctgcatcaccggctacacccacgtaatgcacaccttggctttcatggctgcagag

SEQ ID NO: 34781 - DNA, 1628 bp, Macaca Mulatta
  misc_feature (1)...(1628): n = A,T,C or G
taccaggagctgcccctgtatgggcctgagcccattgccaggtaccagggccgcgagctttatgagcggccaccccatctctacgctgtggccaatgccacctacaaggcgatgaagcaccggtccagggacacctgcatcgtcatctcagnnnnnnnnnnnnnnnnnnnnnnnnnnnnnnnnnnnnnnnnnnnnnnnnnnnnnnnnnnnnnnnnnnnnnnnnnnnnnnnnnnnnnnnnnnnnnnnnnnnnnnnnnnnnnnnnnnnnnnnnnnnnnnnnnnnnnnnnnnnnnnnnnnnnnnnnnnnnnnnnnnnnnnnnnnnnnnnnnnnnnnnnnnnnnnnnnnnnnnnnnnnnnnnnnnnnnnnnnnnnnnnnnnnnnnnnnnnnnnnnnnnnnnnnnnnnnnnnnnnnnnnnnnnnnnnnnnnnnnnnnnnnnnnnnnnnnnnnnnnnnnnnnnnnnnnnnnnnnnnnnnnnnnnnnnnnnnnnnnnnnnnnnnnnnnnnnnnnnnnnnnnnnnnnnnnnnnnnnnnnnnnnnnnnnnnnnnnnnnnnnnnnnnnnnnnnnnnnnnnnnnnnnnnnnnnnnnnnnnnnnnnnnnnnnnnnnnnnnnnnnnnnnnnnnnnnnnnnnnnnnnnnnnnnnnnnnnnnnnnnnnnnnnnnnnnnnnnnnnnnnnnnnnnnnnnnnnnnnnnnnnnnnnnnnnnnnnnnnnnnnnnnnnnnnnnnnnnnnnnnnnnnnnnnnnnnnnnnnnnnnnnnnnnnnnnnnnnnnnnnnnnnnnnnnnnnnnnnnnnnnnnnnnnnnnnnnnnnnnnnnnnnnnnnnnnnnnnnnnnnnnnnnnnnnnnnnnnnnnnnnnnnnnnnnnnnnnnnnnnnnnnnnnnnnnnnnnnnnnnnnnnnnnnnnnnnnnnnnnnnnnnnnnnnnnnnnnnnnnnnnnnnnnnnnnnnnnnnnnnnnnnnnnnnnnnnnnnnnnnnnnnnnnnnnnnnnnnnnnnnnnnnnnnnnnnnnnnnnnnnnnnnnnnnnnnnnnnnnnnnnnnnnnnnnnnnnnnnnnnnnnnnnnnnnnnnnnnnnnnnnnnnnnnnnnnnnnnnnnnnnnnnnnnnnnnnnnnnnnnnnnnnnnnnnnnnnnnnnnnnnnnnnnnnnnnnnnnnnnnnnnnnnnnnnnnnnnnnnnnnnnnnnnnnnnnnnnnnnnnnnnnnnnnnnnnnnnnnnnnnnnnnnnnnnnnnnnnnnnnnnnnnnnnnnnnnnnnnnnnnnnnnnnnnnnnnnnnnnnnnnnnnnnnnnnnnnnnnnnnnnnnnnnnnnnnnnnnnnnnnnnnnnnnnnnnnnnnnnnnnnnnnnnnnnnnnnnnnnnnnnnnnnnnnnnnnnnnnnnnnnnnnnnnnnnnnnnnnnnnnnnnnnnnnnnnnnnnnnnnnnnnnnnnnnnnnnnnnnnnnnnnnnnnnnnnnnnnnnnnnnnnnnnnnnnnnnnnnnnnnnnnnnnnnnnnnnnnnnnnnncagcacggatcccactctacgggccatgtggccagatgggcagcaggacatcacagaggtgaccaagcgccccctgacggccggcacactcttcaagaactccatggtggccctggtggagaaccttgcctccaag

SEQ ID NO: 34782 - DNA, 640 bp, Macaca Mulatta
  misc_feature (1)...(640): n = A,T,C or G
ttctggttgattttctaaatgtgaagacttactaaatgaattttagatcattctccaaaggagatttttttgctcttctcatcttttccaacagtgttctcctgttaaaggagctaaggtgaagaggggacacctgtctgttttatcaggcagtccgtatctatgagaccaggaaatattttcttaaactcatggggagacagcagattcttgccttggtgaggtcattgctgtgccatatgtcctacccccctgtcttcatgcagggaagttggaaatgggggctacatatgctctctccaccccatctacaagagttgtggtttccatcggattcttccactcttgtcaggggaagaagggggcctggtatctcaggcagattgttgaattcttgttcnnnnnnnnnnnnnnnnnnnnnnnnnnnnnnnnnnnnnnnnnnataccccaaataactgtctatattagacacccccagccagtttctggctgcctgtctttgctgccatgttcttttttacaagaaggaaagagttcttgctattttttttcataatttactatttatgatgtatttaagtgttttattaaggacacagttctgttaggggtgggagggaatatttaagggagggcgggg

SEQ ID NO: 34783 - DNA, 933 bp, Macaca Mulatta
  misc_feature (1)...(933): n = A,T,C or G
atgctggcgcgcgcggcgcggggcactggggcccttntgctgaggnnnnnnnnnnnnnnnnnnnnnnnnnnnnnnnnnnnnnnnnnnnnnnnnnnnnnnnnnnnnnnnnnnnnnnnnnnnnnnnnnnnnnnnnnnnnnnnnnnnnnnnnnnnnnnnnnnnnnnnnnnnnnnnnnnnngccnggtttgaacatcctcatccctgtgttagaccggatccgatatgtgcagagtctcaaggaaattgtcatcaacgtgcctgagcagtcggctgtgactctcgngacaatgtaactctgcaaattgatggagtcctttacctgcgcatcatggnnnnnnnnnnnnnnnnnnnnnnnnnnnnnnnnnnnnnnnnnnnnnnnnnnnnnnnnnnnnnnnnnnnnnnnnnnnnnnnnnnnnnnnnnnnnnnnnnnnnnnnnnnnnnnnnnnnnnnnnnnnnnnnnnnnnnnnnnnnnnnnnnnnnnnnnnnnnnnnnnnnnnnnnnnnnnnnnnnnnnnnnnnnnnnnnnnnnnnnnnnnnnnnnnnnnnnnnnnnnnnnnnnnnnnnnnnnnnnnnnnnnnnnnnnnnnnnnnnnnnnnnnnnnnnnnnnnnnnnnnnnnnnnnnnnnnnnnnnnnnnnnnnnnnnnnnnnnnnnnnnnnnnnnnnnnnnnnnnnnnnnnnnnnnnnnnnnnnnnnnnnnnnnnnnnnnnnnnnnnnnnnnnnnnnnnnnnnnnnnnnnnnnnnnnnnnnnnnnnnnnnnnnnnnnnnnnnnnnnnnnnnnnnnnnnnnnnnnnnnnnnnnnnnnnnnnaatggagatgcagcagcttcactgactgtggccgagcagtatgtcagcgcgttctccaaactggccaaggactccaacactatcctactgccctccaatcccggcgatgtcaccagcatggtggctcag

SEQ ID NO: 34784 - DNA, 814 bp, Macaca Mulatta
tcatgtaatctgttgatgaaaagtttttaagtatcaccagcaaagaatcttctgtcataccagctcagttccttccttcaaagaacagattattcttaagtaatttcaataatattatagagcaataagagctctcattatttagatgcatttgttgaaactatgtcaatgatggttatcttgttgcactgaattagttctttaacaacatacttttttctccctttgaacagactgtacagtggaagcctggtgcacgggctatgccaacaactgctagcatcgacctctgtagaaagtctcctgagcatgtgtcctgaggctaagcaactttatgaacatctattcaatgccacaaggtcatatgcccccactgaaatattcctaccaaaaggtaaatcaaattcgaaaaaaaaaaggcagaagaaacagaataccagctgttctaagaacagagggagaaccactgcacacaccaagtgttggtacaagggaaacaaccggtttgggttgttaatggttgaaaacttagaggaacatagtgaggcctccgaccttgaataaaactcagtttgcatcaaactagatgtatttaatataatccttacttaaaattattctgttacctcccttgaaacaattaactttttctttaggactaacctgttaggggataaacatcacagcaatctgaattccaagttattttgtattttgcttttaataaatacaacctgatttaagaaacttttgtatttctaaatatgtttgaaaccatgtttatatttctcatgttccatttcagcaagttaac

SEQ ID NO: 34785 - DNA, 644 bp, Macaca Mulatta
tgagcatgccagcgtcgtaagccgcctcctagcaggcagcaccacaggtgccctggctgtggctgtggcccagcccacggatgtggtaaaggtccggttccaagctcaggcccgggctggaggtcggagataccaaagcaccgtcgatgcctacaagaccattgcccgagaggaagggtttgggggcctctggaaagggacctctcccaatgttgctcgtaatgccattgtcaactgtgctgagctggtgacctatgacctcatcaaggatgcccttctgaaagccaacctcatgacagatgacctcccttgccacttcacttccgcctttggggcaggcttctgcaccactgtcatcgcctcccctgtagacgtggtcaagacgagatacatgaactctgccctgggccagtacagcagcgctggccactgtgccctcaccatgctccagaaggagggaccccgagccttctacaaagggttcatgccctcctttctccgcttgggttcctggaacgtggtgatgttcgtcacctatgagcagctgaaacgggccctcatggccgcctgcacttcccgagaggctcccttctgagcctctcctgctgctgacctgatcacctctggctttggctctagccggg

SEQ ID NO: 34786 - DNA, 679 bp, Macaca Mulatta
ctttttaccgaattccctcgattggcacctagccagaatcaaaatcatttgaaggattggttcttggagaacaagaggagtgaagtacctgaatgtagaaacaatgaggatggacctagtttaataatggaagaacagcacaagtgttcttcgaagagccttgaacataaaacagagacacctcctgtggaggagaatgtaactcagaaaattagtgacctggaaatttgtgctgatgagtttcctggatcctcagccacctaccgaatactggaggtaaccttttattgtctccgtagtggggtatgtgaagctattatacttgtgcacgtgaagtagcatagagagggtgacaacaaaagtaacttctattggatgatgctgactagacttgacccttatattagcctggaatcacttccatttttgaactgataaaatgccctcagtgcaggccagatacctggtggtcatgatggacaaagatcacatgggaatagcatgtcacttccaaaaatagtattaatagcatcatgctgtacttgtcacatgccactgcatcatacaggtgaaagagctcaacatgatcattgctataaccctggaagaaagtcccagatcagaagacaaactgttgcttctcctctaatacagtttacaggaacaaagagggtagtta

SEQ ID NO: 34787 - DNA, 755 bp, Macaca Mulatta
ggggttcaccacagaggagaggacctctgacctcaggctccgatgaagaaaatgttgccctgcctctgggtgacaatgtgctgactcataacctggggatcccggtgttggtggtatgcacaaagtgtgatgcggtgagtgtcttggaaaaggagcacgattacagggatgagcatttggactttatccagtcacacctgcggaggttctgccttcagttgaaagaagagaaaaacctcgacttgttgtataagtatattgttcataaaacatacggtttccacttcaccacacctgccttagttgtggaaaaggatgccgtttttatacctgcaggctgggacaatgaaaagaaaatagctattttacatgaaaattttacaaccgtgaagccagaagatgcatatgaagactttattgtgaaacctcccgtgagaaagctggtccacgacaaagagttggcagcagaagatgagcaggtgttcctaatgaagcaacagtcactccttgccaagcagccagccacgcccacgagagcttctgtgagtaccttacactaaacagagggtcaaggcccagtgttgcaggtgtcgtcaaactttataccattatttgtgagagcttatatttgtgtgggttttgtgttttcagtggggaattttggtttcccctaaagacccgtggaccggaaacctttaaagaaactcaggatgttttctggtggaaagaatgcaactcttgggaaattagggtga

SEQ ID NO: 34788 - DNA, 141 bp, Macaca Mulatta
  misc_feature (1)...(141): n = A,T,C or G
acacactaaatataacgaacaataactattattctgtcgaagttgaaaacatcactgcccaagttcaatttgcgaaaacagttattggaaaggcacgcttaaacaacataacccatattggtccacttgatatgaaacaan

SEQ ID NO: 34789 - DNA, 152 bp, Macaca Mulatta
ggggccattaagtttaatgatggcctgagcttacaggaaagttgccgccttattgaaactctgtcctcatgccagctgccattccagtgtgctcacgggagaccttctatgctgccattagctgacatagaccacttggagcaggaaaaaca

SEQ ID NO: 34790 - DNA, 642 bp, Macaca Mulatta
ttttgcagggctatgtttgaagtaaacatgaaagaaagagatgatggaagtgttaccatcactaatttgtcctccaaagcagtaaaagcatttctcgattatgcctatactggaaaaacaaaaataacagatgataatgtggaaatgttcttccagttgtcatcatttcttcaagtttccttcctatccaaagcttgcagtgactttttaataaaaagtattaatcttgtcaattgtttacagttattatctatatcagatagctatggctccaccagtttgtttgatcatgcattacactttgtacaacatcacttttctttattatttaaatccagtgatttcttagagatgaattttggagtactacaaaaatgtctggaatcagacgaattaaatgttcctgaagaagaaatggtactgaaagttgtccttagttggactaaacataacttagaatcaaggcaaaagtatctgcctcatttgattgaaaaagtaagattgcatcagttatctgaggagacacttcaggactgtctgttcaacgaagagagtttactcaaaagcacagactgttttgacataatcatggatgcaattaagtgtgtgcaaggttctggtggactcttcccctgatgctcg

SEQ ID NO: 34791 - DNA, 689 bp, Macaca Mulatta
  misc_feature (1)...(689): n = A,T,C or G
gtactccggcccccngcgggttgaccccgccgccgtcgccgccatgacggggctagcgctgctctactccggggtcttcgtggccttctgggcctgcgcgctggccgtgggaatctgctacaccatttttgatttgggcttccgctttgatgtggcatggttcctgacggagacttcgcccttcatgtggtccaacctgggcattggcctagctatctccctgtctgtggttggggcagcctggggtatctatattactggctcttccatcattggtggaggagtgaaggcccccaggatcaagaccaagaacctagtcagcatcatcttctgtgaggctgtggccatctacggcatcatcatggcaattgtcattagcaacatggctgagcctttcagtgccacggaccccaaggccattggccatcggaactaccatgcaggctactccatgtttggggctggcctcaccgtagggctgtctaacctcttctgtggagtctgcgtgggcatcgtgggcagtggggctgccctggccgatgctcagaaccccagcctctttgtaaagattctcatcgtggagatctttggcagtgccattggcctctttggggtcatcgtcgcaattcttcagacctccagagtgaagatgggtgactagatgatatgtgtgggtgggggcgtgcctc

SEQ ID NO: 34792 - DNA, 2040 bp, Macaca Mulatta
  misc_feature (1)...(2040): n = A,T,C or G
agatctcgtattgcccctgcctcattctcttctatccagtgctcatcatggccatggcttcctccctgggcctttacgccgctgtggtccagctctcgtggtcctggggagcatggtggctagctgcccgggacatggagaaaggcttctgtggctggctctgcagcaagctgggtctagaggactgttctccctacagcattgtagagttgcttgaatccgacaatatctcaagcactctctccaacaaggaccccatccaagaggtagaaacctccacggtctaaactcccaacaacttacttcctcctctggccccagtagcctatatatcatcttacaattccagcagattctttctttaaattaccccctgctctctgcagttcttctgggacaccatagtccatactgatcagttttatcatcttgacggttccaggagggcannnnnnnnnnnnnnnnnnnnnnnnnnnnnnnnnnnnnnnnnnnnnnnnnnnnnnnnnnnnnnnnnnnnnnnnnnnnnnnnnnnnnnnnnnnnnnnnnnnnnnnnnnnnnnnnnnnnnnnnnnnnnnnnnnnnnnnnnnnnnnnnnnnnnnnnnnnnnnnnnnnnnnnnnnnnnnnnnnnnnnnnnnnnnnnnnnnnnnnnnnnnnnnnnnnnnnnnnnnnnnnnnnnnnnnnnnnnnnnnnnnnnnnnnnnnnnnnnnnnnnnnnnnnnnnnnnnnnnnnnnnnnnnnnnnnnnnnnnnnnnnnnnnnnnnnnnnnnnnnnnnnnnnnnnnnnnnnnnnnnnnnnnnnnnnnnnnnnnnnnnnnnnnnnnnnnnnnnnnnnnnnnnnnnnnnnnnnnnnnnnnnnnnnnnnnnnnnnnnnnnnnnnnnnnnnnnnnnnnnnnnnnnnnnnnnnnnnnnnnnnnnnnnnnnnnnnnnnnnnnnnnnnnnnnnnnnnnnnnnnnnnnnnnnnnnnnnnnnnnnnnnnnnnnnnnnnnnnnnnnnnnnnnnnnnnnnnnnnnnnnnnnnnnnnnnnnnnnnnnnnnnnnnnnnnnnnnnnnnnnnnnnnnnnnnnnnnnnnnnnnnnnnnnnnnnnnnnnnnnnnnnnnnnnnnnnnnnnnnnnnnnnnnnnnnnnnnnnnnnnnnnnnnnnnnnnnnnnnnnnnnnnnnnnnnnnnnnnnnnnnnnnnnnnnnnnnnnnnnnnnnnnnnnnnnnnnnnnnnnnnnnnnnnnnnnnnnnnnnnnnnnnnnnnnnnnnnnnnnnnnnnnnnnnnnnnnnnnnnnnnnnnnnnnnnnnnnnnnnnnnnnnnnnnnnnnnnnnnnnnnnnnnnnnnnnnnnnnnnnnnnnntgccttggcctcccgagtagctgggattacaggcgcatgccaccaagcccggctaagttttgtattttttttagtagagatggggtttcaccatgttgccaaggctggtcttgaactcctgatctcaggtgatccgcctgccttggcctcccaaagtgctgggattataggaaagaatggttattttggtaggcaagtcagaatgtttgcctcacaatgatcatttaaatacattcagaaccccaaactgctaatatgnnnnnnnnnnnnnnnnnnnnnnnnnnnnnnnnnnnnnnnnnnnnnnnnnngcctgaatcttacacagagaatttatatatagatattagctacatatacttcgaatatgctatacatagatcttagcacctcatatactgtgcaattaagcttctgtaatgtcatgtgatttgtttttggaaaggaatagtggacaggagagtacaatatataatagtagcataactctttgtcttggtggtggaggtgggacgaagtggtattatttaccctagattaaagatcagcaagggaggaattgcatctgccaaagtttcttccaacagagatcagtagccttaagcacaaagaagccagattcagccttctcttgtttggcaaaacctcactaagagctttactccctcagacctttgtgagtttaaccacagacaggatctttgctgtg

SEQ ID NO: 34793 - DNA, 399 bp, Macaca Mulatta
atgctcctgctgctcgtcctagtgctcgaggtgatttttactctgggaggaaccagagcccagtctgtgacccagcttgacagtcaagtctctgtctttgaaggagtccctgtgctgctgaggtgcaactactcatcgtcgtctgtttcagtgtatctcttctggtatgtgcaataccccaaccaaggactccggcttctcctgaagtatttatcagggaccaccctggttaaagggatcaatggttttgaggctgaatttaagaagagtgaaacttccttccacttgaggaaaccctcagcccatataagcgacacggctgagtacttctgtgctgtgagcaactatggaaacaagctgatcttcggcacaggaaccattctgagagtcaagccaaat

SEQ ID NO: 34794 - DNA, 264 bp, Macaca Mulatta
  misc_feature (1)...(264): n = A,T,C or G
aggggctggccaggctgggtgcgggcaacccagaccccggcgcccaacaggnnnnnnnnnnnnnnnnnnnnnnnnnnnnnnnnnnnnnnnnnnnnnnnnnnnnnnnnnnnnnnnnnnnnnnnnnnnnnnnnnnnnnnnnnnnnnnnnnnnnnnnnnnnnnnnnnnnnnnnnnnnnngtcacattgacgtctctgagatccaacagagtttccgagctctgggcatttccatcacgctggagcaggcggagaaaattctgcacag

SEQ ID NO: 34795 - DNA, 802 bp, Macaca Mulatta
tctctgctgacaagcctaccgtgagcagttctccgtgtcagacatcaccaccgcctgctttgagtcctccaaccagctggtcaagtgcgatcctcggcttgggaagtacatggcctgctgcctactctacagaggggacgtggtccctaaggaagtgaatgcagcaatcgcagccacgaagtcgaggcactctgttcagtttgtagattggtgtccaactggtttcaaggtgggcatcaacaatcggccgcccacggtgatgccaggtggggacctggccaaagtccaccgggccgtctgcatgctgagcaacaccacagcaatcgtggaggcctgggcccgcctggaccacaagtttgacctcatgtatgccaagagagcatttctgcactggtacctcagagaaggcatggaagaagcagagttcttggaggccagggaagatctggcagccttggagagggattatgaggaagtggggcaaagtttctgaggcatgtatgatgggtgcaaatgaacatcaagttaaaatggcatgttttcttttcaagccgttatatgcctagtgaatagtttccctgatgagaagagaaacgaaatcaaatcaggcaagactctaggttccacactaaattaagtgggtcagtaccaacaacgaacgcattctttcctggtctactggtacaagccagctctgctacctgggaatctttggaagcttagagtcctttgaactgctgggtcacttctaggtgggattttttttgttttaccaagagacaatgaaatcctaaagtttatg

SEQ ID NO: 34796 - DNA, 898 bp, Macaca Mulatta
  misc_feature (1)...(898): n = A,T,C or G
ggccatcacagtcagaagagtcctatttttgtggcatttcagcttgcacaagtctgtgcaatggacagtctcaaaagacaaaaactgagaagagggctttaaaacgaaggcgatctaaagttcaagaccaaggaaaattgataaaaactctaatacagactaagtcgggatcattgccgagcctgcatgacataatcaaaggaaacaaagagatcaccgtgggaacatttggtgttacagcagtctcgggacatatctaaaattaattgaacttttcatactgaagacttttttgttgttctttggagaacagtctgtggtatttgaagggtttggggagggagaaaatattaatgggaaaaggattcacaaattatggtttccgccttttaaaaaaatacaaggggattgtgtcaaatcttgggaaaatgagctacaagctttacaaagctgaatcacttccccataaggcaaatcggtagatatctctataaaggatgtcttgtttaaaacgaataattaccagggcacaaaaatatatcagggaagcccaagtccccttcggtggggaaaaaggaacgtaaaggccctaaaaccccgcccccctttttgccctttattccccacatttctttgggacccgacctccattatttattgatgccccgcttaggcccaatattcaaaaatcgcctacctagacaagcaagcatagggacccaaccctttgtacttgattacagttaatctatccggcattataaagaggcccctaaccatgtttcctcgacagggtttcaacgccgccgttgacgacgatttgactagagctgttcgttggaccctctacacccatatttcagaattatcggaccgtatggaaccggtctccctatan

SEQ ID NO: 34797 - DNA, 173 bp, Macaca Mulatta
gtctgaggaagatcctgaaggtcgtggggcaggttccagatctgccatcctgcctgcccctgactgacaacacccgcatgctggcctctatcctcatcaacaagctctacgatgacctgcgctgtgacccggagcgcgatcacttccgcaagatctgcgaggaatacatcacg

SEQ ID NO: 34798 - DNA, 788 bp, Macaca Mulatta
  misc_feature (1)...(788): n = A,T,C or G
ggggctgcacaaataccagaatctgatcagataaaacagtttaaggaatttctggggacctacaataaacttacagagacctgctttttggactgtgttaaagacttcacaacaagagaagtaaaacctgaagagaccacctgttcagaacattgcttacagaaatatttaaaaatgacacaaagaatatccatgagatttcaggaatatcatattcagcagaatgaagccctggcagccaaagcaggactccttggccaaccacgatagagaagtcctgatggatgaacttttgatgaaagattgccaacagctgctttattggaaatgaggactcatctgatagaatcccctgaaagcagtagccacaatgttaaaccatctgtcatgactttggcaaatggaaaccactggagaaacaaaattgctatttaccaggaataatcaaactagaaggtcttattgttcaatgaaataataagatgcaacatttgttgaggccttatgattcagcaacttggtcacttgattagaaaaataaaccattgtttcttcaattgtgactgttaattttaaagcaacttatgtgttcaatcatgtatgagatagacaaatttttattactanaagtaaaaataaatgggaaatatcannnnnnnnnnnnnnnnnnnnnnnnnnnnnnnnnnnnnnnnnnnnnngagaccccggnnnnnnnnnnnnnnnnnnnnnnnnnnnnccttgtgggggccccccttccgccccctccgaaaaaacttttcttaaaaacc

SEQ ID NO: 34799 - DNA, 2079 bp, Macaca Mulatta
  misc_feature (1)...(2079): n = A,T,C or G
aggggaatctgcccccagactacagaatcagcctgattgacatcggcctggtgatcgagtacctgatgggcggggcttatcgctgcaactacacgcgcaagcgcttccggactctctaccacaacctcttcggccccaagaggnnnnnnnnnnnnnnnnnnnnnnnnnnnnnnnnnnnnnnnnnnnnnnnnnnnnnnnnnnnnnnnnnnnnnnnnnnnnnnnnnnnnnnnnnnnnnnnnnnnnnnnnnnnnnnnnnnnnnnnnnnnnnnnnnnnnnnnnnnnnnnnnnnnnnnnnnnnnnnnnnnnnnnnnnnnnnnnnnnnnnnnnnnnnnnnnnnnnnnnnnnnnnnnnnnnnnnnnnnnnnnnnnnnnnnnnnnnnnnnnnnnnnnnnnnnnnnnnnnnnnnnnnnnnnnnnnnnnnnnnnnnnnnnnnnnnnnnnnnnnnnnnnnnnnnnnnnnnnnnnnnnnnnnnnnnnnnnnnnnnnnnnnnnnnnnnnnnnnnnnnnnnnnnnnnnnnnnnnnnnnnnnnnnnnnnnnnnnnnnnnnnnnnnnnnnnnnnnnnnnnnnnnnnnnnnnnnnnnnnnnnnnnnnnnnnnnnnnnnnnnnnnnnnnnnnnnnnnnnnnnnnnnnnnnnnnnnnnnnnnnnnnnnnnnnnnnnnnnnnnnnnnnnnnnnnnnnnnnnnnnnnnnnnnnnnnnnnnnnnnnnnnnnnnnnnnnnnnnnnnnnnnnnnnnnnnnnnnnnnnnnnnnnnnnnnnnnnnnnnnnnnnnnnnnnnnnnnnnnnnnnnnnnnnnnnnnnnnnnnnnnnnnnnnnnnnnnnnnnnnnnnnnnnnnnnnnnnnnnnnnnnnnnnnnnnnnnnnnnnnnnnnnnnnnnnnnnnnnnnnnnnnnnnnnnnnnnnnnnnnnnnnnnnnnnnnnnnnnnnnnnnnnnnnnnnnnnnnnnnnnnnnnnnnnnnnnnnnnnnnnnnnnnnnnnnnnnnnnnnnnnnnnnnnnnnnnnnnnnnnnnnnnnnnnnnnnnnnnnnnnnnnnnnnnnnnnnnnnnnnnnnnnnnnnnnnnnnnnnnnnnnnnnnnnnnnnnnnnnnnnnnnnnnnnnnnnnnnnnnnnnnnnnnnnnnnnnnnnnnnnnnnnnnnnnnnnnnnnnnnnnnnnnnnnnnnnnnnnnnnnnnnnnnnnnnnnnnnnnnnnnnnnnnnnnnnnnnnnnnnnnnnnnnnnnnnnnnnnnnnnnnnnnnnnnnnnnnnnnnnnnnnnnnnnnnnnnnnnnnnnnnnnnnnnnnnnnnnnnnnnnnnnnnnnnnnnnnnnnnnnnnnnnnnnnnnnnnnnnnnnnnnnnnnnnnnnnnnnnnnnnnnnnnnnnnnnnnnnnnnnnnnnnnnnnnnnnnnnngatgatagacatgatgtactttgtcatcattatgctggtggtgctgatgagctttggagttgccaggcaagccatcctttttcccaatgaggagccatcatggaaactggccaagaacatcttctacatgccctattggatgatttatggggaagtgtttgcggaccagatagaccnctccctgtggacagaacgagacccgagaggatggtaaaataatccagctgcctccctgcaagacaggagcttggatcgtgccagccatcatggcctgctacctcttagtggcaaacatcttgctggtcaacctcctcattgctgtctttaantttagcaacacattttttgaagtaaaatcgatatccaaccaagtgtggaagtttcagaggtatcagctcatcatgactttccatgaaagaccggttctgcccccacccctgatcatcttcagccacatgaccatgatattccagcacctgtgctgccgatggcggaaacacgagagcgacccggatgaaagggactacggcctgannnnnnnnnnnnnnnnnnnnnnnnnnnnnnnnnnnnnnnnnnnnnnnnnnnnnnnnnnnnnnnntcataacggatgatgagctcaggaagtacatgactttgaagagcagtgcatagaagaatactccagaaaaaggacgatcgggtccactcgtctaatgatg

SEQ ID NO: 34800 - DNA, 158 bp, Macaca Mulatta
aggaagggaaacggagtattcgcggggaacctaccatcttttacatgctccattgtgggacggccttgtacaacaatcttttatggagtaattggtcagtagatgccctttctaagatggtcatcgttgggaacagtttcaaaggacttgaggagagg

SEQ ID NO: 34801 - DNA, 124 bp, Macaca Mulatta
ggacatcaccaggcgctttgtggaggccagccagctcctccacctcaatgccaaggagatggccttcaactgcctgatcggcacagctgggagaagtggctacagcagcggacagttgtggaaa

SEQ ID NO: 34802 - DNA, 575 bp, Macaca Mulatta
  misc_feature (1)...(575): n = A,T,C or G
aatagctgtattatttagaatcttaatatggtataaattagcgaatgtgttccaatattcctttaacatcattcctggacagcagggatttatttaaatgttagctgcctcagagtttttaaagagctaaatactaccgggcgcggtggctcacacctgtaatcccagcactttgggaggccaagacaggcagatcacaaggtcaagagattgagaccatcctggccaacatggtgaaaccccatctctactaaaaatacaaaaattacctgggcgtagtggtgcacatctgtagtcccagctactcgggaggctgaggcaggagaatcgcttgaactcaggaggtgtaggttgcagtgagctgagattgagcaactgcactccagcctggcgacagagcaagaccccctctcnnnnnnnnnnnnnnnnnnnnnnnnnnnnnnnnnnnnnngtggccggacgcaatggctcatgcatgtaatcccaacactttgggagactgagttgggaggatcacttgaagccaggagtttaaaatcagaatggtcaccagagtgagacccctgtctatatat

SEQ ID NO: 34803 - DNA, 151 bp, Macaca Mulatta
atgtctcctcagctggtcccaaagcgcccatgaagttctacgttcctcatgctcctgtgagtttcgggccaggaggtcagctggtgtgtgtaggtcccagctctcccactgacgggcaagcagcccttgttgaactgcacagcatggaggt

SEQ ID NO: 34804 - DNA, 251 bp, Macaca Mulatta
  misc_feature (1)...(251): n = A,T,C or G
cagacaagggtgactgtcgcatcttcaccaggtgcatccaagtggaaggacaaggctttgagtatgtcatcttttcccagccatccaagaagaagtcggtctgtctttccaaccaggcccctacctggaggggcccccagggnnnnnnnnnagcgggtccctggcagccatgatggacgagaccttttctaaaactgccttcctggctggagagggggtgttcacactaagcttcaacatcaggttcaaaa

SEQ ID NO: 34805 - DNA, 247 bp, Macaca Mulatta
cgggcgccgaggaggggcaggtagggctgggacgcaggggtggctggatcccccgacttcagcgcaggccctggtctgaccaccctgggagcagggactttccacagccagctggacgcccactcaacccagtaaaagaggggacccatcctgggagccccggggagggcacagccgcctcctcctgggctcccccatcacctggtgcctaccttccccctgccccctgctgggcctggtcctcacc

SEQ ID NO: 34806 - DNA, 157 bp, Macaca Mulatta
  misc_feature (1)...(157): n = A,T,C or G
ngactgcaaaattcaaaatggggctcaaggtattcgtttcatctacaccagagaaggcagaccaagtggcgaggcttttgttgaacttgaatcagaagatgaagtcaaattggccctgaaaaaagacagagaaactatgggacacagatatgttgaa

SEQ ID NO: 34807 - DNA, 2620 bp, Macaca Mulatta
  misc_feature (1)...(2620): n = A,T,C or G
ttgatggagaaccttgtgacctgtctttgaatataacctggtatctgaaaagtgctgattgttacaatgaaatctacaacttcaagnnnnnnnnnnnnnnnnnnnnnnnnnnnnnnnnnnnnnnnnnnnnnnnnnnnnnnnnnnnnnnnnnnnnnnnnnnnnnnnnnnnnnnnnnnnnnnnnnnnnnnnnnnnnnnnnnnnnnnnnnnnnnnnnnnnnnnnnnnnnnnnnnnnnnnnnnnnnnnnnnnnnnnnnnnnnnnnnnnnnnnnnnnnnnnnnnnnnnnnnnnnnnnnnnnnnnnnnnnnnnnnnnnnnnnnnnnnnnnnnnnnnnnnnnnnnnnnnnnnnnnnnnnnnnnnnnnnnnnnnnnnnnnnnnnnnnnnnnnnnnnnnnnnnnnnnnnnnnnnnnnnnnnnnnnnnnnnnnnnnnnnnnnnnnnnnnnnnnnnnnnnnnnnnnnnnnnnnnnnnnnnnnnnnnnnnnnnnnnnnnnnnnnnnnnnnnnnnnnnnnnnnnnnnnnnnnnnnnnnnnnnnnnnnnnnnnnnnnnnnnnnnnnnnnnnnnnnnnnnnnnnnnnnnnnnnnnnnnnnnnnnnnnnnnnnnnnnnnnnnnnnnnnnnnnnnnnnnnnnnnnnnnnnnnnnnnnnnnnnnnnnnnnnnnnnnnnnnnnnnnnnnnnnnnnnnnnnnnnnnnnnnnnnnnnnnnnnnnnnnnnnnnnnnnnnnnnnnnnnnnnnnnnnnnnnnnnnnnnnnnnnnnnnnnnnnnnnnnnnnnnnnnnnnnnnnnnnnnnnnnnnnnnnnnnnnnnnnnnnnnnnnnnnnnnnnnnnnnnnnnnnnnnnnnnnnnnnnnnnnnnnnnnnnnnnnnnnnnnnnnnnnnnnnnnnnnnnnnnnnnnnnnnnnnnnnnnnnnnnnnnnnnnnnnnnnnnnnnnnnnnnnnnnnnnnnnnnnnnnnnnnnnnnnnnnnnnnnnnnnnnnnnnnnnnnnnnnnnnnnnnnnnnnnnnnnnnnnnnnnnnnnnnnnnnnnnnnnnnnnnnnnnnnnnnnnnnnnnnnnnnnnnnnnnnnnnnnnnnnnnnnnnnnnnnnnnnnnnnnnnnnnnnnnnnnnnnnnnnnnnnnnnnnnnnnnnnnnnnnnnnnnnnnnnnnnnnnnnnnnnnnnnnnnnnnnnnnnnnnnnnnnnnnnnnnnnnnnnnnnnnnnnnnnnnnnnnnnnnnnnnnnnnnnnnnnnnnnnnnnnnnnnnnnnnnnnnnnnnnnnnnnnnnnnnnnnnnnnnnnnnnnnnnnnnnnnnnnnnnnnnnnnnnnnnnnnnnnnnnnnnnnnnnnnnnnnnnnnnnnnnnnnnnnnnnnnnnnnnnnnnnnnnnnnnnnnnnnnnnnnnnnnnnnnnnnnnnnnnnnnnnnnnnnnnnnnnnnnnnnnnnnnnnnnnnnnnnnnnnnnnnnnnnnnnnnnnnnnnnnnnnnnnnnnnnnnnnnnnnnnnnnnnnnnnnnnnnnnnnnnnnnnnnnnnnnnnnnnnnnnnnnnnnnnnnnnnnnnnnnnnnnnnnnnnnnnnnnnnnnnnnnnnnnnnnnnnnnnnnnnnnnnnnnnnnnnnnnnnnnnnnnnnnnnnnnnnnnnnnnnnnnnnnnnnnnnnnnnnnnnnnnnnnnnnnnnnnnnnnnnnnnnnnnnnnnnnnnnnnnnnnnnnnnnnnnnnnnnnnnnnnnnnnnnnnnnnnnnnnnnnnnnnnnnnnnnnnnnnnnnnnnnnnnnnnnnnnnnnnnnnnnnnnnnnnnnnnnnnnnnnnnnnnnnnnnnnnnnnnnnnnnnnnnnnnnnnnnnnnnnnnnnnnnnnnnnnnnnnnnnnnnnnnnnnnnnnnnnnnnnnnnnnnnnnnnnnnnnnnnnnnnnnnnnnnnnnnnnnnnnnnnnnnnnnnnnnnnnnnnnnnnnnnnnnnnnnnnnnnnnnnnnnnnnnnnnnnnnnnnnnnnnnnnnnnnnnnnnnnnnnnnnnnnnnnnnnnnnnnnnnnnnnnnnnnnnnnnnnnnnnnnnnnnnnnnnnnnnnnnnnnnnnnnnnnnnnnnnnnnnnnnnnnnnnnnnnnnnnnnnnnnnnnnnnnnnnnnnnnnnnnnnnnnnnnnnnnnnnnnnnnnnnnnnnnnnnnnnnnnnnnnnnnnnnnnnnnnnnnnnnnnnnnnnnnnnnnnnnnnnnnnnnnnnnnnnnnnnnnnnnnnnnnnnnnnnnnnnnnnnnnnnnnnnnnnnnnnnnnnnnnnnnnnnnnnnnnnnnnnnnnnnnnnnnnnnnnnnnnnnnnnnnnnnnnnnnnnnnnnnnnnnnnnnnnnnnnnnnnnnnnnnnnnnnnnnnnnnnnnnnnnnnnnnnnnnnnnnnnngcttcagaagtggtagcttatacaaaggaaacaggtcctgctggcttaatttatacagttattgcatgaagtaatgtggaggccctggactgctgctcattctttaggatggactgttctggtatctggtattggtttagagcctgtttataagggacatcacaaggtgatgggattcatttgaagcactctatttctgttttaatggttttatccaattttgccttcccaagatttttgttctacataaaaagttcatgccactttttaatat

SEQ ID NO: 34808 - DNA, 779 bp, Macaca Mulatta
gctctggcccggtgggcagaggcatcgcctagagaaaataacctccgggttccctcatccctcttgacaaacctgcctctttccctgaaaccattcagtaaaacctctgatcaaagtgtcagtgctttgaggtggggcacggtggctccgggtggggatgatcctcctggggttcaagccagaggtcaaagtgtgggcagggagccgcttccctctctaccccagaacagtacaaacatttgtatccaacggtaaatgcccttctgctcgccgcagagaagaaaatgaacgggcagggccaacaatggccctggggagctgagggctgaacccttgccagaccattctcccctcccctagacgccctggcttgctgaggtcaatgctgtgcatatgaggcactagcaggtgtggaagggtgggggaagcctggaaaaccagatgctaaaataaatgctggcatgggtggaggctgaagacagggaggctggggagctggttccttctccaggaatcccagctattcttggccagacagcaggagctttgggaatgccacgtgtgtggcctggagaatgtggccattgtgagagcacaaggccacccccagcctgcagggctgcctgttgtggaggctgcatccccagcgcctgcagcgttgcagacccccaggaaggccccttgacctctccctgctgcacaacattctccatctggcctagggggcaaggacattttgctttttgaggagaggcaggcaccctctctccatcacagct

SEQ ID NO: 34809 - DNA, 309 bp, Macaca Mulatta
attaaaatgtaaatgtcaacaataaaaagcaagactatgaaaggctcagatttcttgcagtttaaaatggtgtctgaggtcatactatgttggccaagtctgtaaaaagctggcattcgattttgattatgaagttcatccagcccttgggcattgttatacaccaataaagaaggctgtactcaagaggaggagctgacacatttcacttggctgcgtcttaataaacatgtatgcaagcattggcatatgaagttttctttttaaagcatgataaagaacaatttctttgtgtaatagaacagcctg

SEQ ID NO: 34810 - DNA, 149 bp, Macaca Mulatta
gcttcagggtaagggaccaggaggaccacctcccaagggcctgatgtactcagtcaacccgaacaaagtcgatgacctgagcaagttaggagaaaacattgcaaagatgtgtcgtgggattccaacatacatggctgaggagatgcaag

SEQ ID NO: 34811 - DNA, 2004 bp, Macaca Mulatta
  misc_feature (1)...(2004): n = A,T,C or G
agctgcagccacccgcgtgcggcacgcgccggccgcctgcccctatcgcggccaccagtgccgcggcctctcgactcccgccccgccgagccgcgcgcgcgactgccatcctcctcaattgctttttacgattttttgtgcatgcattcattttctgttccgttttgtccttnnnnnnnnnnnnnnnnnnnnnnnnnnnnnnnnnnnnnnnnnnnnnnnnnnnnnnnnnnnnnnnnnnnnnnnnnnnnnnnnnnnnnnnnnnnnnnnnnnnnnnnnnnnnnnnnnnnnnnnnnnnnnnnnnnnnnnnnnnnnnnnnnnnnnnnnnnnnnnnnnnnnnnnnnnnnnnnnnnnnnnnnnnnnnnnnnnnnnnnnnnnnnnnnnnnnnnnnnnnnnnnnnnnnnnnnnnnnnnnnnnnnnnnnnnnnnnnnnnnnnnnnnnnnnnnnnnnnnnnnnnnnnnnnnnnnnnnnnnnnnnnnnnnnnnnnnnnnnnnnnnnnnnnnnnnnnnnnnnnnnnnnnnnnnnnnnnnnnnnnnnnnnnnnnnnnnnnnnnnnnnnnnnnnnnnnnnnnnnnnnnnnnnnnnnnnnctgcgcgagcggctgcaggaggcgaagctggagcgcgagcaggagcagcgacggcacacggcntacatttcggagctcaaggccaagctgcatgaagagaagaccaaggagctgcaggcgctgcgcgaggggctcatccggcagcacgagcaggaggcggcgcgcacggccaagatcaaggagggcgagctgcagcggctgcaggccacactgaacgtgctgcgcgatggcgcggccgacaaggtcaagacggcgctgctgactgaggcgcgcgaggaggcgcgcagggccttcgacggagagcgcctgcggctgcagcaggagatcctggagctcaaggcagcgcgcaagcaggcagaggaggcgctcagtaactgcatgcaggccgacaagaccaaggcagccgacctgcgcgccgcttaccaggcgcaccaagacgaggtgcaccgcatcaagcgcgagtgcgagcgcgacatccgcaggctnnnnnnnnnnnnnnnnnnnnnnnnnnnnnnnnnnnnnnnnnnnnnnnnnnnnnnnnnnnnnnnnnnnnnnnnnnnnnnnnnnnnnnnnnnnnnnnnnnnnnnnnnnnnnnnnnnnnnnnnnnnnnnnnnnnnnnnnnnnnnnnnnnnnnnnnnnnnnnnnnnnnnnnnnnnnnnnnnnnnnnnnnnnnnnnnnnnnnnnnnnnnnnnnnnnnnnnnnnnnnnnnnnnnnnnnnnnnnnnnnnnnnnnnnnnnnnnnnnnnnnnnnnnnnnnnnnnnnnnnnnnnnnnnnnnnnnnnnnnnnnnnnnnnnnnnnnnnnnnnnnnnnnnnnnnnnnnnnnnnnnnnnnnnnnnnnnnnnnnnnnnnnnnnnnnnnnnnnnnnnnnnnnnnnnnnnnnnnnnnnnnnnnnnnnnnnnnnnnnnnnnnnnnnnnnnnnnnnnnnnnnnnnnnnnnnnnnnnnnnnnnnnnnnnnnnnnnnnnnnnnnnnnnnnnnnnnnnnnnnnnnnnnnnnnnnnnnnnnnnnnnnnnnnnnnnnnnnnnnnnnnnnnnnnnnnnnnnnnnnnnnnnnnnnnnnnnnnnnnnnnnnnnnnnnnnnnnnnnnnnnnnnnnnnnnnnnnnnnnnnnnnnnnnnnnnnnnnnnnnnnnnnnnnnnnnnnnnnnnnnnnnnnnnnnnnnnnnagaagcatgttgtggagacattttttggatttgatgaggagtctgtggactcagaaacattgtccgaaacatcctacaacacagacaggacggacaggactccagccacgcctgaagaagacttggacgatccacagcccgcgaggaggctgacctgcgcttctgccagctgacccgggagtaccaggccctgcaacgtgcctatgccctgctccaggagcaggtggggggcaccctggatgctgagagggaggcccg

SEQ ID NO: 34812 - DNA, 820 bp, Macaca Mulatta
  misc_feature (1)...(820): n = A,T,C or G
gagtgaaggctgcgcagactgagttaggacagcaaatcctggccgattttgaagaagcgtttccttcccagggcaccaagnnnnnnnnnnnnnnnnnnnnnnnnnnnnnnnnnnnnnnnnnnnnnnnnnnnnnnnnnnnnnnnnnnnnnnnnnnnnnnnnnnnnnnnnnnnnnnnnnnnnnnnnnnnnnnnnnnnnnnnnnnnnnnnnnnnnnnnnnnnnnnnnnnnnnnnnnnnnnnnnnnnnnnnnnnnnnnnnnnnnnnnnnnnnnnnnnnnnnnnnnnnnnnnnnnnnnnnnnnnnnnnnnnnnnnnnnnnnnnnnnnnnnnnnnnnnnnnnnnnnnnnnnnnnnnnnnnnnnnnnnnnnnnnnnnnnnnnnnnnnnnnnnnnnnnnnnnnnnnnnnnnnnnnnnnnnnnnnnnnnnnnnnnnnnnnnnnnnnnnnnnnnnnnnnnnnnnnnnnnnnnnnnnnnnnnnnnnnnnnnnnnnnnnnnnnnnnnnnnnnnnnnnnnnnnnnnnnnnnnnnnnnnnnnnnnnnnnnnnnnnnnnnnnnnnnnnnnnnnnnnnnnnnnnnnnnnnnnnnnnnnnnnnnnnnnnnnnnnnnnnnnnnnnnnnnnnnnnnnnnnnnnnnnnnnnnnnnnnnnnnnnnnnnnnnnnnnnnnnnnnnnnnnnnnnnnnnnnnnnnnnnnnnnnnnnnnnnnnnnnnnnnnngaaccttggagagctgatagatcggtttgtggctgatttcaaagcccaggggccacttaagcccaacactgatgaagggggtgccgtgctccccagctgcgctgacctctttgt

SEQ ID NO: 34813 - DNA, 648 bp, Macaca Mulatta
  misc_feature (1)...(648): n = A,T,C or G
aattatggtaaaaaaacatttgcttggtctacaggagatcattaatgttttgtgaccatataagttgtaacagtggattgtttttatgtgtaggtattgttaaatacagggactgtttccaggcacagaacatgaatcgtaagttaggatggacattagatgtgattatgatgataaagcgaaggtctgcagtcctatatctacagatgcgtggtgagaaattagaacaaactggagatgggccattgacacatggactctgcctgggcatgttaggaaaatactttgactccaagccttaaaatactcacatggagtcggcgctcacctcattcacacaatcatagagctccctggacactgaacctctaaagggaaaaggtctaccctggagcaggagcatcagggtttgcttgggagcatgagaggtgagctcagggctaggcctgggccaggccccggcagcactgctacttgggaggagccacttcacctttgtattagttattaaaaatataatttgggctggacgtnnnnnnnnnnnnnnnnnnnnnnnnnnnnnnnnnnntcggaggcatgcnnnnnnnnnnnnnnnnnnnnnnnnnnnnnnccctggccaatacggtgaaacctcgtctctactaaaaa

SEQ ID NO: 34814 - DNA, 1148 bp, Macaca Mulatta
atggaggaaggtggtgattttgacaactactatggggcagacaaccagtctgagtgtgagtacacagactggaaatcctcgggggccctcatccctgccatctacatgttggtcttcctcctgggcaccacgggcaacggtctggtgctctggaccgtgtttcggagcagccgggagaagaggcgctcggctgatatcttcatcgccagcctggcagtggctgacctgaccttcgtggtgacgctgcccctgtgggctacctacacgtaccgggactatgactggccctttgggaccttctcctgcaagctcagcagctacctcatctttgtcaacatgtacgccagtgtcttctgcctcaccggcctcagcttcgaccgctacctggccatcgtgaggccagtggccaacgctcggctgaggctgcgggtcagcggggccgtggccacggcggtcctgtgggtgctggccgccctcctggccatgcctgtcatggtgttccgcaccaccggggacctggagaacaccaccaaggtgcagtgctacatggactactccatggtggccactgtgagctcggattgggcctgggaggtgggcctgggggtctcgtccaccaccgtgggcttcgtggtgcccttcaccatcatgctgacctgttacttcttcatcgcccaaaccatcgctggccacttccgcaaggagcgcatcgagggcctgcggaagcggcgccggctgctcagcatcatcgtggtgctggtggtgacatttgccctgtgctggatgccctaccacctggtgaagacgctgtacatgctgggcagtctgctgcactggccctgtgactttgacctcttcctcatgaacgtcttcccctactgcacctgcatcagctacgtcaacagctgcctcaaccctttcctctatgccttcttcgatccccgcttccgccaggcctgcacctccatgctctgctgtggccagagcagatgtgcgggcacctcccacagcagcagtggggagaagtcagccagctactcttcggggcacagccaggggcctggccccaacatgggcaagggtggagaacagatgcacgagaaatccatcccctacagccaggagacccttgtggttgactagggccg

SEQ ID NO: 34815 - DNA, 1325 bp, Macaca Mulatta
  misc_feature (1)...(1325): n = A,T,C or G
tttttttggtcggccgccnnnnnnnnnnnnnnnnnngcgggcaggaaacatatttgttttttttataagccgcgcgcacggaggggtttaatattttcctccccgcccggcctctttgggggtggtcctcccccccctcttgttgtggagagaggtttctttcttttttgccgccaacaacacttctttttcatataatacacccccccccgggggccgggggttgattttatttttgtggggggctctttcttgtggatttcccgttggtggggggggacccccctgggtgtctacaacaaccccccacttttggtctttttataacaacacctcgnnnnnnnnnnnnnnnnnnnnnnnnnnnnnnnnnnnnnnnnnnnnnnnncttgggggggaaaacccnnnnnnnnnnnnnnnnnnnnnggttttccgggaaaaaactataaggggggggggggcgcccnnnnnnnnnnnnnnnnnnnnnnnnnnnnnnnnnaaggggccctagggagaaannnnnnnnnnnnnnnnnnnnnnnnnnnnnnnnnnnnnnnnnnnnnnnnnnnnnnnnnnnnnnnnnnnnnnnnnnnnnnnnnnnnnnnnnnnnnnnnnnnnnnnnnnnnnnnnnnnnnnnnnnnnnnnnnnnnnnnnnnnaggcacatatttagttgttgtggttgtggttgtggttgttttacaaaaggaaatttatttcaaaagcatgaggggacatttacatttaaacaaggtgataaacaggtgtgttgcaaaagaaaaaaaaatccatggcattaggttttttattcaaattcggaagcaaaaataacctaaattgtgcactattgccttaggaaagggaaggggaagagtgaggggtaagggagcagtcaatcaactcagtatcgaacttgagagaataacatcacttctgctcagctttgagtttacaaatatgcttataaagaggaaaagtggaaaaattatacttaatgttcaaatttatttagctgtagtctcaatacaatttctgtacttgaaatggctttggccactggctgatacatctctgaggtccagattagctggtcagttttcaaatggcaatttgatattccttttctgttcagattccaagggaatttaggttcagctcatggtcttttggaatgtttagagattattgccaccactccatagtcaagctgaccaacttcttttgctcacttgtatcattctagcctttcagaacgattttccccatacacatgtgcagtaattctcacaaaggagttttgcttcttctgcagtgtagaggaaatggtaat

SEQ ID NO: 34816 - DNA, 395 bp, Macaca Mulatta
atagtctatggagtgactcgtacactcgaaggcttcatgatgggtttcagggtttagcagtgttatggatgctcttgctcaggttgacgatgtttataatgtgaatttcaggaagatcaggagcaagtcccttagacttaagaattcttaagattttattgcctgtcacaaaacgtacttgtgcaacaccatgtgaatctctcaggatcacaccgatttgtgaaggagtcaggcccttcttggccagtttgtaaatctgctccttcacgtcgtcagatgtcaacttcaaccaagtggggacgctgcgtcgatagggcaaagccgactgggacaggcccttcccgggagcatgcatgcgacccatgatggcggcagtcaggcagcgaaaagagccc

SEQ ID NO: 34817 - DNA, 863 bp, Macaca Mulatta
gtggcaggcacagacatgccacttaacacctgcattcttcccaaaatgttaggcatcttctggttccatttgccagagatttcttttgatgcctgtcttttgcaaatgtggcttattcattcattccaggcaattgaatcaggtatccttctggcaatggccctggatcgctatgtggccatctgtatccccttgagacatgccaccatcttttccccacagttcttaactcatattggacttggggtgacactcagggctgccattcttataataccttccttagggctcatcaaatgctgtcttaaacattatcgaactacagtcgtctctcactcttattgtgagcacatggccattgtgaagctggctattgaagatatccgagtcaacaagatatatggcctatttgttgccttcgcaatcctagggtttgacataatctttattaccttgtcctatgtccaaatttttatcactgtctttcagctgccccagaaggaggcacgattcaaggccttcaatacatgcattgcccacatttgtgtcttcctacagttctaccttcttgccttcttctctttcttcacacacaggtttggttcacacataccaccatatgttcatatcctcttgtcaaatctttacctgttagttccaccttttctcaaccctattgtctatggagtgaagaccaagcaaattcgtgaccatgttctgaaagtgtttttcttcaaaaaagtaacttgatcattagtgactcctatagagatttagggttggttctaagtaaaaacctaaatgtaatgaaagtcacagatcaatattctcaaactactagctcaacacatacctgtaattct

SEQ ID NO: 34818 - DNA, 260 bp, Macaca Mulatta
taggggcaggactcaatgtcctgataagccatgttctcattgcatgactcgcactgatgttgttgtgtgtattgttttagaatgcacggatctcaaaggaaacaaacacccgataaactcgaagtggaagactgacaactgtgagagatgcacttgctacaaaacagaaattatctgttgcaccctgtaagtctcaagccagtgctggccaagagggggatatagctgttctctgaggaacagctactccctcttgcaaa

SEQ ID NO: 34819 - DNA, 173 bp, Macaca Mulatta
ttggtgcagtaactgtgataagtccactagaattgattagaaccaagatgcagtccaagaagttttcttacacggaactgcatcgatttgtcagcaagaaagtatctgaagatggttggatttccctttggaggggctgggctcctactgttcttagagatgtacctttctca

SEQ ID NO: 34820 - DNA, 339 bp, Macaca Mulatta
  misc_feature (1)...(339): n = A,T,C or G
caaancccaaaccccctaccactaccaccaccaaaggtgccaggccctgcaagacacagggcagcataggcatcatgattggccacaggtcagcagagccccagggaccccgacacccctccccaggaagctgaggaacagcctcctctctcacccagggccttgaaggaatcatagctctcttgatgccagcctgttctccttcacaaataaaaaccctggttttgtagcaaggaggcctattgtccttgcttcccttcccacagctcaagggtccaccaggtacaccttctgccaaggcagtatgatcagatcctggggacaccaaggagggcaccc

SEQ ID NO: 34821 - DNA, 3880 bp, Macaca Mulatta
  misc_feature (1)...(3880): n = A,T,C or G
tcactttcananaantggtatctccacaataattcaaacaanganaaaatgcanaantggtttgccaanttancanttcacctgcncctgctgtcagctggttgtatcataatgaggaagtcaccgctatttccgacannnnnnnnnnnnnnnnnnnnnnnnnnnnnnnnnnnnnnnnnnnnnnnnnnnnnnnnnnnnnnnnnnnnnnnnnnnnnnnnnnnnnnnnnnnnnnnnnnnnnnnnnnnnnnnnnnnnnnnnnnnnnnnnnnnnnnnnnnnnnnnnnnnnnnnnnnnnnnnnnnnnnnnnnnnnnnnnnnnnnnnnnnnnnnnnnnnnnnnnnnnnnnnnnnnnnnnnnnnnnnnnnnnnnnnnnnnnnnnnnnnnnnnnnnnnnnnnnnnnnnnnnnnnnnnnnnnnnnnnnnnnnnnnnnnnnnnnnnnnnnnnnnnnnnnnnnnnnnnnnnnnnnnnnnnnnnnnnnnnnnnnnnnnnnnnnnnnnnnnnnnnnnnnnnnnnnnnnnnnnnnnnnnnnnnnnnnnnnnnnnnnnnnnnnnnnnnnnnnnnnnnnnnnnnnnnnnnnnnnnnnnnnnnnnnnnnnnnnnnnnnnnnnnnnnnnnnnnnnnnnnnnnnnnnnnnnnnnnnnnnnnnnnnnnnnnnnnnnnnnnnnnnnnnnnnnnnnnnnnnnnnnnnnnnnnnnnnnnnnnnnnnnnnnnnnnnnnnnnnnnnnnnnnnnnnnnnnnnnnnnnnnnnnnnnnnnnnnnnnnnnnnnnnnnnnnnnnnnnnnnnnnnnnnnnnnnnnnnnnnnnnnnnnnnnnnnnnnnnnnnnnnnnnnnnnnnnnnnnnnnnnnnnnnnnnnnnnnnnnnnnnnnnnnnnnnnnnnnnnnnnnnnnnnnnnnnnnnnnnnnnnnnnnnnnnnnnnnnnnnnnnnnnnnnnnnnnnnnnnnnnnnnnnnnnnnnnnnnnnnnnnnnnnnnnnnnnnnnnnnnnnnnnnnnnnnnnnnnnnnnnnnnnnnnnnnnnnnnnnnnnnnnnnnnnnnnnnnnnnnnnnnnnnnnnnnnnnnnnnnnnnnnnnnnnnnnnnnnnnnnnnnnnnnnnnnnnnnnnnnnnnnnnnnnnnnnnnnnnnnnnnnnnnnnnnnnnnnnnnnnnnnnnnnnnnnnnnnnnnnnnnnnnnnnnnnnnnnnnnnnnnnnnnnnnnnnnnnnnnnnnnnnnnnnnnnnnnnnnnnnnnnnnnnnnnnnnnnnnnnnnnnnnnnnnnnnnnnnnnnnnnnnnnnnnnnnnnnnnnnnnnnnnnnnnnnnnnnnnnnnnnnnnnnnnnnnnnnnnnnnnnnnnnnnnnnnnnnnnnnnnnnnnnnnnnnnnnnnnnnnnnnnnnnnnnnnnnnnnnnnnnnnnnnnnnnnnnnnnnnnnnnnnnnnnnnnnnnnnnnnnnnnnnnnnnnnnnnnnnnnnnnnnnnnnnnnnnnnnnnnnnnnnnnnnnnnnnnnnnnnnnnnnnnnnnnnnnnnnnnnnnnnnnnnnnnnnnnnnnnnnnnnnnnnnnnnnnnnnnnnnnnnnnnnnnnnnnnnnnnnnnnnnnnnnnnnnnnnnnnnnnnnnnnnnnnnnnnnnnnnnnnnnnnnnnnnnnnnnnnnnnnnnnnnnnnnnnnnnnnnnnnnnnnnnnnnnnnnnnnnnnnnnnnnnnnnnnnnnnnnnnnnnnnnnnnnnnnnnnnnnnnnnnnnnnnnnnnnnnnnnnnnnnnnnnnnnnnnnnnnnnnnnnnnnnnnnnnnnnnnnnnnnnnnnnnnnnnnnnnnnnnnnnnnnnnnnnnnnnnnnnnnnnnnnnnnnnnnnnnnnnnnnnnnnnnnnnnnnnnnnnnnnnnnnnnnnnnnnnnnnnnnnnnnnnnnnnnnnnnnnnnnnnnnnnnnnnnnnnnnnnnnnnnnnnnnnnnnnnnnnnnnnnnnnnnnnnnnnnnnnnnnnnnnnnnnnnnnnnnnnnnnnnnnnnnnnnnnnnnnnnnnnnnnnnnnnnnnnnnnnnnnnnnnnnnnnnnnnnnnnnnnnnnnnnnnnnnnnnnnnnnnnnnnnnnnnnnnnnnnnnnnnnnnnnnnnnnnnnnnnnnnnnnnnnnnnnnnnnnnnnnnnnnnnnnnnnnnnnnnnnnnnnnnnnnnnnnnnnnnnnnnnnnnnnnnnnnnnnnnnnnnnnnnnnnnnnnnnnnnnnnnnnnnnnnnnnnnnnnnnnnnnnnnnnnnnnnnnnnnnnnnnnnnnnnnnnnnnnnnnnnnnnnnnnnnnnnnnnnnnnnnnnnnnnnnnnnnnnnnnnnnnnnnnnnnnnnnnnnnnnnnnnnnnnnnnnnnnnnnnnnnnnnnnnnnnnnnnnnnnnnnnnnnnnnnnnnnnnnnnnnnnnnnnnnnnnnnnnnnnnnnnnnnnnnnnnnnnnnnnnnnnnnnnnnnnnnnnnnnnnnnnnnnnnnnnnnnnnnnnnnnnnnnnnnnnnnnnnnnnnnnnnnnnnnnnnnnnnnnnnnnnnnnnnnnnnnnnnnnnnnnnnnnnnnnnnnnnnnnnnnnnnnnnnnnnnnnnnnnnnnnnnnnnnnnnnnnnnnnnnnnnnnnnnnnnnnnnnnnnnnnnnnnnnnnnnnnnnnnnnnnnnnnnnnnnnnnnnnnnnnnnnnnnnnnnnnnnnnnnnnnnnnnnnnnnnnnnnnnnnnnnnnnnnnnnnnnnnnnnnnnnnnnnnnnnnnnnnnnnnnnnnnnnnnnnnnnnnnnnnnnnnnnnnnnnnnnnnnnnnnnnnnnnnnnnnnnnnnnnnnnnnnnnnnnnnnnnnnnnnnnnnnnnnnnnnnnnnnnnnnnnnnnnnnnnnnnnnnnnnnnnnnnnnnnnnnnnnnnnnnnnnnnnnnnnnnnnnnnnnnnnnnnnnnnnnnnnnnnnnnnnnnnnnnnnnnnnnnnnnnnnnnnnnnnnnnnnnnnnnnnnnnnnnnnnnnnnnnnnnnnnnnnnnnnnnnnnnnnnnnnnnnnnnnnnnnnnnnnnnnnnnnnnnnnnnnnnnnnnnnnnnnnnnnnnnnnnnnnnnnnnnnnnnnnnnnnnnnnnnnnnnnnnnnnnnnnnnnnnnnnnnnnnnnnnnnnnnnnnnnnnnnnnnnnnnnnnnnnnnnnnnnnnnnnnnnnnnnnnnnnnnnnnnnnnnnnnnnnnnnnnnnnnnnnnnnnnnnnnnnnnnnnnnnnnnnnnnnnnnnnnnnnnnnnnnnnnnngactaaattaagaagaaattatttaacattttaatgtgccataaaagtgtaaatgataaacaatttcacttccactatgtgttctattctggatgttctagctagaagtcattttaagattttgataaacaattttggttgaagaaattccttaaatattcaacacaaaccttctgatatcttttgttagggttataccagaataaaatgcttctttacttccaagctatgcaagctcccagaggtaagagagtgacacatgatttaacttatatgtaaggtttaaaaaagtatttatgattataaacatacataccatttgggagcaggtttactaaccttgagagccaaaggtttccttaggccctgtaacattcagaacctttggtgtttcagnnnnnnnnnngctcaaatagtgacgggatagggaatgtgttccaaaagaatattggagcaatttttagcattgcagaaacctgctttgggcatgtgtctctgtagagataacctgatgattattaaatgtaaaattaaggcaactcatgaatatttttatttacgaagtgcttgaaactgtcagccaaggagagacgactaagtaattttatataattcctcacttttctggctacagcaggacagaatatgaccatcttcatttgaaggcaccaaatcgtcgca

SEQ ID NO: 34822 - DNA, 290 bp, Macaca Mulatta
agttccttgaactttgtaagacgcagacagcggaccaccctgaggtggtcccattcctctctaaccggcagcaacgtgcccactctctgtttttggcctcggcggagttctgcaacatcctctctcgggtcctatctcgggcccagagccggccatctaagctctatgtctacatcaatgagctctgcactgttctcaaggcccactcagccaaaaaggagctgaacttggcccctgctgccaccacgtccaatgaaccgtctgggaataaccctcccacacacctctcc

SEQ ID NO: 34823 - DNA, 410 bp, Macaca Mulatta
tgccttcctgcctttggaagtgacaaggtgcctcttgcctctgcagacagtgggtgaatctctgctctacatgctggagaagtgtctgggccctgccttcacaccagccacacgggccgcctggagccagctctacggggctgtggtgcaggccatgagtcgaggctgggacagcgagtaagaggcgaccctgcccagtggcccccatctgtttgtgtctgtctgttggtctgtatctgttgtagcccaggctctccaagcttccctgcatcttggtccttgtccccttggccacactggagaggtgctggggcagggctgggtctcagtctcccagagtccaactgcaggagtggcttttcctccaggaaggggcttctgggtgtcccctcatccccaatagcctcttt

SEQ ID NO: 34824 - DNA, 177 bp, Macaca Mulatta
  misc_feature (1)...(177): n = A,T,C or G
agtgtttgagcaacacacctccacttactgagtatttcctcaatgataagtatcaagaagaactgaattttgacaatcccttaggaatgagaggtgaaatagctaaatcttatgccgaactgatcaagcaaatgtggtctggaaagtttagctacgtcaccccaagagcctttaagn

SEQ ID NO: 34825 - DNA, 540 bp, Macaca Mulatta
gtttttaaacagtttagcttaaaaccatcttatgaacatttctgcttctctcacattcatccttgcttccttttaagaacctaacaatctgtgtgacagttttaaaggtattactagataagactgtaaatttctagaatttcataataaactcagctatctccttcaagaacactaaaactaatcatgctgaataagaatttctaaaattaaatcttttctttcaaggaagtctgaatcattccatagggctacattttggttcctttcttcgtttttttctgggcctgaagacatcatttattctgctcttgaacagacttagttgaagttgtatgcccagaatagatgctggcgagagtcagtgtgggcacatatataacactttggtttcacaatagacatagcataggattgaagctgacttttcagaagatacaactttagaatgggaatcctgattttattggtgccataggatattgctatcgtcttaccatttttccgctagtccccttcggtttctttcacaggttacca

SEQ ID NO: 34826 - DNA, 371 bp, Macaca Mulatta
tgtcgcgccctcccagccgggcttttgactttagtgactagccgccacccagcgctgtctcctgtctatctgggtctgctaacagactggggtcagcgtttgcactatgaccttcagaaaggcatttgggttggaactgagtcccaagatgtgccctgggaggagttgcacaataggtttcaaagcctctgtcaggcccctccacctctgaaagataaagttctaactgccctggagacctgtaaagcgcaggatggagatttcgaagtacctggtcttagcatctggacagatctcttattagctcttcggagtggtgcatttaggaaaagacaagttttgggtctcagcccaggcctcagttctgtata

SEQ ID NO: 34827 - DNA, 565 bp, Macaca Mulatta
  misc_feature (1)...(565): n = A,T,C or G
gggctgttgagcgggggccgaccgacgactgggagtttgttttctgtgcttgtgcgttttctattcggcttccttcccgttagcggggccacaagggttgctaggcaacaggtcctgggtgacttggccttagggttctgcccggcttggggctgatgaaaggagccgtccgcgcccgggctcttccgagaaggggttgccgacagtcacaaagtggaagggagggaggcggcgtggacgagtaagnnnnnnnnnnnnnnnnnnnnnnnnnnnnnnnnnnnnnnnnnnnnnnnnnnnnnnnnnnnnnnnnnnnnnnnnnnnnnnnnnnnnnnnnnnnnnnnnnnnnnnnnnnnnnnnnnnnnnnnnnnnnnnnnnnnnnnnnnnnnnnnnnnnnnnnnnnnnnnnnnnnnnnnnctttctaagacctcttctgacttaagtaaaatggctgctatatacctggtagatgtagaccaaactccagtttatacacagtattttgacatcagttatattccgtctactgtctttttcttcaatgggcagcatatgaaagtggattatg

SEQ ID NO: 34828 - DNA, 895 bp, Macaca Mulatta
  misc_feature (1)...(895): n = A,T,C or G
caccatgaagcgagggccccggagcctgcggggcagggacgcgccagcccccacgccctgcgtcccggccgagtgcttcgacctgctggtccggcactgcgtggcctgcggactcctgcgcacgccgcggccgaaacnnnnnnnnnnnnnnnnnnnnnnnnnnnnnnnnnnnnnnnnnnnnnnnnnnnnnnnnnnnnnnnnnnnnnnnnnnnnnnnnnnnnnnnnnnnnnnnnnnnnnnnnnnnnnnnnnnnnnnnnnnnnnnnnnnnnnnnnnnnnnnnnnnnnnnnnnnnnnnnnnnnnnnnnnnnnnnnnnnnnnnnnnnnnnnnnnnnnnnnnnnnnnnnnnnnnnnnnnnnnnnnnnnnnnnnnngccccagaaccnctggacaaggtcatcattctgtctccgggaatctctgatgccgcagctcctgcctggcctcctcctggggaagacccaggaaccaccccacctggccacagtgtccctgtgccagccacagagctgggctccactgaactggtgaccaccaagacggccggccctgagcaacaatagcagggagccggcaggaggtggcccctgccctccctctggacccccgccaggggcttggaaatcaaattttgctcttcactccagcatgcacatgccctctttctgggaccaggctaaccctgcagaagcacagacactacagaccacagcgttcagcccccatggagtttggtgtgctcacctttggcttcagaccacaccatctttgaaagcccttgaaggtggtagcccagctcctgttcctgtgccttcaaaaggctggggcactatgagtaagagaccgcttttaaaatggggaaggcaccattaagccaaaatgagtctgaaaaaggacca

SEQ ID NO: 34829 - DNA, 2155 bp, Macaca Mulatta
  misc_feature (1)...(2155): n = A,T,C or G
tggggacagcagctgggtccagcagagctggctgggggcctgacagcagtttatcctaactgatgctgggtgggcgtaggccctgagatgggcatcagggagaggggacgccagatacacggcctaagcagggtgaggagcagctgccagccccggcaggcccaggccctgtctgggtgcacaggaccgagacacagcaacatgcccaggnnagggagtgccgcttcctgggctagaaacaagcaccagcctgcagtggagaacgcggggccccgctgcccagaaggagcggccacgnnnnnnnnnnnnnnnnnnnnnnnnnnnnnnnnnnnnnnnnnnnnnnnnnnnnnnnnnnnnnnnnnnnnnnnnnnnnnnnnnnnnnnnnnnnnnnnnnnnnnnnnnnnnnggcaccatgttccgcaagaaaaagaagaaacgccctgagatctcagccccacagaacttccagcaccgtgtccacacctccttcgaccccaaagaaggcaagtttgtgggccttcccccacaatggcagaacatcctggacacactgcggcgccccaagcccgtggtggacccttcgcgaatcacacgggtgcagctccagcccatgaagnnnnnnnnnnnnnnnnnnnnnnnnnnnnnnnnnnnnnnnnnnnnnnnnnnnnnnnnnnnnnnnnnnnnnnnnnnnnnnnnnnnnnnnnnnnnnnnnnnnnnnnnnnnnnnnnnnnnnnnnnnnnnnnnnnnnnnnnnnnnnnnnnnnnnnnnnnnnnnnnnnnnnnnnnnnnnnnnnnnnnnnnnnnnnnnnnnnnnnnnnnnnnnnnnnnnnnnnnnnnnnnnnnnnnnnnnnnnnnnnnnnnnnnnnnnnnnnnnnnnnnnnnnnnnnnnnnnnnnnnnnnnnnnnnnnnnnnnnnnnnnnnnnnnnnnnnnnnnnnnnnnnnnnnnnnnnnnnnnnnnnnnnnnnnnnnnnnnnnnnnnnnnnnnnnnnnnnnnnnnnnnnnnnnnnnnnnnnnnnnnnnnnnnnnnnnnnnnnnnnnnnnnnnnnnnnnnnnnnnnnnnnnnnnnnnnnnnnnnnnnnnnnnnnnnnnnnnnnnnnnnnnnnnnnnnnnnnnnnnnnnnnnnnnnnnnnnnnnnnnnnnnnnnnnnnnnnnnnnnnnnnnnnnnnnnnnnnnnnnnnnnnnnnnnnnnnnnnnnnnnnnnnnnnnnnnnnnnnnnnnnnnnnnnnnnnnnnnnnnnnnnnnnnnnnnnnnnnnnnnnnnnnnnnnnnngcccaactcctctttccgaccgccacagaaagacaaccctccaagcctggtggccaaggcccagtccttgccctcggaccagccggtggggaccttcagccctctgaccacttcggataccagcagcccccagaagtccctccgcacagccccggccacaggtccgcttccaggccggtcttctccagcnnnnnnnnnnnnnnnnnnnnnnnnnnnnnnnnnnnnnnnnnnnnnnnnnnnnnnnnnnnnnnnnnnnnnnnnnnnnnnnnnnnnnnnnnnnnnnnnnnnnnnnnnnnnnnnnnnnnnnnnnnnnnnnnnnnnnnnnnnnnnnnnnnnnnnnnnnnnnnnnnnnnnnnnnnnnnnnnnnnnnnnnnnnnnnnnnnnnnnnnnnnnnnnnnnnnnnnnnnnnnnnnnnnnnnnnnnnnnnnnnnnnnnnnnnnnnnnnnnnnnnnnnnnnnnnnnnnnnnnnnnnnnnnnnnnnnnnnnnnnnnnnnnnnnnnnnnnnnnnnnnnnnnnnnnnnnnnnnnnnnnnnnnnnnnnnnnnnnnnnnnnnnnnnnnnnnnnnnnnnnnnnnnnnnnnnnnnnnnnnnnnnnnnnnnnnnnnnnnnnnnnnnnnnnnnnnnnnnnnnnnnnnnnnnnnnnnnnnnnnnnnnnnnnnnnnnnnnnnnnnnnnnnnnnnnnnnnnnnnnnnnnnnnnnnnnnnnnnnnnnnnnnnnnnnnnnnnnnnnnnnnnnnnnnnnnnnnnnnnnnnnnnnnnnnggtgaagctctcggacttcggattctgtgctcagatcagcaaagacgtccctaagaggaagtccctggtgggaaccccctactggatggctcctgaagtgatctccaggtctttgtatgccactgagg

SEQ ID NO: 34830 - DNA, 599 bp, Macaca Mulatta
taggctgggtctgtagcaggagggaaatcccataggaccggcttttcctgcttcatccctcatcacccacacagccatcagccacactttaagccatttattcaacgaccctataaagtatacccaatacctcagactgcttttggcccctagactagaccctcattgctccaggcatggggggccgtgcaccttgacagagtcaaccagggccagtggcctgtggtcacaatgtcaatggctataaccgcttcatctgccgccgctcctgtcggcgctgccgtttctcattgtgctctggtgctggggtgccactgtctgcagtgaaccaggggcccagcacattcacccacaggaggtaaagggcccggcctggagcctacaagagaaacggtaacttgaagcaaggtgcagggaataaaagatggggagggttagatgccccttcttgggagcgtccccagcccacgtaccagaagccagaaggaccagacatagagagagaagcagctgagcacctgcacaatggctgtcagtaggatcacatccttaaggtgcctgtggatagaaataaagctgccaaagacagcagatgggcc

SEQ ID NO: 34831 - DNA, 993 bp, Macaca Mulatta
  misc_feature (1)...(993): n = A,T,C or G
gggcatccaagtagagaaaataatatgtgggttaagatccatcctgnnnnnnnnnnnnnnnnnnnnnnnnnncggagtcttgctgcgannnnnnnnnnnnnnnnnnnnnnngctatcttggcttgctacaaccttcacctcctgggttcaggcaattnnnnnnnnnnnnnnnnnnnnnnnnnnnattcaggtgcacaccaccacnnnnnnnnnnnnnnnnnnnnnnnnnnnnncagagtttcaccatannnnnnnnnnnnnnnnnnnnnnnnnnnnnnnnnnnnnnnngcctactnnnnnnnnnnnnnnnnnnnnnnnnnnncgcggtgagccaccatgcccgagctccatctttaaacttttaaatgggaaattctattatgtaccaatagccctaacagatttttctttccctatttactgactgggtgccttttccccttttttatggaaccatatgaaaggctacctcctgtttaaattaatgatatctctccggaatggtggattaaaatatggtcccgggaaagaattaaggggaggacagtaagcaaacaaatatttttaaatgaatttggtcttaggaaatcgccgctatcttcatggttttttccccactataaagtagtagtggtaaacaccctcttaaaaaccattctaagcaacgccgtcttatcgttgtagaggaagataatagtcacacatattctctcattctgtccaaaagtggtgctcccttttttacccccttactttaacctacccgcatgtgccccaaaaatttcaaagatctgaggaggaataaatctaattttataataaggccctattgtgcagggatcttataaaaaaaagtccattacaaattgtggtaactcaaatctatatacatctacctttttatagattgttttttatattcacgacatacattacaatgaatggacggaagagtttacaatgttctagcgccctccttgtgaagaaataaac

SEQ ID NO: 34832 - DNA, 258 bp, Macaca Mulatta
  misc_feature (1)...(258): n = A,T,C or G
nnnnnnnnnnnnnnnnnnnnnnnnnnnnnnnnnnnnnnnnnnnnnnnnnnngttttgtttttcctgtataaaaaaggaccccaaatataaaggtagggagagggacaagtgggaacataccccttagtgtagagaaatagtggggcaggagaaggagaagcctcaaaaggagaggtaggagggaaatgttaaggcagcaaagtaatctctgtagaaagatggaggaggagcctccacagcctcagagataaaggcacc

SEQ ID NO: 34833 - DNA, 452 bp, Macaca Mulatta
cgtaggtagcaattttagcttaatggcacagaatttagcaacagcataggaattatgattcctgtgggctctaaaacttaattacctcacagagtaaagtgggatatagaagtacaaatggatgtatcatagggataagacaattttgaaacaaaaactcccagctgagaaagaggggacaggtgtcagagcaggaagaactgattggatgttgaggaaagctgcatttgaaccgaaacttgccgagaattctcttggcacccaagatagagaccaaaacttgattgtatcatttttgttctgaggggagccaggggcatagggggaagcatgtaacttaatttgcagacttttttaccccataagcctgaaggaatcatcacataagcttattaaacacaagctattgaaagatataatggagaatgaatttggcatcagtaggtatttta

SEQ ID NO: 34834 - DNA, 931 bp, Macaca Mulatta
cagtttctagtgagtggcagcacgagcggggccgtctctgtgtgggacacgggcgggcctggcaatgatgggaagccggagccggtgttgagttttctgccccagaaggactgcaccaatggcgtgaggtcctcagttccattccagagatgttggggcttgggttggggatggaagtgaatcccagagggagcaagtgtcctcactgaaggcactgatagaccgtccccatctctccctcagcctgcaccctagcctgcctctcctggccactgcctccggtcagcgtgtgtttcccgagcccacagagagtggggacgaaggagaggagttgggccttcccctgctctccacacgccatgtccaccttgaatgtcggcttcagctctggtggtgtggggggggcccagactccagcatccctgatgatcaccagggcgagaaagggcagggaggaacggagggaggtgtgggtgagcttatataaaaaggtttttatgatactagagtcttcgtgtctgtttgtgggggggcgtatgagtgaggtgggggtcgggcagggggactggcgggttccctggtccagcagcagtgggtatggcatattgttcctgaaaccaggggttgagaggtgggactaggcaggagccaatggggtggctgagcttgatgtgaagtcaagtgggtgggggtggggcttcatgccattgactggttggttgctaggcaacttggtaaactgaagggggaaacctgtttgaaatctcactcccaaggtgggggtggcaggggtcagggtgagccgggctgagcaggagctgggtcagactgttgggtgtgaccgtatgagactgtgcagacagtgacagggtggctgtcacccacactccacactgccattctccagcagcatggggaccattactcagct

SEQ ID NO: 34835 - DNA, 3169 bp, Macaca Mulatta
  misc_feature (1)...(3169): n = A,T,C or G
ggtatcagttagcagagcaatcaagccctttgcagaacctggccgccctccagactggttctctcaaaaannnnnnnnnnnnnnnnnnnnnnnnnnnnnnnnnnnnnnnnnnnnnngcaanacggaaacgaggtgaaaagggagaagtggtggaaactgttgaagatgtcattgttcggaaactgactgctgagagagttgaggaactaaagaaagtgataaaggaaactcaggagagatatannnnnnnnnnnnnnnnnnnnnnnnnnnnnnnnnnnnnnnnnnnnnnnnnnnnnnnnnnnnnnnnnnnnnnnnnnnnnnnnngaaaaagaaattggaagaagaggaggctgaagtaaagaggaaggctacagatgctgcatatcagnnnnnnnnnnnnnnnnnnnnnnnnnnnnnnnnnnnnnnnnnnnnnnnnnnnnnnnnnnnnnnnnnnnnnnnnnnnnnnnnnnnnnnnnnnnnnnnnnnnnnnnnnnnnnnnnnnnnnnnnnnnnnnnnnnnnnnnnnnnnnnnnnnnnnnnnnnnnnnnnnnnnnnnnnnnnnnnnnnnnnnnnnnnnnnnnnnnnnnnnnnnnnnnnnnnnnnnnnnnnnnnnnnnnnnnnnnnnnnnnnnnnnnnnnnnnnnnnnnnnnnnnnnnnnnnnnnnnnnnnnnnnnnnnnnnnnnnnnnnnnnnnnnnnnnnnnnnnnnnnnnnnnnnnnnnnnnnnnnnnnnnnnnnnnnnnnnnnnnnnnnnnnnnnnnnnnnnnnnnnnnnnnnnnnnnnnnnnnnnnnnnnnnnnnnnnnnnnnnnnnnnnnnnnnnnnnnnnnnnnnnnnnnnnnnnnnnnnnnnnnnnnnnnnnnnnnnnnnnnnnnnnnnnnnnnnnnnnnnnnnnnnnnnnnnnnnnnnnnnnnnnnnnnnnnnnnnnnnnnnnnnnnnnnnnnnnnnnnnnnnnnnnnnnnnnnnnnnnnnnnnnnnnnnnnnnnnnnnnnnnnnnnnnnnnnnnnnnnnnnnnnnnnnnnnnnnnnnnnnnnnnnnnnnnnnnnnnnnnnnnnnnnnnnnnnnnnnnnnnnnnnnnnnnnnnnnnnnnnnnnnnnnnnnnnnnnnnnnnnnnnnnnnnnnnnnnnnnnnnnnnnnnnnnnnnnnnnnnnnnnnnnnnnnnnnnnnnnnnnnnnnnnnnnnnnnnnnnnnnnnnnnnnnnnnnnnnnnnnnnnnnnnnnnnnnnnnnnnnnnnnnnnnnnnnnnnnnnnnnnnnnnnnnnnnnnnnnnnnnnnnnnnnnnnnnnnnnnnnnnnnnnnnnnnnnnnnnnnnnnnnnnnnnnnnnnnnnnnnnnnnnnnnnnnnnnnnnnnnnnnnnnnnnnnnnnnnnnnnnnnnnnnnnnnnnnnnnnnnnnnnnnnnnnnnnnnnnnnnnnnnnnnnnnnnnnnnnnnnnnnnnnnnnnnnnnnnnnnnnnnnnnnnnnnnnnnnnnnnnnnnnnnnnnnnnnnnnnnnnnnnnnnnnnnnnnnnnnnnnnnnnnnnnnnnnnnnnnnnnnnnnnnnnnnnnnnnnnnnnnnnnnnnnnnnnnnnnnnnnnnnnnnnnnnnnnnnnnnnnnnnnnnnnnnnnnnnnnnnnnnnnnnnnnnnnnnnnnnnnnnnnnnnnnnnnnnnnnnnnnnnnnnnnnnnnnnnnnnnnnnnnnnnnnnnnnnnnnnnnnnnnnnnnnnnnnnnnnnnnnnnnnnnnnnnnnnnnnnnnnnnnnnnnnnnnnnnnnnnnnnnnnnnnnnnnnnnnnnnnnnnnnnnnnnnnnnnnnnnnnnnnnnnnnnnnnnnnnnnnnnnnnnnnnnnnnnnnnnnnnnnnnnnnnnnnnnnnnnnnnnnnnnnnnnnnnnnnnnnnnnnnnnnnnnnnnnnnnnnnnnnnnnnnnnnnnnnnnnnnnnnnnnnnnnnnnnnnnnnnnnnnnnnnnnnnnnnnnnnnnnnnnnnnnnnnnnnnnnnnnnnnnnnnnnnnnnnnnnnnnnnnnnnnnnnnnnnnnnnnnnnnnnnnnnnnnnnnnnnnnnnnnnnnnnnnnnnnnnnnnnnnnnnnnnnnnnnnnnnnnnnnnnnnnnnnnnnnnnnnnnnnnnnnnnnnnnnnnnnnnnnnnnnnnnnnnnnnnnnnnnnnnnnnnnnnnnnnnnnnnnnnnnnnnnnnnnnnnnnnnnnnnnnnnnnnnnnnnnnnnnnnnnnnnnnnnnnnnnnnnnnnnnnnnnnnnnnnnnnnnnnnnnnnnnnnnnnnnnnnnnnnnnnnnnnnnnnnnnnnatggcagtggagatgcagagagatgtcttggaccatatccagncagcaattcttggccacgcagttgattatgcaaacatccgagtctgggatcagtgctaaaagtcttcgagggagagattctactcgcaaacaggatgcttcagannnnnnnnnnnnnnnnnnnnnnnnnnnnnnnnnnnnnnnnnnnnnnnnnnnnnnnnnnnnnnnnnnnnnnnnnnnnnnnnnnnnnnnnnnnnnnnnnnnnnnnnnnnnnnnnnnnnnnnnnnnnnnnnnnnnnnnnnnnnnnnnnnnnnnnnnnnnnnnnnnnnnnnnnnnnnnnnnnnnnnnnnnnnnnnnnnnnnnnnnnnnnnnnnnnnnnnnnnnnnnnnnnnnnnnnnnnnnnnnnnnnnnnnnnnnnnnnnnnnnnnnnnnnnnnnnnnnnnnnnnnnnnnnnnnnnnnnnnnnnnnnnnnnnnnnnnnnnnnnnnnnnnaggtagcttatttaatggagcccttgtgcattagcagcaacgaatcaagtgaaggctgctgccctccatctggtaccagacaagaaggaagggaaattaaagctagcgaaggagaaagggagctctgcagagagactgaagagctttcagccaaaggagaccccttagtagctgaaaagccactgggagaaaatggaaagccacaggtggcttcagctccctccattatttgtgcagttcagggactactcacagagagtgaagagnnnagggggaggctcagcaagaatccaaaagggagaaccagggtgaagtatacgtgtcagagacggaagaccagcccccttcaggcgagtgtgatgacgcctttaacattaaggagactcccttggtggatacacttttcaaccacgctacctccacaaagct

SEQ ID NO: 34836 - DNA, 842 bp, Macaca Mulatta
cccacattaaagccctcaagtctcttatctcctttttctgcttctttgtgatatcatcctgtgctgccttcatctcagtgcccctacttattctgtggcatgacaaaataggggtgatggtttgtgttgggataatggcagcttgtccctctgggcatgcagccgtcctgatctcaggcaatgccaagttgaggagagctgtgacaaccattctgctctgggctcagagcagcctgaaggtaagagccgatcacatggcagattccaggatactgtgctgagaatggatataaaatgaactcttccttaatacgcctgtgagtcttcatgaatatgcctctgattcctcaggaatacaactctgattcctcacaaagccttccaatttcttctgtaaaacacaactgaaagtctctccactttgtatcaatgaactaacttatagatgaataaaataattatgcactatacatggcctaggcaagaataatgttggtggcaccctaggtttattttgataaaatgaacaaaataattaggtgaggtatttggtgtaaatcctttatatactatagcttattattggtatgaatcaaaccatgagaaatcacctcttctgaaatacctatatcccaaaataatatgtttgacttttaacatgactgctaaacctctttctcagaactggtgctagcatcatatttggaaatattcactactacaataagtgtataatcctcttcaaactccacaattttcatggaaacaaaaacaaacgtggaaagataattatgtcataatttcagcttcaagaaatagcacgtaacttcaacttcaagagg

SEQ ID NO: 34837 - DNA, 223 bp, Macaca Mulatta
cacccagcaggggacaggcactcaggagggcccagcaaaggctgagatgaagtggactgagtagaactggaggacgggggtagcatgagttcctgggaggctccagagatggggcctggaggcctgaagggaagggccagacctcacattcatggggctccctgaacggcagcctcagcacagcgtaggcccttaataaacacctgttgaataagccagagag

SEQ ID NO: 34838 - DNA, 553 bp, Macaca Mulatta
  misc_feature (1)...(553): n = A,T,C or G
aaagccagagcaaggaaccagagagaccatttcctcccttaggtcctgtggcagttgatcctaaaggttgtgtcaccataaccatccatgcaaaacctggctccaaacaaaatgctgtaacagnnnnnnnnnnnnnnnnnnnnnnnnnnnnnnnnnnnnnnnnnnnnnnnnnnnnnnnnnnnnnnnnnnnnnnnnnnnnnnnnnnnnnnnnnnnnnnnnnnnnnnnnnnnnnnnnnnnnnnnnnnnnnnagggtggtaaatctcgtgaaaaggtggtgaagcttttggcttctacaactccagaagagatcttggagaaattaaaaaaggaagccagaaaaacataaaagcaagaaatgaggccgggctcagtggctcatgcctgtaatcccagcactttgggaggccaaggtgggtggatcacctgaggtcaggagttcgagaccagcctgaccaacatggtgaaaccccatctctaggaaaaatacaaaattagctggagtgatggcgcatgcctataatcccagttactcaggagggtgaggcaggagaa

SEQ ID NO: 34839 - DNA, 296 bp, Macaca Mulatta
gctgttaatgcttgtctataacattggagccatcacaagaacgttcatttggaatgaaggttacaggcactggttgcaaaagtctttataggcagtcaccatattgtcaaaccttaataatgcatctaatgtgttagccacaataaaattcaaaactcattaggtttcccttctcattcagaatgcttcagaaaacaattcctaccttttctctcagttaaatcagctgcacagttattgacacagcactggggaacaggaaagggttgtggtgtctgctgtgaaagaacacacag

SEQ ID NO: 34840 - DNA, 545 bp, Macaca Mulatta
acatctcctccaaacacacagaggactccaggtcccttcctgagtaccccaaactcttagccctactggggtgctccgatctctcaggaaaaccggtttcccttttgtcagccccccagcggggacgccaaagcagcgcctcggagctgcagggagcttcagcggacaccagttctcattcctctggagttcttgggggggacctcctcctgggaacccagattctatctctaagcctcggggtgggggccttgcttttcctctgggccccatcctctttgccaagttcttgagggcaacctagatcctcctctgaaccccagaggcttccccagccccggggatctttttttctcttctgaaccccagaagcaatctcaactttcccatttgaggttccagagaggaccccctctttcatacccaggggaaactgagtccctcacccccttcgagaccccaggccgctcctcgcttccgcccctcgaggcccctcctcggctctgcctcctccctcttctccaccccaccggccataagatgat

SEQ ID NO: 34841 - DNA, 2401 bp, Macaca Mulatta
  misc_feature (1)...(2401): n = A,T,C or G
nagctagttatgtatcaaatcccatttgcaagggttgtttgtcttgttcaaaggacaatgggtgcagccgatgtcagcagaagttgttcttcttccttcgaagagaagggatgcgccagtatggagagtgcctgcattcctgcccatctgggtactatggacaccgaggcccagatatgaacagatgcgcaannnnnnnnnnnnnnnnnnnnnnnnnnnnnnnnnnnnnnnnnnnnnnnnnnnnnnnnnnnnnnnnnnnnnnnnnnnnnnnnnnnnnnnnnnnnnnnnnnnnnnnnnnnnnnnnnnnnnnnnnnnnnnnnnnnnnnnnnnnnnnnnnnnnnnnnnnnnnnnnnnnnnnnnnnnnnnnnnnnnnnnnnnnnnnnnnnnnnnnnnnnnnnnnnnnnnnnnnnnnnnnnnnnnnnnnnnnnnnnnnnnnnnnnnnnnnnnnnnnnnnnnnnnnnnnnnnnnnnnnnnnnnnnnnnnnnnnnnnnnnnnnnnnnnnnnnnnnnnnnnnnnnnnnnnnnnnnnnnnnnnnnnnnnnnnnnnnnnnnnnnnnnnnnnnnnnnnnnnnnnnnnnnnnnnnnnnnnnnnnnnnnnnnnnnnnnnnnnnnnnnnnnnnnnnnnnnnnnnnnnnnnnnnnnnnnnnnnnnnnnnnnnnnnnnnnnnnnnnnnnnnnnnnnnnnnnnnnnnnnnnnnnnnnnnnnnnnnnnnnnnnnnnnnnnnnnnnnnnnnnnnnnnnnnnnnnnnnnnnnnnnnnnnnnnnnnnnnnnnnnnnnnnnnnnnnnnnnnnnnnnnnnnnnnnnnnnnnnnnnnnnnnnnnnnnnnnnnnnnnnnnnnnnnnnnnnnnnnnnnnnnnnnnnnnnnnnnnnnnnnnnnnnnnnnnnnnnnnnnnnnnnnnnnnnnnnnnnnnnnnnnnnnnnnnnnnnnnnnnnnnnnnnnnnnnnnnnnnnnnnnnnnnnnnnnnnnnnnnnnnnnnnnnnnnnnnnnnnnnnnnnnnnnnnnnnnnnnnnnnnnnnnnnnnnnnnnnnnnnnnnnnnnnnnnnnnnnnnnnnnnnnnnnnnnnnnnnnnnnnnnnnnnnnnnnnnnnnnnnnnnnnnnnnnnnnnnnnnnnnnnnnnnnnnnnnnnnnnnnnnnnnnnnnnnnnnnnnnnnnnnnnnnnnnnnnnnnnnnnnnnnnnnnnnnnnnnnnnnnnnnnnnnnnnnnnnnnnnnnnnnnnnnnnnnnnnnnnnnnnnnnnnnnnnnnnnnnnnnnnnnnnnnnnnnnnnnnnnnnnnnnnnnnnnnnnnnnnnnnnnnnnnnnnnnnnnnnnnnnnnnnnnnnnnnnnnnnnnnnnnnnnnnnnnnnnnnnnnnnnnnnnnnnnnnnnnnnnnnnnnnnnnnnnnnnnnnnnnnnnnnnnnnnnnnnnnnnnnnnnnnnnnnnnnnnnnnnnnnnnnnnnnnnnnnnnnnnnnnnnnnnnnnnnnnnnnnnnnnnnnnnnnnnnnnnnnnnnnnnnnnnnnnnnnnnnnnnnnnnnnnnnnnnnnnnnnnnnnnnnnnnnnnnnnnnnnnnnnnnnnnnnnnnnnnnnnnnnnnnnnnnnnnnnnnnnnnnnnnnnnnnnnnnnnnnnnnnnnnnnnnnnnnnnnnnnnnnnnnnnnnnnnnnnnnnnnnnnnnnnnnnnnnnnnnnnnnnnnnnnnnnnnnnnnnnnnnnnnnnnnnnnnnnnnnnnnnnnnnnnnnnnnnnnnnnnnnnnnnnnnnnnatgttcttgggtcactgaagaagttactaacatgagcctgtgcatagaattttaggagataaatggatgaatttctgtgactgctggtcagatcttaacaagtctctattgagccagaatctgtttcagatccaagatggagaggaacactatggaaacttcccaggtgactttcagagcagttgtttcgaacgcattattgttcacttgggggaaccagtttttagaaggttgtgaattggctttttctcaaaacattattatcttcttggcagatccaggagaaaattagaacagaaaaataatggttgtggatttctaaacaaagcaaggtaaagccatatttttttcaccttgcattggcaaaactacctcttcagtgtttttgtttaacttttgattcaaaagcgtcttaccgataaggataaatatcatatacatcattatgaaaatattgctatgagataataagccatatatgaatgttgtatacaactttagggtttgcatttaatcctgaagtgttacctcctttcatgtctatttacactattttcccatttactaagtggggaggggtctccttatatagtgcttcatcgttaataagtcaatacctgttgttcctgggatgttcttttttgtgcattaaaaacttcaaaatt

SEQ ID NO: 34842 - DNA, 230 bp, Macaca Mulatta
aggtgtttttggtgatataaggaatcctgttacctgccttaggagtggtgccatatgtcatccaggcttttgccctagaaggtataaacatatcggcgtctgtggtgtctctgcaataaaatgctgcaaaaagccatgaggaggccaagaagctgctgtaactgatgtggattcagaaagggctcccttatcagagatgtgcgacatgtaaacaaaattaaactgtggtg

SEQ ID NO: 34843 - DNA, 724 bp, Macaca Mulatta
  misc_feature (1)...(724): n = A,T,C or G
aaggagctttgaagtaactgattcatgcagctaagttaaatacctcgttaacaaccttagaaggagaaagaaaccaaatttatattcagttatctgaagttgatgaaaccaagaaggagctcagagggcatattaaaaaccttcagatggaacaagcatctttgcagtcggaaaacacacactttgaaagtgagaatcagaaacttcaagagaaagttaaagtaatgactgaattacgtcaagaaaatgcaatgaaactctacaggaaattaatagtagaggaaaataaccagtcagagaatgagaaactttctaaagtagacgaaacgatcagccatggcagtggagagctggagacctgcagaaagcgagccaaagatctggaagaacaatttgagagagttcttcatttttatcaagggaagattatttcctataagaaaaaagtagatggtaattgttttgcagcttggattgctgaaagaaacctcaatgatttaaggaaagaaaatgctcacaacagacaaaaattagctgaaacagagtttaaaatgaaacttttagaaaaagatccttatgcgcttgatgttccaaatacagcatttggcagacagcattcctcatatggtccctctccactgggtcggncttcatctganatgagagcttttctctatcctccagctttgtcggagggtccacggagactctcaccttcgcttcc

SEQ ID NO: 34844 - DNA, 697 bp, Macaca Mulatta
  misc_feature (1)...(697): n = A,T,C or G
tccgccgccgtctgccgcggagccgccctcgggccccgaggccggggtcaacacgcactgcgccgagctgtacgcctcgggacccggcccggccgccgcactctgtgcctccgagcgccgctgctccccgctctgtggcctggacctgtccaagaagagccccccgggctccgcggcgccagagcggccgctggctgagcgcgagctgcccccgcgcccggacagccctcccannnnnnnnnnnnnnnnnnnnnnnnnnnnnnnnnnnnnnnnnnnnnnnnnnnnnnnntgcccttccagaagctggaggaggccgcaccgccttccgacccgtttcgcggcggcagcggcagcccgggacccgagccccccggccgccccgacgggcctagtctcctctatcgctggatgaagcacgagccgggcctgggtagctatggcgacgagctgggccgggagcgcggctcccccagcgagcgctgcgaagagcgtggtggggacgcggccatctcgcccggggggcccccgctcggcctggcgccgccgccgcgctaccctggcagcctggacgggcccggcgcgggcggcgacggcgacgactacaagagcagcagcgaggagaccggcagcagcgaggaccccagcccgcccggcggccacctcgagggctacccatgcccgcacctggcctatggcg

SEQ ID NO: 34845 - DNA, 840 bp, Macaca Mulatta
cccggggacagtcctgagttgctgcgttcacggaagacacccctcaataaaaatatttctaaaatggtaaaaatcagaccctgatctctttagaacatgtttttaggaaaaagagacttttctgatgaacttgcctgtcattctgttatcttttgtaggatggttctttatttcacgaacagtccaagaaatgtgtccaggctgcgaggaaggagtcgagtgacagttttgttccactcttacgagactgcaccaactcggatcatcagaaatggttcttcaaggagcgcatgttatgaagccttgtgtatcaaggagcccatcgtaggagactgtggagccaggactctgcccaacagagacttagctaagcagtgaccagagccctccaaaaactaggctgctctgctttgaggagggaatcattttgccgtttgtaaaagttgtgttccatttagtaaaaatgtgaataagctttgtacttactttgaaaactttttaaatgttccaaaataccctattttcaaagggtaatcataagatgttaacccttggtatttagaaaattaaaaccttataatatttttctatcaagatgtatattttacagtcaagccttttactttcattagcaaaaggtaaagattttattttgatatttacaagaattcccaggtaagaagatatctgcatgggtggaaactgggttcaaacaacgtactttgcattaactgataatatctcagctgtggggttaaagttttcccggtatagagagactgacactaggaacactgtattggtttattcaggtcattgagatcttctagatgtattttt

SEQ ID NO: 34846 - DNA, 789 bp, Macaca Mulatta
  misc_feature (1)...(789): n = A,T,C or G
gcgggctccgccaggacactggggacagcagcgggaggacatggggtggggaaggggctctcccccaccgtcctcctgccggcacgggtggcttcctgggcgcggtctcagaaggcctggccactttgcattatannnnnnnnnnnnnnnnnnnnnnnnnnnnnnnnnnnnnnnnnnnnnnnnnnnnnnnnnctgcgtgaacaccccgggttcttaccgttgcacctgccccagcggatacctaaccctcttccgacgggaagagctgtgaggnnnnnnnnnnnnnnnnnnnnnnnnnnnnnnnnnnnnnnnnnnnnnnnnnnnnnnnnnnnnnnnnnnnnnnnnnnnnnnnnnnnnnnnnnnnnnnnnnnnnnnnnnnnnnnnnnnnnnnnnnnnnnnnnnnnnnnnnnnnccagtgtgagcggaacccctgccctatggacagcaggccctgccgccatctgcccaagaccatctccttccattacctctctctgccttccaacctgaagacgcccatcacgctcttccgcatggccaccgcctctgcccccggccgagctgggcccaacagcctgcgctttgggatcgtgggtggcagcagccgcggccactttgtgatgcagcgctcagaccggcagactggggagctcatcctcgtgcagaccctggcggggcctcagacgctggaggtggacgtcgacatgtcggaatacctggaccgcaacgtccaggccaaccacgtgtccaaggtcaccatttttgtatcccccctatgacttctgaggg

SEQ ID NO: 34847 - DNA, 2052 bp, Macaca Mulatta
  misc_feature (1)...(2052): n = A,T,C or G
gctgtggtcaacgacacagtgggcaccatgatgacctgtgnnnnnnnnnnnnnnnnnnnnnnnnnnnnnnnnnnnnnnnnnnnnnnnnnnnnnnnnnnnnnnnnnnnnnnnnnnnnnnnnnnnnnnnnnnnnnnnnnnnnnnnnnnnnnnnnnnnnnnnnnnnnnnnnnnnnnnnnnnnnnnnnnnnnnnnnnnnnnnnnnnnnnnnnnnnnnnnnnnnnnnnnnnnnnnnnnnnnnnnnnnnnnnnnnnnnnnnnnnnnnnnnnnnnnnnnnnnnnnnnnnnnnnnnnnnnnnnnnnnnnnnnnnnnnnnnnnnnnnnnnnnnnnnnnnnnnnnnnnnnnnnnnnnnnnnnnnnnnnnnnnnnnnnnnnnnnnnnnnnnnnnnnnnnnnnnnnnnnnnnnnnnnnnnnnnnnnnnnnntgctttgcactgcctcgtgtggtcctcagtgcatcagtattggcctctaacttcacaggaataaggaaggcctccacaatgccaaagaaatcctgacccgcctgggagtggagccgtccgatgatgactgtgtctcggtccagcacgtttgcaccattgtctcgtttcgctcagccaacctggtggctgctacactgggcgccatcttgaaccgcctgcgtgataacaagggcacacccaggctgcggaccacggttggtgtcgacggatctctttacaagacgcacccacagtnnnnnnnnnnnnnnnnnnnnnnnnnnnnnnnnnnnnnnnnnnnnnnnnnnnnnnnnnnnnnnnnnnnnnnnnnnnnnnnnnnnnnnnnnnnnnnnnnnnnnnnnnnnnnnnnnnnnnnnnnnnnnnnnnnnnnnnnnnnnnnnnnnnnnnnnnnnnnnnnnnnnnnnnnnnnnnnnnnnnnnnnnnnnnnnnnnnnnnnnnnnnnnnnnnnnnnnnnnnnnnnnnnnnnnnnnnnnnnnnnnnnnnnnnnnnnnnnnnnnnnnnnnnnnnnnnnnnnnnnnnnnnnnnnnnnnnnnnnnnnnnnnnnnnnnnnnnnnnnnnnnnnnnnnnnnnnnnnnnnnnnnnnnnnnnnnnnnnnnnnnnnnnnnnnnnnnnnnnnnnnnnnnnnnnnnnnnnnnnnnnnnnnnnnnnnnnnnnnnnnnnnnnnnnnnnnnnnnnnnnnnnnnnnnnnnnnnnnnnnnnnnnnnnnnnnnnnnnnnnnnnnnnnnnnnnnnnnnnnnnnnnnnnnnnnnnnnnnnnnnnnnnnnnnnnnnnnnnnnnnnnnnnnnnnnnnnnnnnnnnnnnnnnnnnnnnnnnnnnnnnnnnnnnnnnnnnnnnnnnnnnnnnnnnnnnnnnnnnnnnnnnnnnnnnnnnnnnnnnnnnnnnnnnnnnnnnnnnnnnnnnnnnaggaatttgacctggacgtggtggctgtggtcaacgacacagtgggcaccatgatgacctgtgcttatgaggagcccacctgtgaggtcggactcattgttggnnnnnnnnnnnnnnnnnnnnnnnnnnnnnnnnnnnnnnnnnnnnnnnnnnnnnnnnnnnnnnnnnnnnnnnnnnnnnnnnnnnnnnnnnnnnnnnnnnnnnnnnnnnnnnnnnnnnnnnnnnnnnnnnnnnnnnnnnnnnnnnnnnnnnnnnnnnnnnnnnnnnnnnnnnnnnnnnnnnnnnnnnnnnnnnnnnnnnnnnnnnnnnnnnnnnnnnnnnnnnnnnnnnnnnnnnnnnnnnnnnnnnnnnnnnnnnnnnnnnnnnnnnnnnnnnnnnnnnnnnnnnnnnnnnnnnnnnnnnnnnnnnnnnnnnnnnnnnnnnnnnnnnnnnnnnnnnnnagtgaccgattagcactgctccaggtccgggccatcctccagcagctgggtctgaatagcacctgcgatgacagtatcctcgtcaagaccgtgtgtggggtggtgtccaggagggccgcgcagctgtgtggcgcaggcatggctgcggtggtggataagatccgagagaacagaggactggaccgtctgaacgtgactgtgggagtggacgggacgctctacaagcttcatcc

SEQ ID NO: 34848 - DNA, 400 bp, Macaca Mulatta
tccctcgttgaagtttaacattgaaaagcatatgcccttaaagtgaacttgtggaaaaaataacctgtgtttgtaatagtagattaccaagaaggcaattatattttagaattttttatcttacaggaaatttcaagagcaggaatgtcctccttcaccagaaccaacacggaaagaaaaagacaagaaaggctgccattgtgtcattttctagaatcccttcagttttagctaccaactgccaggaaaagccctcatctcctcctcctctcctcggtttacatcttgttggtacctttctagccttagacaaatgatcaccatgttagccttagaccaagaagctggctagttctttctgtgaagctaatacaatggtcatttccagacaaatttaaag

SEQ ID NO: 34849 - DNA, 468 bp, Macaca Mulatta
gcccgctggggttctggggcggggtttcccttcccatgggtgctctggaccctttgtttgtgaccttagtgatgcagcactgccacctgcatcataggcttccaggcagctgcagcagcaggaggaagccgcgggacggataaggagacccattcttcacttgcatcagggtttggtggctgttgtgaaacattctcctttctcccctcttcctgcaacccatgccttgagctccaaaagcttctacaggttcccagagcctcatttctgattctcatgggaaggggccagccagcagccctgagaattccatggaagccctctcttacagagcctgggcctcccttctccttatcgtttcaggtacgtggcagccatctccactgctgcaagtattataaccgcctggttccaagatgtgctgagatcaggagcagagtcccacccttctcctgcacagagatgtct

SEQ ID NO: 34850 - DNA, 698 bp, Macaca Mulatta
  misc_feature (1)...(698): n = A,T,C or G
aacaccgaaaatctcccccagcactttagaagggggaccctgactgtgttaaagaagaagtgggagaaccccagggctgggagcagagtctcacacagactctnnnnnnnnnnnnnnnnnnnnnnnnnnnnnnnnnnnnnnnnnnnnnnnnnnnnnnnnnnnnnnnnnnnnnnnnnnnnnnnnnnnnnnnnnnnnnnnnnnnnnnnnnnnnnnnnnnnnnnnnnnnnnnnnnnnnnnnnnnnnnnnnnnnnnnnnnnnnnnnnnnnnnnnnnnnnnnnnnnnnnnnnnnnnnnnnnnnnnnnnnnnnnnnnnnnnnnnnnnnnnnnnnnnnnnnnnnnnnnnnnnnnnnnnnnnnnnnnnnnnnnnnnnnnnnnnnnnnnnnnnnnnnnnnnnnnnnnnnnnnnnnnnnnnnnnnnnnnnnnnnnnnnnnnnnnnnnnnnnnnnnnnnnnnnnnnnnnnnnnnnnnnnnnnnnnnnnnnnnnnnnnnnnnnnnnnnnnnnnnnnnnnnnnnnnnnnnnnnnnnnnnnnnnnnnnnnnnnnnnnnnnnnggtcaattgtcatcttctacattcaactcggagaaaaatgagagtaggcgaaatctggaacttccacgcctctcagaaacctctataaaggatcgaatggccaagtaccaggcagctgtgtccaaacaaagcagctcaaccaactataca

SEQ ID NO: 34851 - DNA, 884 bp, Macaca Mulatta
  misc_feature (1)...(884): n = A,T,C or G
gggagtgtaaggccgggcagcccagctgaaggcagtaagctggcctctccgttgcagggtagttctgggatatcggggcaaaggggcgtgagaaggcctggaggcgaagtcgaagagaagccgaagagaagcaactgcgccctggagaagagaagctcgcccattcccgactgggagcgagctttcagtgaggatggcagggccagagctgttgctcgactctaacatccgcctctgggtggttctacccatcgttatcatcactttcttcgtaggcatgatccgccactacgtgtccatcctgctgcagagcgacaagaagctcacccaggaacaagtatctgacagtcaagtcctaattcgaagcagagtcctcagggaaaatggaaaatacattcccaaacagtctttcttgacacgaaaatattacttgaacaacccagaggatggatttttcaaaaaaactaaacggaaggtagtgccaccttctcctatgactgatcctactatgctgacagacatggtgaaagggaatgtgacaaatgtcctccctatgattcttattggtggatggatcagcatgacattctcaggctttgtcacaaaccaaggtccgattttcactgacccctccgtttttagcctatgttacagctaggaatcgaagcaattcgagctacctcacatttggaatgcatcccttggggtggatttcttgcatccctggtggtttcggtcgggtggtattttggggcttcctgagagcatggtaccccctcctggaatcccgggggcccaagaaataatggcccgatggagcgcctgtcccttaggatggcggcataatttgnnccnnnatggaacgggnggaagccgagcccccc

SEQ ID NO: 34852 - DNA, 100 bp, Macaca Mulatta
cacaagaaaatatcctcccagctggggccattgctggcattgtgattggactggccctggttgttctgatagtagcagccctggcatattttctgcattt

SEQ ID NO: 34853 - DNA, 449 bp, Macaca Mulatta
tctccctcactttcccactgccctcagcatagcgatttttcaggagaaaggactcctggctgcctttcttctaagcttccagctcctctcccctaactggaaaacgtgttgttctttctttccagactggaccttcatcaagcccattcgcctccaagcctccaaccaccaaccccttcttgtagcactgtgtttttgggggacctcttccctgccttctggggccctctgctccctagagctctggtgaccacttacctgtgggcgtttctatgggccttagggatggtggaggtgctaatgctttgcttggggcctacaggtgaaaggtggctgtcctcagattccacaaagcctctgctcccctccctcgtcccacccccacccaggcaggaagcccaggaggagtgcgggcagggcctggcctggaggagtgatagttgagggga

SEQ ID NO: 34854 - DNA, 2014 bp, Macaca Mulatta
  misc_feature (1)...(2014): n = A,T,C or G
cgctccccactctggactcccgcgctgggctagctgaggcggcccccgagcgagcgcgcgtgcagccgccgccgccccgagcacccgcagctccggcgccgcggcgagacggagacggaccgagccacgggcccccgcggccgcagcatcccggaggagaacatgcttgccaactcagccagcgtgaggatcctcatcaagggaggcaaggtggtgaacgatgactgcacccacgaggctgacgtctacatcgagaatggcatcatccagcaggtgggccgcgagctcatgatccctggcggggccaaggtgattgatgccacagggaaactggtgatccctggtggcatcgacaccagcacccacttccaccagaccttcatgaatgccacgtgcgtggacgacttctaccatgggaccaagnnnnnnnnnnnnnnnnnnnnnnnnnnnnnnnnnnnnnnnnnnnnnnnnnnnnnnnnnnnnnnnnnnnnnnnnnnnnnnnnnnnnnnnnnnnnnnnnnnnnnnnnnnnnnnnnnnnnnnnnnnnnnnnnnnnnnnnnnnnnnnnnnnnnnnnnnnnnggtgaaagcagaaatggagacactggtgagggagaagggtgtcaactcattccagatgttcatgacctacaaggacctgtacatgcttcgagacagcgagctgtaccaagtgttgcacgcttgcaaggacattggggcaatcgcccgtgtccatgctgaaaacggggagcttgtggccgaggcaagnnnnnnnnnnnnnnnnnnnnnnnnnnnnnnnnnnnnnnnnnnnnnnnnnnnnnnnnnnnnnnnnnnnnnnnnnnnnnnnnnnnnnnnnnnnnnnnnnnnnnnnnnnnnnnnnnnnnnnnnnnnnnnnnnnnnnnnnnnnnnnnnnnnnnnnnnnnnnnnnnnnnnnnnnnnnnnnnnnnnnnnnnnnnnnnnnnnnnnnnnnnnnnnnnnnnnnnnnnnnnnnnnnnnnnnnnnnnnnnnnnnnnnnnnnnnnnnnnnnnnnnnnnnnnnnnnnnnnnnnnnnnnnnnnnnnnnnnnnnnnnnnnnnnnnnnnnnnnnnnnnnnnnnnnnnnnnnnnnnnnnnnnnnnnnnnnnnnnnnnnnnnnnnnnnnnnnnnnnnnnnnnnnnnnnnnnnnnnnnnnnnnnnnnnnnnnnnnnnnnnnnnnnnnnnnnnnnnnnnnnnnnnnnnnnnnnnnnnnnnnnnnnnnnnnnnnnnnnnnnnnnnnnnnnnnnnnnnnnnnnnnnnnnnnnnnnnnnnnnnnnnnnnnnnnnnnnnnnnnnnnnnnnnnnnnnnnnnnnnnnnnnnnnnnnnnnnnnnnnnnnnnnnnnnnnnnnnnnnnnnnnnnnnnnnnnnnnnnnnnnnnnnnnnnnnnnnnnnnnnnnnnnnnnnnnnnnnnnnnnnnnnnnnnnnnnnnnnnnnnnnnnnnnnnnnnnnnnnnnnnnnnnnnnnnnnnnnnnnnnnnnnnnnnnnnnnnnnnnnnnnnnnnnnnnnnnnnnnnnnnnnnnnnnnnnnnnnnnnnnnnnnnnnnnnnnnnnnnnnnnnnnnnnnnnnnnnnnnnnnnnnnnnnnnnnnnnnnnnnnnnnnnnnnnnnnnnnnnnnnnnnnnnnnnnnnnnnnnnnnnnnnnnnnnnnnnnnnnnnnnnnnnnnnnnnnnnnnnnnnnnnnnnnnnnnnnnnnnnnnnnnnnnnnnnnnnnnnnnnnnnnnnnnnnnnnnnnnnnnnnnnnnnnnnnnnnnnnnnnnnnnnnnggctctcagatcgatgaccatgttccaaagcgagcttcagctcggatcctcgctcctcccggaggcaggtcgagtggcatttggtaaaggcactgcccagccccccgagtgaggacacaccgccgccaccagtccgcaactctccggccacagcttcaggggcaggagaggctgggctgggcagcacgccacaagaagggggccccaggacctgcggagccctccctatgtctgcaaagtgat

SEQ ID NO: 34855 - DNA, 315 bp, Macaca Mulatta
catcccctctgctggggcgcgttgccaggcgattctcaaaacctcaggaaattagcctggcactggcttgaaagtcaccgaatctcagagccatctaatcaccgagttttcaactccacgaaactcagagcagcttgaattcgcccggcgatgggattgtggaatcagaacaggggaaagggaggggaagcagatgtgggatggtgactgggagcctctcctataggagtaggacccaggggacacaatgctgatgatgatggtgatgacagtgattcactgagtgcccgctatgtgctctgcccacttctaagc

SEQ ID NO: 34856 - DNA, 745 bp, Macaca Mulatta
  misc_feature (1)...(745): n = A,T,C or G
aagaggagnatgggttaatgtagaccaattttttgagggaacagtaaatgatttattaggaggaaggaatgcaccaaggagaaagaaaattaacttgtaaatgattctctttggaatctgaatgagatcaagaggccagctttatcttgtgggaaagttcatctaggtatagttgcattcttcagtcttcttttctgcatgcagtagataatgaggtaaccgaaggcaattgtgcttcttttggtaagaagctttcttggtcatatcaggaaattccagagaaagtccctccttggcaggtttacttagcgctggtgtacttggtgacggccttggtgccctccgacaccgcgtgcttggccaactccccgggcagcagcaggcgcacagccgtctggatctccctggaggtgatggtcgagcgcttgttgtaatgcgccagacgggaagcctcacccgcaatgcgctcaaagatgtcgttgacgaaggagttcatgattcccatggccttagaggagatgccggtgtcggggtggacctgcttcagcaccttgtacacgtacacggagtagctctccttgcggctgcgcttgcgcttcttgccgtctttcttctgggccttagtcactgccttcttcgagcccttcttgggcgcaggagcggacttcgctggctccggcatgtcgagggcgaactacgagtcgaggcggactaacagcagatcgagaaaacgggaagtaatccc

SEQ ID NO: 34857 - DNA, 113 bp, Macaca Mulatta
aggatgcacctgctgctgctcgacagcagttctacaccgacatgtactgtcccatctgcctgcaccaagcctccttcccggtggagaccaactgtggacatcttttttgtggt

SEQ ID NO: 34858 - DNA, 850 bp, Macaca Mulatta
gctctcctggagattcgaatatctctctctgtggttcttgtgttaacttacacattaacagcaacaggaaacatcatcatcatctccctgatatggattgatcatcgcctgcaaactccaatgtacttcttcctcagtaatttgtcctctctggatatcttatacaccactgtcattaccccaaagttgttagcctgcctcctaggagaaaagaaaaccatatcatttgctggttgcatgacccagagcatatttctacttctttctggggacagtggagtttatcctcttggcagtaatgtcctttgaccgctacgtggctatctgcgacccactgcgctacatggtcatcatgaacagcagggcctgcctcctgctggttctgggatgctgggtgggggccttcctgtctgtgttggttccaaccattgcagtgacacggctaccttactgtaggaaagaaattaatcattttttctgtgacattgcccctcttttacaggtggcctgtataaatactcatctcattgagaagataaactttctcctctcgcccttgtcatcctgagttccctggcattcactactggctcctacgtgtgcataatttctaccatcctacatatcccttccacccagggacgtcagaaagctttttctacctgtgcttctcatatcactgttgtctccattgcctatgggagcaacatctttgtgtatgtgcgacccaatcagaactcctcactggattatgacaaggtggctgctatcctcatcacagtggtgacccctctcctgaatccttttatctacagcttgaggaatgagaaggtaaaggaagtgttgagag

SEQ ID NO: 34859 - DNA, 691 bp, Macaca Mulatta
acgaagtcgctcaaagtctcgatcttcacattcacgatcttcatcacgctcatcctccccctcaagttcaaggtctaggtccaggtcccgttcaggaagtcttccagttcgcagtcaagatctcgttccagttccagagaacgttcgagatctcgtgggtcgaaatcaagatccagctccaggtcccacaggggctcttcttccccacgaaaaagatcttattcaagttcatcatcttctcctgagaggaacagaaagagaagtcgttctagatcttcttcatctggtgatcgcaaaaaaagacgaacaagatcacggtcacccgaaaggtttgggtttctgtagaaataagaatgggtgttcttaagtgtgtttaatagataaactttcctagtcaagggttagatttttattatctcctgtgttccaactttctacttttcaactttgaacttcaaaaaaacattactttgtttatcctttgtattttgatcaggttgtttagaattgtagatcaaaccattctttgatcattttattgtttaaatttttatttccatttatcatttttataggccaactctcggttatttctgtcttttgagatgccattgaggagctatatgtcgaagtaattcatgagttgacttttatacttaggcttcttcaatactaatagtcaagaattcta

SEQ ID NO: 34860 - DNA, 248 bp, Macaca Mulatta
  misc_feature (1)...(248): n = A,T,C or G
tggccctggtgatgatgaagccactgaagctgaaaccactgctgctgcaaccactatgaccaccgctgctcctaccactgcaaccaccgctgctcctaccactgcnnnnnnnnnnnnnnnnnnnnnnnnnnnnnnnnnnnnnnnnnnnnnnnnnnnnnnnnnnnntccctgagatggaatcaacttgagtcttctgcaattggtcacaactaatcacgcttcctatgatttcatccaactacttacct

SEQ ID NO: 34861 - DNA, 797 bp, Macaca Mulatta
cgccctcatcgcggggtcgtcttcttcctgctgctgccgggaccttctgcggccgatgagaagaagaaggggcccaaagtcagcgtcaaggtgtattttgacctgcgaattggagatgaagatgtaggccgggtgatctttggtctcttcggaaagactgttccaaaaacagtggataattttgtggccttagctacaggagagaaaggatttggctacaaaaacagcaaagttccatcgtgtaatcaaggacttcatgatccagggcggagacttcaccaggggagatggcacaggaggaaagagcatctatggtgagcgcttccccgatgagaacttcaagctgaagcactacgggcccggctgggtgagcatggccaacgcaggcaaagacaccaacggctcccagttcttcatcacaacagtcaagacggcctggctagatggcaagcatgtggtgtttggcaaagtgctagagggcatggaggtggtgcggaaggtggagagcaccaagacagacagccgggataaacccctgaaggatgtgatcatcgcagactgcggcaagattgaggtggagaagccctttgccatcgccaaggagtaggacccagggacctctttctttgagtgaccgtctgtgcaggccctgtagtctgccacagggccctgagctgcactggccccagtgctggcatctggtggagcggacccattcccctcacattccacaggcccatggactcagttttgtaacagactcctaccaacactgacgaatagaaaaaaatgtgggg

SEQ ID NO: 34862 - DNA, 5557 bp, Macaca Mulatta
  misc_feature (1)...(5557): n = A,T,C or G
tgcaggtttgcagggtctgagattccttgggcttttcctgcctttttcttttgcttaagggatggacaaggagctgagatttatgacccttattagagaaaaaaaaatgtgccttgctagggtggggacacttggttgatgcagtctctctctgtctttcttggtgtttttaacaaaacaaaaccaaagtgaactgaggggtttgtaatggtagtttgtttgttgctggagaatgctactttgcatgctttttttctcttgcagggttatgttctgttttgtgctttttcttttagaagctactaaagggtgtcggggatgcttctgactattatgaaggccaaaaggcctgttgactggggctgcttttaaccctttcctatttgctgagaatgcagccgtgtgacagtaactgaacattggtctaaagtctttccaaaaggtcaaggtnnnnnnnnnnnnnnnnnnnnnnnnnnnnnnnnnnnnnnnnnnnnnnnnnnnnnnnnnnnnnnnnnnnnnnnnnnnnnnnnnnnnnnnnnnnnnnnnnnnnnnnnnnnnnnnnnnnnnnnnnnnnnnnnnnnnnnnnnnnnnnnnnnnnnnnnnnnnnnnnnnnnnnnnnnnnnnnnnnnnnnnnnnnnnnnnnnnnnnnnnnnnnnnnnnnnnnnnnnnnnnnnnnnnnnnnnnnnnnnnnnnnnnnnnnnnnnnnnnnnnnnnnnnnnnnnnnnnnnnnnnnnnnnnnnnnnnnnnnnnnnnnnnnnnnnnnnnnnnnnnnnnnnnnnnnnnnnnnnnnnnnnnnnnnnnnnnnnnnnnnnnnnnnnnnnnnnnnnnnnnnnnnaaagactcgacgttcagccagtttagcccgatctccagtgctgaagagtttgaccacgatgagaagattgaggtagatgaccctcctgacaaggaggatgtgcgatcaagcttcaggtcgaacgtgttgacggggtcggctccccagcaggactacgataagctgaaggcactgggaggggaaaactccagcaaaatgggactttccacgtcaggcaatatggagaaaaacaaagttgttaagagagaagcagaagccaattctataaacctgagcgtttatgaaccttttaaagtcagaaaagcagaggataaattgaaggaaaactctgacaaggtgctggaaaacagagtcccggatgggaagccgagctccgagaagaatgacgctggccttcccggcgttgcgccatcaaagacaaagtcgtcctccaagctctcgtcctgcatcgctgccatcgcggctcttagcgctaaaaaggcggcttcagactcctgcaaagaaccagtggccaattcgagggaatcctccccgttaccaaaagaagtaaacgacagtccgagagccgccgacaagtctcctgaatcccaaaatctgatcgacgggaccaaaaaaccatccctaaaacaaccagatagtcccagaagcatctcaagtgagaacagcagcaagggatccccatcctctcccgcagggtccacaccagcaatccccaaagtccgcataaaaaccattaagacatcttctgnnnnnnnnnnnnnnnnnnnnnnnnnnnnnnnnnnnnnnnnnnnnnnnnnnnnnnnnnnnnnnnnnnnnnnnnnnnnnnnnnnnnnnnnnnnnnnnnnnnnnnnnnnnnnnnnnnnnnnnnnnnnnnnnnccgtcctttcctctccccccagggcgcctctccagtccgcggtcgtgaccaatgcagtttcccctgcaaagctcacccctaaacaggtcacaatcaagcctgtggctaaagctttcctcccagtgtctgctgnnnnnnnnnnnnnnnnnnnnnnnnnnnnnnnnnnnnnnnnnnnnnnnnnnnnnnnnnnnnnnnnnnnnnnnnnnnnnnnnnnnnnnnnnnnnnnnnnnnnnnnnnnnnnnnnnnnnnnnnnnnnnnnnnnnnnnnnnnnnnnnnnnnnnnnnnnnnnnnnnnnnnnnnnnnnnnnnnnnnnnnnnnnnnnnnnnnnnnnnnnnnnnnnnnnnnnnnnnnnnnnnnnnnnnnnnnnnnnnnnnnnnnnnnnnnnnnnnnnnnnnnnnnnnnnnnnnnnnnnnnnnnnnnnnnnnnnnnnnnnnnnnnnnnnnnnnnnnnnnnnnnnnnnnnnnnnnnnnnnnnnnnnnnnnnnnnnnnnnnnnnnnnnnnnnnnnnnnnnnnnnnnnnnnnnnnnnnnnnnnnnnnnnnnnnnnnnnnnnnnnnnnnnnnnnnnnnnnnnnnnnnnnnnnnnnnnnnnnnnnnnnnnnnnnnnnnnnnnnnnnnnnnnnnnnnnnnnnnnnnnnnnnnnnnnnnnnnnnnnnnnnnnnnnnnnnnnnnnnnnnnnnnnnnnnnnnnnnnnnnnnnnnnnnnnnnnnnnnnnnnnnnnnnnnnnnnnnnnnnnnnnnnnnnnnnnnnnnnnnnnnnnnnnnnnnnnnngaaaggggtggtaatgcaatgctcccacttaattttaaagccagtcccagcagatcaaatgatagtttctccatcaagcaatacttccacttcaacttccactcttcagagccctgtgggagctggcacacacactgtcacaaaaattcagtctggcataactgggacagtcatatcggctccttcaagcactcccatcaccccagccatgcccctagatgaagacccctccaaactgtgtagacatagtctaaaatgtttggagtgtaatgaagtcttccaggacgagacgtcactggctacacatttccagcaggctgcagatacgagtggacannnnnnnnnnnnnnnnnnnnnnnnnnnnnnnnnnnnnnnnnnnnnnnnnnnnnnnnnnnnnnnnnnnnnnnnnnnnnnnnnnnnnnnnnnnnnnnnnnnnnnnnnnnnnnnnnnnnnnnnnnnnnnnnnnnnnnnnnnnnnnnnnnnnnnnnnnnnnnnnnnnnnnnnnnnnnnnnnnnnnnnnnnnnnnnnnnnnnnnnnnnnnnnnnnnnnnnnnnnnnnnnnnnnnnnnnnnnnnnnnnnnnnnnnnnnnnnnnnnnnnnnnnnnnnnnnnnnnnnnnnnnnnnnnnnnnnnnnnnnnnnnnnnnnnnnnnnnnnnnnnnnnnnnnnnnnnnnnnnnnnnnnnnnnnnnnnnnnnnnnnnnnnnnnnnnnnnnnnnnnnnnnnnnnnnnnnnnnnnnnnnnnnnnnnnnnnnnnnnnnnnnnnnnnnnnnnnnnnnnnnnnnnnnnnnnnnnnnnnnnnnnnnnnnnnnnnnnnnnnnnnnnnnnnnnnnnnnnnnnnnnnnnnnnnnnnnnnnnnnnnnnnnnnnnnnnnnnnnnnnnnnnnnnnnnnnnnnnnnnnnnnnnnnnnnnnnnnnnnnnnnnnnnnnnnnnnnnnnnnnnnnnnnnnnnnnnnnnnnnnnnnnnnnnnnnnnnnnnnnnnnnnnnnnnnnnnnnnnnnnnnnnnnnnnnnnnnnnnnnnnnnnnnnnnnnnnnnnnnnnnnnnnnnnnnnnnnnnnnnnnnnnnnnnnnnnnnnnnnnnnnnnnnnnnnnnnnnnnnnnnnnnnnnnnnnnnnnnnnnnnnnnnnnnnnnnnnnnnnnnnnnnnnnnnnnnnnnnnnnnnnnnnnnnnnnnnnnnnnnnnnnnnnnnnnnnnnnnnnnnnnnnnnnnnnnnnnnnnnnnnnnnnnnnnnnnnnnnnnnnnnnnnnnnnnnnnnnnnnnnnnnnnnnnnnnnnnnnnnnnnnnnnnnnnnnnnnnnnnnnnnnnnnnnnnnnnnnnnnnnnnnnnnnnnnnnnnnnnnnnnnnnnnnnnnnnnnnnnnnnnnnnnnnnnnnnnnnnnnnnnnnnnnnnnnnnnnnnnnnnnnnnnnnnnnnnnnnnnnnnnnnnnnnnnnnnnnnnnnnnnnnnnnnnnngcctccccgaggagccaccattcaaccattgaaaaagctgaaaatcaatgtgtttaaggtccacaagtgtgccgtgtgtggcttcaccaccgaaaacctgctgcagttccacgaacacatccctcagcacaaatccgatggttcttcctaccagtgccgggagtgtggcctctgctacacgtctcacgtctctttatccaggcacctcttcatcgtacacaagttaaaggaacctcagccagtgtccaagcagaatggggctggggaagataaccaacaggagaacaaacccagccacgaggatgaatcccccgatggcgccgtgtcagacagaaagtgcaaagtgtgcgcaaaaacttttgaaactgaagctgccttaaatactcacatgcggacacacggcatggccttcatcaaatccaaaaggatgagctcagccgagaaatagccacagatgctccatgaggaaaatccctgtccacattggaataaaaaagacatttttgttacaaaaggtttgcagtataatagagttaacagtactgtctaggctgttgcaatatattctctttcaacgtaccttccttcacctcgtcgtatgtatcctcgataagtattaaaacagtatttgagtttcaaagagtttgtatatatttaaatgaataactttttatactctactctttgttacatgtttgtatcagtatttagtggaaaaccatttgagttgttttgggttagaatttttctttttgtactgtttctttaaaacagagttcttagtaacagnnnnnnnnnnnnnnnnnnnnnnnnnnnnnnnnnnnnnnnnnnnnnnnnnnnnnnnnnnnnnnnnnnnnnnnnnnnnnnnnnnnnnnnnnnnnnnnnnnnnnnngaattcactacataaattgtaagtaattgtgggtctcgaaaacactaggaacgtttaagtgtcttagcacttcctcggtgtgcctgccctgagggagtgacttcacatttgagacaactgcgctccagtgtgggcgtgcctttgtcttcaggtcacgccaaagggtgtttaaagcagccttgcaggtcgctcctttcccagcatggataaaaactgaagccaggaatctaataagaaatgctgatttccccaattccattttgaggaatggggaaggctattctaaagaaaaaaatggtactggttttctgggcagatctgcaaggctggctttaaaagcacaaggagggaaagtaacgaaagggctggactactataaaagttacaaatacgtagttagaccaatagatttatgtagtcaggtttttgtcgtgtaatttgttaactattacagaaacacaactaagaatatcaattatttctctggctcttgacagaaaaaaatcagttgacttaaccctttgctgtcaaaagagttggtgtttcctgctctgggtgctactgccaaacgttctggtacttagagtcgggatgcacaagttcaaccaccgacttatcagtgcagccgcctgtgtattgcaattggccgttaccttaagcactgggccacccgggtttagttcagccatttcaagaagcacatttaacgtctgctttattaaaatgcagcagaggtac

SEQ ID NO: 34863 - DNA, 1473 bp, Macaca Mulatta
  misc_feature (1)...(1473): n = A,T,C or G
aaatttagcttcttcaaggccaaaagcctcattgtgaagagaaagannnnnnnnnnnnnnnnnnnnnnnnnnnnnnnnnnnnnnnnnnnnnnnnnnnnnnnnnnnnnnnnnnnnnnnnnnnnnnnnnnnnnnnnnnnnnnnnnnnnnnnnnnnnnnnnnnnnnnnnnnnnnnnnnnnnnnnnnnnnnnnnnnnnnnnnnnnnnnnnnnnnnnnnnngtctgtatgagctgttggctgctctgccagcccagctgcagcnnnnnnnnnnnnnnnnnnnnnnnnnnnnnnnnnnnnnnnnnnnnnnnnnnnnnnnnnnnnnnnnnnnnnnnnnnnagattcatgaaaaactacactactatgagaagcagagtccggtgcccattctccatggtgcggcggccttggccgatgntggccgaagagcttcagaacaagccattaaacagtgagatcagagagctgttgaaactactgtcaaaacccagtgtgaaggnnnnnnnnnnnnnnnnnnnnnnnnnnnnnnnnnnnnnnnnnnnnnnnnnnnngcctcctatgcctgaagatattgatgatgaggaagactcagtaaaaataatccgtctggtcaaaaatagagaaccactgnnnnnnnnnnnnnnnnnnnnnnnnnnnnnnnnnnnnnnnnnnnnnnnnnnnnnnnnnnnnnnnnnnnnnnnnnnnnnnnnnnnnnnnnnnnnnnnnnnnnnnnnnnnnnnnnnnnnnnnnnnnnnnnnnnnnnnnnnnnnnnnnnnnnnnnnnnnnnnnnnnnnnngctcagtctcagggagcaattacatttaagattatacccggcatcaaagaggagacaccatcaaaagaaggcaagnnnnnnnnnnnnnnnnnnnnnnnnnnnnnnnnnnnnnnnnnnnnnnnnnnnnnnnnnnnnnnnnnnnnnnnnnnnnnnnnnnnnnnnnnnnnnnnnnnnnnnnnnnnnnnnnnnnnnnnnnnnnnnnnnnnnnnnnnnnnnnnnnnnnnnnnnnnnnnnnnnnnnnnnnnnnnnnnnnnnnnnnnnnnnnnnnnnnnnnnnnnnnnnnnnnnnnnnnnnnnnnnnnnnnnnnnnnnnnnnnnnnnnnnnnnnnnnnnnnnnnctggttttagaagaagttttcgtcttagtagaaaagataagaaaacaaataaatccatgtatgaatgcaagaagagtgatcagtacgacacagctgacgtgcccacgtacgaagaagtgacaccgtatcggcgacaaactaatgagaaatacagactcgttgtcttggttggnnnnnnnnnnnnnnnnnnnnnnnnnnnnnnnnnnnnnnnnnnnnnnnnnnnnnnnnnnnnnnnnnnnnnnnnnnnnnnnatactaccagagcaagaagaagccaggagagtgatggtgttgaatacattttcatttccaagcatttgtttgagacagatgtacaaaataacaag

SEQ ID NO: 34864 - DNA, 305 bp, Macaca Mulatta
gactccaaagccacggacagtgatgaggaagatggcagtggccactggagggctggagcagtctctcctcatggcggcctgtgaccgaggtcaggaaggagtggagctattctcccatgatactgaccatgtgcagttccctttttaaaaagcaataaaatgctttggattagaattcctaacattttaaatctattatttaaaacaaatatttgtatgtatacatttgttcatacacatacatgcttccattctacaaacactgaaagaacgttttattatggaaaattccatacatccaatac

SEQ ID NO: 34865 - DNA, 378 bp, Macaca Mulatta
  misc_feature (1)...(378): n = A,T,C or G
ggtctgtttcttcacggagcaccgtgggggagttcttgagaaaggtgcattttggacgactagggagggagaagatgggnnnnnnnnnnnnnnnnnnnnnnnnnnnnnnnnnnnnaatgtctcctctctcacgggacagccgatgccaaggccctaccgccaggtgagcttcccagacgacgacgaggagatcgtgcgcatcaacccccgggagaagatctggatgacggggtacgaggattaccggcacgcgcccgtcaggggcaagtacccggacccctcggaggacgcggactcctcctacgtgcgcttcgccaagggcgaggtccccaagcacgactacaactacccctacgtggactcctcagactttggcct

SEQ ID NO: 34866 - DNA, 562 bp, Macaca Mulatta
ctgaagacaagcagaaagagactcctccagacccactcaataccacacgcacgctctccaataatggtatcccgtaaggctgtggctgctctgctggtggtgcatgcacctgccatgctggcctcccagacggaagccttcgtccccatcttcacctacggcgaactccagaggatgcaggaaaaggaacggagtaaagggcaaaagaaatccctgagtgtatggcagaggtctggggaggaaggtcctgtagaccctgcggagcccatcgaggaagaaggaaacgaaatgatcaagctgactgctcctctggaaattggaatgaggatgaactccagacagctggaaaagtaccgggccgccctggaagggctgctgagtgagatgcttccccagcacgcagccaagtgacggccatgctggggagaaggtggacagatttgggaggactctcccgcccaagtgaggccctgggaatttgcacagcctgccagctgggcttggaagaataacaccctttccaaagcaaatccccctccagcaaataaagcatgaaatatac

SEQ ID NO: 34867 - DNA, 690 bp, Macaca Mulatta
gggggatgaaccctgggccggtggcggcggcgcagtgtatcctgggtcggcgtagctatggcgtctcgtgtcctttcatcctatgtccgccgcctgcccgcggcctttgcgccgctgccccgggtcccgatgctggccgtggcccggcctctcagcaccggtctgtgctccgtggggacccagacgaggctcgggcctttgcagccggccttaaagctcgcgcaggttcctggtagagttacacagttgtgccgccagtatagcgacatgccccctttgacgttagagggcatccgggaccgtgttctttacgtattgaaactctatgacaagattgacccagagaagctttcggtcgattctcattttatgaaagacctgggcttagacagtttggaccaagtggagattatcatggccatggaggacgaattcgggtttgaaattcctgatacagatgctgaaaagttaatgtgtccacaagaaattgtagattacattgcagataagaaggatgtgtatgaataaagtatcagaccctttggctttggggagagaggactcagatgatagtggcgaatgtctggcagtgaggacacattttcgcattattgctgactctgacagagtgattctgatggacgtgtatttaaattgtataagtgttttactctttgaaaataaatccat

SEQ ID NO: 34868 - DNA, 821 bp, Macaca Mulatta
ggaggggagagggttgtatttggaaacgcggagtgggaagtttttcggtgctgtgggctaacaatggacacccagaaggacgttcaacctccaaagcagcaaccaatgatatatatctgtggagaatgtcacacagaaaatgaaataaaatctagggatccaatcagatgcagagaatgtggatacagaataatgtacaagaaaaggactaaaagattggttgtttttgatgctcgatgaaacctgggaattcagaggagtgtcttcacttatacttggatttgctgtcttaacgtttctgattgttgtatttcgattttgcatactgtagttctctcttatctttgggggatacattccaaggcccccagtgaactcctggaacctcagatagtaccaaacctttatacactgtttttttctatatatactatgatatatgtgtgagagagatatatatatgttaaagtataatgtataaattaagcatagcaagagattaataacaatgtaataggacaatgctaacatactgtaataaaagttatgtggaatgtgggttgggtctctcttggctctcaaaatatctttcttttacagtactcacctaattttagaatgtggcctgactacagggtaactgaaaaccacggaaagggaaaacttttggaatgaagggggggcacttactgttacttagggaataccaactattattataccctatggattttaattttttaagaccatcatattgtaattttggggtaatctacctaaatattccgggaaaaaaagccaatttttttggtttccccttt

SEQ ID NO: 34869 - DNA, 737 bp, Macaca Mulatta
  misc_feature (1)...(737): n = A,T,C or G
cagcacctccaaggttcctaggacactttgcctctcttctccccctgctccccaccccgctcccagatctgggggcccatgggccaggagtggataagcctgcattaatacaacctttctccattcactttctatttacaaattaggaaagcaaccttttggtttatatttttttttaatacctcagtgctgcaagtatcaccagagaggctatggaannnnnnnnnnnnnnnnnnnntgtagatgtaaacagnnnnnnnnnnnnnnnnnntataaacatcactgcactgtgactggtgggaaaaactgacagtttcctctttgcacatgtttaacatttggctgttataatatatggtcctcggttggggaaagatacttatgatgaaggatannnnnnnnnnnnnnnnnnnnnnnnnnnttggtaataggtcggcaacagcaactatagaagtacaactcaatagatggcattaaaacatattgtagtgtggnnnnnnnnnnnnnnnnnnnnnnnnnnnnatattgacgttttattaatattttttaaattgttacgtttataaatttggtacttaaggcacagccagtatgagacactgaatgcgacatttattataaagagctgctgcactcctatttttataaattttactaacaaagtagactaatgtagacattcacagacatggtagggcaaaagcatcttcaaactaaagactccaaaatgctaactc

SEQ ID NO: 34870 - DNA, 519 bp, Macaca Mulatta
caggaagggttgccgtccatcacatgcactctgccccactgtcccttcctgtcctctgcctatggcgagctcatgggtcagaggggctgaaaggaccacctggctcccttgttctccagctccgccaggaactccacgcccacgcgcctcacttccaggtctccttactgcgcatcaggagaggctaacagacatcagctgcagccaggcctgtcctgtatgccaaaagaaggtgctgcccatggcctgggcccccaccaacagactgcagatgcattactgtgctgagaggtaccaagaagtttcctgtgaagggcagccggtccaagcccctgaccccagatgtggcaacaggacctcgctcacggccaccggagcatatatgcggggaggggcttcacctgttcccagaggtgtccttggactcaccttggcacatgttctgtttcagtaaagagagacctgatcagccatctgtgtgcttccatcctgcattaaaactcactcagcgtggtccag

SEQ ID NO: 34871 - DNA, 112 bp, Macaca Mulatta
gagccaaagagttcaagacacgtctggggatctttcttcacaaatcagagctgggctgtgatactgggagtagtggcaagttcgagtggggcagtaaacacggcaaagagaa

SEQ ID NO: 34872 - DNA, 755 bp, Macaca Mulatta
  misc_feature (1)...(755): n = A,T,C or G
ggatatttatagaacaaagttttctatttcacattgctgtggactattattacatatatcattattatataaatcatgatgctagccagcaaagatgtgaaaatatctgctcaaaactttcaaagtttagtaagtttttcttcatgaggtcaccagtaaaagacattaatgagaattccttagcaaggagttttgtaagaagtttcttaaacattgtcagttaacatcactcatgtctggnnnnnnnnnnnnnnnnnnnntttttcacctcagctttttgagatgtgaaaaaattattatgtaaattttgtgatgttaaagatgcacagaatatgtatgtatagtttttaccacagtggatgtataataccttggcatcttgtgtgatgttttatacacatgagggctggtgttcattaatactgttttctaatttttccatagtttatctataactacttcactatacaaacaaattagatgttcagataattgaataagtacctttgtgtccttgttcacttatatcactggccagcattataagcaggtgtatacttttagcttgtgtactgtaaatatttttcaagtaaagggaacaaatgtctagttttatttctataggaaatttccctgaccctaaagaatacattttgaaatgaaacaagctttacaagatataatctattttcttatgggtttcccttgtatctattttngggtgaaagtgtttttttaaaatggaactatctcca

SEQ ID NO: 34873 - DNA, 872 bp, Macaca Mulatta
gggggggaggtgcttgtacgcctggtgcgggagctacgggacacagggattgtgtttgaagtagtgcttctaccaagatgtcccgtggttccagcgccggttttgaccgccacattactattttttcacccgagggtcggctctaccaagtagaatatgcttttaaggctattaaccagggtggccttacatcagtagctgtcagagggaaagactgtgcagtaattgtcacacagaagaaagtacctgacaaattattggattccagcacagtgactcacttattcaagataactgaaaacattggttgtgtgatgaccggaatgacagctgacagcagatcccaggtacagagggcacgctatgaggcagctaactggaaatacaagtatggctatgagattcctgtggacatgctatgtaaaagaattgccgatatttctcaggtctacacacagaatgctgaaatgaggcctcttggttgttgtatgattttaattggtatagatgaaaagcaaggccctcaggtatataagtgtgatcctgcaagttactactgtggggtttaaaggccactgccaccaggagttaaacaaaactgattcaacccagctttcctttggaaaaaaaagttgaagaagaaaatttttgactgggacatttttaaacagaccagttggaaacctgccaatttactttgcccgggtccaccgggttccacatcaaatttgaattccaaaccttttccaaaaataaaaaatttggaagtaattgacacttttaaaaattcccttaatttccgggatttcttttcccaaaaacccgaaatttggttggctccaccctttgtttgccccccatcccagaaaaaa

SEQ ID NO: 34874 - DNA, 2114 bp, Macaca Mulatta
  misc_feature (1)...(2114): n = A,T,C or G
ggctgcgtttctggggcccatggctcctcctcatacggcaactattgtgtctactagtcaaggaggctgagcctctggagtgggtcaaggacccgctccagctgacctctaaccccctggggccgcctgagccccggtcttccggcgcctcccatctcccatgggaatctccccatgcgcccactcccccgggagacccgggggactttgattacctggggccctatgcttcctcgcagatgtcagccnnnnnnnnnnnnnnnnnnnnnnnnnnnnnnnnnnnnnnnnnnnnnnnnnnnnnnnnnnnnnnnnnnnnnnnnnnnnnnnnnnnnnnnnnnnnnnnnnnnnnnnnnnnnnnnnnnnnnnnnnnnnnnnnnnnnnnnnnnnnnnnnnnnnnnnnnnnnnnnnnnnnnnnnnnnnnnnnnnnnnnnnnnnnnnnnnnnnnnnnnnnnnnnnnnnnnnnnnnnnnnnnnnnnnnnnnnnnnnnnnnnnnnnnnnnnnnnnnnnnnnnnnnnnnnnnnnnnnnnnnnnnnnnnnnnnnnnnnnnnnnnnnnnnnnnnnnnnnnnnnnnnnnnnnnnnnnnnnnnnnnnnnnnnnnnnnnnnnnnnnnnnnnnnnnnnnnnnnnnnnnnnnnnnnnnnnnnnnnnnnnnnnnnnnnnnnnnnnnnnnnnnnnnnnnnnnnnnnnnnnnnnnnnnnnnnnnnnnnnnnnnnnnnnnnnnnnnnnnnnnnnnnnnnnnnnnnnnnnnnnnnnnnnnnnnnnnnnnnnnnnnnnnnnnnnnnnnnnnnnnnnnnnnnnnnnnnnnnnnnnnnnnnnnnnnnnnnnnnnnnnnnnnnnnnnnnnnnnnnnnnnnnnnnnnnnnnnnnnnnnnnnnnnnnnnnnnnnnnnnnnnnnnnnnnnnnnnnnnnnnnnnnnnnnnnnnnnnnnnnnnnnnnnnnnnnnnnnnnnnnnnnnnnnnnnnnnnnnnnnnnnnnnnnnnnnnnnnnnnnnnnnnnnnnnnnnnnnnnnnnnnnnnnnnnnnnnnnnnnnnnnnnnnnnnnnnnnnnnnnnnnnnnnnnnnnnnnnnnnnnnnnnnnnnnnnnnnnnnnnnnnnnnnnnnnnnnnnnnnnnnnnnnnnnnnnnnnnnnnnnnnnnnnnnnnnnnnnnnnnnnnnnnnnnnnnnnnnnnnnnnnnnnnnnnnnnnnnnnnnnnnnnnnnnnnnnnnnnnnnnnnnnnnnnnnnnnnnnnnnnnnnnnnnnnnnnnnnnnnnnnnnnnnnnnnnnnnnnnnnnnnnnnnnnnnnnnnnnnnnnnnnnnnnnnnnnnnnnnnnnnnnnnnnnnnnnnnnnnnnnnnnnnnnnnnnnnnnnnnnnnnnnnnnnnnnnnnnnnnnnnnnnnnnnnnnnnnnnnnnnnnnnnnnnnnnnnnnnnnnnnnnnnnnnnnnnnnnnnnnnnnnnnnnnnnnnnnnnnnnnnnnnnnnnnnnnnnnnnnnnnnnnnnnnnnnnnnnnnnnnnnnnnnnnnnnnnnnnnnnnnnnnnnnnnnnnnnnnnnnnnnnnnnnnnnnnnnnnnnnnnnnnnnnnnnnnnnnnnnnnnnnnnnnnnnnnnnnnnnnnnnnnnnnnnnnnnnnnnnnnnnnnnnnnnnnnnnnnnnnnnnnnnnnnnnnnnnnnnnnnnnnnnnnnnnnnnnnnnnnnnnnnnnnnnnnnnnnnnnnnnnnnnnnnnnnnnnnnnnnnnnnnnnnnnnnnnnnnnnnnnnnnnnnnnnnnnnnnnnnnnnnnnnnnnnnnnnnnnnnnnnnnnnnnnnnnnnnnnnnnnnnnnnnnnnnnnnnnnnnnnnnnnnnnnnnnnnnnnnnnnnnnnnnnnnnnnnnnnnnnnnnnnnnnnnnnnnnnnnnnnnnnnnnnnnnnnnnnnnnnnnnnnnnnnnnnnnnnnnnnnnnnnnnnnnnnnnnnnnnnnnnnnnnnnnnnnnnnnnnnnnnnnnnnnnnnnnnnnnnaattctcaatcacaatcctctgacagctgttgaagatccatatctctttgaactgccggcattaaaatanngacatgggaacaactcaagtcccacttgcaacacttaagaacattcttacgatgactgttgaactggaaaaactg

SEQ ID NO: 34875 - DNA, 270 bp, Macaca Mulatta
  misc_feature (1)...(270): n = A,T,C or G
gagacagggtctgactctcttgcccaggctggagtgcggtggtgtgattgtggctcactgtagtctcgacctccccagttttgggtgatccttcctcctctgcctcccaagtagctaggactacagacacgcaccaccacgtctggctaatttttgtactatttgtagaggtgaggttttgccatgttgcccaggctggtctcaaactcctnnnncaagtgatcccccaacctaagcctctcaaactgttgggattacaggcatgagcca

SEQ ID NO: 34876 - DNA, 598 bp, Macaca Mulatta
tactggagagaaaccctacaaatgtgaagaatgtgacaaagcctttaagtacttctgtacccttactacacataaaaaaattcatactgtagagaaaccatacaaatgcgaagaatgtggcaaagcctttaagtactcctatacccttactacacataagataatccatactggagaacaaccctacaaatgtaaagaatgtggcaaagcttttaaccatcctgcaactctttcttcacataagaaaattcatactggagagaaaccatacaagtgtgataaatgtggcaaagcctttatttcatcctcaatccttcgtaaacacgagaagattcatacgggagagaaaccctacaaatgtgaagaatgtgacaaagccttcacccgttcctcacaccttactatgcataggatcattcatactggagagaagccatacaaatgtgaagaatgtggcaaagcttttacatggtctgcaggcctccataaacataggagaactcatactggagagaaaccctacaaatgtgaagaatgtggcaaagcctatactacatcctcaaatctaacggaacataaggcagctcatactggagag

SEQ ID NO: 34877 - DNA, 907 bp, Macaca Mulatta
ggcgtctgccgcctgggccaggtgccgcctcagctcattttcagcagcttcgttcaggaagggctggctcccggcaaaacgcccccgtcctcgcacaaagcctctgagatgccaccagttcccggcgggctgagcctagaggagttttcccgctttgtggacctggagggtgaggagccagggcctggagtgtgtaaagaggagacaggcaccgaagacgaggagagggacagagagggtgcctttgagcccccgcccacgaaagctgatgccctccaggccctgggcaccttgaggaggtggtttgagtgcaacagcacttctcctgagctgtttgaaaaattctacgactgtgaggaggaggtggagcggctttgctgcctatgaaggcacctttgctgcttgccagagccccctcctctcctgtttcccatggaaacggcctcttcggaaggcagatccgggctgtctctttcctgtggaaatagaactgtcataaaggtgtagaagggagagaagttgggacaccaagtctgagcgtggagtggcagtcgtccaagccccagaagagagctctaaagatggggcttcaagggtaggaatccaggctacttagtttccttgcttgaaagttatagagccttagaaagggagttagtctagaggcgggcgcttagaaagctggagtgtgggctttttggacagacttcttccttgaactctgttaaaaacagttctgcttctggaaataaagtttttaatcagataagaggccagggtgttattttcgtgggagaagggtaaaaatttttcattcagatttagaaattaattgctgatggtcgctgcggtgcagctgtctgtccatgagcagcagggatcctcctcttccggatattcaacagca

SEQ ID NO: 34878 - DNA, 124 bp, Macaca Mulatta
agatgctgctgttctcaacaatgtagcacacacatttggcctaatggacacagtcaagaaggttttagacaacagaaggaaccaagtagagcagggagaagaacagtttctctatactctgaca

SEQ ID NO: 34879 - DNA, 3157 bp, Macaca Mulatta
  misc_feature (1)...(3157): n = A,T,C or G
agtaacatctttaccagcaatgactgatcgtttggagtccatagcaagacagaatggngactgggctctcatctcagtgccagtggcactgaatgttacatcacgtcagatatgttctatgggaagtgcagttagatcctgcaggacagctttgnnnnnnnnnnnnnnnnnnnnnnnnnnnnnnnnnnnnnnnnnnnnnnnnnnnnnnnnnnnnnnnnnnnnnnnnnnnttttgatgaattttctaagcaccttaagggccttgttaatctgtataaccttccaggggacaancaaactgaagactaaaatgtacttggctctccaatccttagaacaagatctttctaaaatggcaattatgtactggnnnnnnnnnnnnnnnnnnnnnnnnnnnnnnnnnnnnnnnnnnnnnnnnnnnnnnnnnnnnnnnnnnnnnnnnnnnnnnnnnnnnnnnnnnnnnnnnnnnnnnnnnnnnnnnnnnnnnnnnnnnnnnnnnnnnnnnnnnnnnnnnnnnnnnnnnnnnnnnnnnnnnnnnnnnnnnnnnnnnnnnnnnnnnnnnnnnnnnnnnnnnnnnnnnnnnnnnnnnnnnnnnnnnnnnnnnnnnnnnnnnnnnnnnnnnnnnnnnnnnnnnnnnnnnnnnnnnnnnnnnnnnnnnnnnnnnnnnnnnnnnnnnnnnnnnnnnnnnnnnnnnnnnnnnnnnnnnnnnnnnnnnnnnnnnnnnnnnnnnnnnnnnnnnnnnnnnnnnnnnnnnnnnnnnnnnnnnnnnnnnnnnnnnnnnnnnnnnnnnnnnnnnnnnnnnnnnnnnnnnnnnnnnnnnnnnnnnnnnnnnnnnnnnnnnnnnnnnnnnnnnnnnnnnnnnnnnnnnnnnnnnnnnnnnnnnnnnnnnnnnnnnnnnnnnnnnnnnnnnnnnnnnnnnnnnnnnnnnnnnnnnnnnnnnnnnnnnnnnnnnnnnnnnnnnnnnnnnnnnnnnnnnnnnnnnnnnnnnnnnnnnnnnnnnnnnnnnnnnnnnnnnnnnnnnnnnnnnnnnnnnnnnnnnnnnnnnnnnnnnnnnnnnnnnnnnnnnnnnnnnnnnnnnnnnnnnnnnnnnnnnnnnnnnnnnnnnnnnnnnnnnnnnnnnnnnnnnnnnnnnnnnnnnnnnnnnnnnnnnnnnnnnnnnnnnnnnnnnnnnnnnnnnnnnnnnnnnnnnnnnnnnnnnnnnnnnnnnnnnnnnnnnnnnnnnnnnnnnnnnnnnnnnnnnnnnnnnnnnnnnnnnnnnnnnnnnnnnnnnnnnnnnnnnnnnnnnnnnnnnagatgtatgtccatccctgtgacgatgagggctattcggaggaaagctgaaaccattcaggccgacaccccagcactgtccctcattgcagagacagttgaagacatggtgaaaaagaacctgcccccggctagcagcccagggtatggcatgaccacaggcaacaacccaatgagtggtaccactacaccaaccaacacctttccggggggtcccattaccaccttgtttaatatgagcatgagcatcaaagatcggcatgagtcggtgggccatggggaggacttcagcaaggtgtctcagaacacagttcttaccagtttgttgcaaatcacagggaacggggggtctaccagtggctcgagtccgacccnnnnnnnnnnnnnnnnnnnnnnnnnnnnnnnnnnnnnnnnnnnnnnnnnnnnnnnnnnnnnnnnnnnnnnnnnnnnnnnnnnnnnnnnnnnnnnnnnnnnnnnnnnnnnnnnnnnnnnnnnnnnnnnnnnnnnnnnnnnnnnnnnnnnnnnnnnnnnnnnnnnnnnnnnnnnnnnnnnnnnnnnnnnnnnnnnnnnnnnnnnnnnnnnnnnnnnnnnnnnnnnnnnnnnnnnnnnnnnnnnnnnnnnnnnnnnnnnnnnnnnnnnnnnnnnnnnnnnnnnnnnnnnnnnnnnnnnnnnnnnnnnnnnnnnnnnnnnnnnnnnnnnnnnnnnnnnnnnnnnnnnnnnnnnnnnnnnnnnnnnnnnnnnnnnnnnnnnnnnnnnnnnnnnnnnnnnnnnnnnnnnnnnnnnnnnnnnnnnnnnnnnnnnngtccgactatccagttcagacagcatgggcccagatgtaactgacatcttttcagacattgcagaagaagcttctaaacttccccagcactagtgatgatgccccagctattggcacccctcttcgagattcttcaagctctgggcattctcagagtaccctctttgactctgatgtctttcaaactaacaataatgaaaatccatacactgatccagctgatcttattgcagatgctgctggaagccccagtagtgactctcctaccaatcatttttttcatgatggagtagatttcaatcctgatttattgaacagccagagccaaagtggttttggagaagaatattttgatgaaagcagccaaagtggggataatgatgatttcaaaggatttgcatctcaggcactaaatactttgggggtgccaatgcttggaggtgataatggggagaccaagtttaaggccaataaccaagctgacacagttgatttcagtattatatcagtagccggcaaagctttaggtcctgcagatcttatggagcatcacagtggtagtcagggacctttaatgaccactggggacttagggaaagaaaagactcaaaagagggtaaaggaaggcaatggcaccagtaatagtactctcgcggggccaggattagacagcaaaccagggaaacgcagtcggaccccttctaatgatgggaaaagcaaagataagcctccaaagaggaagaaagcagacactgagggaaagtctccatctcatagttcttctaaccgaccttttaccccacctaccagtacaggtggatctaaatctccaggcagttcaggaagatctcagactcccccaggtgttgccacaccacccattcccaaaatcactattcagattcctaagggaacagtgatggtgggcaagccttcctctcacagtcagtataccagcagtggttctgtgtcttcctcaggcagcaaaagccaccatagccattcttcctcttcttcctcatcttctgcttccacctcagggaagagaaaagcagtaaatcagaag

SEQ ID NO: 34880 - DNA, 125 bp, Macaca Mulatta
cagatgtggcaaaatctggcaaaagcagagaccaaacttcataccccaaactctggggggcggagggagctgagcgagtcggtctacacggatgtcctggaccggagctgctcccggaactggca

SEQ ID NO: 34881 - DNA, 481 bp, Macaca Mulatta
gccccaaataagattcaaccgaagatactcaacagacgctggctgaaggaaaatttgaattttaattatttttatgtacagaaaactcaacagtgtacatttaacccagcttagtggcaagttctttagcctttgccttttcgagcttggcgatacgagccacagacttgggacccaggacattgccgccccagtgacggcggatctgaaaagacagaaagaggcggtcagcttgacttgttttctgatattttcaaggttattagttgcgttattctgttggactgttacaagctgatcgtcagaacttctcgtaagttaagccagccagttatttggtaaaatgatttgtgcaagacaatattttgtgtaaagctcttacctcatcgtatctgtcgttgtaattggtcctgatagcttccaccagcttagccaaagcgcctttgtcttccctaaaaggcaggaaggaaaacaaaagtgg

SEQ ID NO: 34882 - DNA, 778 bp, Macaca Mulatta
cctaccacggggaaagggctctggcagaggctttttgcacaggcttctctatggggactgtaggaaagaatgcttttgtctggaggagccagaaaggctttgtaaaatgtgtgctttgagggcctcaaagatcaagtaggggtttgataggtagagaagaggataggctaccaggtagcaagaaggatgtgtgttggtaccaggtctgtgtgagagaattatgagtaagcgcagtgaggcataagcagacagtgttagaggattctggggtgtgattgtattctccaagtgtttgcagtgttcttcatttttcacgtttttatgtcataggtggagctatatacctttctggaattgacatgatacatggcacaccagtactagacatcaagccctacatagctgagtatgactcgccgcaaaatgtgatggagcctttagcagactttaatttacagaataaccaacatacaccaaacactgcgtcccagtctgacagcaagactgacagctgtgaccagcgacagctgtcagtgtgtgatgagccacaacctcaccgtagcactaaggagaaacctaaatgtcctgaagacagaacttcagaagaaaactacctgacacacagtgacacagccagaattcagcaagcattccctatgcacagggagatagcagtggattttggtttggaatcaagacgtgatcagagttccagtatgtcagaagaacaaattggcccatatggcccggagaagagcttttcagagaaaggtacaga

SEQ ID NO: 34883 - DNA, 734 bp, Macaca Mulatta
gttgactggaggagaagatgcacagttgttactttggaaacctggagctatagagaagacctttactaagaaagagagcatgaaaatagcatcttctgtgcaccaacgagtacgagttcatagtaatgattcttataaaagaaggaaaaagcagtgataatgcatttggcactttggtaggttttatagtttcaagtagtcctttttgtttactacccatggtagacatgtttaaagctttatgtaaaaacaagcagtcagcaaacagtccaggaaaaatacggggagaatggtttaattccggtcttcacatattctaaaaaattttaaagcctctaagtataaaatcagtgagttgaaagtaaaatttctcatttaaagaacccatctgttaatgtagtaaatgttgggtttaaagaaatagctctgataaggaatttttagaaggagatacctggtaaaacttagtaaaacaggtggttggctgcattttttaagcccagttttttacattttaaattgtcgttattgtgtataaaaccagatcagactatattcttcatttgaggagcatctctatatttaatacacctaatgtattatgttggagtatttaaatgtaagtattttaatgagtaaatagaattaaacttttttagaaataaaatgatagccatgtatgtaaaatgagaaaaatatgtttagtaaatatatgcatctttaatattgttagt

SEQ ID NO: 34884 - DNA, 1714 bp, Macaca Mulatta
  misc_feature (1)...(1714): n = A,T,C or G
gcctctgcagatatgggggcagctggtcaggatggccattcgggctcagcacagcaaggcagcccagactcagactggggaagcaaacaggggctggacaggccaggagagcctgtcggacagtgatcctgagatgtgggagttgctgcagagggagaaggacaggcagtgtcgtggcctggagctcattgcctcagannnnnnnnnnnnnnnnnnnnnnnnnnnnnnnnnnnnnnnnnnnnnnnnnnnnnnnnnnnnnnnnnnnnnnnnnnnnnnnnnnnnnnnnnnnnnnnnnnnnnnnnnnnnnnnnnnnnnnnnnnnnnnnnnnnnnnnnnnnnnnnnnnnnnnnnnnnnnnnnnnnnnnnnnnnnnnnnnnnnnnnnnnnnnnnnnnnnnnnnnnnnnnnnnnnnnnnnnnnnnnnnnnnnnnnnnnnnnnnnnnnnnnnnnnnnnnnnnnnnnnnnnnnnnnnnnnnnnnnnnnnnnnnnnnnnnnnnnnnnnnnnnnnnnnnnnnnnnnnnnnnnnnnnnnnnnnnnnnnnnnnnnnnnnnnnnnnnnnnnnnnnnnnnnnnnnnnnnnnnnnnnnnnnnnnnnnnnnnnnnnnnnnnnnnnnnnnnnnnnnnnnnnnnnnnnnnnnnnnnnnnnnnnnnnnnnnnnnnnnnnnnnnnnnnnnnnnnnnnnnnnnnnnnnnnnnnnnnnnnnnnnnnnnnnnnnnnnnnnnnnnnnnnnnnnnnnnnnnnnnnnnnnnnnnnnnnnnnnnnnnnnnnnnnnnnnnnnnnnnnnnnnnnnnnnnnnnnnnnnnnnnnnnnnnnnnnnnnnnnnnnnnnnnnnnnnnnnnnnnnnnnnnnnnnnnnnnnnnnnnnnnnnnnnnnnnnnnnnnnnnnnnnnnnnnnnnnnnnnnnnnnnnnnnnnnnnnnnnnnnnnnnnnnnnnnnnnnnnnnnnnnnnnnnnnnnnnnnnnnnnnnnnnnnnnnnnnnnnnnnnnnnnnnnnnnnnnnnnnnnnnnnnnnnnnnnnnnnnnnnnnnnnnnnnnnnnnnnnnnnnnnnnnnnnnnnnnnnnnnnnnnnnnnnnnnnnnnnnnnnnnnnnnnnnnnnnnnnnnnnnnnnnnnnnnnnnnnnnnnnnnnnnnnnnnnnnnnnnnnnnnnnnnnnnnnnnnnnnnnnnnnnnnnnnnnnnnnnnnnnnnnnnnnnnnnnnnnnnnnnnnnnnnnnnnnnnnnnnnnnnnnnnnnnnnnnnnnnnnnnnnnnnnnnnnnnnnnnnnnnnnnnnnnnnnnnnnnnnnnnnnnnnnnnnnnnnnnnnnnnnnnnnnnnnnnnnnnnnnnnnnnnnnnnnnnnnnnnnnnnnnnnnnnnnnnnnngccaagctccaggatttcaaatccttcctgctcaaggactcagaaacaagtcagcgtctggccgacctcaggcaacgggtggagcagtttgccaggggcttccccatgcctggttttgatgagcattgaaggcacctgggaaatgaggcccacagacaagaagttactctccctccccctacctgggccagtggaatagaaagcctttctattttttggtgggggagggaagacctctcacctagggcaagagccaggtatagtcccccttcccagaatttgtaactgagaagatctttccttttccctttttcagtaacaagacttagaaggagggcccaggcactttctgtttggaccc

SEQ ID NO: 34885 - DNA, 3992 bp, Macaca Mulatta
  misc_feature (1)...(3992): n = A,T,C or G
atccatgaccaagaagacggtgaacagtttaaatcagtttttcactgggacatgaaatccaaggataaggaaggtgcacctaacaggcagcccctggcaaatgagnnnnnnnnnnnnnnnnnnnnnnnnnnnnnnnnnnnnnnnnnnnnnnnnnnnnnnnnnnnnnnnnnnnnnnnnnnnnnnnnnnnnnnnnnnnnnnnnnnnnnnnggaatatacagaagactatgagcagcccaggggcaaggggagctttccagccatgatcacacctgcttatcaaagggccaagcaagccaaccagatggccagccaagtgnnnnnnnnnnnnnnnnnnnnnnnnnnnnnnnnnnnnnnnnnnnnnnnnnnnnnnnnnnnnnnnnnnnnnnnnnnnnnnnnnnnnnnnnnnnnnnnnnnnnnnnnnnnnnnnnnnnnnnnnnnnnnnnnnnnnnnnnnnnnnnnnnnnnnnnnnnnnnnnnnnnnnnnnnnnnnnnnnnnnnnnnnnnnnnnnnnnnnnnnnnnnnnnnnntgaggtaccatcaacaatatcaaaaagaaatgaggggaatggctggtccagccgttggagctgagggcatgttgacaagggaatgtgcagaccaatatggccaggnnnnnnnnnnnnnnnnnnnnnnnnnnnnnnnnnnnnnnnnnnnnnnnnnnnnnnnnnnnnnnnnnnnnnnnnnnnnnnnnnnnnnnnnnnnnnnnnnnnnnnnnnnnnnnnnnnnnnnnnnnnnnnnnnnnnnnnnnnnnnnnnnnnnnnnnnnnnnnnnnnnnnnnnnnnnnnnnnnnnnnnnnnnnnnnnnnnnnnnnnnnnnnnnnnnnnnnnnnnnnnnnnnnnnnnnnnnnnnnnnnnnnnnnnnnnnnnnnnnnnnnnnnnnnnnnnnnnnnnnnnnnnnnnnnnnnnnnnnnnnnnnnnnnnnnnnnnnnnnnnnnnnnnnnnnnnnnnnnnnnnnnnnnnnnnnnnnnnnnnnnnnnnnnnnnnnnnnnnnnnnnnnnnnnnnnnnnnnnnnnnnnnnnnnnnnnnnnnnnnnnnnnnnnnnnnnnnnnnnnnnnnnnnnnnnnnnnnnnnnnnnnnnnnnnnnnnnnnnnnnnnnnnnnnnnnnnnnnnnnnnnnnnnnnnnnnnnnnnnnnnnnnnnnnnnnnnnnnnnnnnnnnnnnnnnnnnnnnnnnnnnnnnnnnnnnnnnnnnnnnnnnnnnnnnnnnnnnnnnnnnnnnnnnnnnnnnnnnnnnnnnnnnnnnnnnnnnnnnnnnnnnnnnnnnnnnnnnnnnnnnnnnnnnnnnnnnnnnnnnnnnnnnnnnnnnnnnnnnnnnnnnnnnnnnnnnnnnnnnnnnnnnnnnnnnnnnnnnnnnnnnnnnnnnnnnnnnnnnnnnnnnnnnnnnnnnnnnnnnnnnnnnnnnnnnnnnnnnnnnnnnnnnnnnnnnnnnnnnnnnnnnnnnnnnnnnnnnnnnnnnnnnnnnnnnnnnnnnnnnnnnnnnnnnnnnnnnnnnnnnnnnnnnnnnnnnnnnnnnnnnnnnnnnnnnnnnnnnnnnnnnnnnnnnnnnnnnnnnnnnnnnnnnnnnnnnnnnnnnnnnnnnnnnnnnnnnnnnnnnnnnnnnnnnnnnnnnnnnnnnnnnnnnnnnnnnnnnnnnnnnnnnnnnnnnnnnnnnnnnnnnnnnnnnnnnnnnnnnnnnnnnnnnnnnnnnnnnnnnnnnnnnnnnnnnnnnnnnnnnnnnnnnnnnnnnnnnnnnnnnnnnnnnnnnnnnnnnnnnnnnnnnnnnnnnnnnnnnnnnnnnnnnnnnnnnnnnnnnnnnnnnnnnnnnnnnnnnnnnnnnnnnnnnnnnnnnnnnnnnnnnnnnnnnnnnnnnnnnnnnnnnnnnnnnnnnnnnnnnnnnnnnnnnnnnnnnnnnnnnnnnnnnnnnnnnnnnnnnnnnnnnnnnnnnnnnnnnnnnnnnnnaaagacgagcctctcttcctgcgggcccgagccactgttgcaaatctcagcgagnnnnnnnnnnnnnnnnnnnnnnnnnnnnnnnnnnnnnnnnnnnnnnnnnnnnnnnnnnnnnnnnnnnnnnnnnnnnnnnnnnnnnnnnnnnnnnnnnnnnnnnnnnnnnnnnnnnnnnnnnnnnnnnnnnnnnnnnnnnnnnnnnnnnnnnnnnnnnnnnnnnnnnnnnnnnnnnnnnnnnnnnnnnnnnnnnnnnnnnnnnnnnnnnnnnnnnnnnnnnnnnnnnnnnnnnnnnnnnnnnnnnnnnnnnnnnnnnnnnnnnnnnnnnnnnnnnnnnnnnnnnnnnnnnnnnnnnnnnnnnnnnnnnnnnnnnnnnnnnnnnnnnnnnnnnnnnnnnnnnnnnnnnnnnnnnnnnnnnnnnnnnnnnnnnnnnnnnnnnnnnnnnnnnnnnnnnnnnnnnnnnnnnnnnnnnnnnnnnnnnnnnnnnnnnnnnnnnnnnnnnnnnnnnnnnnnnnnnnnnnnnnnnnnnnnnnnnnnnnnnnnnnnnnnnnnnnnnnnnnnnnnnnnnnnnnnnnnnnnnnnnnnnnnnnnnnnnnnnnnnnnnnnnnnnnnnnnnnnnnnnnnnnnnnnnnnnnnnnnnnnnnnnnnnnnnnnnnnnnnnnnnnnnnnnnnnnnnnnnnnnnnnnnnnnnnnnnnnnnnnnnnnnnnnnnnnnnnnnnnnnnnnnnnnnnnnnnnnnnnnnnnnnnnnnnnnnnnnnnnnnnnnnnnnnnnnnnnnnnnnnnnnnnnnnnnnnnnnnnnnnnnnnnnnnnnnnnnnnnnnnnnnnnnnnnnnnnnnnnnnnnnnnnnnnnnnnnnnnnnnnnnnnnnnnnnnnnnnnnnnnnnnnnnnnnnnnnnnnnnnnnnnnnnnnnnnnnnnnnnnnnnnnnnnnnnnnnnnnnnnnnnnnnnnnnnnnnnnnnnnnnnnnnnnnnnnnnnnnnnnnnnnnnnnnnnnnnnnnnnnnnnnnnnnnnnnnnnnnnnnnnnnnnnnnnnnnnnnnnnnnnnnnnnnnnnnnnnnnnnnnnnnnnnnnnnnnnnnnnnnnnnnnnnnnnnnnnnnnnnnnnnnnnnnnnnnnnnnnnnnnnnnnnnnnnnnnnnnnnnnnnnnnnnnnnnnnnnnnnnnnnnnnnnnnnnnnnnnnnnnnnnnnnnnnnnnnnnnnnnnnnnnnnnnnnnnnnnnnnnnnnnnnnnnnnnnnnnnnnnnnnnnnnnnnnnnnnnnnnnnnnnnnnnnnnnnnnnnnnnnnnnnnnnnnnnnnnnnnnnnnnnnnnnnnnnnnnnnnnnnnnnnnnnnnnnnnnnnnnnnnnnnnnnnnnnnnnnnnnnnnnnnnnnnnnnnnnnnnnnnnnnnnnnnnnnnnnnnnnnnnnnnnnnnnnnnnnnnnnnnnnnnnnnnnnnnnnnnnnnnnnnnnnnnnnnnnnnnnnnnnnnnnnnnnnnnnnnnnnnnnnnnnnnnnnnnnnnnnnnnnnnnnnnnnnnnnnnnnnnnnnnnnnnnnnnnnnnnnnnnnnnnnnnnnnnnnnnnnnnnnnnnnnnnnnnnnnnnnnnnnnnnnnnnnnnnnnnnnnnnnnnnnnnnnnnnnnnnnnnnnnnnnnnnnnnnnnnnnnnnnnnnnnnnnnnnnnnnnnnnnnnnnnnnnnnnnnnnnnnnnnnnnnnnnnnnnnnnnnnnnnnnnnnnnnnnnnnnnnnnnnnnnnnnnnnnnnnnnnnnnnnnnnnnnnnnnnnnnnnnnnnnnnnnnnnnnnnnnnnnnnnnnnnnnnnnnnnnnnnnnnnnnnnnnnnnnnnnnnnnnnnnnnnnnnnnnnnnnnnnnnnnnnnnnnnnnnnnnnnnnnnnnnnnnnnnnnnnnnnnnnnnnnnnnnnnnnnnnnnnnnnnnnnnnnnnnnnnnnnnnnnnnnnnnnnnnnnagttgcgctacaagtcagacctggtcggcatgaagggcatagggtggctggcgctgagatccccacagatagagagtgcaaagaaggctggagaactcatcagcga

SEQ ID NO: 34886 - DNA, 404 bp, Macaca Mulatta
  misc_feature (1)...(404): n = A,T,C or G
gaggtggagaaaacccggtgccagcatgagcgagaacacattctcggggcagcgggggcggcggacccacagcgacccattcctccagggctgttcgttcctgagtgcgatgcgcacgggcactacgcgcccacccagtgccacggcagcaccggctactgctggtgcgtggatcgcgacggccgcgaggtggagggcaccaggaccaggcccgggatgacgcccccgtgtnctgagtacagtggctcccccgattcaccaaggacccgcagtgcctaccgccgtgatccccttgccccccgggacccatttactctttgcccagaccgggaagattgagcgcctgcccctggagggaaataccatgaggaagacagaagcaaaggcattccttcatgtcccgg

SEQ ID NO: 34887 - DNA, 1790 bp, Macaca Mulatta
  misc_feature (1)...(1790): n = A,T,C or G
nccaacctgtcagtggtgttcaaagactccaactccaccacgcccctcatctttgtgctgtcacccggcacagaccctgctgccgacctctacaagtttgccgaagaaatgaagttctccaaaaagctctctgccatctccctgggccaggggcagnnnnnnnnnnnnnnnnnnnnnnnnnnnnnnnnnnnnnnnnnnnnnnnnnnnnnnnnnnnnnnnnnnnnnnnnnnnnnnnnnnnnnnnnnnnnnnnnnnnnnnnnnnnnnnnnnnnnnnnnnnnnnnnnnnnnnnnnnnnnnnnnnnnnnnnnnnnnnnnnnnnnnnnnnnnnnnnnnnnnnnnnnnnnnnnnnnnnnnnnnnnnnnnnnnnnnnnnnnnnnnnnnnnnnnnnnnnnnnnnnnnnnnnnnnnnnnnnnnnnnnnnnnnnnnnnnnnnnnnnnnnnnnnnnnnnnnnnnnnnnnnnnnnnnnnnnnnnnnnnnnnnnnnnnnnnnnnnnnnnnnnnnnnnnnnnnnnnnnnnnnnnnnnnnnnnnnnnnnnnnnnnnnnnnnnnnnnnnnnnnnnnnnnnnnnnnnnnnnnnnnnnnnnnnnnnnnnnnnnnnnnnnnnnnnnnnnnnnnnnnnnnnnnnnnnnnnnnnnnnnnnnnnnnnnnnnnnnnnnnnnnnnnnnnnnnnnnnnnnnnnnnnnnnnnnnnnnnnnnnnnnnnnnnnnnnnnnnnnnnnnnnnnnnnnnnnnnnnnnnnnnnnnnnnnnnnnnnnnnnnnnnnnnnnnnnnnnnnnnnnnnnnnnnnnnnnnnnnnnnnnnnnnnnnnnnnnnnnnnnnnnnnnnnnnnnnnnnnnnnnnnnnnnnnnnnnnnnnnnnnnnnnnnnnnnnnnnnnnnnnnnnnnnnnnnnnnnnnnnnnnnnnnnnnnnnnnnnnnnnnnnnnnnnnnnnnnnnnnnnnnnnnnnnnnnnnnnnnnnnnnnnnnnnnnnnnnnnnnnnnnnnnnnnnnnnnnnnnnnnnnnnnnnnnnnnnnnnnnnnnnnnnnnnnnnnnnnnnnnnnnnnnnnnnnnnnnnnnnnnnnnnnnnnnnnnnnnnnnnnnnnnnnnnnnnnnnnnnnnnnnnnnnnnnnnnnnnnnnnnnnnnnnnnnnnnnnnnnnnnnnnnnnnnnnnnnnnnnnnnnnnnnnnnnnnnnnnnnnnnnnnnnnnnnnnnnnnnnnnnnnnnnnnnnnnnnnnnnnnnnnnnnnnnnnnnnnnnnnnnnnnnnnnnnnnnnnnnnnnnnnnnnnnnnnnnnnnnnnnnnnnnnnnnnnnnnnnnnnnnnnnnnnnnnnnnnnnnnnnnnnnnnnnnnnnnnnnnnnnnnnnnnnnnnnnnnnnnnnnnnnnnnnnnnnnnnnnnnnnnnnnnnnnnnnnnnnnnnnnnnnnnnnnnnnnnnnnnnnnnnnnnnnnnnnnnnnnnnnnnnnnnnnnnnnnnnnnnnnnnnnnnnnnnnnnnnnnnnnnnnnnnnnnnnnnnnnnnnnnnnnnnnnnnnnnnnnnnnnnnnnnnnnnnnnnnnnnnnnnnnnnnnnnnnnnnnnnnnnnnnnnnnnnnnnnnnnnnnnnnnnnnnnnnnnnnnnnnnnnnnnnnnnnnnnnnnnnnnnnnnnnnnnnnnnnggaacactatcaaccacaggacactccaccaactatgtcattgctgtggagatccccacccatcagccccagcgacactggataaagcgtggtgtggccctcatctgtgccctggactactagactgagacagaagggctgaggccattaaagctgaattttc

SEQ ID NO: 34888 - DNA, 309 bp, Macaca Mulatta
tccacgtttgcaaacgcagccgcacgcccaggcctacccgtgccgcccgagctccgcactgcgtccgcgctactctcctcgccgccccgatggcgttccggggctggaggcccccgccgccaccgctgctcctgctgctgctctgggtgaccgggcaggcagcgcccgtggctggcctgggctccgacgcggagctgcagatcgagcggcgcttcgtgcctgacgagtgcccgcgcaccgtgcgcagcggcgactttgtgcgctaccactacgtggggacgttccccgacggccagaagttcgactcca

SEQ ID NO: 34889 - DNA, 83 bp, Macaca Mulatta
aggtatcctctggcacatgcaggcctgatgtttcagaatctcctgaattacgtcagaagtcaccattgtttcagtttgccgag

SEQ ID NO: 34890 - DNA, 671 bp, Macaca Mulatta
  misc_feature (1)...(671): n = A,T,C or G
agatgccctccaaatccttggttatggaatatttggctcatcccagtgcactcggcttggctattggagttgcttgtggcgtgtgtctgggctggagcctccgagtacgctttgggatgctccccaaaagcaagacgagcaagacacacacagatactgaaagtgaagcaagcatcttgggagagagtggggagtacaagatgattcttgtggttcgaaatgacttaaagatgggaaaagggaaagtggctgcccagtgctctcatgctgcgtgattcagcctacaagcagnnnnnnnnnnnnnnnnnnnnnnnnnnnnnnnnnnnnnnnnnnnnnnnnnnnnnnnnnnnnnnnnnnnnnnnnnnnnnnnnnnnnnnnnnnnnnnnnnnnnnnnnnnnnnnnnnnnnnnnnnnnnnnnnnnnnnnnnnnnnnnnnatgctggacgtactcagattgcaccaggctctcaaactgtcctagggattgggccaggaccagcagacctaattgacaaagtcactggccacctaaaactttactaggtggactttgatatgacagtaacccttccatcacaggtgtttgaagcctgtcagattctaacaaaagctgaatttcttcacccaatttaaatgttcttaagatgaaaataaaacctattcccatgttct

SEQ ID NO: 34891 - DNA, 94 bp, Macaca Mulatta
attgaacaggagggtgtcacagtgaagagcagctcccacttcaacccagaccctgatgcagagaccctctacaaagccatgaaggggatcggtg

SEQ ID NO: 34892 - DNA, 330 bp, Macaca Mulatta
gtgaatgtgaaatcggggagagaggaaacacctctctgacttgggtctggggggcgtgatgggtgaggcagccccaacctccatcatttttgtggggacactttaggcagctgtagtggaggggcggcaggcagggcccctggcctagttgttgagctggacaggcttgctgtccagtgggtgccacagctccaggcggtggtcactgtggcccaggcactcaagccagtgccgcaggcgctccccactggcatggctgcccagctgcaccccgcctgccatgggggatgggtcaggaactgccagtagcgtactgggcccccaccccag

SEQ ID NO: 34893 - DNA, 254 bp, Macaca Mulatta
atccaccagagctttgtatttttgttacgtactgtttctttgataattgatgtgataaggaaaaaagtcctatttttatactcccaacaagcctgtgtcctgtggttctttcccttcgggtgtgtgagacgtattgcagaggtgtgagattctggtttagaaagtccccacatgtggcttctgaagcctctgtgggtactgccttcttcaggagagaggagatgaggaggcactggaggccatggtagcagtga

SEQ ID NO: 34894 - DNA, 668 bp, Macaca Mulatta
  misc_feature (1)...(668): n = A,T,C or G
gtctacttctattttgactctttattagtacagttttctacttgtcatataactcctggaacaacaatacgggaagccgtgatcctttgtccccaactcataattttattctttttccaaatcgctgtattgtactgtttgtgtgctgctccaacgaccagcgtgtgttggatcggatcaccatggtaaaccaaaagtggacttgtcagcctataactactctgcagctgccactaactctacaggcacagtaactacactttatacaggagcacatgccaaagtgcctgggaggtgccaataacatcaagaaaattacaaaaaaagatacggtattaaccttggacannnnnnnnnnnnnnnnnnnnnnnnnnaggcagctttcccacatttataaatggggttgtcaagctcaacaggtcatttgttccccatagcagcatatatctcatttttaaattgaagctaattaaataggattttactactcaacattcattatactgttaatctttgctgaaatacatgctaacaaatgttaagcaagggaaactgaagattgaatcacatggattctgttagcagtgttctgctttctgtaaaaagaggtactttcccatgatggaggcatgaagtggtgccaataagcatagaacggaaatgttgac

SEQ ID NO: 34895 - DNA, 343 bp, Macaca Mulatta
  misc_feature (1)...(343): n = A,T,C or G
gctaaagcgagcagtcctcagggttttgatgtggatcgagatgcnnnnnnnnnnnnnnnnnnnnnnnnnnnnnnnnnnnnnnnnnnnnnnnnnnnnnnnnnnnnnnnnnnnnnnnnnnnnnnnnnnnnnnnnnnnnnnnnnnnnnnnnnnnnnnnnnnnnnnnnnnnnnaggagctggaggaagtactcgagagtgagctgagtggaaacttcaagaagacagcgttggcccttctggaccgccccagcgagtatgccgcccggcagctgcagaaggctatgaagggtttggggacagatgagtctgtgctcattgaggtcctgtgcacgaggaccaataagg

SEQ ID NO: 34896 - DNA, 789 bp, Macaca Mulatta
  misc_feature (1)...(789): n = A,T,C or G
ggggaaaaaaattcggatacattagcagctatgtaactgacctaattgatggcaggtgtaataagactatcgtcttcctacacataggaggctcattctctgggcacactgtcaactgttacattttactgattaataaataaattggaattttaaaatatcgatatcaccatggatttaatccagatctggtattatgtaactaaacatggtggtgattattatttaaaaccattatttaataagagtaaaaatatgtgaatctggannnnnnnnnnnnnnnnnngatgcccagatgatatattaggcaccactgattttttaattaaattgatgggctacactttcgatgtttcaaagttacaaacctgtgatttttttgtaaaggaaataattgccaaatacccattgctgacgattagttttaaaatcttattcctcttcttctcccctcacttttacctacttcctctgcaaaaagatttgacaaatactttcataaagaaatgtgtgttgtaacataaatatattgcacaaacatagtttgtaaaggcattctttaagctatttatgtaaaatcaataaaagttgatcattataattaaactgtatcagttaaatattaaagcagcacagagtattcctttggacagaattttgtcaaattggaaacccaccaatgaaaatggattgtttaaaatgtgttttcaagaacatcccccagaatacctccgtgttcaccgggggaaaaaagaagtgggggtaaccaacattcgggtttaaatttcc

SEQ ID NO: 34897 - DNA, 825 bp, Macaca Mulatta
  misc_feature (1)...(825): n = A,T,C or G
nnnnnnnnnnnnnnnnnnnnnnnnnnnnnnnnnnnnnnnnnnnnnnnnnnnnnnnnnnnnnnnnnnnnnnnnnnnnnnnnnnnnnnnnnnnnnnnnnnnnnnnnnnnnnnnnnnnnnnnnnnnnnnnnnnnnnnnnnnnnnnnnnnnnnnnnnnnnaattcttggatgtttgagctgngnnnnccataaatgctaccactccaagtctagctcgggngcttcactttttacatttttagtccactgggaaactcttcctcgttcggccttcaaaggtatattttctgctcgttccagggttagagttctgctctctaggagcatcttggacatgcggcaagatctgcagtcatgatttgtttccatgacctactcatttagactttgagcacctttaggtaggaagaattgtctttgggccccagtgatacttgttgaaattgttagttcggtagatgagtacattcaaaggggaagaggcaggtggatcacccgaggtcaggaattcgagagcatnnnnnnnnnnnnnnnnnnnttctgtctctactaaaaacacaacaagatcagccgggcgtggtggcacacgcctgcagtcccggccacttgggaggctgaagcaggagaatggcttgaacccgggagatnnnnnnnnnnnnnnnnnnnnnnnannnnnnnnnnnnnnnnnnnnnnnnnnnnnncgagacctcctnnnnnnnnnnnnnnnnnnnnnnnnnaaggaagaggtagtgtctttgacctttgagcttttcgggccctgggcctgggtctgacttgctgtaatgggttgtatgtgctctagttgcc

SEQ ID NO: 34898 - DNA, 547 bp, Macaca Mulatta
tcccgggatcgcagccccgcgtgctctctgccgtgggacctgggtccccgcgccgctcccctgagccctgagcgcgcggcaggcgggtgccgggttgggactggcggtgaggcagggagtgaggagcgagcggagtcgcgtgcgccgccgcgcagctccgtgtcgccccagccccagccgggggcctgtggcccgcgggaggagctgtgcgtccgcgacctgtcggggaccgcagctgctctgtcggagtgcacgggccgagtctgcgcgactacccacgcgtgacaggtccctggatgagaaggagctgacagcagctgaattgcatcttctctgtgtgctggggagcagggctacacgccccaggtggcatcaatgccgaagaacagcaaagtgacccagcgtgagcacagcagtgagcatgtcactgagtcggtggccgacctgctggccctcgaggagcctgtggactataagcagagcgtactgaatgtggctggcgaggcaggtggcaagcagaaggcagtggaggaggagctggacgcag

SEQ ID NO: 34899 - DNA, 334 bp, Macaca Mulatta
ctgaagatcctctgcccggagcctgcagactccaacccctcagtttgagagtcaggagccccacagtcctcacagcaacagggagcaccagctcctggtctcgaaaaaaggagggccccaactccaaggatggcggcccggcggggagctgagaacacgcgaactctagggaaaggacagggcttcagggacccgaaagtcgagcaccgggaaatgtggctgcctctgcggcagagctggaagggccctcgaatgccattcacaggaacagcccgggacccagggacatcagaaggattggtttgtccgaaaagtgagaggaggcggaagagag

SEQ ID NO: 34900 - DNA, 782 bp, Macaca Mulatta
  misc_feature (1)...(782): n = A,T,C or G
gggtgccaaaggtgaaaatgatgctttctctaacagagaaattcttagtgactccagttgtagaaaaacgtctttacaacctgaataagattgaagaattgtgaacataccatgcctattggatgaatcatttgccgttaagctaagtcagactgtagggtttgtgatggatttatggaatatgtgggtatagaaatcatgaatctagcatttgttttcagagattcaagcatagtctttagggtagatcagaaatgacaaatgaattcaaaacctagcaggtgcattgtaaatgtgtgcccaattatgttttggaaatggcatttccttggggtcatgtttctactggcaaaatttgcaatagtattgtatgtaattttaaaacttataaaattatccacattggccacataaactgtactgccaattaatagaattctggaattgtgagaaattgtatcattgaagttcaataggaggtgtggcttanaaatttatcagtaccacaaaaaagaaaacaaaaatatttggtactgaggttcattgccagggcaggaggtatttccagaaaatactcatgcctgtgttctgttccttgctttcccaaatactgcatgtgactcttcttagtggcagctgaaagactcgagcccgggttgtctcctttggttattatgacatgaaagtgtatcaagaaactcgccattttcttttgcctccatggactttggttttggaagaacataaagaaaaatttctggaccccttttttataaaaaaaa

SEQ ID NO: 34901 - DNA, 667 bp, Macaca Mulatta
tgagtggtgtttctgtgagctaatcacacctattaccacttcctgaatcagttattattcttcctctttttttctaccagagaacagactaacagctttaacccttcacaacagttcttgttagaatcataggatgtgtggcccagaggtaagaatagaatttctttcactaaagaacacaccttttgtagatgacctcttctcaactctgttttgctatgctgtaattccgaagcatgtaagacaaaaaaaatgaagacactcaatctagaacaaactgagccaggtatgccaatattgctgaatagaaacagatagaattagaaatagatcttctatttttaggcttctatttcctttacacccactcttcacagcctattctactttaaaggaaacctttttattttggtgcacataatctagcaggaatctttttatcttttaagagctgtatcagccttacgaaggtacgagatgtttgcttttgtcaaaagctttattcagatatcattaacgtaaaataaactgaacatatttaaagtgtacaatttgataagtttcacaccttgtggagaacatgcataccacagttaacatatccgtcatccctcaaagtgtcacaatgaccctcccgctgactcctccccagaatagcaccaatggg

SEQ ID NO: 34902 - DNA, 789 bp, Macaca Mulatta
  misc_feature (1)...(789): n = A,T,C or G
ggtgctaaatcttaaaagaaactgggtttatgcactaaacgttttgtgccttggtctaatattaacacgatgtctgtgtaaaatnnnnnnnnnnnnnnnnnnngtgttgaatcacactatattttccatcatcccagattgctaaatgtgttctttccaagaagtctgaatgaattattatatacatttgctgtcacatacatgacagtttggtcattattagagatttcagtaattacagtgggaaacagaagcctaagttctttaccttatcaaaactatgttcctggaaccacattattatgatggtttttgtgctcttgtacattggatgtcttaagctgagtacagtttaggggatcctttctcatgacaggaaggtactgctttcctcaacactgtgatctgacctgtgacaaatctgtactatccactatgtaaatggctcacaagtcaattgcaaacaaactgaatgtacaaatcttagtgctggtgctgaaatctcttcggaatagtcatcatgaattaaaagtttgtttaaaaatttgcaagcatcaaagtgtcaatcacaactggaagatgtaaacacttaatggaatggttgaattcctcaatgcttttttaaggtggtacttccctttcctttaaaatttttcaagttttcccaattttttaacccgtaaacctaattttcgcttttaaaaatttggtttttcaacatttcaaaattttccctaaccacccctaaaacttttccctttctgggggcgccatatttgaaaaataacc

SEQ ID NO: 34903 - DNA, 1249 bp, Macaca Mulatta
  misc_feature (1)...(1249): n = A,T,C or G
agattcagcacctgtcgccagactctcacctggatcccagnnnnnnnnnnnncagtcttctgagcgcactcatctcgacgctgaaagatgaggccggagcnnnnnnnnnnnnnnnnnnnnnnnnnnnnnnnnnnnnnnnnnnnnnnnnnnnnnnnnnnnnnnnnnnnnnnnnnnnnnnnnnnnnnnnnnnnnnnnnnnnnnnnnnnnnnnnnnnnnnnnnnnnnnnnnnnnnnnnnnnnnnnnnnnnnnnnnnnnnnnnnnnnnnnnnnnnnnnnnnnnnnnnnnnnnnnnnnnnnnnnnnnnnnnnnnnnnnagtgttcccagtgaagcggcggaaccggcacagcctagtggggcctcagcagctaggaggacggccagcccctgtccgacggagcaacacgatgccccccaaccttggcaatgcagggctgctgggccgaatgctggatgagaaagcccctccctcaccctcagnnnnnnnnnnnnnnnnnnnnnnnnnnnnnnnnnnnnnnnnnnnnnnnnnnnnnnnnnnnnnnnnnnnnnnnnnnnnnnnnnnnnnnnnnnnnnnnnnnnnnnnnnnnnnnnnnnnnnnnnnnnnnnnnnnnnnnnnnnnnnnnnnnnnnnnnnnnnnnnnnnnnnnnnnnnnnnnnnnnnnnnnnnnnnnnnnnnnnnnnnnnnnnnnnnnnnnnnnnnnnnnnnnnnnnnnnnnnnnnnnnnnnnnnnnnnnnnnnnnnnnnnnnnnnnnnnnnnnnnnnnnnnnnnnnnnnnnnnnnnnnnnnnnnnnnnnnnnnnnnnnnnnnnnnnnnnnnnnnnnnnnnnnnnnnnnnnnnnnnnnnnnnnnnnnnnnnnnnnnnnnnnnnnnnnnnnnnnnnnnnnnnnnnnnnnnnnnnnnnnnnnnnnnnnnnnnnnnnnnnnnnnnnnnnnnnnnnnnnnnnnnnnnnnnnnnnnnnnnnnnnnnnnnnnnnnnnnnnnnnnnnnnnnnnnnnnnnnnnnnnnnnnnnnnnnnnnnnnnnnnnnnnnnnnnnnnnnnnnnnnnnnnnnnnnnnnnnnnnnnnnnnnnnnnnnnnnnnnnnnnntgacagtgggaactggatcgagatcgcctatggcaccagctcagggggcgtgcgggtcatcgtgcagcacccagagactgtgggctcggggcctcagctcttccagaccttcactgtgcaccgcagccctgtcaccaagatcatgctgtcggagaagcacctcatctcag

SEQ ID NO: 34904 - DNA, 1768 bp, Macaca Mulatta
acacaggtgtcgtgaaaactaccccttaaagccaaaatgggaaaggaaaagactcactatcaacattgtcgtcattggacacgtagattcgggcgaagtccaccactactggccatctgatctacaaatgcggtggcatcgacaaaagaaccatgaaaaatttgaaaaggaggctgctgagatgggaaagggctccttcaagtcatgcctgggtcttggataaactgaaactgacgggacgtggtatcacattgatatctccttgtggaaatttgagaccagcaagtattatgtgactatcattgatgccccaggacacagagacttcatcaaaaacatgattacagggacatctcaggctgactgtgctgtcctgattgttgctgctggtgttggtgaatttgaagctggtatctccaagaatgggcagacccgagagcatgctcttctggcttacacactgggtgtgaaacaactaattgttggtgttaacaaaatggattccactgagccaccctacagccagaagagatacgaggaaattgttaaggaagtcagcacttacattaagaaaattggctacaaccccgacacagtagcatttgtgccaatttctggttggaatggtgacaacatgctggagccaagtgctaacatgccttggttcaagggatggaaggtcacccgtaaggatggcaatgccagtggaaccacgctgcttgaggctctggactgcatcctaccaccaactcgtccaactgacaagcccttgcgcctgcctctccaggatgtctacaaaattggtggtattggtactgttcctgttggccgagtggagactggtgttctcaaacccggtatggtggtcacctttgctccagtcaacgttacaactgaagtaaaatctgtcgaaatgcaccatgaagctttgagtgaagctcttcctggggacaatgtgggcttcaatgtcaagaatgtgtctgtcaaggatgttcgtcgtggcaacgttgctggtgacagcaaaaacgacccaccaatggaagcagctggcttcactgctcaggtgattatcctgaaccatccaggccaaataagtgctggctatgcccctgtgttggattgccacacagctcacattgcatgcaagtttgctgagctgaaggaaaagattgatcgccgttctggtaaaaaactggaagatggccctaaattcttgaagtctggtgatgctgccattgttgatatggttcctggcaagcctatgtgtgttgagagcttctcagactatccacctttgggtcgctttgctgttcgtgatatgaggcagacagttgcggtgggtgtcatcaaagcagtggacaagaaagctgctggagctggcaaggtcaccaagtctgcccagaaagctcagaaggctaaatgaataattatccctaatacctggcacccccactcttaatcaagtgggtgggaagaaacggtcctcagaacctgtttgatttcaattggcccattttaattttagtagtaaaaagactgggttaaaggataaacaaggcatccgtgaaaacccttccgaagggaaagggaaaatggtttttgtggaccccctttgggttttctcttttttgccttggggccatcttttgaatttacttaagtttttaaaaatcaacgcactccttctaagggggaaacaccccgtaccccaaataaacttggctcacaagaaacttggcgaaacccccttatagagcggtctcacaac

SEQ ID NO: 34905 - DNA, 598 bp, Macaca Mulatta
ggattaatcttgggtgcatttgtaatatgttggcttcctttttttgtaaaagaattagttgttaatgtttgtgaaaaatgtaaaatttctgaagaaatgtccaattttttgacatggcttggatatctcaattcgcttataaatccactgatttacaccatctttaatgaagacttcaagaaagcattccaaaaacttgtgcgatgtcgatgctagttttaaaaatgtttattattgaaggatgggggtttttgaggggaggagtaactagatgaatgctgaataataaagcacttaagcttttagagggaaatacctgaatactgctaaaatgataaggctataatttatattttaatagcaatgtgaatataaaatttattgatcaccattattctaggggactcaaaattagaaaataatttatgtaggttataaacaatattttgcctatgcaatgttcctaaaaagttgactggaaaaaaaaatacatatatacacaatattaatgacagtgattttccatgtttatgtctcacaataattatagaggagttttcaattaacaacatacctccctccataatttctatctagt

SEQ ID NO: 34906 - DNA, 556 bp, Macaca Mulatta
ggcatatgtcccctgactagtggatctcactcaccaacttcatcagcgaagccacagtggagaagctgcagcctgacaaccggcagagctgtgccttctccgatgtgctacctgatgctctccagtgaagcacaccaaggaccgcgtggggcagaatctaccccggctgtggcactgagtgcaagagctaccaagagggcctggcccggctaccagagatgaagcccagagctgggacagagatccgcttcgcagagctacccacgcagatgttcccagcgggtgccacgccagcagagataaccaagcacagcatggacctgagctatgccctgcagactgtgctcagtcactggaataataagctcctggttccttgggagtcctgggggcacgcctttcgtgctgtgtggcagggttcctctctagacaagtacacaggccctgccaacctgacatcaaactgctgtactatgatcacagtccctgtgccatccttttccaaggctggggctcacaccaggttcttgaatgagaatccctgctggttaagact

SEQ ID NO: 34907 - DNA, 1286 bp, Macaca Mulatta
  misc_feature (1)...(1286): n = A,T,C or G
cagatgctgtacttgaagaattacaaaaaacagtcatgtccaactcaacctctgttccagcttggcagtggctggcacatgtgtatcagtcccaaggaatgatgagagctgcagagatgtgttacagaaagagtctacaagtggcatctcagcagggcagttggagtgggaagctctcaagtctgttgagactagcactgcttgcattaaaagtctgtatggctaacatttccaatgatcactggccatctttggttcaagaggctacaactgaggccctaaaactttgcttttgtccactggctgttcttttacaagctttattacaattcaaatgtaaaatgggggcaagagagacacggcgtcttttggaaagagtggtatatcagcctgggtatcccaaatctattgcatcaactgcacgttggtacctgctgagacacttatatgccaaagatgactatgagcttattgacgtgctggtaaataatgccaaaactcatggagatacaagagcattggaactgaatcagagattgtcctcacaataacattggattattttagtaaggaagcaaagaaaaagctgtaagaatgaagcaatgaatcaagacttcttcccaaagcaacgttttttaaactatatttattccttttctaaaggaatctaaagaagttgaagtttttaagttaggaatgcaattttccgttaactccaaacctgattttaannnnnnnnnnnnnnnnnnnnnnnnnnnnnnnnnaaaaccagaatgaaaggaaaaccattattgccttggttgcttaacattatttgtaaaccattattttctgcatcttgcatggtgcacaatagaatatcttttactgtaatcccttacaataaaaccttaatagccattttctatgtaatatgcaaaagtagattagcacaatgcacaattttctttttgttaaaaatcaatttcaaagatttaaattcctccctatgaaattctgaaagttcggcaaaaccaactcatcataaaatcccaaataaatctggtaaccttatttatctaagggatttcttcctcaaattcttattgaaaaaaccctaatataaaagggtgaattaagcctagaacccctaaagggaaatgttttaaaaaaatcccaaaacccgggaaattatgtggaaatgccttttaaaaaacatttaatgggaaaaaaaaggcgcgaaaaattaaattgatccacggccaattccccttccctttttggaaggggaaaaaactttgaacttt

SEQ ID NO: 34908 - DNA, 789 bp, Macaca Mulatta
ggggatcagtctttttgatttcatagtgagttttctgaccagctcttgcggagattttgaacagaactcgtgtttcctctaatgaagaattctgtttagctgtgggtgtgccgggtggggtgtgtgtgatcaaaggacaaagacagtattttgacaaaatacgaagtggagatttacactacattgtacaaggaacaaaagtgtcacgggtaaaaactctaaaaggttaatttctgtcaaatgcagtagatgatgaaagaaaggttggtattatcaggaaatgttcttaagcttttcctttctcttacacctgccatccctccccaaattgggcatttaattcatctttaaactggtcgttcccttagtcgctaacttagtaagtgcttttcttataggaccccttcttactgagcaatatgcctccttgtattataaaatctttctgataatgcattagaaggtttttttgtagatgagtaaaagtgctttccatgttactttattcaaagctaataagtgcttttccttagttttctagtaactagggtgtaaaaatcatgtgttgcagctttatagttttttaaaatattttagataattcttaaactatgaaccttcttaacatcactgtcttgccagattactggacactgttaccttgaaccaatactgacccctcttttacctcgcccaagccagaaacacggctttcccggtagtccgctttggcctaaatgaagtttccttttggggtccggttgaaggttccgttaaaactgtgcctaa

SEQ ID NO: 34909 - DNA, 1859 bp, Macaca Mulatta
  misc_feature (1)...(1859): n = A,T,C or G
ggatgcctcagcgggatctttcccttcctgtgatggcgaaaacaagctttgaaatggaaagagatgatgacagggactccagggcttacgagtcccgatctcagnnnnnnnnnnnnnnnnnnnnnnnnnnnnnnnnnnnnnnnnnnnnnnnnnnnnnnnnnnnnnnnnnnnnnnnnnnnnnnnnnnnnnnnnnnnnnnnnnnnnnnnnnnnnnnnnnnnnnnnnnnnnnnnnnnnnnnnnnnnnnnnnnnnnnnnnnnnnnnnnnnnnnnnnnnnnnnnnnnnngttcctggacttcaaacacttaggagcatttctggtgtttgaggagttggtgacctttgaggatgtgtttgtggacttcagcccggaggaattaagctcccttagtgccgctcagagaaacctctacagggaggtaatgctggagaattaccggaacctggtctccnnnnnccagaggccgtggcctgcaagggagaccctgccggggacgacatccgggaacgcgatgaattcagccgaatcccaagaaccatatcgaaccctgctgctacccaagccagtgtccccgatgacagcaggccccagaggtgcagtgcgcccgggaagagcccgaagcagaggcatcctgacagccgccagcgggagagaggtggcggccccaagaagccgtggaaatgcggggactgcgggaaggccttcagctactgttcggcgttcatcctgcaccagcgaatccacaccggggagaagccgttcgcgtgccccgagtgcggcaaggccttcagccagagcgtgcacctgaccctgcaccagcgcacgcacacgggcgagaagccctacgcgtgccacgagtgtggcaaggccttcagccagggctcgtacctggcgtcccactggcgcacgcacacgggcnnnnnnnnnnnnnnnnnnnnnnnnnnnnnnnnnnnnnnnnnnnnnnnnnnnnnnnnnnnnnnnnnnnnnnnnnnnnnnnnnnnnnnnnnnnnnnnnnnnnnnnnnnnnnnnnnnnnnnnnnnnnnnnnnnnnnnnnnnnnnnnnnnnnnnnnnnnnnnnnnnnnnnnnnnnnngccctacgagtgcgccgcgtgcgccaagaccttccgcttctcctcggcgctcatccgccaccagcgcatccacacggaagagaagccctacagctgcggccagtgcgccaaggccttcacgcagatcgcgcacctgacccagcaccggcgcgtgcacacgggcgagaagccctacacgtgccaggactgcggctcgctcttcagccagagcgcctctctggccgagcaccggcgcatccacacgggcgagaagccctacgcgtgcggccagtgcgccaaggccttcacccaggtgtcgcacctgacgcagcaccagcgcacgcacaccggagagcggccctacccctgccacgactgcggcaagagcttcagcaaccgctcccacctcctccagcaccgcctcgtgcacaccggtgagcggccctacaggtgcctgcagtgcggggccgccttcagccacgtgtcctcgctcatcgagcaccagaagatccacaccggggagcggccctacaagtgcagcgagtgcggcaaggccttcagccagggctcctcgctcaccctgcaccagcgcacgcacacgggcgagcggccctacgcctgccccgagtgcggcaaggccttcagcaaccgctcctacctgatccagcaccacatcgtgcacaccggggagaagccctacgagtgcagcggctgcgggaaggccttcagcttctcctccgctctcatccgacaccagaggacgcatgcagacagtgcgggacgcctttgc

SEQ ID NO: 34910 - DNA, 947 bp, Macaca Mulatta
  misc_feature (1)...(947): n = A,T,C or G
gggaacagtatactacctgtaagagctgctgtcctgaaaagataactggcctctatttcttaataaattcttccaagaaataaagaacaatagtttcatcgtaatacattatgtttacctccatcataattgcttttttcatagttcttgttttcnnnnnnnnnnnnnnnnnnnncatataaagattgcatattttattatgacatttcctaataaaaccctttgannnnnnnnnnnnnnnnnnnnnnngaaaatgtttacattgatgattagtaatattatggcatgcgttttcaggtgatcagataaaatatattttgcgaaattacctgaacaaataaaaagtttttgatacaacttcaattaattgtaacacatgctaatcctgaagagatgtgtagaattttggaaggggtctaattcatacatgcttaaagtctaacctacattagatagtttgttgtcaaagtctgttctagtaaagtgaagattcaagtcagttgttcagttacttgaagcaaaacgaaatcatttcagtcaaatcactgcagagtcatgaaatactgaacagttgccttaagtctttgctttgcttgactcactgggatagactggagctttgggtgtgtctgtattagcatttcattagtacttcacatgctttttgatgtactcttgagattgcttttaaattttgtatttgaaacacaatacatttttgcactgtagtaataggagccctaactccttaaaacagtttagtgaattgttttaaaagaatcagtttcaagtgtagaaattttttgcaaaagatttgtttcccggtgcttttaatgaaaagccttaagtaacaaatggggccactcttctggccttttaacttgcccgcgtttttccactggcccctatatttttcccccgggggaccagtggaaacccaaccagaa

SEQ ID NO: 34911 - DNA, 2165 bp, Macaca Mulatta
  misc_feature (1)...(2165): n = A,T,C or G
ctagtctgggacttcccagtggagtgaggaacccagcaacacgctcctgacttcccttcccaaggactcgacctgagaannnnnnnnnnnnnnnnnnnnnnnnnnnnnnnnnnnnnnnnnnnnnnnnnnnnnnnnnnnnnnnnnnnnnnnnnnnnnnnnnnnnnnnnnnnnnnnnnnnnnnnnnnnnnnnnnnnnnnnnnnnnnnnnnnnnnnnnnnnnnnnnnnnnnnnnnnnnnnnnnnnnnnnnnnnnnaggggccttggtgtggacagcaagccagagctgcagcgcgtcctggagcaccgccggcggaaccagctcatcaagaagaagaaggaagagctggaagccaagcggctgcagtgcccctttgagcaggagctgttgagacggcagcagaggctgaaccaggtggnnnnnnnnnnnnnnnnnnnnnnnnnnnnnnnnnnnnnnnnnnnnnnnnnnnnnnnnnnnnnnnnnnnnnnnnnnnnnnnnnnnnnnnnnnnnnnnnnnnnnnnnnnnnnnnnnnnnnnnnnnnnnnnnnnnnnnnnnnnnnnnnnnnnnnnnnnnnnnnnnnnnnnnnnnnnnnnnnnnnnnnnnnnnnnnnnnnnnnnnnnnnnnnnnnnnnnnnnnnnnnnnnnnnnnnnnnnnnnnnnnnnnnnnnnnnnnnnnnnnnnnnnnnnnnnnnnnnnnnnnnnnnnnnnnnnnnnnnnnnnnnnnnnnnnnnnnnnnnnnnnnnnnnnnnnnnnnnnnnnnnnnnnnnnnnnnnnnnnnnnnnnnnnnnnnnnnnnnnnnnnnnnnnnnnnnnnnnnnnnnnnnnnnnnnnnnnnnnnnnnnnnnnnnnnnnnnnnnnnnnnnnnnnnnnnnnnnnnnnnnnnnnnnnnnnnnnnnnnnnnnnnnnnnnnnnnnnnnnnnnnnnnnnnnnnnnnnnnnnnnnnnnnnnnnnnnnnnnnnnnnnnnnnnnnnnnnnnnnnnnnnnnnnnnnnnnnnnnnnnnnnnnnnnnnnnnnnnnnnnnnnnnnnnnnnnnnnnnnnnnnnnnnnnnnnnnnnnnnnnnnnnnnnnnnnnnnnnnnnnnnnnnnnnnnnnnnnnnnnnnnnnnnnnnnnnnnnnnnnnnnnnnnnnnnnnnnnnnnnnnnnnnnnnnnnnnnnnnnnnnnnnnnnnnnnnnnnnnnnnnnnnnnnnnnnnnnnnnnnnnnnnnnnnnnnnnnnnnnnnnnnnnnnnnnnnnnnnnnnnnnnnnnnnnnnnnnnnnnnnnnnnnngcatccctccctgtagggggttcagagcccagcacagggggtttctctggcacatttgaggaggaagaggcagccctctggcttgacaagccttctgttctgcccgggccttcccaccaggaatctccaaggctccccagggccccgcttctccgcgcacccagctcctaggtctcagagaactcccccacctgcgattttacctgcagccagcagagcttagcttcaaggtcacccgcctccaaagcactgaggggaggacgggcagggcagaccgcaggtggccttgttgctgccatcctgaccaggtgggaggacactaacaaagacagctgttttgggtgttctcccctcacccatgctttcatcatcccctccgcacagcnnccccatccaggccttctaaccacacctagccagggctgccacattcctgcgcccagaagtctgcagcagtgcctcacaaacttgattgtgcatgcaaatcactggggatcttgttaaaatacagcttctaactcagtagatctggggtgggggctgagatcctgcatttctaacaagctcccaggtgaggcagaggctgctggtgtgaggaccatgctgtgagcagcagggcgtgagtgcccagggctggtatgtattagaaatnnnnnnnnnnnnnnnnnnnnnnnnnnnnnnnnnnnnnnnnnnnnnnnnnnnnnnnnnnnnnnnnnnnnnnnnnnnnnnnnnnnnnnnnnnnnnnnnnnnnnnnnnnnnnnnnnnnnnnnnnnnnnnnnnnnnnnnnnnnnnnnnnnnnnnnnnntgtgttggttatgtgagtgttgttttaatcagagatgtatgtgattgccaatctgcatttcgtgccagtgtgaccacactgttatgatgcaaatctagc

SEQ ID NO: 34912 - DNA, 575 bp, Macaca Mulatta
cccagatgtgttttctggtgcttctgggatcctacacagcactgttagttatgctccgaagccactcacgggagggccgcagcaaggccctgcacacctgtgcctctcacattgctgtggtgaccttaatctttgtgccctgcatctacatctatgcaaggccttttcggacattccccatggacaaggcagtgtctgtgctatacacaattgtcacccccatgctgaatcctgccatctataccctgagaaacaaggaagtgatcatggccatgaagaagctgtggaggaggaaaaaggaccttatcggtcccctggagcgcagacccttaccttagcacaggcagtgacctgagaatctgaaagatgcttcagggtattagcctgctggataggaccctcaaagtagacaaaactctatgcctattgcttctccattgttcttaacctcaattaggttctggtgacctgaactcttagccacaatagaagatgggatgagtgtcttagaactgcttctaagtgcctcctagataaaaagtaccaagttctatgcagaagtactgtttggctca

SEQ ID NO: 34913 - DNA, 791 bp, Macaca Mulatta
cgatggtgtattcaccacggacaggtatcatcctcaacaacgagctcctggacttatgcgagcgatgcccccggggttccggcaccaccccctcacctggtgagaacaaggcttcccacctggggtccacaagggctccccaccaggggagaggagagagggggctgggctggggctgcatgctgacccctggatgggtcactgcactcgctaagctgctgtttgctcagcagtgaatggagacagggtgagtggagctcccggagggtgctggcccccagttccaggcgagcggtccccgtcctccatggtgccctccatcctgatcagcaaagcccaggggtcgaagctagtgattggcggggctggcggggagctcatcatctctgccgtggcccaggtgagtctgggggggctctgggctccagtgtctcctctctgggcagcatactgtctgactctccctggagtggggatgtgagggctgaagtagggtagagggtaccccctttctccctgcatccctcatctctcccccaggccatcatgaacaagctgtggcttggctttgacctgagagcgggcattgcagcccccatcctgcatgtcaacagtaagggctgtgtggagtacgagcccagcttcagccaggtgaggctgaggtcccagctggatgcctagggcagagcccactccccagtccatgctggtcaaagccactgaagagaaattagtccccgacattcttaggccaggacacttcagctttggggggcataagagttggggaa

SEQ ID NO: 34914 - DNA, 599 bp, Macaca Mulatta
  misc_feature (1)...(599): n = A,T,C or G
tcttattatactgtcatatattttgattctgtactctgtacttagactgaactctgttgaagctgcagccaaggccctgagcacttgtagttcacatcttaccctcatccttttcttttacactattgttgtagtgatttcagtaactcatctgacagagatgagggctactttgattccagttctacttaatgtgttgcacaacatcatccccccttccctcaaccctatagtttatgcacttcagaccaaagaacttagggcagccttccaaaaggtgctctttgctcttacaaaagaaataagatcctagagaccttctccgtgacgtccatgaacctcagcttctcctaaactggatagtaaaatttcaaagaggataaacgagtaagtgcatacctttgggattccctttttatatttgtatgtaaataattgtgaaagcttcagaaaagatacaaaaaatcacagtagcctaaaatattgacaaaacctanatatataaatatatttgagaatatggaagaattttctgccaaaccaaattggatttaaagaacttaatgatttatctatctcataatataaaaatgaatatt

SEQ ID NO: 34915 - DNA, 444 bp, Macaca Mulatta
ttgttctggggtggtggcgatgcttgcagatggtgggtagggaagcgtcttgtgtggcacgtggtacccgtgggcgtcctatgagtgactgctgttcatgtgggtgaggtggtcacgcttgctcagagtctcttctgcagccccggtggacacctgttactcccacctggttattagcattgttctgatttgttctcagcattgcccaggtttgggagataaatgcggggacagagtctggttgggggctcccagagctcacatctgatagtctgtggtcagggcccggcaggcacaggcggtccctgggacgtgcccatctctggaagcctagaggtccccagctccaggcctgtcctctgtgactgcctgtgtgggcaagcagatggagcctgtctcctgcctccttttccgtggtttgccagggctttggcatcttgactg

SEQ ID NO: 34916 - DNA, 161 bp, Macaca Mulatta
cagttgtttgttgctggtttgattgtgctgctgttagatgagctgctacagaagggttacggcttggggtctgggatttccctctttattgccaccaacatctgtgagaccattgtctggaaggcctttagtcccactaccattaacactggcagaggtac

SEQ ID NO: 34917 - DNA, 467 bp, Macaca Mulatta
ggcctagtccaaaagagcaggggtggccaggagccaggctcagagagatgggcagaggtgacctgtaggggagacgcccacatcagcctcctctccctctcagcagggaaagggcctcagcgacctgcaggccccaaagcaagtgtcagaaagagggaacccaggaccaggaccaagcacggtccccaggcagagatggaactcctgtcctcaccaccaccacgtgtctcctaccagcctctgagcttctcatccacagagacgccctgacttcctttagcctcgtgccatcctaaagtcacaatagcaggagtgtctctctttatctctttttcacagattttcgaatacagacagaagtggctgcaaccatggaaacgttcatatttacaacagagtaccaggtagcaggtgagtggggcactggctttgtggacaaaatgtacaccaggctgagatatggacag

SEQ ID NO: 34918 - DNA, 514 bp, Macaca Mulatta
agcgggactacttgttgatatctgaggagggaagtgtcttacctgagagcctgtctggagaagactggggttcaaggcttgaagcctaagtgattgccccaggaccgtggatgatggctgcagagatcccgagagtgaccactccgctgagccccttggtccaggtgcctcaagtggaagatagacagaaggaggaggtcaccaccatgatcctggaggatgactcctgggtgcaggaagactgtgttgcaggaggatggccctgagtctgagccctttccccagagtgctggcaagggcagctcccaggaggaggtgaccaagggaccacagggtgcactcagccgcctccgagagctctgtcggcgctggctgaggccagaggtacacaccaaggagcagatgttaactgtgctaccaaaggaaattcaggcttggctgcaagagcatcggcctgaaagcagtgaggaggcagcggccctggtggaagacttgacccagacccttcgggaca

SEQ ID NO: 34919 - DNA, 500 bp, Macaca Mulatta
ctaaattagtatataaaaacaaaaatggtaaattatacctgtgaattgcagatattggggaacagttttaagggaaatttttggggaaacattttaggtttgtatttggtagtcttaatgtatctggcatttgggtgaactgtggacatactagagttgattatagacacattgattctgaataaggaactgctggccgagcctcctgggagtctagaaagaggaaatctgtttctagacctcagttatcttcccatttttggttgttgtgaagcagtagcatttttctcagtgcacatgcaatttgggttttagagaagatggccaccagctggcttcctagatattttaaacttttgttctttaatgtggtgtccatggctgagttcattagtacatgggcgtagtgaccacaaaatattttattaagaaactttttcaaaaataaatttgcactgttcatttttctggcctcgctgttctccatagagcaagggtaa

SEQ ID NO: 34920 - DNA, 2937 bp, Macaca Mulatta
  misc_feature (1)...(2937): n = A,T,C or G
gatggcaggagagctggttgacaaaaaggaccgtgatgcatcaccttccaaggaggaaaggaagcgatcacggactcctgacagagagcgggannnnnnnnnnnnnnnnnnnnnnnnnnnnnnnnnnnnnnnnnnnnnnnnnnnnnnnnnnnnnnnnnnnnnnnnnnnnnnnnnnnnnnnnnnnnnnnnnnnnnnnnnnnnnnnnnnnnnnnnnnnnnnnnnnnnnnnnnnnnnnnnnnnnnnnnnnnnnnnnnnnnnnnnnnnnnnnnnnnnnnnnnnnnnnnnnnnnnnnnnnnnnnnnnnnnnnnnnnnnnnnnnnnnnnnnnnnnnnnnnnnnnnnnnnnnnnnnnnnnnnnnnnnnnnnnnnnnnnnnnnnnnnnnnnnnnnnnnnnnnnnnnnnnnnnnnnnnnnnnnnnnnnnnnnnnnnnnnnnnnnnnnnnnnnnnnnnnnnnnnnnnnnnnnnnnnnnnnnnnnnnnnnnnnnnnnnnnnnnnnnnnnnnnnnnnnnnnnnnnnnnnnnnnnnnnnnnnnnnnnnnnnnnnnnnnnnnnnnnnnnnnnnnnnnnnnnnnnnnnnnnnnnnnnnnnnnnnnnnnnnnnnnnnnnnnnnnnnnnnnnnnnnnnnnnnnnnnnnnnnnnnnnnnnnnnnnnnnnnnnnnnnnnnnnnnnnnnnnnnnnnnnnnnnnnnnnnnnnnnnnnnnnnnnnnnnnnnnnnnnnnnnnnnnnnnnnnnnnnnnnnnnnnnnnnnnnnnnnnnnnnnnnnnnnnnnnnnnnnnnnnnnnnnnnnnnnnnnnnnnnnnnnnnnnnnnnnnnnnnnnnnnnnnnnnnnnnnnnnnnnnnnnnnnnnnnnnnnnnnnnnnnnnnnnnnnnnnnnnnnnnnnnnnnnnnnnnnnnnnnnnnnnnnnnnnnnnnnnnnnnnnnnnnnnnnnnnnnnnnnnnnnnnnnnnnnnnnnnnnnnnnnnnnnnnnnnnnnnnnnnnnnnnnnnnnnnnnnnnnnnnnnnnnnnnnnnnnnnnnnnnnnnnnnnnnnnnnnnnnnnnnnnnnnnnnnnnnnnnnnnnnnnnnnnnnnnnnnnnnnnnnnnnnnnnnnnnnnnnnnnnnnnnnnnnnnnnnnnnnnnnnnnnnnnnnnnnnnnnnnnnnnnnnnnnnnnnnnnnnnnnnnnnnnnnnnnnnnnnnnnnnnnnnnnnnnnnnnnnnnnnnnnnnnnnnnnnnnnnnnnnnnnnnnnnnnnnnnnnnnnnnnnnnnnnnnnnnnnnnnnnnnnnnnnnnnnnnnnnnnnnnnnnnnnnnnnnnnnnnnnnnnnnnnnnnnnnnnnnnnnnnnnnnnnnnnnnnnnnnnnnnnnnnnnnnnnnnnnnnnnnnnnnnnnnnnnnnnnnnnnnnnnnnnnnnnnnnnnnnnnnnnnnnnnnnnnnnnnnnnnnnnnnnnnnnnnnnnnnnnnnnnnnnnnnnnnnnnnnnnnnnnnnnnnnnnnnnnnnnnnnnnnnnnnnnnnnnnnnnnnnnnnnnnnnnnnnnnnnnnnnnnnnnnnnnnnnnnnnnnnnnnnnnnnnnnnnnnnnnnnnnnnnnnnnnnnnnnnnnnnnnnnnnnnnnnnnnnnnnnnnnnnnnnnnnnnnnnnnnnnnnnnnnnnnnnnnnnnnnnnnnnnnnnnnnnnnnnnnnnnnnnnnnnnnnnnnnnnnnnnnnnnnnnnnnnnnnnnnnnnnnnnnnnnnnnnnnnnnnnnnnnnnnnnnnnnnnnnnnnnnnnnnnnnnnnnnnnnnnnnnnnnnnnnnnnnnnnnnnnnnnnnnnnnnnnnnnnnnnnnnnnnnnnnnnnnnnnnnnnnnnnnnnnnnnnnnnnnnnnnnnnnnnnnnnnnnnnnnnnnnnnnnnnnnnnnnnnnnnnnnnnnnnnnnnnnnnnnnnnnnnnnnnnnnnnnnnnnnnnnnnnnnnnnnnnnnnnnnnnnnnnnnnnnnnnnnnnnnnnnnnnnnnnnnnnnnnnnnnnnnnnnnnnnnnnnnnnnnnnnnnnnnnnnnnnnnnnnnnnnnnnnnnnnnnnnnnnnnnnnnnnnnnnnnnnnnnnnnnnnnnnnnnnnnnnnnnnnnnnnnnnnnnnnnnnnnnnnnnnnnnnnnnnnnnnnnnnnnnnnnnnnnnnnnnnnnnnnnnnnnnnnnnnnnnnnnnnnnnnnnnnnnnnnnnnnnnnnnnnnnnnnnnnnnnnnnnnnnnnnnnnnnnnnnnnnnnnnnnnnnnnnnnnnnnnnnnnnnnnnnngattacatccaccgcattggccgcacgggacgagcaggcaagagtggggtggccatcaccttcctcacaaaagaggactctgctgtgttctacgagctgaagcaagccatcctggaaagcccagtgtcttcctgtccccccgaactagccaaccacccagatgcccagcataagccaggcaccatcctcaccaagaagcgccgggaagagaccatctttgcctgacacagcactcttcctgtgggctgagggcatctccgaagctgcctgatgcctgttcttcagaaacctcacatccctctttccaggtcctcactcctgggttacgggggcttaggaaaacagtcagactccctagcccagaccctcaggtcgggaggcctgcatgtggggctgcaaaaggagaggacgatgctgtcagaggcagggagaggaaattaccacagctttttggctcagctctgcccttctttgctttgggattgcactgggccatcagctcatgccaggctatgggggcagccagttggcattgctccccagactgaacagaaacctggctgcctgatgggacctcctttggcacagacctgactgtgtaactgtataaactgcagcagcatcgttgccctagatgccccaggggacctggcaccatgaggattacagacagtggaatcttactgtcatctggacagct

SEQ ID NO: 34921 - DNA, 590 bp, Macaca Mulatta
  misc_feature (1)...(590): n = A,T,C or G
ggaccgcatggtgctgctggtcatgggcaacgtcatcaactggtnnnggctgcctatgggctcatcatgcgccccaacgatttcgcctcctacttgttggccattggtatctgcaacctgctcctttacttcgccttctacatcatcatgaannnnnnnnnnnnnnnnnnnnnnnnnnnnnnnnnnnnnnnnnnnnnnnnnnnnnnnnnnnnnnnnnnnnnnnnnnnnnnnnnnnnnnnnnnnnnnnnnnnnnnnnnnnnnnnnnnnnnnnnnnnnnnnnnnnnnnnnnnnnnnnnnnnnnnnnnnnnnnnnnnnnnnnnnnnnnnnnnnnnnnnnnnnnnnnnnnnnnnnnnnnnnnnnnnnnnnnnnnnnnnnnggtgttgctgacactggatgacgacctggacactgtgcagcgggacaagatctatgtcttctagcaggagctaggcccttcgcttcacctcagggggccctgaggagctttatgtcatagtccgggcactctgtcgtgctgtggtgatgagtcccagcaccgctgcccagcacttaaaggcagcaggacagccaggtctagcctaggcttggcc

SEQ ID NO: 34922 - DNA, 1051 bp, Macaca Mulatta
  misc_feature (1)...(1051): n = A,T,C or G
ggcagatttttatattcttgataaatatccattggctgtaagacctttctatacgatgcctgacccaagaaatcctaaacagtccaactcttacgatatgttcatgagaggagaagaaatattgtcaggagctcaaagaatacatgatcctcagctgctaacagagagagctttacatcatggaattgatttggagaaaatcaaggcttacattgattccttccgctttggagctcctcctcatgctggtggaggcattgggttggaaagagtgactatgctgtttctgggattgcataatgttcgtcagacctccatgttccctcgtgatcccaaacgactcactccttaaattcacatcttgcctctgaactccagtgtggatgacagagcgagaccctgcctnnnnnnnnnnnnnnnnnnnnngccacacttactctttccagtaacctgctagtgcacaggctgtactttaggtacttaaaatatgcactagaataaatttgcaaggccctaaagtatcactgttatttttggagtaatgcagtatagatatgtttaaaagagattttttataacttcagacgtgcgtcagtaggaaatacttgagaaattaatatggttatgtggaaaaattcatattctgttactacaggtaaatgtttacgaagttttaaacagttaagattgtaacaaccttttccttcttttcctatattaccaagggcccccagtgttaatggtcttaaatttttcagtatttgaacttattttttttaaattctgacattgggaataagaatattcagggtagcatcttgaaattttaatgattgtataatttggcatatcatggaaaatttaaccagaaaagtatccgtttttttaaaaagttatgttctaaaaaattatggtaaaagcaaggctaaaaatactgggttaaaaaaagtattccggtggtaatccttggtattaaaattggtttaaattcttaaaccttgaaatttcaataaaaatttttaaaagccttntcaatatatagtgataaaat

SEQ ID NO: 34923 - DNA, 503 bp, Macaca Mulatta
  misc_feature (1)...(503): n = A,T,C or G
gaaaactcagatgagcctctgacttgactttatcaagaggaattttcaattcaaataatctgacaacaaaagcactaacccagtgttgggcatgaacccatttagtgccaaacctttatacacagctcttccacctcaaagcgcatttccccctgctactttcatgccaccagtccagaccagtattcctgggctacgaccatacccaggactggatcagatgagcttcctaccacatatggcctacacctacccaactggagcagctacttttgctgatatgcagcaaaggagaaagtaccagcggaaacaaggatttcaggnnnnnnnnnnnnnnnnnnnnnnnnnnnnnnnnnnnnnnnnnnnnnnnnnnnnnnnnnnnnnnnnnnnnnnnnnnnnnnnnnnnnnnnnnnnnnnnnagagtggcatgtatgcatgtgacttatgggacaagacattcaagaaaagcagtcccttctgcgacataaatacgaacacacagg

SEQ ID NO: 34924 - DNA, 498 bp, Macaca Mulatta
ccttgaagttctttgttaccatattgcacaactcagatggtttgtttttaatggtctgattgtcttgtttcatttaacctatacaaattgctaacatcctttaagtagtttttctcaaagaattgaatgtttctttgtcaggtcatacagcatatttgacaataatcgccaggatcccacagggctgacagctgctcttcaggcaactgacctggctggagttcttcatatgctctactgtgtcctcttccatggcaccatcttggaccctagcactgccagtcccaaggagaattacacccaaaataccacccaagtagccattcagagtttacgtttcttcaacagctttgcagctcttcatctgcctgcttttcaggtaccaagtattggtttatatcaatgttaaccaatcgagagttaatattttcgtgtagataggatgtcaggttcttctcctgaattggggtataaggaataaactacaataaatggaat

SEQ ID NO: 34925 - DNA, 1370 bp, Macaca Mulatta
  misc_feature (1)...(1370): n = A,T,C or G
gggggacgggcatttccgggcttttcggctctctgatcagcaccatggcggttggcaagaacaagcgccttacgaaaggcggcaaaaagggagccaagaagaaagtggttgatccattttctaagaaagattggtatgatgtgaaagcacctgctatgttcaatataagaaatattggaaagacgctcgtcaccaggacccaaggaaccaaaattgcatctgatggtctcaagggtcgtgtgtttgaagtgagtcttgctgatttgcagaatgatgaagttgcatttagaaaattcaagctgattactgaagatgttcagggcaaaaactgcctgactaacttccatggcatggatcttacccgtgacaaaatgtgttccatggtcaaaaagtggcagacaatgattgaagctcatgttgatgtcaagactaccgatggttacttgcttcgtctgttctgtgttggttttactaaaaaacgcaacaatcagatacggaagacctcttatgctcagcaccaacaggtccgccaaatccggaagaagatgatggaaatcatgacccgagaggtgcagacaaatgacttgaaagaagtggtcaataaattgattccagacagcattggaaaagacatagaaaaggcttgccaatctatttatcctctccatgatgtcttcgttagaaaagtaaaaatgctgaaagaagcccaagttttgaattggggaaagctcatggagcttcatgggtgaaggcagtagttctggaaaagccactggggacgagacaggtgctaaagttgaacgagctgatggatatgaaccaccagtccaagaatctgtttaaagttcagacttcaattagtgtcaaataaaaagtgctatttgtgaaananaanannnnnnnnnnnnnnnnnnnnnnnnnntcggcccnnnnnnnnnnnnnnnnnnnnnnnnnnaaaaccttgtttggccgccctgggcccttcgaaaacctttctgaacaattccttttgggccgccgcggccccattttggtaaagtgaaaccgtgggccaaaagctgttttcccaaaagaaaaacccggggccaaaaaacaaggggtttgggattcccccccnnnnnnnnnnnnnnnnnnnnnnnnnnnnnnncaaaannnnnnnnnnnnnnnnnnnnnnaaaagggaggttttctgaaggggctttttgggggggttccttcccaccggggggtatcccaaggggggggcccccaaaataacaaaattatnnnnnnnnnnnnnnnnnntgcccttannnnnnnnnnnnnnnnnnnntggggaagatctctttaagaaaatcttttttgccccccaaggtggagaaaacccctccc

SEQ ID NO: 34926 - DNA, 157 bp, Macaca Mulatta
tccaagcacagggcccgggcagccccggatccccctcccctcttcgatgacacaagcggtggttattccagccagcccgggggatatccagccacgggagcagatgtggccttcagtgtcaaccacttgctggagagccaatggccaatgtggctat

SEQ ID NO: 34927 - DNA, 267 bp, Macaca Mulatta
cctgctcgcgcgctcgccctgtggggacccggggcccatggacatacacacccagtcctgctgtcccgcgtgccagctctccagccttaaccaaagggacacaattcacgcctgggcgcctccgccggctccgggagcccaaggtcgcggctggaccagcgctgaccatcagaggaagagagcaggaggctccccagtcgccccagcaggcccaggcgcataggtgcccagagatccctggcttctgatcgcccggacgactaagag

SEQ ID NO: 34928 - DNA, 292 bp, Macaca Mulatta
  misc_feature (1)...(292): n = A,T,C or G
ggcagcttcactcccgagggtgccgcgagcccacgcagcgaggacccggtacccctggcgcagcgaggtgggatgcggtgcggacagcagcgctaagtgnnnnnnnnnnnnnnnnnnnnnnnnnnnnnnnnnnnnnnnnnnnnnnnnnnnnnnnnnnnnnnnnnnnnnnnnnaggggatgagcccaggacgcgcgagacgcctgcctcaagctacctcccggagagggacgccgagcagggctcatcgcaggaccgcgcggacccctggccccggtggcacccggctgcgga

SEQ ID NO: 34929 - DNA, 251 bp, Macaca Mulatta
caggctgaagtattgtattttgcaaaaagtgctgaaataacaggagttcattcagagaccatttctgtgccacaagaaataaaagcactgcagccgtggaaggagatcgaaactcgacatcatggattggctgatgttagaagtcagatactatttgaaaataaaaaagaatatgacaagcttggagatcagctcctcctccttcaaccaggagacgaaattgccgttatcccccccattagtggaggata

SEQ ID NO: 34930 - DNA, 232 bp, Macaca Mulatta
ggaaagcgtggcggctgctgcgagagcctgtcccttcaccgcccccagggagctggagcgacaacaatgacgtcgtttccgtttccaccacctcttccttttcccgtcctcgcggacgccgtgccgggccggtattagtctccagccctggttgtggaaagcgacagaagtcatggcgatgtttgaacagatgagagctaacgtgggcaagttgctcaagggtatcgacagg

SEQ ID NO: 34931 - DNA, 640 bp, Macaca Mulatta
actgagttttacttgaattaataatgaaaacatctggtttaaagagcacacaagaggaaaacagcccaaagccctgttgtggacatcagtcagtcctttctcctctttaggccaactgcattgactccacagcctcagccgaggctgtgtttgcctccgaagtgaaaaagatgcagcaggagaatatgaagccgcaggagcagttgacccttgagccatatgaaagagaccatgccgtggtcgtgggagtgtacaggtgagcaggggcccagcaatacaccaagacagacatctctgtcccttgcaccccgagtgccatgatcctggggatccttcttcatcacgtatcttcctctcacaggccaccccccaaggtgaagaactgaagttcagcgctgtctggattgctagagatgtgtgttgatactgttgcacgtgtgtttttctattaaaagactcatccgtctcccatgtctgctgctcattcctccccttgacctgctgacacagggcgcatgcacccttggttaactttgcggggtcgtggggtaaattctcacccggtcacagagcccatgctccgtttgtagctgcctctcgcgcagtcgcagcccggatatcggttcttgggtgtgattgg

SEQ ID NO: 34932 - DNA, 689 bp, Macaca Mulatta
  misc_feature (1)...(689): n = A,T,C or G
aaaaattccctgtaaatctgaaatatatatatgtaccacttatatatttttggaaaatggagctatggtgtaaaagctttcaagtggatcaacccagttgttactctcttaacatctgcatttgagagatcagctaatagttctctcaacaaaaatggaagagcagatgctagaatcccccctagacagaggaaaccattttattcagtgaattacacatcctcttgttcttaaaaagcaagtgtatttggtgttggaggacaaaatcccctaccattttcacgctgtgctactaagagatctcaaatattcgtctttgtccggtcctttccatagtacaccttagcgctgagactgagccagcttgggggtcaggtaggtagaccctgttagggacagagcctagtgggaaatccaagagaaatgatcctatccaaagctgattcacaaagccacgctcacctgacagccgagggacacgagcatcactctgctggacggaccattaggggccttgccaaggtctaccttagagcaaacccagtacctcagacagcaaagtcggggctttgaacactaccatgtcggtagcccgttttctaggcattgtgaatangtaggtagctagtcacacttttcagaccatttcaactgtctatgcacaaaatttcagtggggctggatggagg

SEQ ID NO: 34933 - DNA, 413 bp, Macaca Mulatta
  misc_feature (1)...(413): n = A,T,C or G
ctccccaaccccctcatccaaagacaccttcctctccnnngctgtcaagcccacagggcacgagtgccagccagggccctgcgcaaagggatgcctagtaaaccttaaccaacttggttttttgcttcacccagcaattaaacgtcccaagctgaggtagcatcagcccatcacagttcatcttctaacccaagagtcagagatgaggctggtcatgttccctttggtttaaataactcccttgactaaaacagactcctctagtacttggagatcttggacatatacctaatccagtgggaccttggcttccttaactacaagtgagaaggggaggtccacacaggagcctcgggtctgatcaagggagaggccatgcagataacgctgggcggctccctaagaaggtgaag

SEQ ID NO: 34934 - DNA, 334 bp, Macaca Mulatta
ggggcttcggaggagaggtcagggctgaggctggggatggaactgcaggagagagagcagctgcggggcccacattctgagcctccgtccactccagttttagcaacttttgccttttgcactgagtgctaaacaaattctagctctgtgatttttttcccattcccagatttactgtaagttctccttaaaaagtatctaagctgttatagtagctttcccttcatttggttctattgtgtgttctctatgtttggaataatcacatcctaatacctagatattttctcttcactgcattttgtaaataaaagagatgtgtatgtctccttga

SEQ ID NO: 34935 - DNA, 733 bp, Macaca Mulatta
  misc_feature (1)...(733): n = A,T,C or G
tgtatccctcatccaaccccagaacactttctgtaatctgagtttttttaatggcaagtggcttatatttagcacctgttctcatgttaaacagctctgaatgttagatattcctccttatcctggnnnnnnnnnnnnnnnnnnngagtcatgcagtataaattggccatcagtacccttctaaaacctgagatccgtcaggaccctcttctaacaccaggttaggcatgcctgttatttccagtacttgtcaattgacatgtttcaagacactgtgttagacagtagggatgcaaagatgaatgagataaggcctcaggcctcatggaaggtgagacagtaaagacataactcccataaaaatgtgaggagactcagttcagcaactgtttttcgagcacttacttggaccaagctctgtggtcttggcgttttacatagactgtctctaattctcacaactctgcaaaatattattcccattttataaaactacaaactgaggctcagacaggttgtgacctcttgttgcttgaggcacagaattataaagtaacatctggaatttgaaatcagacctgttacgtgctaatgctgcatttttctacaacatcatgcttctagaaggttgaagctaggtaggctttcagccagcagacatgatggggagagccttctaataagagggaagagactgcttggaagcatgaaatggggtgtaagaaagataagt

SEQ ID NO: 34936 - DNA, 690 bp, Macaca Mulatta
aggccaagaggatcaatcacattagctcctggaaggcagccaccatcagggagcacaaagccacagtgacactggccgccgtcatgggggccttcatcatctgctggtttccctacttcaccgcgtttgtgtaccgtgggctgagaggggatgatgccatcaatgaggtgttagaagccatcgttctgtggctgggctatgccaactcagccctgaaccccatcctgtatgctgcgctcaacagagacttccgtaccgggtaccaacagctcttctgctgcaggcttgccaaccgcaactcccacaaaacttctgtgaggtccaacgcctctcagctgtccaggacccaaagccgagaacccaggcaacaggaagacaaacccctgaagctccaggtgtggagtgggacagaagtcacagccccccagggagccacagacaggtaatagccctagccgttggtgcacaggatgggggcaccgggaggggaggctactgatgggaatgatttaaggaactgctgtttagatggtgctggtttctgttctaggcactcttcacgagcactttgtaaacaccctcttgcttaatcctcccaacggcccccaaagggagaacttattagctccattttaaaaggagcatattaaaattctcagaggacttggcaaggaccgcacagctggggcc

SEQ ID NO: 34937 - DNA, 154 bp, Macaca Mulatta
ttgaaagaagaagaaggtataatattaattaccgaatcaaggagcttggcactcttattccaaagtctaatgatctgatatgcgctggaacaaaggaaccattctaaaagcatcagtggagtacatcaagtggcaacaaaaagaacaacagaga

SEQ ID NO: 34938 - DNA, 715 bp, Macaca Mulatta
gacgccgggaccgggcccggcggtacgccgccaccatgagtgatcagcagctggactgtgccttggacctaatgaggcgcctgcctccccagcaaatcgagaaaaacctcagcgacctgatcgacctggtccccagtctatgtgaggatctcctgtcttctgttgaccagccactgaaaattgccagagacaaggtggtgggaaaggattaccttttgtgtgactacaacagagatggggactcctataggtcaccatggagtaacaagtatgaccctcccttggaggatggggccatgccgtcggctcggctgagaaagctggaggtggaagccaacaatgcctttgaccagtatcgagacctgtattttgaaggcggcgtctcatctgtctacctctgggatctggatcatggctttgctggagtgatcctcataaagaaggctggagatggatcaaagaagatcaaaggctgctgggattccatccacgtggtagaagtgcaggagaaatccagcggccgcactgcccattacaagttgacctccacggtgatgctgtggctgcagaccaacaaatccggctctggcaccatgaacctcggaggcagccttaccagacagatggagaaagatgaaactgtgggtgactgctccccaaacattgccaacatcgggcgcctggttaaggacatggaacataaatccgaagtacg

SEQ ID NO: 34939 - DNA, 135 bp, Macaca Mulatta
gtgtctcccacaggcgctggccctacggctcggacggctgccaggctcacggcttccagggctttgtgacagcgttggccagcatctgcagcagtgcagctatcgcctgggggcgctatcaccactactgcaccc

SEQ ID NO: 34940 - DNA, 137 bp, Macaca Mulatta
gagctggtgagtgaagagccctttgtggtgaagctacggtttgaacccgcaggaaggcccgaatctcctggagactattacttgatggttaaagagaacctatgtgtagtgtgtggcaagagagactcctacattcg

SEQ ID NO: 34941 - DNA, 972 bp, Macaca Mulatta
  misc_feature (1)...(972): n = A,T,C or G
gcctgctgcgcccgcgagtcccgagcgctcggtcgcccgccccgaccggggcccagccgcctccacggcccgcgctcgtactggagcgaagagcggcctctggaaggaggggaagggacgtgggggcggccacggcagnnnnnnnnnnnnnnnnnnnnnnnnnnnnnnnnnnnnnnnnnnnnnnnnnnnnnnnnnnnnnnnnnnnnnnnnnnnnnnnnnnnnnnnnnnnnnnnnnnnnnnnnnnnnnnnnnnnnnnnnnnnnnnnnnnnnnnnnnnnnnnnnnnnnnnnnnnnnnnnnnnnnnnnnnnnnnnnnnnnnnnnnnnnnnnnnnnnnnnnnnnnnnnnnnnnnnnnnnnnnnnnnnnnnnnnnnnnnnnnnnnnnnnnnnnnnnnnnnnnnnnnnnnnnnnnnnnnnnnnnnnnnnnnnnnnnnnnnnnnnnnnnnnnnnnnnnnnnnnnnnnnnnnnnnnnnnnnnnnnnnnnnnnnnnnnnnnnnnnnnnnnnnnnnnnnnnnnnnnnnnnnnnnnnnnnnnnnnnnnnnnnnnnnnnnnnnnnnnnnnnnnnnnnnnnnnnnnnnnnnnnnnnnnnnnnnnnnnnnnnnnnnnnnnnnnnnnnnnnnnnnnnnnnnnnnnnnnnnnnnnnnnnnnnnnnnnnnnnnnnnnnnnnnnnnnnnnnnnnnnnnnnnnnnnnnnnnnnnnnnnnnnnnnnnnnnnnnnnnnnnnngctagaaagtttgggtcagagtgaactggcttcaagacttaccttgaattgtcaaaattcctatgtggaacctcataaaattcgggacatccctgtaaccattatggatgngtgtttgatcagagtgcactttcaactgaagctaaagaagaaatgtacaagctgtatcctaatgcccgaagagctcacctgaaaacaggaggcaatttcccatacctgtgcagaagtgcagaggtgaatctttatgtaca

SEQ ID NO: 34942 - DNA, 407 bp, Macaca Mulatta
agggatagttgattcttggggtgttttgaaattaagttggagttaatttgcttaagcatatttatgttgtgagaaaccttcatatgaagtttatcatgccctttttcaagcagatttatgagcagatttctgtcacataagtcgtcttctacttgagcatcctaatatttaaatacatcaggggagagctccactggataagcattttatttcccgcatggcataatgtttttgcactaaaggctcaaagtgtgagaacctgttctggatttgtttgaaattgtttcaccaataaagatcataaataaatgcttctttgaagaaaatatatttggatggccttttaaaaataacaggatatttaataagagtcctagatagccagcagagactttaagaataattgc

SEQ ID NO: 34943 - DNA, 371 bp, Macaca Mulatta
  misc_feature (1)...(371): n = A,T,C or G
cagggtggtcccggtactggatatcagggaatgcagccaatggccagcatgacctccacattaggcccgtggagttagaggatgaagcatcatatgaatgtcaggctacacaagcaggcctccgctcgagaccagtccaactgcacgtgctggnnnnnnnnnnnnnnnnnnnnnnnnnnnnnnnnnnnnnnnnnnnnnnnnnnnnnnnnnnnnnnnnnnnnnnnnnnnnnnnnnnnnnnnnnnnnnnnnnnnnnnnnnnnnnnnnnnnnnnnnnnnnnnnnnnnnnnnnnnnnnnnnnnnnnnnnnnnnnnagaccctgctgaaggaagggacccctggatcagtggagagcaccttaaccctgacccctt

SEQ ID NO: 34944 - DNA, 278 bp, Macaca Mulatta
tggagcctcagaaacgccacccggctggttggcatggcccagggcaggagcagaggcaggagaccaagatgacaggtggaggcctggcttactgcaagtgaagagacctcccgctggggccgggcaggcctggctcagctgccacaggcatatggtggagaggggggtaccctgcccaccttggggtggtggcaccagagctcttgtctactcaaatgctggtgtgcgggctcggacccctcactggggagagggccagtgttggaaaattctgattc

SEQ ID NO: 34945 - DNA, 554 bp, Macaca Mulatta
  misc_feature (1)...(554): n = A,T,C or G
cctagcagctgagcctgctgagaacagaaaaggtacagcggtgccggtcgaatgccccacatgtctcaaaaagttcctcagcaaatattatctaaaagtccacaacaggncaggaaacatactggggagaaaccctttgagtgtcccaagtgtgggaagtgttactttcggaaggagaacctcctggagcatgaagcccggaattgcatgaaccgctcggaacaggtnnnnnnnnnnnnnnnnnnnnnnnnnnnnnnnnnnnnnnnnnnnnnnnnnnnnnnnnnnnnnnnnnnnnnnnnnnnnnnnnnnnnnnnnnnnnnnnnnnnnnnnnnnnnnnnnnnnnnnnnnnnnnnnnnnnnnnnnnnnnnnnnnnnnnnnnnnnnnnnnnnnnnnnnnnnnnnnnnntgccccacctgtgccaagtgcttcctgtctcggacagagctgcagctgcatgaagctttcaagcaccgtggtgaaaagctgtttgtgtgtgaggagtgtgggcaccgggcctcgagccggaatggcctgcagatgcacatcaaggccaa

SEQ ID NO: 34946 - DNA, 665 bp, Macaca Mulatta
  misc_feature (1)...(665): n = A,T,C or G
atctcgatatcagctgcctgaactctctggttgcatctgtcatctgtgatgtactgtccagattgggcagttatgacataagtgagaaggcaagcatgtgtgagtgaagattagagggtcacatataactggctgttttctgttcttgtttatccagcgtaggaagaaggaaaagaaaatctttgctcctctgccccattcactatttaccaattgggaattaaataattaatttgaacagttacgaaattaatatttgctgtctgtgtgtataagtacatcctnnnnnnnnnnnnnnnnnnnnnnnnnnnnnnnnnnnaaagttgctgtctagtgcattcaaaggtcacttttggtttttcacagatctttttaatgttcttttccatgttgtattgcatttttgggggaagcaaattgactttaaagaaaaaagttgtggcaaaagatgctaagatgcgaaaatttcaccacactgagtcaaaaaggtgaaaaattatccatttcctatgcgttttactcctcagagaatgaaaaaaaactgcatcccatcacccaaagttctgtgcaatagaaatttctacagatacaggtataggggctcaaggaggtatgtcagtcagtagtcaaaactatgaaatgatactggtttctccacaggaaaa

SEQ ID NO: 34947 - DNA, 162 bp, Macaca Mulatta
ggaggccctcatccacctgggcgccaagttttcgccctgcatgcgccaggacccgcaggtgcacagcttccttcgctcagctcgtgagcgcgagaagcactaaacctgctgcgtgcgcaacgacaggtcgggctgcgtacaaacctcggaggaggagtgctc

SEQ ID NO: 34948 - DNA, 127 bp, Macaca Mulatta
aacacataagaaaacaagagaccgagttacgtccagcatctcctgggatgagtacacacctctgggatgggaaccttcagcctaccccttccccaggctatgggctggatctcctgggcctccggag

SEQ ID NO: 34949 - DNA, 564 bp, Macaca Mulatta
tcaggggagccgccaggctctcggtgcccctcggggtgggtacggggcaaggtgccttcgtgggggacatgccggagctggtccggggatcttggaccaggcagaggcagggctgagggagcctagaggacatgcaggcccactgtgggctgtggacactgccgaaggccctcttgaccctgtggataaaggacagcaccccctcccctgctcctctgtctcctctgcccctgcacccctcaggcttctagcccccgtctgaccccaggggctgtcttgcaggtgaagtagccctagaagagcaggacgccctgtacctgcagaaaagggaagcagcctctgtgcctcatccgtggatgccagagagcagaaaggacccaccctggactctgctgtacgcaggaaaatgcaccagcccctgcctccagctcccctctgtccgccacagaacccagtcttctagaccaggggaatgggcacccatcactccgcaggtgaagcggagcacccctgccctggccctaacccctgtgcctccttcctgtgcttcccccagagccagct

SEQ ID NO: 34950 - DNA, 748 bp, Macaca Mulatta
ctccctgataggaaggtgaaatagctaggagaatcaggcagctcctggtatcggctcctgggaaaggtgctaggttacagatttgcgaaatgtggtatctttgttctcccttgaagataaaaacaaagagactagttttctccccgactacctcaagagtatcaggcaacagagccacccttacccaggggacaaataatcttcttaatttatcttgatgaatacgtttctttttttattatttcctccctgcctggggcagctgctatttgaaatgtcacagtggagctttaggaacattcctttaattgatgcaggcagaggactgctttcttcaccccatgttccactagggcaggaagagaaagtgcttgttacatccctcagtctcttcctccgtccctgcaggtctccacatctgggctgtttagagtctcctgccaacctcaagacactagactaagaggagacaggcataagaaacacagcctaagggatttaggtcacttacagagaaaacacttctggcttgaagagcattctatgaaaactcttaaaaagcaaatgagcagaaatcaatttcttactattatagaaaaggaactgtaggcctttattcttcccactttcctgacaaatacacactccttcgcagaaggaaaatgagtcttccgggctgatttcctatcttctgtacagtccatacaggaagcctgagctcaggtgccaccatcgtcttgctgcaggg

SEQ ID NO: 34951 - DNA, 975 bp, Macaca Mulatta
  misc_feature (1)...(975): n = A,T,C or G
aggtcaacctggactcctacacgcgggagcacaccaaggacaacctgcagagcgtcacgcggggctgcttcgacctggcacagaagcgcatcttcgggctcatggaaaaggactcgtaccctcgctttctccgttctgacctctacctggaccttattaaccagaagaagatgagtcccccgctttaggggccggccactggagtcgagctcagcgttcacaccaggcgggctgggtctcctgcccacctgcctccctccccactgtgacggagggggcaagcaagcccccagaggctgtgtctctggacagatggatagacatacggaagtgaggcctggaccaagagaggcccaggctactggaggagtagaaggatgggccccgtggggtccccactgccccggtacgagggggcccaaggaccctggcaggtcggggccccggcnnnnnnnnnnnnnnnnnnnnnnnnnnnnnnnnnnnnnnnnnnnnnnnnnnnnnnnnnnnnnnnnnnnnnnnnnnnnnnnnnnnnnnnnnnnnnnnnnnnnnnnnnnnnnnnnnnnnnnnnnnnnnnnnnnnnnnnnnnnnnnnnnnnnnnnnnnnnnnnnnnnnnnnnnnnnnnnnnnnnnnnnnnnnnnnnnnnnnnnnnnnnnnnnnntaggaaacccttgcctcatcagttttcctgatttacaagtgcagtattttagccaatgccttgtgagaagctgccacacaaaggtggacatcattcttcagcttcaggggatgtgcttgctcttaagaaccagtggtgggcagctggccttctggactaaggcggccttgggggacactgcagtctggctgcacttcaaagatctggcaccccctgggtggggtgtcccttgggggcttttgggaaagcatggcaccctcagaccacacagtagccgagttctggagcaaataaaaggcctgtgttatttcttgttc

SEQ ID NO: 34952 - DNA, 409 bp, Macaca Mulatta
tgatgatgatgttttcttccgggaactggaagctgcttgcttcagatctcggcttcagctggcttcctttcagtacagtaaaagtccctccctgtgaggccagacttgatcataggtgaaggttctggaggcctttaccaggacagagctagaattgagccagtaaacagataagccagaaaaatcattttcaaatgctttacctatatttccagtactttttatgaattttaaaataaaaattattttctaaaagcttattattttgaatttatgacctaacatctgaaaagggggatcttcattagtcgtatttgtgctaaagcaattaacaagccttgtttgagcagccagctcctgaagtttgttgctttaagtcaataaaaataattaagaattagcacttgac

SEQ ID NO: 34953 - DNA, 2097 bp, Macaca Mulatta
  misc_feature (1)...(2097): n = A,T,C or G
ctcagctctgcaaagagctcctccccctccaggaaaagcacttctccccaggcagggcgctcagtcccctcagnnnnnnnnnnnnnnnnnnnnnnnnnnnnnnnnnnnnnnnnnnnnnnnnnnnnnnnnnnnnnnnnnnnnnnnnnnnnnnnnnnnnnnnnnnnnnnnnnnnnnnnnnnnnnnnnnnnnnnnnnnnnnacaagctgcatgctgcatacacaagtcatacaggagataaactcagagtaccagcctcaaacagaccccatctcttgctcagctgctgtcatccttgacctgtttctttcaccacatttctataatctgccagcgcctgcaaggagaagcatggggggttttctatctaaggcagaagggcctaggagccaactccagaaacttctgccctcctttcttgtcagagaacaagactgggaccagcacctggacaagcttcatatgctgcagcagaagaggnaggattctagagtctccactgcttcgagcagccaaggaaaatgacctgtctgttcttaggcaacttctactggaccgcacctgtgacgttcgacaaagaggnaggagccctgggggagacggcactgcacatagcagccctctatgacaacttggaggcggccttggtgctgatggaggctgccccagagttggtctttgagccccaccacatgtgaggcttttgcaggtnaggtcagactgcactgcacattggttttgggaaccagaacgtgaacctggtgggacccctgctcacccgcagggcccagtgtttctgccagagccacaggcactgccttttgcggtagtccccgcaacctcatctattttggnggggagcaccctttgtcctttgctgcctgtgtgaacagcgaggagatcgtgcggctcctcattgagcatggagccgacatccgggcccaggactccctgggnggaaacacagtgttacacatcctcatcctccagcccaacaaaacctttgcctgccagatgtacaacctgctgctgtcctacgatggacatggggaccacatgcagcccctggacctcgtgcccaatcaccagggtctcacccccttcaagttggctgcagtggagggtaacactgtgngatgttccagcacctgatgcagaagcggaggcacatttagtggacatatggacccctgacctccattctctacgacctcacagagatcgactcctggggagaggaactgtccttcctagagcttgtggtctcctctgataaacgagaggnaggctcgccaaattctggaacagaccccagtgaaggagctggtgagcttcaagtggaacaagtatggccggccgtacttctgcatcctggctgccttgtacctgctctacatgatctgcttcaccacgtgctgcgtctaccgcccccttaagtttcgtggtggcaaccgcactcattctcgagacatcaccatcctccagcaaaaactactacaggnaggaggcctatgagacacatgaagatatcatcaggctggtgggggagctggtgagcgtcactggggctgtgatcatcctgctcctagagnncatcacctatgcctccctggtgctggtgaccatggcgatgcggctcaccaacaccaatggggaggtggtgcccatgtcctttgccctggtgctgggctggtgcagtgtcatgtattttgctcgaggattccagatgttgggtcccttcaccatcatgatccagaagnagatgatttttggagacctaatgcgtttctgctggctgttggctgtggttatcttgggatttgcctcngcgttctatatcattttccagacagaggacccaaccagtttggggcagttctatgactaccccatggcactgttcagcaccttcgagctttttctcactgttattgatgctcctgccaactacgatgtggacttgcccttcatgttcagcgttgtctacttcgccttcgccatcattgccacactgctcatgctcaacctgttcatcgccatgatgggtgacacccactggcgggtggcccaggagcgggatgagctctggagggcccaggt

SEQ ID NO: 34954 - DNA, 457 bp, Macaca Mulatta
  misc_feature (1)...(457): n = A,T,C or G
agactcaaggcctgggaaggttttctaatctgtgtcttgggtcaggtgcagagatttcctgggaaaggaaaaccagacacagtaggacaaatattgtatagttccacttacatgaaatagaataggcaagttcgtagagacagaaagtagaacaggaattaccagggactggaggagaagacaaggagttcttgcctagtgggtacagagtttctgtttgagatgatgaaaaccttctggaaatagattgtggcgatagctacacaacattgtgaatataattattaccaccgaaccgtacacgttaaaatggttnnnnnnnnnnnnnnnnnnnnnnnnnnnnnnnnnnnnnnnnnnnnnnnnnngaaagggagattgtctcaggctggccaactttccctgcatgtacgcacgtcttcacatgtgcacatgtgtgaaacaaatgaagcaagaaaag

SEQ ID NO: 34955 - DNA, 1833 bp, Macaca Mulatta
  misc_feature (1)...(1833): n = A,T,C or G
agacgctgaaggagtgggtggccatcgagagcgactctgtccagcccgtgcctcgcttcagacaagagctcttcagaatgatggctgtggccgcggacacactgcagcgcctgggggcccgtgtgacatcggtggacatgggttcgcagcannnnnnnnnnnnnnnnnnnnnnnnnnnnnnnnnnnnnnnnnnnnnnnnnnnnnnnnnnnnnnnnnnnnnnnnnnnnnnnnnnnnnnnnnnnnnnnnnnnnnnnnnnnnnnnnnnnnnnnnnnnnnnnnnnnnnnnnnnnnnnnnnnnnnnnnnnnnnnnnnnnnnnnnnnnnnnnnnnnnnnnnnnnnnnnnnnnnnnnnnnnnnnnnnnnnnnnnnnnnnnnnnnnnnnnnnnnnnnnnnnnnnnnnnnnnnnnnnnnnnnnnnnnnnnnnnnnnnnnnnnnnnnnnnnnnnnnnnnnnnnnnnnnnnnnnnnnnnnnnnnnnnnnnnnnnnnnnnnnnnnnnnnnnnnnnnnnnnnnnnnnnnnnnnnnnnnnnnnnnnnnnnnnnnnnnnnnnnnnnnnnnnnnnnnnnnnnnnnnnnnnnnnnnnnnnnnnnnnnnnnnnnnnnnnnnnnnnnnnnnnnnnnnnnnnnnnnnnnnnnnnnnnnnnnnnnnnnnnnnnnnnnnnnnnnnnnnnnnnnnnnnnnnnnnnnnnnnnnnnnnnnnnnnnnnnnnnnnnnnnnnnnnnnnnnnnnnnnnnnntatgatgaagtggctcctcttacagaagaggaaataaatacatacaaagccatccatctagacctggaagaataccggaatagcagccgggttgagaaatttctgttcgatactaaggnnnnnnnnnnnnnnnnnnnnnnnnnnnnnnnnnnnnnnnnnnnnnnnnnnnnnnnnnnnnnnnnnnnnnnnnnnnnnnnnnnnnnnnnnnnnnnnnnnnnnnnnnnnnnnnnnnnnnnnnnnnnnnnnnnnnnnnnnnnnnnnnnnnnnnnnnnnnnnnnnnnnnnnnnnnnnnnnnnnnnnnnnnnnnnnnnnnnnnnnnnnnnnnnnnnnnnnnnnnnnnnnnnnnnnnnnnnnnnnnnnnnnnnnnnnnnnnnnnnnnnnnnnnnnnnnnnnnnnnnnnnnnnnnnnnnnnnnnnnnnnnnnnnnnnnnnnnnnnnnnnnnnnnnnnnnnnnnnnnnnnnnnnnnnnnnnnnnnnnnnnnnnnnnnnnnnnnnnnnnnnnnnnnnnnnnnnnnnnnnnnnnnnnnnnnnnnnnnnnnnnnnnnnnnnnnnnnnnnnnnnnnnnnnnnnnggtggaactacatagagggaaccaaattatttgctgcctttttcttagagatggcccagctgcattaatcacaagaaccttctagtctgatgtgatccactgacagattcacctcccccacatccctagacagggatggaatctaaatatccagagaatttgggtctagtatagtacattttcccttccatttaaaatgtcttgggatatctggatcaataataaaatatttcaaaggcacagatgttggaaatggtttaaggtcccccactgcacaccttcctcaagtcacagcgacttgcagcaacttgatttccccaagttccgtgcaatagccccaggattggattccttctaatcttttagcatgtctctgaccttgcaatttgattggcataatcactccggtttgctttctaggtcctcaagtgctcatgacacataatcattccatccaatgatcgcctttgctttaccactctttccttttatcttattaataaaaatgttggtctccaccactgactacaa

SEQ ID NO: 34956 - DNA, 72 bp, Macaca Mulatta
ttggcgctatacgtctatgagtacctgctgcacatcggtgcccagaagtcagcccagaccttcctgtctgag

SEQ ID NO: 34957 - DNA, 3030 bp, Macaca Mulatta
  misc_feature (1)...(3030): n = A,T,C or G
agcttctgaaagttctgctgaagacagtgagcaggaagatgagagaggtgctcaagacatggataataatggcaaagaggaatctaagattgatcaaaaacccacaacagaaatgatcttattnnnnnnnnnnnnnnnnnnnnnnnnnnnnnnnnnnnnnnnnnnnnnnnnnnnnnnnnnnnnnnnnnnnnnnnnnnnnnnnnnnnnnnnnnnnnnnnnnnnnnnnnnnnnnnnnnnnnnnnnnnnnnnnnnnnnnnnnnnnnnnnnnnnnnnnnnnnnnnnnnnnnnnnnnnnnnnnnnnnnnnnnnnnnnnnnnnnnnnnnnnnnnnnnnnnnnnnnnnnnnnnnnnnnnnnnnnnnnnnnnnnnnnnnnnnnnnnnnnnnnnnnnnnnnnnnnnnnnnnnnnnnnnnnnnnnnnnnnnnnnnnnnnnnnnnnnnnnnnnnnnnnnnnnnnnnnnnnnnnnnnnnnnnnnnnnnnnnnnnnnnnnnnnnnnnnnnnnnnnnnnnnnnntacaatggtttggaggaaaaaagaaaatctctacggacaactggtttctattcaggattttcagaagtggcagaaaaaaggattaaacttttaaataactctgatgaaagacttcaaaacagcagggccaaagatcgaaaagatgtctggtcaagtattcagggacagtggcctaaaaaaacgctgaaagagcttttttcagactctgatactgaggctgcagcttccccaccccatcctgccccagaggagggggcggcagaggagtcactacagactgtgactgaagaggagagttgtccacccagtgtagaactagaaaaaccacctccagtcaatgtcgatagtaaacccattgaagaaaaaacagtagaggtcaatgacagaaaagcagaatttccaagtagtggcagtaattcagtgctaaatacccctcctactacacctgaatcgccttcatcagtcactgtaacagaaggcagccggcagcagtcttctgtaacagtatcagaaccactggctccaaaccaagaagaggttcgaagtatcaagagtgaaactgatagcacaattgaggtggatagtgttgctggggagctccaagacctccagtctgaagggaatagctcaccagcaaattttgatgccagtgtgagctcaagcagtagtaatcagccagaaccagaacatcctgaaaaannnnnnnnnnnnnnnnnnnnnnnnnnnnnnnnnnnnnnnnnnnnnnnnnnnnnnnnnnnnnnnnnnnnnnnnnnnnnnnnnnnnnnnnnnnnnnnnnnnnnnnnnnnnnnnnnnnnnnnnnnnnnnnnnnnnnnnnnnnnnnnnnnnnnnnnnnnnnnnnnnnnnnnnnnnnnnnnnnnnnnnnnnnnnnnnnnnnnnnnnnnnnnnnnnnnnnnnnnnnnnnnnnnnnnnnnnnnnnnnnnnnnnnnnnnnnnnnnnnnnnnnnnnnnnnnnnnnnnnnnnnnnnnnnnnnnnnnnnnnnnnnnnnnnnnnnnnnnnnnnnnnnnnnnnnnnnnnnnnnnnnnnnnnnnnnnnnnnnnnnnnnnnnnnnnnnnnnnnnnnnnnnnnnnnnntcagaaaaattatctctcattaaaatctgaagtagcttccattgatcggaggagaaagcgtttaaagaagaaagagagagaaagtnnnnnnnnnnnnnnnnnnnnnnnnnnnnnnnnnnnnnnnnnnnnnnnnnnnnnnnnnnnnnnnnnnnnnnnnnnnnnnnnnnnnnnnnnnnnnnnnnnnnnnnnnnncttcaatcactcctataagacgtcctccactcccaaaatgaggcttctctgaaccttcaaagaccaccaaccaaaggagacaaacctgacgcctcaccgagcgcctcccaccgcggcttggcggcctactgccgggggaggagggggcgtggcccgagagcggaagtgcccggaacccggaagtgcgagctcgcgcgccgctgccgtctgggagttctcggagtaagaatggccttggaagggatgaacaaacggaagagaaagagaagtgtcgaggagggngagagaaccctgacgacggcgttcgcgggagtccgccgggagactacagggttggacaggtcgccagtagcttatgccgcggcgagcaccattccagaggtggcaccggtcggctggcggccctcttcagttctctggagccccagattcaacccgtgtacgtgcctgtgcctaaannnnnnnnnnnnnnnnnnnnnnnnnnnnnnnnnnnnnnnnnnnnnnnnnnnnnnnnnnnnnnnnnnnnnnnnnnnnnnnnnnnnnnnnnnnnnnnnnnnnnnnnnnnnnnnnnnnnnnnnnnnnnnnnnnnnnnnnnnnnnnnnnnnnnnnnnnnnnnnnnnnnnnnnnnnnnnnnnnnnnnnnnnnnnnnnnnnnnnnnnnnnnnnnnnnnnnnnnnnnnnnnnnnnnnnnnnnnnnnnnnnnnnnnnnnnnnnnnnnnnnnnnnnnnnnnnnnnnnnnnnnnnnnnnnnnnnnnnnnnnnnnnnnnnnnnnnnnnnnnnnnnnnnnnnnnnnnnnnnnnnnnnnnnnnnnnnnnnnnnnnnnnnnnnnnnnnnnnnnnnnnnnnnnnnnnnnnnnnnnnnnnnnnnnnnnnnnnnnnnnnnnnnnnnnnnnnnnnnnnnnnnnnnnnnnnnnnnnnnnnnnnnnnnnnnnnnnnnnnnnnnnnnnnnnnnnnnnnnnnnnnnnnnnnnnnnnnnnnnnnnnnnnnnnnnnnnnnnnnnnnnnnnnnnnnnnnnnnnnnnnnnnnnnnnnnnnnnnnnnnnnnnnnnnnnnnnnnnnnnnnnnnnnnnnnnnnnnnnnnnnnnnnnnnnnnnnnnnnnnnnnnnnnnnnnnnnnnnnnnnaagttgcagaatctgccgttgagaagcactttctggactgtggaagtgtcatggccgtgaggattgtgagagaccaagtgacaggcataggcaaagggtttggctatgtcctctttga

SEQ ID NO: 34958 - DNA, 894 bp, Macaca Mulatta
  misc_feature (1)...(894): n = A,T,C or G
gggagttcgtccagcagaattacctgaagtaccagcgcgtcccgtacgtggagccgcccgagtacgagttcttctggggctcccgggccagccgcgaaatcaccaagctgcaaatcatggagttcctggccagggtctttaagaaagacccccaggcctggccctcccgatacagagaggctctagaggaggccagagctctgcgggaggctaatcccgctgcccactgccctcgcagcagtgtctccgaggactagccaagtctggaggcagatgaatgctttctgatcctcaccagggctgtggaagggtgggggtgggtcattaaagtggtcaggatttacagtgcagtattcccgggtaacttttacgttttcagcacagtgcttttatacctttaatgcaatgttgtattcctttggggactattggtgtatatttaagaagtatgcattggctgcttataagctacccttggtcggcgcctttccctttttgcaggacctttcctttgaattttgtatcccaaacccggtctgaatctgttgaagctcattttggcaccgtttccactccgcgttgacttctaatgcgacctccaccggctttgttcccgggaacattggggttcttggcgaagcccggggacataccctccccgtgtcaatggttccctgccggnactagaagatatgcccggcgggcgccggccgtgaacctttgccactggggcaacatcgggacaggcgccctcgcgcgtgagccatctcccttccccgtggaacctacgacctccgtgccttccttttcatccccaccccccctctgatttaaatccttctcctgccgtgagcctctgttgtttngngcnnngngngaaccggtaatattcct

SEQ ID NO: 34959 - DNA, 1307 bp, Macaca Mulatta
  misc_feature (1)...(1307): n = A,T,C or G
caaggagcagatcttggaactgctggtgctggagcatttcctgtccatccnnnnnnnnnnnnnnnnnnnnnnnnnnnnnnnnnnnnnnnnnnnnnnnnnnnnnnnnnnnnnnnnnnnnnnnnnnnnnnnnnnnnnnnnnnnnnnnnnnnnnnnnnnnnnnnnnnnnnnnnnnnnnnnnnnnnnnnnnnnnnnnnnnnnnnnnnnnnnnnnnnnnnnnnnnnnnnnnnnnnnnnnnnnnnnnnnnnnnnnnnnnnnnnnnnnnnnnnnnnnnnnnnnnnnnnnnnnnnnnnnnnnnnnnnnnnnnnnnnnnnnnnnnnnnnnnnnnnnnnnnnnnnnnnnnnnnnnnnnnnnnnnnnnnnnnnnnnnnnnnnnnnnnnnnnnnnnnnagatggtggctggcaaagtgttgatggcaaagcaagaaattgttggatgtgtagcctcagctgccatgatatctccaggaaaacttcctggagaaacaccttccgaacagatagctgaagaagctttgggaggtctggacaactctaagaagcaaaagggaaatgctgcagggaacaaaatcagtgagcttccttcccaggacagacatatcagtctggcaaccttcaacagaagaatccccacagaacacagtgtccttgaatctcatgagagtgaaggaagtttcagtatgaatccaaatgatattacacaacagagagttcacactggggaaaagctctatgagtgctttgactgtgggaaggccttttgccagagctcaaagctgattagacatcagagaattcatactggagagagaccttatgcatgtaaagaatgtggcaaagccttcagtttgagctcagaccttgttagacatcagagaattcacagtgggtgaaaaaccctatgaatgttgtgaatgtggaaaagccttcaggggcagttcagagctcatcaggcatcggagaatccacactggagagaagccttatgaatgtggagaatgtgggaaagccttcagccggagctcagcccttattcagcataagaaaattcacactggagataaaggctatgaatgtattgagtgtggtaaggcttttggtaggagctctatccttattgaacatcaaagaattcacactggagagaaaccttatgagtgtaatgaatgtggaaaatcctttaatcagagctcagcgctcacccagcaccacagaattcacactggagagaagccttatgaatgtagtgaatgtagaaaaacatttaggcataggtcaggccttatgcagcatcagagaacacacaccaga

SEQ ID NO: 34960 - DNA, 177 bp, Macaca Mulatta
ggtcctggctgctgtctacaaggccctgaatgaccatcatgtttacctggagggcaccctgctaaagcccaacatggtgactgctggacacgcctgcaccaagaagtatactccagagcaagtggctatggccaccgtaacagctctccaccgcaccgttcctgcagctgttcctgg

SEQ ID NO: 34961 - DNA, 156 bp, Macaca Mulatta
gattattccttgggcctgaatgacttgaatgtttcccccgctgagctaacagtccatgtgggtgattcagctctgatgggatgtgttttccagagcacagaagacaaatgcatattcaagatagactggattctctcatcaggagagcaggccaag

SEQ ID NO: 34962 - DNA, 296 bp, Macaca Mulatta
ggaataaatgagaggtggtaatttatccctaagccaggacctggatgatcaaaaccttcaagttttaggaatcagcacttcaaaaataacaaataaacaagcatgaggagtgactgtggggtttcgctcagaggcaggttttaaaggaagccaaaaccgggttcagaacttcgggcctgtatgatgcctgaagaccggaattctggggggtgccccgctggtgccttagcctcaactcctttcatccctaaaactacgtacagaagaatcaaacggtgttttagttttcggaaagg

SEQ ID NO: 34963 - DNA, 239 bp, Macaca Mulatta
gaagactggctaaaccatcagccgtaaatggggacaaacgtggggccagcagcttccgttcgaggtctcggcatcagcgaaccgcggcagctttggagaagggttgtgagtggcggctctggaggcagcaatggtgcgctttggggcgggtgggggttctgctggattcaggtggaggtgagcatcaaccattcccacagccctgcgtgtacccccaatgctcctggcccacgaatcac

SEQ ID NO: 34964 - DNA, 850 bp, Macaca Mulatta
ggccctggctccagcatttcgaggagcgtgtgtccgatgcattgacccacgaatcttcagcaggttcacagccgtgacaaactccaggatggggcctccctgtcccttcccacccatctcatgaacgacgtcgcagttcctctcaggcctctgatgagtgagcagatgaagtgtctctgggtcattgcaggtcagctggaatgggagcatggtagatcttccttacagattaaatagatcacatttgcttctaaaattaactcctgtttcggagactgcacacctagattccgggtctgggtgcaggtgtctgagtcaatggagggagttgtgaaagtaagggatgagccaccgtggctacaggcccccaggagagcagggtacagctctgggtctgaatcagcggcagagctgtgggcagggaccccattgaccactgggcaccttggcctgtagtgatgaacacagttgggaatcaagatgaacagcgagcagcaccctttctggtccttttaggggagcgttgggaggtgaggcaaaccttaccagggatcccctttaccaagggttctgacaagttgaaattacttcctctgggggcctgaccagcctgagctgctagctataaccctccaaaggccaaagccccagaagaggtgagctgtccacaccaggagcagcagggccacgtctgtgcctccctgaggttcaggcctcgcagggacttgccgtgctgcttgagtgggggcagagcagcagacctctctccggagccatccagagagggcgccccactgaagatgactgtgttgggggttcaggatggggaaaaggccaccaagggctggag

SEQ ID NO: 34965 - DNA, 397 bp, Macaca Mulatta
cctggcacatataaatgtaacctaaaaaattagttacctttagtcagagggaatgacattttaaacttgcaaattcagactgttaaaagaatattaatctaacagtaaaaataaatgtcaaattaatgaattcaaagtttcatagatatgttgatagttgatgccaaatctactttgttataaagaaacaaattttgttaattttatactgtgatggagttaagatgtccagatagcatatagttgtttttgtatgttttgattaacttttgaacaggaaaattgttctgtatatctagatcaactggcctcctccaatagttgaaatatgtgttaagtcactcatgtaacagtagagcccacagaatctacctacattaaactctctaggtggact

SEQ ID NO: 34966 - DNA, 112 bp, Macaca Mulatta
aaggcatgcatgtattttacctacaaggttcactactttaacagctccactgagattcctaaattcctcattgcactggaaatgctgatggcttcagacttcctagatatat

SEQ ID NO: 34967 - DNA, 699 bp, Macaca Mulatta
  misc_feature (1)...(699): n = A,T,C or G
nnnnnnnnnnnnnnnnnnnnnnnnnnnnnnnnnnnnnnnnnnnnnnnnnnnnnnnnnnnnnnnnnnnnnnnnnnnnnnnnnnnnnnnnnnnnnnnnnnnnnnnnnnnnnnnnnnnnnnnnnnnnnnnnnnnnnnnnnnnnnnnnnnnnnnnnnnnnnnnnnnnnnnnnnnnnnnnnnnnnnnnnnnnnnnnnnnnnnnnnnnnnnnnnnnnnnnnnnnnnnnnnnnnnnnnnnnnnnnnnaattacattgtcatttatttcaatcctgtggcacacactgaatataataggcttgaaaaacactttgatatttcctttgtagaacactaaatgctaccattgatttctataaattaaatttactaggaaaacccacagtttaaaaaaagtacacaagaataagctagctgatcacaatcaaatgaatgaattcaaaatagtataaagtcaggaacagtttatcttcatggtaacattcactttatgcaaatcccacttggcttcatttaattaaaaagtccgtctttttccaacatctcctttcgaagttgctgcttcatttagaagaaccatccccatggtgatagcggcattcagtaccagaataatgtgtgattctgccacaaactgagcctggctgctcccatgaatgtagctcacttgtccattgtgtggttcttatgagcatatggagtccac

SEQ ID NO: 34968 - DNA, 1938 bp, Macaca Mulatta
  misc_feature (1)...(1938): n = A,T,C or G
ctcctctactaatctctgtgtagaaaatcttcagaaaaataaagattcgaatagtataattaaagatagattgtctcaaacggttaggcagaatactaaattcttttttgacccagtccggaagtgtaatggtcagccagtaccttttcaacaaccaaagcacttcacgggaggagtgatnnnnnnnnnnnnnnnnnnnnnnnnnnnnnnnnnnnnnnnnnnnnnnnnnnnnnnnnnnnnnnnnnnnnnnnnnnnnnnnnnnnnnnnnnnnnnnnnnnnnnnnnnnnnnnnnnnnnnnnnnnnnnnnnnnnnnnnnnnnnnnnnnnnnnnnnnnnnnnnnnnnnnnnnnnnnnnnnnnnnnnnnnnnnnnnnnnnnnnnnnnnnnnnnnnnnnnnnnnnnnnnnnnnnnnnnnnnnnnnnnnnnnnnnnnnnnnnnnnnnnnnnnnnnnnnnnnnnnnnnnnaaacggaaagggactctgcaaattcatcctgtggtaatcacgtcatttgaaatagccatgagagaccgaaatgcgttacannnnnnnnnnnnnnnnnnnnnnnnnnnnnnnnnnnnnnnnnnnnnnnnnnnnnnnnnnnnnnnnnnnnnnnnnnnnnnnnnnnnnnnnnnnnnnnnnnnnnnnnnnnnnnnnnnnnnnnnnnnnnnnnnnnnnnnnnnnnnnnnnnnnnnnnnnnnnnnnnnnnnnnnnnnnnnnnnnnnnnnnnnnnnnnnnnnnnnnnnnnnnnnnnnnnnnnnnnnnnnnnnnnnnnnnnnnnnnnnnnnnnnnnnnnnnnnnnnnnnnnnnnnnnnnnnnnnnnnnnnnnnnnnnnnnnnnnnnnnnnnnnnnnnnnnnnnnnnnnnnnnnnnnnnnnnnnnnnnnnnnnnnnnnnnnnnnnnnnnnnnnnnnnnnnnnnnnnnnnnnnnnnnnnnnnnnnnnnnnnnnnnnnnnnnnnnnnnnnnnnnnnnnnnnnnnnnnnnnnnnnnnnnnnnnnnnnnnnnnnnnnnnnnnnnnnnnnnnnnnnnnnnnnnnnnnnnnnnnnnnnnnnnnnnnnnnnnnnnnnnnnnnnnnnnnnnnnnnnnnnnnnnnnnnnnnnnnnnnnnnnnnnnnnnnnnnnnnnnnnnnnnnnnnnnnnnnnnnnnnnnnnnnnnnnnnnnnnnnnnnnnnnnnnnnnnnnnnnnnnnnnnnnnnnnnnnnnnnnnnnnnnnnnnnnnnnnnnnnnnnnnnnnnnnnnnnnnnnnnnnnnnnnnnnnnnnnnnnnnnnnnnnnnnnnnnnnnnnnnnnnnnnnnnnnnnnnnnnnnnnnnnnnnnnnnnnnnnnnnnnnnnnnnnnnnnnnnnnnnnnnnnnnnnnnnnnnnnnnnnnnnnnnnnnnnnnnnnnnnnnnnnnnnnnnnnnnnnnnnnnnnnnnnnnnnnnnnnnnnnnnnnnnnnnnnnnnnnnnnnnnnnnnnnnnnnnnnnnnnnnnnnnnnnnnnnnnnnnnnnnnnnnnnnnnnnnnnnnnnnnnnnnnnnnnnnnnnnnnnnnnnnnnnnnnnnnnnnnnnnnnnnnnnnnnnnnnnnnnnnnnnnnnnnnnnnnnnnnnnnnnnnnnnnnnnnnnnnnnnnnnnnnnnnnnnnnnnnnnnnnnnnnnnnnnnnnnnnnnnnnnnnnnnnnnnnnnnnnnnnnnnnnnnnnnnnnnnnnnnnnnnnnnnnnnnnnnnnnnnnnnnnnnnnnnnnnnnnnnnnnnnnnnnnnnnnnnnnnnnnnnnnnnnnnnnnnnnnnntcatttcaaaggtggtcagtctggattaaatctgtctaagaatttcttagatcctaaggaattaatggaattattaaaatctagagattatgaaaggnagggaaataaaaggatcaagagagaaggtcattagtgataaagatctagagttgttgttagatcgaagtgatcttattg

SEQ ID NO: 34969 - DNA, 667 bp, Macaca Mulatta
  misc_feature (1)...(667): n = A,T,C or G
tgtggagagaccccatctctataaaaaaatcacacaagaaaattagctgggtgtggtggtgcgtnnnnnnnnnnnnnnnnnnnnnnnnnnnnacaagatcaaggccaaaggggagaggtggaatccaggtgggcctagttcaggagctggtatgtgcttatagtttaggctatggggattggagaccttactggcatttgtgcttatcacctttatcagccagtgaatgcagggcgaggggcttaaacagccagagcaggactgggtccctgaatgtcagccagactcaactgtgtgctcaacttcactgaaatgtgaagcccagcagggcaatgagcgcctcttgcgtttgcaggttactaccggtactacaacaagtacattaacgtgaagaaggggagcatctcggggattaccatggtgctggcatgctatgtgctcttcaactacagcatttcctacaagcatctcagtgagtgcctctgcagcatcttgccttcagtttcccaagagagggtggtggtgactgatttcattagagacagcagcccaccttcttctgaggctgagagaccattagtaaatcccttatgtttccacctaaaagaattggagggacctatcagagtacagtatgtgggatattgtttgaatgagaaaattgtga

SEQ ID NO: 34970 - DNA, 598 bp, Macaca Mulatta
aatttaaaagcttttacagtagcatcttagagttaagctgaattgaagtggatctaggtagaggttccagatatcactaaggagtctttcactgtaattatctcttcctagggctttaaaatctagcgggctctgtgagtcattgacatatggactcccattcatcctcagacctacaagctgttggcagctggactgggatgagctagagacaaatcagcaacatttccatgctttgtgtcacagcctgctggtgagtacccatgtccccaggtgaaaaagaagaatcatttttaaagtaccaaccacagaaaagcagctaactaactctgcccaatcctaaatctgcctcaaccctcaagaggacagaaaaaactggatatactctgaaatttggagtaaatatgacttgccttttgttggtttcatgctatagagaataattcctgaattcagttatacaacactaaacttgaaaattccctatttgtaagcttaacatttaaatggcaacagggaattttccataagtacctgtattttaaaacctacttccttcctaacactgtgatagacattatggttcatttaaatgaag

SEQ ID NO: 34971 - DNA, 358 bp, Macaca Mulatta
gtgaccttccccttgtgatcaacttgcctgcaaggacacctacatcctacagctcctggcccttaaagacagtgggctcctgtcactggtctgcttcctcctcttgcttctctcctatggagtcataatattctcagttaggcaccgtgctgctagtcgatcctctaaggctttctctactctctcagctcacatcacagttgtgactctgttctttgctccatgtgtctttatctatgtatggcctttcagcagatactctgtagataaaattctttctgtgttttacacaattttcacacctctcttaaatcctattatttatacattaagaaatcaagaggtaaaagcagccatt

SEQ ID NO: 34972 - DNA, 631 bp, Macaca Mulatta
  misc_feature (1)...(631): n = A,T,C or G
ggggcggttgtgccctgggtcgccaagatgtcgacctcaaagtacaagccgtcgcacctggccactctgcccgagagcctcgacccagctgaatacaacacatctccggaaacccggcgggcgcaagccgagcggttggctataagagcccggctgaaacaagagtacttgcttcagtacaacgatcccaaccgccgagagctcatcgaaaatcctgccttgcttcgttggacctatgcaagaataaatgtctatcctaatttcagacccactcctaaaaactcactcctgggagctctgtttggaatcgggcccctcatcttcctgtattgtattatcaaagctgacagggataagaaagaaaaacttatccgggaaggaaaattggatcgaacatttcagctctcatgttaagtctggcaatgatgactatatgtattcctgcctaaataaatagtttattaaccaaananaatnnnnnnnnnnnnnnnnnnnnncccggccccccccgcccccaaaaactttttaaccattttttgggcccggggccccnnnnnnnnnnnnnnnnnnataactttttcccagaaaaaccgggccaaaaaaggggttgaattctcccaaaaaaaacccg

SEQ ID NO: 34973 - DNA, 3442 bp, Macaca Mulatta
  misc_feature (1)...(3442): n = A,T,C or G
tgcccagcggccgccttccccagccgagggagtgaactagccatgattgcctcatgtggagggcaaagttgcgccggggaacttgtgagcctgcggtgaaaggnnnnnnnnnnnnnnnnnnnnnnnnnnnnnnnnnnnnnnnnnnnnnnnnnnnnnnnnnnnnnnnnnnnnnnnnnnnnnnnnnnnnnnnnnnnnnnnnnnnnnnnnnnnnnnnnnnnnnnnnnnnnnnnnnnnnnnnnnnnnnnnnnnnnnttgaagatcctctttgtaactgccactccccaaacttcctgaggatctcagaggtggaaatgagaggttccgaggatgcggcagctggaacagtattgcagcggctgatccaggaacaactgcggtatggcaccccaaccgagaacatgaacttgctggccattcagcaccaggccacagggagtgcaggaccagcccaccctacaaacaacttttcttccacggaaaacctcactcaagaagacccacaaatggtctaccagtcagcacgccaagaaccgcagggtcaagaacaccaggtggacaatacggtgatggagaaacaggtccggtccacgcagcctcagcagaacaatgaggaactgcccacttacgaggaggccaaagcacagtcgcagttcttcagnnnnnnnnnnnnnnnnnnnnnnnnnnnnggggcggtgggccatggttactacatggcagggggcaccagtcagaagtcccgaactgaggggaggcccactgtgaaccgtgccaacagtggacaggcgcataaggacgaggcactgaaggaactgaagcagggtcacgtccgctcgctcagcgagagaatcatgcagctgtccctggagaggaatggggccaagcaacaccatcctggctcggggaatggaaagggcttcaaagcaggaaggggtccctcccctgctcagcctnnnnnnnnnnnnnnnnnnnnnnnnnnnnnnnnnnnnnnnnnnnnnnnnnnnnnnnnnnnnnnnnnnnnnnnnnnnnnnnnnnnnnnnnnnnnnnnnnnnnnnnnnnnnnnnnnnnnnnnnnnnnnnnnnnnnnnnnnnnnnnnnnnnnnnnnnnnnnnnnnnnnnnnnnnnnnnnnnnnnnnnnnnnnnnnnnnnnnnnnnnnnnnnnnnnnnnnnnnnnnnnnnnnnnnnnnnnnnnnnnnnnnnnnnnnnnnnnnnnnnnnnnnnnnnnnnnnnnnnnnnnnnnnnnnnnnnnnnnnnnnnnnnnnnnnnnnnnnnnnnnnnnnnnnnnnnnnnnnnnnnnnnnnnnnnnnnnnnnnnnnnnnnnnnnnnnnnnnnnnnnnnnnnnnnnnnnnnnnnnnnnnnnnnnnnnnnnnnnnnnnnnnnnnnnnnnnnnnnnnnnnnnnnnnnnnnnnnnnnnnnnnnnnnnnnnnnnnnnnnnnnnnnnnnnnnnnnnnnnnnnnnnnnnnnnnnnnnnnnnnnnnnnnnnnnnnnnnnnnnnnnnnnnnnnnnnnnnnnnnnnnnnnnnnnnnnnnnnnnnnnnnnnnnnnnnnnnnnnnnnnnnnnnnnnnnnnnnnnnnnnnnnnnnnnnnnnnnnnnnnnnnnnnnnnnnnnnnnnnnnnnnnnnnnnnnnnnnnnnnnnnnnnnnnnnnnnnnnnnnnnnnnnnnnnnnnnnnnnnnnnnnnnnnnnnnnnnnnnnnnnnnnnnnnnnnnnnnnnnnnnnnnnnnnnnnnnnnnnnnnnnnnnnnnnnnnnnnnnnnnnnnnnnnnnnnnnnnnnnnnnnnnnnnnnnnnnnnnnnnnnnnnnnnnnnnnnnnnnnnnnnnnnnnnnnnnnnnnnnnnnnnnnnnnnnnnnnnnnnnnnnnnnnnnnnnnnnnnnnnnnnnnnnnnnnnnnnnnnnnnnnnnnnnnnnnnnnnnnnnnnnnnnnnnnnnnnnnnnnnnnnnnnnnnnnnnnnnnnnnnnnnnnnnnnnnnnnnnnnnnnnnnnnnnnnnnnnnnnnnnnnnnnnnnnnnnnnnnnnnnnnnnnnnnnnnnnnnnnnnnnnnnnnnnnnnnnnnnnnnnnnnnnnnnnnnnnnnnnnnnnnnnnnnnnnnnnnnnnnnnnnnnnnnnnnnnnnnnnnnnnnnnnnnnnnnnnnnnnnnnnnnnnnnnnnnnnnnnnnnnnnnnnnnnnnnnnnnnnnnnnnnnnnnnnnnnnnnnnnnnnnnnnnnnnnnnnnnnnnnnnnnnnnnnnnnnnnnnnnnnnnnnnnnnnnnnnnnnnnnnnnnnnnnnnnnnnnnnnnnnnnnnnnnnnnnnnnnnnnnnnnnnnnnnnnnnnnnnnnnnnnnnnnnnnnnnnnnnnnnnnnnnnnnnnnnnnnnnnnnnnnnnnnnnnnnnnnnnnnnnnnnnnnnnnnnnnnnnnnnnnnnnnnnnnnnnnnnnnnnnnnnnnnnnnnnnnnnnnnnnnnnnnnnnnnnnnnnnnnnnnnnnnnnnnnnnnnnnnnnnnnnnnnnnnnnnnnnnnnnnnnnnnnnnnnnnnnnnnnnnnnnnnnnnnnnnnnnnnnnnnnnnnnnnnnnnnnnnnnnnnnnnnnnnnnnnnnnnnnnnnnnnnnnnnnnnnnnnnnnnnnnnnnnnnnnnnnnnnnnnnnnnnnnnnnnnnnnnnnnnnnnnnnnnnnnnnnnnnnnnnnnnnnnnnnnnnnnnnnnnnnnnnnnnnnnnnnnnnnnnnnnnnnnnnnnnnnnnnnnnnnnnnnnnnnnnnnnnnnnnnnnnnnnnnnnnnnnnnnnnnnnnnnnnnnnnnnnnnnnnnnnnnnnnnnnnnnnnnnnnnnnnnnnnnnnnnnnnnnnnnnnnnnnnnnnnnnnnnnnnnnnnnnnnnnnnnnnnnnnnnnnnnnnnnnnnnnnnnnnnnnnnnnnnnnnnnnnnnnnnnggagagatgatggaagtcctcatctaactgccatccctgtggaatttcagaacggagcattgacaaacaaggaaagtggcagagaaagaagaaagacctagaaggttatagtgggaaatcaggaatgatttgaactgataaagatttcagactcataagaacacattttataaatgttaaacacaaaaacaggagacctacatgactgaagatagaagagaatgcgatggattttattacacatagtggaagggagagaggcgtgtaggtttgcaaacaaagttaagaaataggaaattgaaaaaaaagttgtacagaaaatgtatctcttagggagggcttgtgtatccccattctctgattataaacagataaacccaaatgtggatcctccttggaatacccccattctccttgcctcttagcatgtttggtttaagaagagcctccaagaaatcttgagagcctgtcttggcataatgcagtgtgacttgtgccaaccgtgggaagtcccgtgtgtgtgagtgtggcagtgagaagaagcatggag

SEQ ID NO: 34974 - DNA, 1891 bp, Macaca Mulatta
  misc_feature (1)...(1891): n = A,T,C or G
gtaccaatggaggcgttacagtggtgggccttgtctctagtctccttggtggtacctttgtgggcattgcatacttcctcacacagctgatttttgtgaatgatttagacatttctgccccccagtggccaattattgcatttggtggtttagctggattactaggatcaattgtggactcatacttaggggctataatgcagtatactggngggttggatgaaagcactggcatggtggtcaacagcccaacaaatgaggcaaagcacatagcagggaaacccattcttgataacaatgcggtgaatctgttttcttctgttcttattgccctcttgcttccaactgctgcttggggtttttggcccaggggatgaactttatttcatttccacaggttgaaactgatcagtccagctaaatttgcaattccaacttctatcctaagaagaataattgtaatggcaaagcagaaatgccagctcctcctatattccattgtgatgggatttcacattttgctctcatcaactcccctgtaacagctagcatctttctagtgaaagagaagaattccaagaacttacgcatattttttttctgctgaatggaagtcttgagcaatgaagctgtattgtccctacatactgctatatattgaactgaaagttctcacataatcagtgtcaagttttgtcttattttgttttgnnnnnnnnnnnnnnnnnnnnnnnnnnnnnnnnnnnnnnnnnnnnnnnnnnnnnnnnnnnnnnnnnnnnnnnnnnnnnnnnnnnnnnnnnnnnnnnnnnnnnnnnnnnnnnnnnnnnnnnnnnnnnnnnnnnnnnnnnnnnnnnnnnnnnnnnnnnnnnnnnnnnnnnnnnnnnnnnnnnnnnnnnnnnnnnnnnnnnnnnnnnnnnnnnnnnnnnnnnnnnnnnnnnnnnnnnnnnnnnnnnnnnnnnnnnnnnnnnnnnnnnnnnnnnnnnnnnnnnnnnnnnnnnnnnnnnnnnnnnnnnnnnnnnnnnnnnnnnnnnnnnnnnnnnnnnnnnnnnnnnnnnnnnnnnnnnnnnnnnnnnnnnnnnnnnnnnnnnnnnnnnnnnnnnnnnnnnnnnnnnnnnnnnnnnnnnnnnnnnnnnnnnnnnnnnnnnnnnnnnnnnnnnnnnnnnnnnnnnnnnnnnnnnnnnnnnnnnnnnnnnnnnnnnnnnnnnnnnnnnnnnnnnnnnnnnnnnnnnnnnnnnnnnnnnnnnnnnnnnnnnnnnnnnnnnnnnnnnnnnnnnnnnnnnnnnnnnnnnnnnnnnnnnnnnnnnnnnnnnnnnnnnnnnnnnnnnnnnnnnnnnnnnnnnnnnnnnnnnnnnnnnnnnnnnnnnnnnnnnnnnnnnnnnnnnnnnnnnnnnnnnnnnnnnnnnnnnnnnnnnnnnnnnnnnnnnnnnnnnnnnnnnnnnnnnnnnnnnnnnnnnnnnnnnnnnnnnnnnnnnnnnnnnnnnnnnnnnnnnnnnnnnnnnnnnnnnnnnnnnnnnnnnnnnnnnnnnnnnnnnnnnnnnnnnattggtggccctactgtggtgatgatctagaactgacttacttctggacannnnnnnnncaatcacacccttaatctttaagccagtcagatcagggggttgcaacagttgggttagaacttcgggtatatattggaagcaccagggcatgtttgnnnnnnnnnnnnnnnnnnnnnnnnnnnagacagagtctcacactgtggcccaggctgaactccagcacagtggcatgatctnnnnnnnnnnnnnnnnnnnnnnngattctcatgcctcagccacccaagtagctgggatcacagacgtgcaccatcatgccaggctaatttttgtatttttagtagagacagggt

SEQ ID NO: 34975 - DNA, 2934 bp, Macaca Mulatta
  misc_feature (1)...(2934): n = A,T,C or G
ctcaggaagacagtctcagaaacatgtggaatgatattgagctgctaacaaatgatgataccggaagtgggtacctgagtgtcggttcaagaaaagaacatggaactgctttatatcaagtagatatgctagtgaagatctcttctgaaaagnnnnnnnnnnnnnnnnnnnnnnnnnnnnnnnnnnnnnnnnnnnnnnnnnnnnnnnnnnnnnnnnnnnnnnnnnnnnnnnnnnnnnnnnnnnnnnnnnnnnnnnnnnnnnnnnnnnnnnnnnnnnnnnnnnnnnnnnnnnnnnnnnnnnnnnnnnnnnnnnnnnnnnnnnnnnnnnnnnnnnnnnnnnnnnnnnnnnnnnnnnnnnnnnnnnnnnnnnnnnnnnnnnnnnnnnnnnnnnnnnnnnnnnnnnnnnnnnnnnnnnnnnnnnnnnnnnnnnnnnnnnnnnnnnnnnnnnnnnnnnnnnnnnnnnnnnnnnnnnnnnnnnnnnnnnnnnnnnnnnnnnnnnnnnnnnnnnnnnnnnnnnnnnnnnnnnnnnnnnnnnnnnnnnnnnnnnnnnnnnnnnnnnnnnnnnnnnnnnnnnnnnnnnnnnnnnnnnnnnnnnnnnnnnnnnnnnnnnnnnnnnnnnnnnnnnnnnnnnnnnnnnnnnnnnnnnnnnnnnnnnnnnnnnnnnnnnnnnnnnnnnnnnnnnnnnnnnnnnnnnnnnnnnnnnnnnnnnnnnnnnnnnnnnnnnnnnnnnnnnnnnnnnnnnnnnnnnnnnnnnnnnnnnnnnnnnnnnnnnnnnnnnnnnnnnggtgcaaagaagttccagctaatagacaatctactttttgttcttgatactgatnnnnnnnnnnnnnnnnnnnnnnnnnnnnnnnnnnnnnnnnnnnnnnnnnnnnnnnnnnnnnnnnnnnnnnnnnnnnnnnnnnnnnnnnnnnnnnnnnnnnnnnnnnnnnnnnnnnnnnnnnnnnnnnnnnnnnnnnnnnnnnnnnnnnnnnnnnnnnnnnnnnnnnnnnnnnnnnnnnnnnnnnnnnnnnnnnnnnnnnnnnnnnnnnnnnnnnnnnnnnnnnnnnnnnnnnnnnnnnnnnnnnnnnnnnnnnnnnnnnnnnnnnnnnnnnnnnnnnnnnnnnnnnnnnnnnnnnnnnnnnnnnnnnnnnnnnnnnnnnnnnnnnnnnnnnnnnnnnnnnnnnnnnnnnnnnnnnnnnnnnnnnnnnnnnnnnnnnnnnnnnnnnnnnnnnnnnnnnnnnnnnnnnnnnnnnnnnnnnnnnnnnnnnnnnnnnnnnnnnnnnnnnnnnnnnnnnnnnnnnnnnnnnnnnnnnnnnnnnnnnnnnnnnnnnnnnnnnnnnnnnnnnnnnnnnnnnnnnnnnnnnnnnnnnnnnnnnnnnnnnnnnnnnnnnnnnnnnnnnnnnnnnnnnnnnnnnnnnnnnnnnnnnnnnnnnnnnnnnnnnnnnnnnnnnnnnnnnnnnnnnnnnnnnnnnnnnnnnnnnnnnnnnnnnnnnnnnnnnnnnnnnnnnnnnnnnnnnnnnnnnnnnnnnnnnnnnnnnnnnnnnnnnnnnnnnnnnnnnnnnnnnnnnnnnnnnnnnnnnnnnnnnnnnnnnnnnnnnnnnnnnnnnnnnnnnnnnnnnnnnnnnnnnnnnnnnnnnnnnnnnnnnnnnnnnnnnnnnnnnnnnnnnnnnnnnnnnnnnnnnnnnnnnnnnnnnnnnnnnnnnnnnnnnnnnnnnnnnnnnnnnnnnnnnnnnnnnnnnnnnnnnnnnnnnnnnnnnnnnnnnnnnnnnnnnnnnnnnnnnnnnnnnnnnnnnnnnnnnnnnnnnnnnnnnnnnnnnnnnnnnnnnnnnnnnnnnnnnnnnnnnnnnnnnnnnnnnnnnnnnnnnnnnnnnnnnnnnnnnnnnnnnnnnnnnnnnnnnnnnnnnnnnnnnnnnnnnnnnnnnnnnnnnnnnnnnnnnnnnnnnnnnnnnnnnnnnnnnnnnnnnnnnnnnnnnnnnnnnnnnnnnnnnnnnnnnnnnnnnnnnnnnnnnnnnnnnnnnnnnnnnnnnnnnnnnnnnnnnnnnnnnnnnnnnnnnnnnnnnnnnnnnnnnnnnnnnnnnnnnnnnnnnnnnnnnnnnnnnnnnnnnnnnnnnnnnnnnnnnnnnnnnnnnnnnnnnnnnnnnnnnnnnnnnnnnnnnnnnnnnnnnnnnnnnnnnnnnnnnnnnnnnnnnnnnnnnnnnnnnnnnnnnnnnnnnnnnnnnnnnnnnnnnnnnnnnnnnnnnnnnnnnnnnnnnnnnnnnnnnnnnnnnnnnnnnnnnnnnnnnnnnnnnnnnnnnnnnnnnnnnnnnnnnnnnnnnnnnnnnnnnnnnnnnnnnnnnnnnnnnnnnnnnnnnnnnnnnnnnnnnnnnnnnnnnnnnnnnnnnnnnnnnnnnnnnnnnnnnnnnnnnnnnnnnnnnnnnnnnnnnnnnnnnnnnnnnnnnnnnnnnnnnnnnnnnnnnnnnnnnnnnnnnnnnnnnnnnnnnnnnnnnnnnnnnnnnnnnnnnnnnnnnnnnnnnnnnnnnnnnnnnnnnnnnnnnnnnnnnnnnnnnnnnnnnnnnnnnnnnnnnnnnnnnnnnnnnnnnnnnnnnnnnnnnnnnnnnnnnnnnnnnnnnnnnnnnnnnnnnnnnnnnnnnnnnnnnnnnnnnnnnnnnnnnnnnnnnnnnnnnnnnnnnnnnnnnnnnnnnnnnnnnnnnnnnnnnnnnnnnnnnnnnnnnnnnnnnnnnnnnnnnnnnnnnnnnnnnnnnnnnnnnnnnnnnnnnnnnnnnnnnnnnnnnnnnnnnnnnnnnnnnnnnnnnnnnnnnnnnnnnnnnnnnnnnnnnnnnnnnnnnnnnnnnnnnnnnnnnnnnnnnnnnnnnnnnnnnnnnnnngggcaaagcctggagaacgtctgtagcgaagacatccgtggacattcttaagatactatgtgacattcagaaag

SEQ ID NO: 34976 - DNA, 511 bp, Macaca Mulatta
cgcaggtgggtctgcagatcccgcgggccgcattggcccggctgctgcgggacgccgaggggctgcaggagctggcgctggcgccgtgtcacgaatggttgtcagacgaggacctggtgccggtgctggcgcgtaatccgcagctgcggagtgtggcgctgggcggttgcgggcaactgagtcgtcgggcgcttggggcgctggccgagggctgcccacgcctgcagcgcctgtcgctcgcgcactgtgactgggtggacgggctggcgctgcgcggcctcgctgaccgctgcccggccctggaggagctggatctcaccgcctgccgccagctcaaggacgaggccatcgtgtacctggcgcagaggcgcggcgctggcctccgcagcctctctctggccgtcaacgccaacgtgggggacgccgcggttcaagagttggctcggaactgcccagaactccagcaccttgacctcaccggctgcctccgcgtcggaagcgacggtgtcag

SEQ ID NO: 34977 - DNA, 543 bp, Macaca Mulatta
acacacacaaaagtttacagattaatttaaattgataatgaaatgtgaagtttgtcctagtttacatcttagagaggggagtatacttgtgtttgtttcatgtgcctgaatatcttaagccactttctgcaaagctgtttcttacagatgaagtgctttctttgaaaggtggttatttaggttttagatgtttaatagacacggcacatttgctctattaactcagaggctcactacagaaatatgtaatcagtgctgtgcatctgtctgcagctaatgtacctcctggacaccaggaggggaaaaagcactttttcgattgtgctgagttagacatctgtgaattagactatggtgtcagtaatttttgcagaacaagtgcacaaccctgaggtatgtttagtctaagcaggtacgtttaaaggaattttgatctattataaggaattcacaatttatgcctataaatttcaaaatgattaacaatttaaaccggttacattgaaaaacattcaaattccaccttgaagaaagcattaagga

SEQ ID NO: 34978 - DNA, 666 bp, Macaca Mulatta
  misc_feature (1)...(666): n = A,T,C or G
aagctgaagaaaaagctgcagaacagtttcgngaatgcgacttaaaaataagcaagatgaaatgaagctagaaggagatctcagaagaagccagcgagcctgtcaacaattggatgcccagaaannnnnnnnnnnnnnnnnnnnnnnnnnnnnnnnnnnnnnnnnnnnnnnnnnnnnnnnnnnnnnnnnnnnnnnnnnnnnnnnnnnnnnnnnnnnnnnnnnnnnnnnnnnnnnnnnngtactggaaaaattacaaatattgactagttatttaagagaagaacatctgtattgtatttggtgtggaacagcctatgaannnnnnnnnnnnnnnnnnnnnnnnnnnnnnnnnnaacttctgcagatcatgattaagattatccccaataaagtagaaactcgaaaagtgttattatttcctagggatggacaattcagcagctggaaatccaaaattttttatgccagtaaagaaagagggactttatataatgttttgttcttttcgtactttatgagtgttcactgacttgaaaaaaataatgcaatggcatttcagaacacaagtatcatagagatggacagttacaatttattgctgtattgtgatacatgaggggtttaaggacaccaacaggtaactatcttattcccctcttcactttg

SEQ ID NO: 34979 - DNA, 242 bp, Macaca Mulatta
ggcttcttggaggtcaataaggtggccggaaacttccactttgcccctgggaagagcttccagcagtcccacgtgcacgtccatgacttgcagagctttggccttgacaacatcaacatgacccactacatccagcacctgtcatttggggaggactatccaggcattgtgaaccccctggaccacaccaatgtcactgcaccccaagcctccatgatgttccagtactttgtgaaggtggt

SEQ ID NO: 34980 - DNA, 1210 bp, Macaca Mulatta
  misc_feature (1)...(1210): n = A,T,C or G
aggacatggacgtggacatcctggccgtggtcaatgacaccgtggggaccatgatgacctgtgcctatgacgacccctactgcgaagttggtgtcatcatcgnggaacaggcacaaatgcgtgttacatggaggacatgagcaacattgacctggtggagggcgacgagggcaggatgtgcatcaacacagagtggggggccttcggggacgatggggccctggaggacattcgcaccgagttcgacagggagctggacctaagctctctcaacccgggaaagcannnnnnnnnnnnnnnnnnnnnnnnnnnnnnnnnnnnnnnnnnnnnnnnnnnnnnnnnnnnnnnnnnnnnnnnnnnnnnnnnnnnnnnnnnnnnnnnnnnnnnnnnnnnnnnnnnnnnnnnnnnnnnnnnnnnnnnnnnnnnnnnnnnnnnnnnnnnnnnnnnnnnnnnnnnnnnnnnnnnnnnnnnnnnnnnnnnnnnnnnnnnnnnnnnnnnnnnnnnnnnnnnnnnnnnnnnnnnnnnnnnnnnnnnnnnnnnnnnnnnnnnnnnnnnnnnnnnnnnnnnnnnnnnnnnnnnnnnnnnnnnnnnnnnnnnnnnnnnnnnnnnnnnnnnnnnnnnnnnnnnnnnnnnnnnnnnnnnnnnnnnnnnnnnnnnnnnnnnnnnnnnnnnnnnnntacccaaaacgcctgcacaaggtggtgaggaaactggtcccgagctgtgatgtccgattcctcctgtcagagagtggcagcaccaagggggccgccatggtgactgcggtggcctcccgcgtgcaggcccagcggaagcagatcgacaaggtgctggctttgttccggctgacccgagagcagcttgtggacgtgcaggccaagatgcgggctgagctggagtatgggctgaagaagaagagccacgggctggccacggtcagaatgctgcccacttacgtctgcgggctgccggacggcacagnnnnacagagaaaggaaagtttcttgccctggatcttgggggaaccaacttccgggtcctcctggtgaagatcagaagtggacggaggtcagtgcgaatgtacaacaagatcttcgccatccccctggggatcatgcagggcactggtgaggagnagctctttgaccacattgtgcagtgcattgccgacttcctggactacatgggcctcaagggggcctccctacct

SEQ ID NO: 34981 - DNA, 434 bp, Macaca Mulatta
ctctgggtttccgtgcagctgtctctatctgggaaggtttgtggcttctcacaaaaggctctctgctcgggttgcagggctgctgtttagattggcttctctgggcactagggaagcctccctcccttggggtagtcccctccctcctgagcctgtgctcagggggcccctcagggagcttcattctgacctgagtgacttcggtagagcccttagcagacaaggaatggaataccgaaatgtcttgtgtgaagccttctgtaagtgtgtctccttgcacacacccctgagagtgcaggccttcccctggagcaggaggagatggagggtttttatttctaacaaaaggccccaccctggcgagagtggcttccttttatctggccatctgacagacagcttgtgctagcagcgatttccgtcagatgctgagg

SEQ ID NO: 34982 - DNA, 225 bp, Macaca Mulatta
caggttggtgaaaaccctgtgtccttggagaaagctggttcccgttttccagagggggagcccagagcttgaaaggccgcggttggcacttcgagaaggaagtggagagtaaagacagcgcctggagcgatcgtagaaacacagaatgggactggggaagccctttggaaatccagctgcagaaacagacaccccaatgctatttacatacagctctatatatat

SEQ ID NO: 34983 - DNA, 4882 bp, Macaca Mulatta
  misc_feature (1)...(4882): n = A,T,C or G
ggcaaaggtaaggatgatgaagaacaaagcatatatttagctgttaatgnnnnnnnnnnnnnnnnnnnnnnnnnnnnnnnnnnnnnnnnnnnnnnnnnnnnnnnnnnnnnnnnnnnnnnnnnnnnnnnnnnnnnnnnnnnnnnnnnnnnnnnnnnnnnnnnnnnnnnnnnnnnnnnnnnnnnnnnnnnnnnnnnnnnnnnnnnnnnnnnnnnnnnnnnnnnnnnnnnnnnnnnnnnnnnnnnnnnnnnnnnnnnnnnnnnnnnnnnnnnnnnnnnnnnnnnnnnnnnnnnnnnnnnnnnnnnnnnnnnnnnnnnnnnnnnnnnnnnnnnnnnnnnnnnnnnnnnnnnnnnnnnnnnnnnnnnnnnnnnnnnnnnnnnnnnnnnnnnnnnnnnnnnnnnnnnnnnnnnnnnnnnnnnnnnnnnnnnnnnnnnnnnnnnnnnnnnnnnnnnnnnnnnnnnnnnnnnnnnnnnnnnnnnnnnnnaacagagcatatcaaagaacaaacagattgtgaagacacgtgcgaaaaaagagataatacgaggagtttgaaagctactacggaagaattgtttacctgccaagaaacaatgtgctgtgaactgtcttctctagctgatcatggtattactgagaaagcagaagcaggtacagcctatataattaagacaacatcagaaagtactccagaaagcatgtctgctagagaaaaagcagtaattgctaagctacctcaagagacagcacgaagtgacaggcccatcgaggtaaaggaaacagcgtttgatccacatgaagggagaaatgattattcacattataccctttgtcaacgagatacagtaggtgtaatctatgacaatgattttgaaaaggaatcacatttaggtatttgtaatgtacatgtagatgaaatggagaaggaagaaaccatgtctacgtacaagcctagaaagacacatgacaaggagaaatgtggcactgaaaatataacatccgtggaagaatcctcacgggtcattacagaatatcaaaaagcgacttcaaaactggatttacagttgggaatgttaccaacagacaaaatgatattttcagaaaacagagatcataggcaagttcaagaattatcaaagaaaacagacttggatgccactgtgcattctgcttttaactcagacaccaatagagctccttggaatagctctcctttttccaaacatactgaaattttggtgtcaactaatgagcaggcaattgctatagagaatgcaattactaccatggctagccaacctatttctacgaaatcagaaagtatttgtaattcaacaagagaaatccaggatattgagaagcacccttatcctgagtctaaacctgaagaggtttccaaaagttcaggaatagtgacgtcaggtagtagnnnnnnnnnnnnnnnnnnnnnnnnnnnnnnnnnnnnnnnnnnnnnnnnnnnnnnnnnnnnnnnnnnnnnnnnnnnnnnnnnnnnnnnnnnnnnnnnnnnnnnnnnnnnnnnnnnnnnnnnnnnnnnnnnnnnnnnnnnnnnnnnnnnnnnnnnnnnnnnnnnnnnnnnnnnnnnnnnnnnnnnnnnnnnnnnnnnnnnnnnnnnnnnnnnnnnnnnnnnnnnnnnnnnnnnnnnnnnnnnnnnnnnnnnnnnnnnnnnnnnnnnnnnnnnnnnnnnnnnnnnnnnnnnnnnnnnnnnnnnnnnnnnnnnnnnnnnnnnnnnnnnnnnnnnnnnnnnnnnnnnnnnnnnnnnnnnnnnnnnnnnnnnnnnnnnnnnnnnnnnnnnnnnnnnnnnnnnnnnnnnnnnnnnnnnnnnnnnnnnnnnnnnnnnnnnnnnnnnnnnnnnnnnnnnnnnnnnnnnnnnnnnnnnnnnnnnnnnnnnnnnnnnnnnnnnnnnnnnnnnnnnnnnnnnnnnnnnnnnnnnnnnnnnnnnnnnnnnnnnnnnnnnnnnnnnnnnnnnnnnnnnnnnnnnnnnnnnnnnnnnnnnnnnnnnnnnnnnnnnnnnnnnnnnnnnnnnnnnnnnnnnnnnnnnnnnnnnnnnnnnnnnnnnnnnnnnnnnnnnnnnnnnnnnnnnnnnnnnnnnnnnnnnnnnnnnnnnnnnnnnnnnnnnnnnnnnnnnnnnnnnnnnnnnnnnnnnnnnnnnnnnnnnnnnnnnnnnnnnnnnnnnnnnnnnnnnnnnnnnnnnnnnnnnnnnnnnnnnnnnnnnnnnnnnnnnnnnnnnnnnnnnnnnnnnnnnnnnnnnnnnnnnnnnnnnnnnnnnnnnnnnnnnnnnnnnnnnnnnnnnnnnnnnnnnnnnnnnnnnnnnnnnnnnnnnnnnnnnnnnnnnnnnnnnnnnnnnnnnnnnnnnnnnnnnnnnnnnnnnnnnnnnnnnnnnnnnnnnnnnnnnnnnnnnnnnnnnnnnnnnnnnnnnnnnnnnnnnnnnnnnnnnnnnnnnnnnnnnnnnnnnnnnnnnnnnnnnnnnnnnnnnnnnnnnnnnnnnnnnnnnnnnnnnnnnnnnnnnnnnnnnnnnnnnnnnnnnnnnnnnnnnnnnnnnnnnnnnnnnnnnnnnnnnnnnnnnnnnnnnnnnnnnnnnnnnnnnnnnnnnnnnnnnnnnnnnnnnnnnnnnnnnnnnnnnnnnnnnnnnnnnnnnnnnnnnnnnnnnnnnnnnnnnnnnnnnnnnnnnnnnnnnnnnnnnnnnnnnnnnnnnnnnnnnnnnnnnnnnnnnnnnnnnnnnnnnnnnnnnnnnnnnnnnnnnnnnnnnnnnnnnnnnnnnnnnnnnnnnnnnnnnnnnnnnnnnnnnnnnnnnnnnnnnnnnnnnnnnnnnnnnnnnnnnnnnnnnnnnnnnnnnnnnnnnnnnnnnnnnnnnnnnnnnnnnnnnnnnnnnnnnnnnnnnnnnnnnnnnnnnnnnnnnnnnnnnnnnnnnnnnnnnnnnnnnnnnnnnnnnnnnnnnnnnnnnnnnnnnnnnnnnnnnnnnnnnnnnnnnnnnnnnnnnnnnnnnnnnnnnnnnnnnnnnnnnnnnnnnnnnnnnnnnnnnnnnnnnnnnnnnnnnnnnnnnnnnnnnnnnnnnnnnnnnnnnnnnnnnnnnnnnnnnnnnnnnnnnnnnnnnnnnnnnnnnnnnnnnnnnnnnnnnnnnnnnnnnnnnnnnnnnnnnnnnnnnnnnnnnnnnnnnnnnnnnnnnnnnnnnnnnnnnnnnnnnnnnnnnnnnnnnnnnnnnnnnnnnnnnnnnnnnnnnnnnnnnnnnnnnnnnnnnnnnnnnnnnnnnnnnnnnnnnnnnnnnnnnnnnnnnnnnnnnnnnnnnnnnnnnnnnnnnnnnnnnnnnnnnnnnnnnnnnnnnnnnnnnnnnnnnnnnnnnnnnnnnnnnnnnnnnnnnnnnnnnnnnnnnnnnnnnnnnnnnnnnnnnnnnnnnnnnnnnnnnnnnnnnnnnnnnnnnnnnnnnnnnnnnnnnnnnnnnnnnnnnnnnnnnnnnnnnnnnnnnnnnnnnnnnnnnnnnnnnnnnnnnnnnnnnnnnnnnnnnnnnnnnnnnnnnnnnnnnnnnnnnnnnnnnnnnnnnnnnnnnnnnnnnnnnnnnnnnnnnnnnnnnnnnnnnnnnnnnnnnnnnnnnnnnnnnnnnnnnnnnnnnnnnnnnnnnnnnnnnnnnnnnnnnnnnnnnnnnnnnnnnnnnnnnnnnnnnttaatggctcagtttttgaattctacctttaagggttttagtcaacatgccatatctcatttttgcagagaactctatattatgaacacaggtgtcttaactagaattattatcttaaaagacaacataacttattttatgtcttttatttaacttttggtaatattaacttaccaaatctcctatacatttttaatatgacaaaacaaattttaaaagattcgaaatacttaattgtgtatttctctgaattcaatgaagaaataattcatgattcaactgcatctccaaacattacttatgaccttgaaataaaataagaatctatgaaactattgatatctgaagagatggattattgcaacctgttttggtcacatcactatgccgagcaagaaaagtggatctcggagtactagcagcccctggttaatggagatctgcctgtgaaacatatggcaagagtaatctttataagcatagctgcctgcactgtgtctctccaagtaccagttaaggcccaaatgagggcatggcaggagatttagagaggtgcatcacacatctgcttcatatgttgggtaagaaacatcacctcatctttcattttgctgggctcctgacttttagaaacaaaattctgaatatttgcaagtcaagtaagtatgggtagcaaaaacaattatctttttaaaaaatcacatcggtataggccatcaatatcacaacagatttctcaaggtaaaagaaaataagcccatgagatgacagtcacccttcaacataaaagaacattgggttaatgcagccatggtatcctgctgagctccagtattttgatagtgaattatttcaaataatatannnnnnnnnnnnnnnnnnnnnntttattaagcaggcccatctttaacgtgttatctcaaaccagtctgctggttaaatggaaaataaaaatatccatnnnnnctttgtatataaatgaaccaaaaaagcaatgcaaaacaataaactagcagaagaactagaatagatacaagaagatttatctactgatttctgttcttgtgatctctcactttcaaatttttactgagaatatagaaattgaattatgcaataagatcttattcagttatttgaatgtgtcttagtcagttcctgtagaactgagaaataggattgactctgattccacagcaagatctgaaa

SEQ ID NO: 34984 - DNA, 111 bp, Macaca Mulatta
  misc_feature (1)...(111): n = A,T,C or G
nggcaaacactgtatacttgatgtatcaggaaatgctatcaagcggttacaagttgcccagctctattccattgccatcttcataaaacccaggtctctggaacctcttat

SEQ ID NO: 34985 - DNA, 1050 bp, Macaca Mulatta
  misc_feature (1)...(1050): n = A,T,C or G
ctctgcgtcctttgccgcggcccgtgtccctagcaaagccgctgccaccccggagggcccagccagtgggctcccggaggctggccgggcaggcgtggtgcgcggtaggagctgggcgcacacggctaccgcgcgtggatgttattctgccctgccgcgatgggggcccggggcgctccttcacgccgtaggcaagcggggcggcggctgcggtacctgcccaccgggagctttcccttcctnnnnnnnnnnnnnnnnnnntgcatccagctcgggggaggacagaagaaaaaggagaatcttttagctgaaaaagtagagcagctgatggaatggagttccagacgctcaatcttccgaatgaatggtgataaattccgaaaatttataaaggcaccacctcgaaactattccatgattgttatgttcactgctcttcagcctcagcggcagtgttctgtgtgcaggcaagctaatgaagaatatcaaatactggcaaactcctggcgctattcatctgctttttgtaacaagctcttcttcagtatggtggactatgatgaggggacagacgtttttcagcagctcaacatgaactctgctcctacattcatgcattttcctccaaaaggcagacccaagagagctgatacttttgacctccaaagaattggatttgcagctgaacaactagcaaagtggattgctgacagaacggatgttcatattcgggttttcagaccacccaactactctggtaccattgctttggccctgttagtgtcgcttgttggaggtttgctttatttgagaaggaacaacttggagttcatctataacaagactggttgggccatggtgtctctgtgtatagtctttgctatgacttctggccagatgtggaaccatatccgtggacctccatatgctcataagaacccacacaatggacaaggtgagctatatttcatggggagcagcccaggcctcagttttgtgggcaagaatccccaccatttatttctggggtaactgaaattgccccgccta

SEQ ID NO: 34986 - DNA, 915 bp, Macaca Mulatta
  misc_feature (1)...(915): n = A,T,C or G
ttttttatatagatcttgatcgaactctcttcttcttatcgagaaaggaatacccgccatcattttgtatgtcatacgccacctcattcctccgtgtgagagaaaaaaataagagcgcacccgcacacttgttagtgctctttttctcttctctctgggtgataataaccgcattattatagggggaccccgccccccctcttgttatttggtcccaccaccatagtggtgcgaagtcggagtataacacacccccccccgccagggtactaatatggtgagattntgtnntatcatcnangnnnnnanannaannnnnnnnnnntctcttcccctccgacaaccactgtttcttctccccccgggnnnnnnnnnnnnnnnnnnnnnnnacaagagtgtgggggggggtttttaaattccctctcttaaagagacaccagggggggtttctttttatnnnnnnnnnnnnnnccnnnnnnnnnnnnnnnccacaaggnnnnnnnnnnnnnnnnnnnnncccgggggccaaaacagcctttggggttttattcttctgggttttggtttttcgggtccggaacttggggggcccagcttaagccagcggagttagctgtttgggcggtccagggccttgggtgaaactggttaatagcaggaggcactttcagccgcttatagaggatggctctctgccgctgcaacctgatatagcgaggccatttcacaaagcgggtgaggtctcttttgggctggatgtcctgtccaatgccaaaattcttaggtcttttctcaaacaggggattcaccactttcttggcctcctgctttttcacgacagcaggggccggagccaccttctttcccttggccttctttcctttcggcatcttgggcggcgggaggagagagccc

SEQ ID NO: 34987 - DNA, 1116 bp, Macaca Mulatta
  misc_feature (1)...(1116): n = A,T,C or G
ctttgcccgccttggcggccggctctaccttccaagttctcgcctcctgctccgccatggctcccaaaggcagctccaaacagcagtccgaggaggacctgctcctgcaggatttcagccgcaatctctcggccaagtcctccgcgctcttcttcgggaacgcgttcatcgtgtccgccatccccatctgnnnnnnnnnnnnnnnnnnnnnnnnnnnnnnnnnnnnnnnnnnnnnnnnnnnnnnnnnnnnnnnnnnnnnnnnnnnnnnnnnnnnnnnnnnnnnnnnnnnnnnnnnnnnnnnnnnnnnnnnnnnnnnnnnnnnnnnnnnnnnnnnnnnnnnnnnnnnnnnnnnnnnnnnnnnnnnnnnnnnnnnnnnnnnnnnnnnnnnnnnnnnnnnnnnnnnnnnnnnnnnnnnnnnntgtggaagaagaatgaagttgctgattatgaagctacaacattttccatcttctataacaacactcttttcctggtcgtggtcattgttgcttccttcttcatattgaagaacttcaaccnnnnnnnnnnnnnnnnnnnnnnnnnnnnnnnnnnnnnnnnnnnnnnnnnnnnnnnnnnnnnnnnnnnnnnnnnnnnnnnnnnnnnnnnnnnnnnnnnnnnnnnnnnnnnnnnnnnnnnnnnnnnnnnnnnnnnnnnnnnnnnnnnnnnnnnnnnnnnnnnnnnnnnnnnnnnnnnnnnnnnnnnnnnnnnnnnnnnnnnnnnnnnnnnnnnnnnnnnnnnnnnnnnnnnnnnnnnnnnnnnnnnnnnnnnnnnnnnnnnnnnnnnnnnnnnnnnnnnnnnnnnnnnnnnnnnnnnnnnnnnnnnnnnnnnnnnnnnnnnnnnnnnnnnnnnnnnnnnnnnnnnnnnnnnnnnnnnnnnnnnnnnnnnnnnngtcacagtaacctgggccgagctgttattatttattatataccagtagtatgaagttaataactggttctctgtgttccaagtacaatattgcagcttcttttgaaccataaatatccgaatgaatcctcttcccaggggattgaacagaagcttaatgtttaaaagtgtttgaatttgtgatctgaaataacgcaaaattaaaaa

SEQ ID NO: 34988 - DNA, 455 bp, Macaca Mulatta
  misc_feature (1)...(455): n = A,T,C or G
tgtcggcggccgtggcgtgtgtggattacttcgccgccgacgtgctcatggccatctcctcgggcgccgtggtgcaccgcgggcggcccggccccgagggcgcgggccccgccgctggcctggatgtgcgnnnnnnnnnnnnnnnnnnnnnnnnnnnnnnnnnnnnnnnnnnnnnnnnnnnnnnnnnnnnnnnnnnnnnnnnnnnnnnnnnnnnnnnnnnnnnnnncacctgctggccgccagcatcctggccgacctgcgcggcgggcccggagccgccccggggggcnnnnnnnnnnnnnnnnnnnnnnnnnnnnnnnnnnnnnnnnnnnnnnnnnnnnnnnnnnnnnnnnnnnnnnnnnnnnnnnnnagagccaccgctgtcccttcccggactgcgccaaagcctactacaagtcctcgcacctaaagtcgcacctgcggacgcacacagg

SEQ ID NO: 34989 - DNA, 714 bp, Macaca Mulatta
  misc_feature (1)...(714): n = A,T,C or G
ggggcagttgtgtccagccggtcccgggtcggctatggcggccacgttcttcggagaggtggtgaaggcgccatgccgagctgggacggaggacnnnnnnnnnnnnnnnnnnnggcggagggagacgcccgaggacagggaggtgcgtcaacagctggcgcggaagagggaggtgcggctccttcgaagacaaacaaaaacatctttggaagtttctttgctagaaaaatatccgtgctccaagtttataattgctataggaaataatgcagtagcatttctgtcatcatttgttatgaattcaggagtctgggaagaagttggttgtgctaaactctggaatgaatggtgtagaacagcagacactacacatctgtcctccacagaggctttttgtgggttttatcatctcaaatccaatccctcggttttcctctgtcaatgcagttgctacgttgcagaagatcagcagtatcagtggctggaaaaggtttttggctcttgtccaaggaagaacatgcagataactattctcacatgtcgacacgttaccgattataaaaccttagaatccactggcagccttccttctcctttcctgaaagccctgaaaacacagaatttcaaagaccctgcgtgttgcccattgctagaacaaccgaatatagtacacgaaccttccctgcagcaagttctgaagtttactgtcaaaga

SEQ ID NO: 34990 - DNA, 230 bp, Macaca Mulatta
aacagacgccgtgggtccttctcatcaagcgtcagcagttcccgggcggccttgcggatcttggccagggtaaatttgaccctccagacctcacgtttgttccggagcccatactcgccgatcagcttcagctcttggtcgagacgagattttctcaaagggtctcctcggggtcacgtaagttttgcgacaaacccagctccgggccaccgcatgttggtccgctaccc

SEQ ID NO: 34991 - DNA, 810 bp, Macaca Mulatta
  misc_feature (1)...(810): n = A,T,C or G
ggggctcttcttcctcggcgctgcctacggaggtggcagccatctcctcctcgaaggcatcatggccgccctcagaccccttgtgaagcccaagatcgtcaaaaaaagaaccaagaagttcatccggcaccagtcagaccgatatgtcaaaattaagcgtaactggcggaaacccagaggcattgacaacagggttcgtagaagattcaagggccagatcttgatgcccaacattggttatgggagcaacaaaaaaacaaagcacatgctgcccagtggcttccggaagttcctggtccacaacgtcaaggagttggaagtgctgctgatgtgcaacaaatcttactgtgccgagattgctcacaatgtttcttccaagaaccgcaaagccatcgtggaaagagctgcccagctggtcatcagagtcaccaaccccaacgccaggctgcgcagtgaagaaaatgagtagacagctcatgtgcacgttttctgtttaaataattgtaaaaactgnnnnnnnnnnnnnnnnnnnnnnnnnnnnnnncgccgccacgccccccaaacctttcaaaccatctttgggccccggccaataggaagtgacagggctatctgttctaagaaccctggnnnnnnnnnnnnnnnnnnnnnnnnnnnnnatggngcggccccccctcgnnnnnnnnnnnnnnnnnnnnnnnnnnnnnnnnngttggggcgcggcggcggnnnnnnnnnnnnnnnnnnnnnnnnnnnggtcctattttgtgttttctcaaaagaaaaaacccggggaaataaaaaaagggt

SEQ ID NO: 34992 - DNA, 658 bp, Macaca Mulatta
  misc_feature (1)...(658): n = A,T,C or G
aatgcattcagntgcacccttgttatttgggagaggtggtagctaaagaacattctgagtgtaggttcttctccatttacagatgttttgggtcaaatattgaaagcaaacttgtcatggtcttctcacattaagttgaaactagcttataataactggtttttaattctaatgctgtgaagtctctgcagagcttttacagttttcgaagtccttttatcactgtgatcttattctgaggggaggaaaaactatcatacctgtgaggcaagacttcgactttatagtgctatcagttccccaatacagggtcagaataaccgatacagtattttggtcaggaagagaaagtggccatttacactgaatgagttgcattctgataatgtcttatctcttatacgtagaataaatttgaaagactatttggtcttaaaaccaaagtaattttagaatgagtgacatattacataggaatttagtatcaatttcatgtgtttaaaaacatgggaaaaatgcttagagattactattttgactacaaagttgagttttatctgtagttaccatatttcattgaagcaaatgaatgagtttgagaggttagttttcataattgtgttatattacttgtttactaataatctctaattctgtg

SEQ ID NO: 34993 - DNA, 4634 bp, Macaca Mulatta
  misc_feature (1)...(4634): n = A,T,C or G
tgggtgcccagtttccgcgtggcttggtgtgggagccgagacaggacagtggggcctgccctgttcgtccactccctgcctgtgctggttgcagcctcagagcaggcgggagacgttcttggggcttaggctcctggcagagcacatagcaggagttcgtggggtctgaggttgccactccagggctccctgattctgggcctggtctgttaatctttctctggggagcccagtgcccgctgccgagcagactctgccatcccctgtgggcaggtgtgtgaaggagaatgggatcccagcacagtcttggtttctaacatcttggggtgtgttttggaggcaggcagaagtcatggatgtagatgctgaaagagagaagataacacaggagatcaaggagctggaaaggattttagatcccagctccgcgggcacccacatggaggtctcagaatcaagtctcgagtcagattctgaagcannnnnnnnnnnnnnnnnnnnnnnnnnnnnnnnnnnnnnnnnnnnnnggaagaagaaaggtggggtgaagccagcaatgacgaggacgaccccaaggataaaaccctccctgaagacccggagacctgcctgcagctgaacatggtctaccaggaggtcatccaagagaagctggctgaggccaacctgctgctggcccagaaccgggagcagcagnnnnnnnnnnnnnnnnnnnnnnnnnnnnnnnnnnnnnnnnnnnnnnnnnnnnnnnnnnnnnnnnnnnnnnnnnnnnnnnnnnnnnnnnnnnnnnnnnnnnnnnnnnnnnnnnnnnnnnnnnnnnnnnnnnnnnnnnnnnnnnnnnnnnnnnnnnnnnnnnnnnnnnnnnnnnnnnnnnnnnnnnnnnnnnnnnnnnnnnnnnnnnnnnnnnnnnnnnnnnnnnnnnnnnnnnnnnnnnnnnnnnnnnnnnnnnnnnnnnnnnnnnnnnnnnnnnnnnnnnnnnnnnnnnnnnnnnnnnnnnnnnnnnnnnnnnnnnnnnnnnnnnnnnnnnnnnnnnnnnnnnnnnnnnnnnnnnnnnnnnnnnnnnnnnnnnnnnnnnnnnnnnnnnnnnnnnnnnnnnnnnnnnnnnnnnnnnnnnnnnnnnnnnnnnnnnnnnnnnnnnnnnnnnnnnnnnnnnnnnnnnnnnnnnnnnnnnnnnnnnnnnnnnnnnnnnnnnnnnnnnnnnnnnnnnnnnnnnnnnnnnnnnnnnnnnnnnnnnnnnnnnnnnnnnnnnnnnnnnnnnnnnnnnnnnnnnnnnnnnnnnnnnnnnnnnnnnnnnnnnnnnnnnnnnnnnnnnnnnnnnnnnnnnnnnnnnnnnnnnnnnnnnnnnnnnnnnnnnnnnnnnnnnnnnnnnnnnnnnnnnnnnnnnnnnnnnnnnnnnnnnnnnnnnnnnnnnnnnnnnnnnnnnnnnnnnnnnnnnnnnnnnnnnnnnnnnnnnnnnnnnnnnnnnnnnnnnnnnnnnnnnnnnnnnnnnnnnnnnnnnnnnnnnnnnnnnnnnnnnnnnnnnnnnnnnnnnnnnnnnnnnnnnnnnnnnnnnnnnnnnnnnnnnnnnnnnnnnnnnnnnnnnnnnnnnnnnnnnnnnnnnnnnnnnnnnnnnnnnnnnnnnnnnnnnnnnnnnnnnnnnnnnnnnnnnnnnnnnnnnnnnnnnnnnnnnnnnnnnnnnnnnnnnnnnnnnnnnnnnnnnnnnnnnnnnnnnnnnnnnnnnnnnnnnnnnnnnnnnnnnnnnnnnnnnnnnnnnnnnnnnnnnnnnnnnnnnnnnnnnnnnnnnnnnnnnnnnnnnnnnnnnnnnnnnnnnnnnnnnnnnnnnnnnnnnnnnnnnnnnnnnnnnnnnnnnnnnnnnnnnnnnnnnnnnnnnnnnnnnnnnnnnnnnnnnnnnnnnnnnnnnnnnnnnnnnnnnnnnnnnnnnnnnnnnnnnnnnnnnnnnnnnnnnnnnnnnnnnnnnnnnnnnnnnnnnnnnnnnnnnnnnnnnnnnnnnnnnnnnnnnnnnnnnnnnnnnnnnnnnnnnnnnnnnnnnnnnnnnnnnnnnnnnnnnnnnnnnnnnnnnnnnnnnnnnnnnnnnnnnnnnnnnnnnnnnnnnnnnnnnnnnnnnnnnnnnnnnnnnnnnnnnnnnnnnnnnnnnnnnnnnnnnnnnnnnnnnnnnnnnnnnnnnnnnnnnnnnnnnnnnnnnnnnnnnnnnnnnnnnnnnnnnnnnnnnnnnnnnnnnnnnnnnnnnnnnnnnnnnnnnnnnnnnnnnnnnnnnnnnnnnnnnnnnnnnnnnnnnnnnnnnnnnnnnnnnnnnnnnnnnnnnnnnnnnnnnnnnnnnnnnnnnnnnnnnnnnnnnnnnnnnnnnnnnnnnnnnnnnnnnnnnnnnnnnnnnnnnnnnnnnnnnnnnnnnnnnnnnnnnnnnnnnnnnnnnnnnnnnnnnnnnnnnnnnnnnnnnnnnnnnnnnnnnnnnnnnnnnnnnnnnnnnnnnnnnnnnnnnnnnnnnnnnnnnnnnnnnnnnnnnnnnnnnnnnnnnnnnnnnnnnnnnnnnnnnnnnnnnnnnnnnnnnnnnnnnnnnnnnnnnnnnnnnnnnnnnnnnnnnnnnnnnnnnnnnnnnnnnnnnnnnnnnnnnnnnnnnnnnnnnnnnnnnnnnnnnnnnnnnnnnnnnnnnnnnnnnnnnnnnnnnnnnnnnnnnnnnnnnnnnnnnnnnnnnnnnnnnnnnnnnnnnnnnnnnnnnnnnnnnnnnnnnnnnnnnnnnnnnnnnnnnnnnnnnnnnnnnnnnnnnnnnnnnnnnnnnnnnnnnnnnnnnnnnnnnnnnnnnnnnnnnnnnnnnnnnnnnnnnnnnnnnnnnnnnnnnnnnnnnnnnnnnnnnnnnnnnnnnnnnnnnnnnnnnnnnnnnnnnnnnnnnnnnnnnnnnnnnnnnnnnnnnnnnnnnnnnnnnnnnnnnnnnnnnnnnnnnnnnnnnnnnnnnnnnnnnnnnnnnnnnnnnnnnnnnnnnnnnnnnnnnnnnnnnnnnnnnnnnnnnnnnnnnnnnnnnnnnnnnnnnnnnnnnnnnnnnnnnnnnnnnnnnnnnnnnnnnnnnnnnnnnnnnnnnnnnnnnnnnnnnnnnnnnnnnnnnnnnnnnnnnnnnnnnnnnnnnnnnnnnnnnnnnnnnnnnnnnnnnnnnnnnnnnnnnnnnnnnnnnnnnnnnnnnnnnnnnnnnnnnnnnnnnnnnnnnnnnnnnnnnnnnnnnnnnnnnnnnnnnnnnnnnnnnnnnnnnnnnnnnnnnnnnnnnnnnnnnnnnnnnnnnnnnnnnnnnnnnnnnnnnnnnnnnnnnnnnnnnnnnnnnnnnnnnnnnnnnnnnnnnnnnnnnnnnnnnnnnnnnnnnnnnnnnnnnnnnnnnnnnnnnnnnnnnnnnnnnnnnnnnnnnnnnnnnnnnnnnnnnnnnnnnnnnnnnnnnnnnnnnnnnnnnnnnnnnnnnnnnnnnnnnnnnnnnnnnnnnnnnnnnnnnnnnnnnnnnnnnnnnnnnnnnnnnnnnnnnnnnnnnnnnnnnnnnnnnnnnnnnnnnnnnnnnnnnnnnnnnnnnnnnnnnnnnnnnnnnnnnnnnnnnnnnnnnnnnnnnnnnnnnnnnnnnnnnnnnnnnnnnnnnnnnnnnnnnnnnnnnnnnnnnnnnnnnnnnnnnnnnnnnnnnnnnnnnnnnnnnnnnnnnnnnnnnnnnnnnnnnnnnnnnnnnnnnnnnnnnnnnnnnnnnnnnnnnnnnnnnnnnnnnnnnnnnnnnnnnnnnnnnnnnnnnnnnnnnnnnnnnnnnnnnnnnnnnnnnnnnnnnnnnnnnnnnnnnnnnnnnnnnnnnnnnnnnnnnnnnnnnnnnnnnnnnnnnnnnnnnnnnnnnnnnnnnnnnnnnnnnnnnnnnnnnnnnnnnnnnnnnnnnnnnnnnnnnnnnnnnnnnnnnnnnnnnnnnnnnnnnnnnnnnnnnnnnnnnnnnnnnnnnnnnnnnnnnnnnnnnnnnnnnnnnnnnnnnnnnnnnnnnnnnnnnnnnnnnnnnnnnnnnnnnnnnnnnnnnnnnnnnnnnnnnnnnnnnnnnnnnnnnnnnnnnnnnnnnnnnnnnnnnnnnnnnnnnnnnnnnnnnnnnnnnnnnnnnnnnnnnnnnnctggacccggagaagccatccctgccccagcctgggcctgagaagggggccctggacctgggcctgctgtcccaggaggctgaggcggccacacagcagtggctggggggccagcgtggggtgcgggtacgtcttctgggaagcagactgccctaccagcccccggccctgtgcagccttcgagcactgtccagcctcctgctccacaagaaggccctggagcacaaggccgcctccctggtggcggggggcgaggctgagcggccggctggagcgctgcaggcctcactggggctggtgcgggggcagctccgggacaacccagcctacctcctgctgcgggcacggttcctggcggccttcaccctccctgcgctcctggccaccctggccccccatggtatccgcaccaccctctcagcagcctccatagcaggctccgagagcgaggacgaggacctcctgagcgagctggaactcgcagacagggacgggcagccgggctgcacggcggccacacgccacattcag

SEQ ID NO: 34994 - DNA, 2229 bp, Macaca Mulatta
  misc_feature (1)...(2229): n = A,T,C or G
aaagtaagccagatgtgaatctgaaagatctccagagtgaagaagagattgatcatccactgatgattctaaaagcaatcttattagagnnnnnnnnnnnnnnnnnnnnnnnnnnnnnnnnnnnnnnnnnnnnnnnnnnnnnnnnnnnnnnnnnnnnnnnnnnnnnnnnnnnnnnnnnnnnnnnnnnnnnnnnnnnnnnnnnnnnnnnnnnnnnnnnnnnnnnnnnnnnnnnnnnnnnnnnnnnnnnnnnnnnnnnnnnnnnnnnnnnnnnnnnnnnnnnnnnnnnnnnnnnnnnnnnnnnnnnnnnnnnnnnnnnnnnnnnnnnnnnnnnnnnnnnnnnnnnnnnnnnnnnnnnnnnnnnnnnnnnnnnnnnnnnnnnnnnnnnnnnnnnnnnnnnnnnnnnnnnnnnnnnnnnnnnnnnnnnnnnnnnnnnnnnnnnnnnnnnnnnnnnnnnnnnnnnnnnnnnnnnnnnnnnnnnnnnnnnnnnnnnnnnnnnnnnnnnnnnnnnnnnnnnnnnnnnnnnnnnnnnnnnnnnnnnnnnnnnnnnnnnnnnnnnnnnnnnnnnnnnnnnnnnnnnnnnnnnnnnnnnnnnnnnnnnnnnnnnnnnnnnnnnnnnnnnnnnnnnnnnnnnnnnnnnnnnnnnnnnnnnnnnnnnnnnnnnnnnnnnnnnnnnnnnnnnnnnnnnnnnnnnnnnnnnnnnnnnnnnnnnnnnnnnnnnnnnnnnnnnnnnnnnnnnnnnnnnnnnnnnnnnnnnnnnnnnnnnnnnnnnnnnnnnnnnnnnnnnnnnnnnnnnnnnnnnnnnnnnnnnnnnnnnnnnnnnnnnnnnnnnnnnnnnnnnnnnnnnnnnnnnnnnnnnnnnnnnnnnnnnnnnnnnnnnnnnnnnnnnnnnnnnnnnnnnnnnnnnnnnnnnnnnnnnnnnnnnnnnnnnnnnnnnnnnnnnnnnnnnnnnnnnnnnnnnnnnnnnnnnnnnnnnnnnnnnnnnnnnnnnnnnnnnnnnnnnnnnnnnnnnnnnnnnnnnnnnnnnnnnnnnnnnnnnnnnnnnnnnnnnnnnnnnnnnnnnnnnnnnnnnnnnnnnnnnnnnnnnnnnnnnnnnnnnnnnnnnnnnnnnnnnnnnnnnnnnnnnnnnnnnnnnnnnnnnnnnnnnnnnnnnnnnnnnnnnnnnnnnnnnnnnnnnnnnnnnnnnnnnnnnnnnnnnnnnnnnnnnnnnnnnnnnnnnnnnnnnnnnnnnnnnnnnnnnnnnnnnnnnnnnnnnnnnnnnnnnnnnnnnnnnnnnnnnnnnnnnnnnnnnnnnnnnnnnnnnnnnnnnnnnnnnnnnnnnnnnnnnnnnnnnnnnnnnnnnnnnnnnnnnnnnnnnnnnnnnnnnnnnnnnnnnnnnnnnnnnnnnnnnnnnnnnnnnnnnnnnnnnnnnnnnnnnnnnnnnnnnnnnnnnnnnnnnnnnnnnnnnnnnnnnnnnnnnnnnnnnnnnnnnnnnnnnnnnnnnnnnnnnnnnnnnnnnnnnnnnnnnnnnnnnnnnnnnnnnnnnnnnnnnnnnnnnnnnnnnnnnnnnnnnnnnnnnnnnnnnnnnnnnnnnnnnnnnnnnnnnnnnnnnnnnnnnnnnnnnnnnnnnnnnnnnnnnnnnnnnnnnnnnnnnnnnnnnnnnnnnnnnnnnnnnnnnnnnnnnnnnnnnnnnnnnnnnnnnnnnnnnnnnnnnnnnnnnnnnnnnnnnnnnnnnnnnnnnnnnnnnnnnnnnnnnnnnnnnnnnnnnnnnnnnnnnnnnnnnnnnnnnnnnnnnnnnnnnnnnnnnnnnnnnnnnnnnnnnnnnnnnnnnnnnnnnnnggtttcctgaaggtgcccatctggtggtaccagcttcagggtccctcaggacactgcaagagtcatcaggaccagaccaactgtacttcctctcggggtggagtttggagagccgctttcagccaaggtgnnnnnnnnnnnnnnnnnnnnnnnnnnnnnnnnnnnnnnnnnnnnnnnnnnnnnnnnnnnnnnnnnnnnnnnnnnnnnnnnnnnnnnnnnnggccatgaccttgcccccattcctggagttcggtgtcccgtccccagcccacctcagagcctggacagtggagaggaagcgcccaggcaggcttttacgaactgaccagcagccgctcaggnnnntcagggaatataaactaggacggagaattgagatctgcttagagccccttcagaaaggagaaaacttgg

SEQ ID NO: 34995 - DNA, 755 bp, Macaca Mulatta
ggaatgacaatagagagggttttagcaccctttgaatgagacagagtggctatactccacagagctcagctgaattcacattactaatacttatgaaagaattttacaaccaaataattcctgtggtgtgtgacatatctcatccactctactcagttattaatgttattatacagtggtggaaacgtgagattttacatcaagtaatagatttaatattttctagtaaataggtgttcttccaccagaaagtataaaaccatcatatatatacatacacatgtgtatatatatataattgtttttctctttcatgaatatgacaaaaagcaaatctgattgaggataacttaagctggctagaagtgttcgaatcacagaacaatggagctagcaaaatccttctcatagttgatggaactgaatccaggggcatatgacttgcccaaggctaccttagccattgtgggaactagaaatatctcctgcttcccattgttcctccttttcaattgtttgtgcttcagaacatttgatgctctctccccaagcagacccatttggctcggaatgccagagaacaaaattaactttctgggaattggagctccgtttgaatctaattattccctccaaatcctgattaaaagtggttttctaaaacagtcttggcttattattgagccctttgtcaactgtttaaaagtggttgcttggaaattagagattcaagaattgtcccccaatttttacct

SEQ ID NO: 34996 - DNA, 231 bp, Macaca Mulatta
cacctgtgcttccagcactggagcagtcaccagtggtcactctccacactggtgccagcagaagcctggccaagcccccaggacactgatttataatacaagcttcaaacactcctggactcctgcccggttctcaggctccctccttgggggcaaagctgccctgatactgtcaggtgcacagcctgaggacgaggctgagtattactgcttgctgcactatagtggtgc

SEQ ID NO: 34997 - DNA, 739 bp, Macaca Mulatta
aaatcacagatcctgacgtcgtttatttggaaaacaaacagccttcctcttcgcttctgggtaaacatcctgaagaaccctcagtttgtctttgacattaagaagacgccacacatagacggctgtttgtcagtgattgaccaggcattcatggatgcattttctctcacagagcagcaactagggaaggaagcaccaactaataagcttctctatgccaaggatatcccaacctacaaagaagaagtaaaatcttattacaaagcaatcagggatttgcctccattgtcatcctcagaaatggaagaatttttaactcaggaatctaagaaacacgaaaatgaatttaatgaagaagtggccttgacagaaatttacaaatacatcgtaaaatattttgatgagattctaaataaactagaaagagaacgagggctggaagaagctcagaaacaactcttgcatgtaaaagtcttatttgatgaaaagaagaaatgcaagtggatgtaagcactctggggcctggcttaatctggcaaagttcttcagacgacttgggagcaaaatggctgcttgagctactctgtgtcgttaatttcttgtttgcacataggttccactttgagcactgtctttttaagagaccaaggcacatgcacagctttaaaaaagcatatcaaccattgtgcctgtgtgtctactgtggggaacccttcttgtactcgagttgacgtggttg

SEQ ID NO: 34998 - DNA, 1233 bp, Macaca Mulatta
  misc_feature (1)...(1233): n = A,T,C or G
tcctgtgtctccaggaagtccaggaagatcattactgggagcagctggaaccctctctgcgaatgatgggnnnnnnnnnnnnnnnnnnnnnnnnnnnnnnnnnnnnnnnnnnnnnnnnnnnnnnnnnnnnnnnnnnnnnnnnnnnnnnnnnnnnnnnnnnnnnnnnnnnnnnnnnnnnnnnnnnnnnnnnnnnnnnnnnnnnnnnnnnnnnnnnnnnnnnnnnnnnnnnnnnnnnnnnnnnnnnnnnnnnnnnnnnnnnnnnnnnnnnnnnnnnnnnnnnnnnnnnnnnnnnnnnnnnnnnnnnnnnnnnnnnnnnnnnnnnnnnnnnnnnnnnnnnnnnnnnnnnnnnnnnnnnnnnnnnnnnnnnnnnnnnnnnnnnnnnnnnnnnnnnnnnnnnnnnnnnnnnnnnnnnnnnnnnnnnnnnnnnnnnnnnnnnnnnnnnnnnnnnnnnnnnnnnnnnnnnnnnnnnnnnnnnnnnnnnnnnnnnnnnnnnnnnnnnnnnnnnnnnnnnnnnnnnnnnnnnnnnnnnnnnnnnnnnnnnnnnnnnnnnnnnnnnnnnnnnnnnnnnnnnnnnnnnnnnnnnnnnnnnnnnnnnnnnnnnnnnnnnnnnnnnnnnnnnnnnnnnnnnnnnnnnnnnnnnnnnnnnnnnnnnnnnnnnnnnnnnnnnnnnnnnnnnnnnnnnnnnnnnnnnnnnnnnnnnnnnnnnnnnnnnnnnnnnnnnnnnnnnnnnnnnnnnnnnnnnnnnnnnnnnnnnnnnnnnnnnnnnnnnnnnnnnnnnnnnnnnnnnnnnnnnnnnnnnnnnnnnnnnnnnnnnnnnnnnnnnnnnnnnnnnnnnnnnnnnnnnnnnnnnnnnnnnnnnnnnnnnnnnnnnnnnnnnnnnnnnnnnnnnnnnnnnnnnnnnnnnnnnnnnnnnnnnnnnnnnnnnnnnnnnnnnnnnnnnnnnnnnnnnnnnnnnnnnnnnnnnnnnnnnnnnngatcacaggctgtatcgagatggaactctcaagctcctgggtcgtctctcccttctctctgaagagattctctgggctgccaatggcttacccaaccccttctgctcttcagaccacctctgcctgctagccagcttcgggatggaagtcaccgctccatgacggggctcccaggggaagagagcttctctttcagaagagctcactggatcagagactgtggaaaaatcccatgcttctggaaacttagatccaagaa

SEQ ID NO: 34999 - DNA, 796 bp, Macaca Mulatta
caggcacgccggagatgcaggctcccgtggccagtcgtcgaaagccacccagcgccttccgcgagtggaggctgctggggcctctccggagacccaccacccagctgcgcgccaaagtctccagcctgtcgcacaagatccgcgccgggggcgcgcagcgcgcagaggcagcgtgctcccagcgctcagaggtggaggccgtgtccctaggcgtcccccacgaggtggccgagggcgccgcctgccaggcctacgaattggccgactacagtaacctgcgggagactgatatttaaggaccccagagctaggccgcggagtgtgctgggcttgggggtaagggggactagagagggaggctggcgttgttctaagagaccccgtgcaaatcggagacccggaaactgatcagggcagctgctctgtggcatccctgaggaactgggtggagcttgaggctggagccctcgaaaggtgaaaagtaatggggccccctgctggactcaggtgcccagaactcttttcttagaagggaggggctgcgggctccgtggggccatttgctcccaatccctatttgagaaacactgccccatcctccatgccctgaaccctgagtagacagccccaagcatgcccaggaaggcctgcccctcctcttctggggaatgggcacagaagctttggccggctaccccagtgcctcccttagggaaaaagtcagtgggaccagggctcctcaatggacaaatttctcattgttactgccgactggaggaacccagtggacctacca

SEQ ID NO: 35000 - DNA, 758 bp, Macaca Mulatta
ttagctcttggtgccaatctcctcatcataatcaccattcaacatgagaccatgctacatgaacccatgtaccatttgctgggcatactggcagtggtggacattggcctggccaccaccatcatgcccaagatcctggccatcttctgatttgatgccaaggccatcagcctccatgagtgttttgctcagatctatgccatccactctttcatgtgcatggagtcaggcatcttcttttgcatggcagtggatagatatatgaccagttgttatccccttcagtacacttccatagttactgaagcttttgtcgtcaaagccacactgtcagtagtgctcaggaatggcctgttgaccatcccagtgccggtattggctgcccagcgatactactgctccaggaatgagattgatcactgcctgtgctctaacttgggggtcacaagtctggcctgtgatgacaccaccatcaacaggttttaccagctggccttggtctgggttgtggttgggagtgacatgggtctggtcttcgcttcctattctttgattattcgctcagtgctgaagctgaactctgctaaagcaacatctaaggccctgaatacctgcagctcccaccttatcctcattctctttttctacacagctattattgtagtatctgtcactcacctagaaggaagaagggttcccctcatccctattctcctcaatgtgctgcatattatcattcccccagcccttaaccccat

SEQ ID NO: 35001 - DNA, 1619 bp, Macaca Mulatta
  misc_feature (1)...(1619): n = A,T,C or G
agcgctgcacctgcaccagcagaaggagcggttcccggcccagccctaacgcctgagcctcggctgcccggtgctggactcgctcctccgcggtggcctgcctctggacggcatcacctaactggccggacgcagctcggtggggaagacccagctggcgctgcagctctgcctggctgtgcagtttccgcggcagcacggaggcctggaggctggnnnnnnnnnnnnnnnnnnnnnnnnnnnnnnnnnnnnnnnnnnnnnnnnnnnnnnnnnnnnnnnnnnnnnnnnnnnnnnnnnnnnnnnnnnnnnnnnnnnnnnnnnnnnnnnnnnnnnnnnnnnnnnnnnnnnnnnnnnnnnnnnnnnnnnnnnnnnnnnnnnnnnnnnnnnnnnnnnnnnnnnnnnnnnnnnnnnnnnnnnnnnnnnnnnnnnnnnnnnnnnnnnnnnnnnnnnnnnnnnnnnnnnnnnnnnnnnnnnnnnnnnnnnnnnnnnnnnnnnnnnnnnnnnnnnnnnnnnnnnnnnnnnnnnnnnnnnnnnnnnnnnnnnnnnnnnnnnnnnnnnnnnnnnnnnnnnnnnnnnnnnnnnnnnnnnnnnnnnnnnnnnnnnnnnnnnnnnnnnnnnnnnnnnnnnnnnnnnnnnnnnnnnnnnnnnnnnnnnnnnnnnnnnnnnnnnnnnnnnnnnnnnnnnnnnnnnnnnnnnnnnnnnnnnnnnnnnnnnnnnnnnnnnnnnnnnnnnnnnnnnnnnnnnnnnnnnnnnnnnnnnnnnnnnnnnnnnnnnnnnnnnnnnnnnnnnnnnnnnnnnnnnnnnnnnnnnnnnnnnnnnnnnnnnnnnnnnnnnnnnnnnnnnnnnnnnnnnnnnnnnnnnnnnnnnnnnnnnnnnnnnnnnnnnnnnnnnnnnnnnnnnnnnnnnnnnnnnnnnnnnnnnnnnnnnnnnnnnnnnnnnnnnnnnnnnnnnnnnnnnnnnnnnnnnnnnnnnnnnnnnnnnnnnnnnnnnnnnnnnnnnnnnnnnnnnnnnnnnnnnnnnnnnnnnnnnnnnnnnnnnnnnnnnnnncctctccctgggtctggggacaggcccggcttgctgggcacctggtccccaccgctgagctggtccttggggacaggtgattctcagggctggggcctgggggtgtccctacagtgactccctgggagtcccctgcttctgctgtccacatggaagcccacccggggtcgcgtcttaggccnnnnnnnnnnnnnnggcctcaggccccctcagccttggggccctgcccgcgaaggtctcccctcctacacgcagggctgtcttgactcccccaacccctcaggccacagcggggctgcaggcaggcagctcctcctcacccacctctgggtccttggatcccgggggccccaccccggcacacaccgtgccccacaaaacttcagtgtggtacaaggtggagaaagcatatcccaccgacctccagcttctgggtccaggagagcctggggttgggggggggctgccttgactctagtagtgtggcctgtgccagtaccacagccagacagaggggagcgggcagcgtggggctggcacgtgacaggctcgtcagtcacctgggaacacag

SEQ ID NO: 35002 - DNA, 630 bp, Macaca Mulatta
ctgcactggtgctcttcacctcacaggcctctcccctgtgtgcctccaacaggaagtgaatactctggctatgcctatggccacaccccctactcctcctacagcgaggcctggcgcttccccaactccagcttgctgagtaagtccctggggccgcccaggcctttgctgggcaggatggatggtgtggtggggggcaagggtgggtcaaaggttacctgaaagctgggaggcctcagattatacagacagcctgggaggtggtggtgtttgtaatggaagaaggcagcaggagggcagtgtacctggtggtttggggaaagagggcggaagtccagaggctcccaggcattggtttccctcctgcttcttaaggccgtgtcttttcaatctttgttttgtgtaagattcagggctcaggccttgaaggggagggcaggggaggacttgagaaaagcctaagagaggacctcctgcctccgcggcttacagtcccacagtgcagacactgacgccgggcaccctgccagaatgcaactgctctccttcctgggagccgatttcaagaatgccatcctgttgcccccattaaccatctaagtggctccgaaatactcatgattcagcacc

SEQ ID NO: 35003 - DNA, 1475 bp, Macaca Mulatta
  misc_feature (1)...(1475): n = A,T,C or G
ggganancgacaaggatcttgtgatctaaatccactccttccgcagtaccggattctctctctttaaccctccccttcctgtttcccccaatgtttaaaatgtttggatggtttgttgttctgcctggggacaaggtgctaacatagatttaagtgaatactttaacggtgctaaaaatgaaaattctaacccaagacatgacattcttagctgtaacttaactattaaggccttttccacactcattaatagtcccatttttctcttgccatttgtagctttgcccattgtcttattggcacatgggtggacatggatctgctgggctctgccttaaacacacattgcagcttcaacttttctctctagtattctgtttgaaactaatactcaccgagtcagactttgtgttcatttcatttcagggtattggctgcctgtgggcttccccaggtggcctgaaggtgggcaaagggaagtaacagacacacgatgttgtcaaggatggttttgggactagaggcccagtgatgggagaggtccctgcagaacccaccaaccagaacgtggtttgcctgaggctgtcactgagagaaagattctagggctgtgttatgaaaatatagacattctcacataagcccagttcgtcaccatttcctcctttacctttcagtgcagtttcttttcacactaggctgttggttcaaacttttgggagcatggactgtcagttctctgggaagtggtcagcgcatcctgcagggcttctcctcctctgtcttttggagaatcagggctcttctcaggggctctggggactgccaggctgtttcagccaggaaggccaaaatcaagagtgagatgtagaaagttgtaaaatagaaaaagtggagttagtgaattggttgttctttccccgcatttggacgactgtcataaggtttttagcatgttcctccttttcttcattctccctttttttcttctattaattaaaagaaacttcaaagttaatgggatggtcggatctcacaggctgagaactcgttcacctccaagcatttcatgaaaaagctgcttcttattaatcatacgaactctcatcatggtgtgaagagtttcacgaatctttcaaaataaaaagtaatgacttagaaactgncanannnnnannnnnnnnnnnnnnnnnnnnnnnnnnccgcctcgggccctcgaagaaccttcgtagaccatttcttttgggcgcgcggggcccagtagggtaagtggaacatggggcaatancctggttttcctaaggaaaatccctggggccatgaacctaagtggctttggggatttcctccccannnnnnnnnnnnnnnnnnnnngcgggcggggcaaaccccgaaagcggtttcttggaaccaaaaattccacagaagtggaaagttctctggagggggccatgtaaactgtggaaatcctaatt

SEQ ID NO: 35004 - DNA, 2506 bp, Macaca Mulatta
  misc_feature (1)...(2506): n = A,T,C or G
ggacgtctccttggggctggtcggttgcatccagagatgcctccctcaggggtnggtgtggcccctaccagaccccgcagacccgggcacttctcagcatggccatcttctccacgggcgtctgggtgacgggcatcttcttcttccgccaaaccctgaagctgcttctctcctaccatgggtggatgnnnnnnnnnnnnnnnnnnnnnnnnnnnnnnnnnnnnnnnnnnnnnnnnnnnnnnnnnnnnnnnnnnnnnnnnnnnnnnnnnnnnnnnnnnnnnnnnnnnnnnnnnnnnnnnnnnnnnnnnnnnnnnnnnnnnnnnnnnnnnnnnnnnnnnnnnnnnnnnnnnnnnnnnnnnnnnnnnnnnnnnnnnnnnnnnnnnnnnnnnnnnnnnnnnnnnnnnnnnnnnnnnnnnnnnnnnnnnnnnnnnnnnnnnnnnnnnnnnnnnnnnnnnnnnnnnnnnnnnnnnnnnnnnnnnnnnnnnnnnnnnnnnnnnnnnnnnnnnnnnnnnnnnnnnnnnnnnnnnnnnnnnnnnnnnnnnnnnnnnnnggaccttgtgctcatcaagaatacagacgtgcaggcagcccgcctgggaaacatcatccatgccatgatcatgtatcgccgtaaactggaccgtgaagaaatcaagcctgtgangtgatggcactaggcatagtgcccatgtgctcctatcagatggagagaatgttcaacaccactcgggtcccgggcaaggagacagnnnnnnnnnnnnnnnnnnnnnnnnnnnnnnnnnnnnnnnnnnnnnnnnnnnnnnnnnnnnnnnnnnnnnnnnnnnnnnnnnnnnnnnnnnnnnnnnnnnnnnnnnnnnnnnnnnnnnnnnnnnnnnnnnnnnnnnnnnnnnnnnnnnnnnnnnnnnnnnnnnnnnnnnnnnnnnnnnnnnnnnnnnnnnnnnnnnnnnnnnnnnnnnnnnnnnnnnnnnnnnnnnnnnnnnnnnnnnnnnnnnnnnnnnnnnnnnnnnnnnnnnnnnnnnnnnnnnnnnnnnnnnnnnnnnnnnnnnnnnnnnnnnnnnnnnnnnnnnnnnnnnnnnnnnnnnnnnnnnnnnnnnnnnnnnnnnnnnnnnnnnnnnnnnnnnnnnnnnnnnnnnnnnnnnnnnnnnnnnnnnnnnnnnnnnnnnnnnnnnnnnnnnnnnnnnnnnnnnnnnnnnnnnnnnnnnnnnnnnnnnnnnnnnnnnnnnnnnnnnnnnnnnnnnnnnnnnnnnnnnnnnnnnnnnnnnnnnnnnnnnnnnnnnnnnnnnnnnnnnnnnnnnnnnnnnnnnnnnnnnnnnnnnnnnnnnnnnnnnnnnnnnnnnnnnnnnnnnnnnnnnnnnnnnnnnnnnnnnnnnnnnnnnnnnnnnnnnnnnnnnnnnnnnnnnnnnnnnnnnnnnnnnnnnnnnnnnnnnnnnnnnnnnnnnnnnnnnnnnnnnnnnnnnnnnnnnnnnnnnnnnnnnnnnnnnnnnnnnnnnnnnnnnnnnnnnnnnnnnnnnnnnnnnnnnnnnnnnnnnnnnnnnnnnnnnnnnnnnnnnnnnnnnnnnnnnnnnnnnnnnnnnnnnnnnnnnnnnnnnnnnnnnnnnnnnnnnnnnnnnnnnnnnnnnnnnnnnnnnnnnnnnnnnnnnnnnnnnnnnnnnnnnnnnnnnnnnnnnnnnnnnnnnnnnnnnnnnnnnnnnnnnnnnnnnnnnnnnnnnnnnnnnnnnnnnnnnnnnnnnnnnnnnnnnnnnnnnnnnnnnnnnnnnnnnnnnnnnnnnnnnnnnnnnnnnnnnnnnnnnnnnnnnnnnnnnnnnnnnnnnnnnnnnnnnnnnnnnnnnnnnnnnnnnnnnnnnnnnnnnnnnnnnnnnnnnnnnnnnnnnnnnnnnnnnnnnnnnnnnnnnnnnnnnnnnnnnnnnnnnnnnnnnnnnnntagcagatgatggctatggagtttcctacatgatcgcgggtgagaacacgatcttcttccacatctccagcaagttctcaagctcagagacgnnncccagcgctttggaaaccacatccgccaagccctgctggacctcgctgatcttttccaagtgcccaagaccgacagctgaaggttggagaaataccagtcaccctttcatccccacactgtggaggaaaggacctgtggcggctcacaggcatgaggggtggccatgcacaggtgcccaggctccaaggacagctctggcagcaggtcctcactgggcagacgctgctccccgagggcccggttggtggaggtggggttggagcaggaagggaattttgannnnnnnnnnnttgatagatactaataaaaataaggctgtgtaattttctctcagcccttaggtacctgtgttttgtttgggaactaggaggccctccccctcccccagctcagaccacagaggtggcaagagaagggctgaagctggaagactgttcatgagggacttgtgtgacctgctttgaaatgtgtgactctgctgagtgacgt

SEQ ID NO: 35005 - DNA, 271 bp, Macaca Mulatta
  misc_feature (1)...(271): n = A,T,C or G
cagattcttacactgtatgacagtattaatgttatcgacgtaaataaagttgtggaatatgttaaaggtctacagaaagaagatggttcttttgctggagatatttgggnnnnnnnnnnnnnnnnnnnnnnnnnnnnnnnnnnnnnnnnnnnnnnnnnnngggaagcttgatgctattaatgtggaaaaggcaattgaatttgttttatcctgtatgaactttgatggtggatttggttgcagaccaggttctgaatcccatgctgggcag

SEQ ID NO: 35006 - DNA, 181 bp, Macaca Mulatta
aggatgatgccaataatgacccacagtggtctgaggaacagctgattgctgcaaaactttgcttcgctggacttgttataggccaaactgaagtggatatcatgagtcatgctacacaggctatatttgaaatactggagaaatcctggttgccccagaattgtacactggttgatatgaa

SEQ ID NO: 35007 - DNA, 730 bp, Macaca Mulatta
  misc_feature (1)...(730): n = A,T,C or G
agagcctaaggactcccgtcagcatccccataaataaancaccactgtttcgatgttgggagctgtcagtactaaaaagcacttccnttcttgctctgttctactgtggtagaaacattccctgtgtcctgggntgaagagtgtagaggaaaccagatgtgcctgggccgggatgatgcctttctgggtgaatgtgggcttcctgtaagagcagggcctgtcctccactgtttgctgaaattgctttgtttgctctttttccagagaacagggctttggcagagtcacagatgccattggagcagatcatcggaggtgaggacagcgtctgttgggaagcctgatctggaaccttcccaaggactcaggcaagcctttatggctggattgtgagaggagggactctgtcttgagccatgtccctcagccgtggcatagctgcaccataaacgccagtcaggggtcaccaggatcaaccgcaggctttcttcagtcccttggtcagactataaactgtgtttgtgattctttgtggattcaaaccctaggatccgtcagtcttgcaaggacattgaatattagggggaaaaagttatggaaaaaataaagccatttagaacctgggtttcaacgctagccctatatggtttgccacaggccctgcccagacgctgcaggtccttccaggcctgtgatacctgcatctccagtgggcttccccaggaacttg

SEQ ID NO: 35008 - DNA, 509 bp, Macaca Mulatta
cagagtggcgggcagaggagaggagatggcagcccctggagtctgtttccttatcagtctctgtgatgtaagaggtaggtaatggtggacttgggagcctaatactctgctccttcttcacccctcaggccattaagaatccaaaggctacgctgcgttacttccagcacctcctggggaagcaggcagataacccccacgtagctctttaccaggcccgcttcccggagcatgagctgactttcgacccacagaggcagactgtgcactttcagatcagcccgtgagtgttctgttggggaaggtggtctcagcaactctgctgggctcctcattggtgtgtgttcctgattgtgccgccttaatgcctgactttccttggctccaactaccttccctccccttaggcagctgcagttctcacctgaggaagtgttgggcatggttctcaattactctcgttctctagctgaagattttgcaggtgagtagtcaaggtggggcccttc

SEQ ID NO: 35009 - DNA, 381 bp, Macaca Mulatta
tctgcgacaagcagtgccttgctcggcccagaacgtgattgactatgggacttgtgtatgctgtgtgaaaggtctcttctatcactgttctaatgatgatgaggacaactgtgctgacaacccatgttcttgcagccagtctcactgttgtacacgatggtcggccatgggtgtcatgtccctctttttgccttgtttatggtgttaccttccagccaagggttgccttaaattgtgccaggggtgttatgaccgggttaacaggcctggatgccgttgtaaaaactcaaacacagtttgctgcaaagttcccactgtcccccccaggaactttgaaaaaccaacatagcatcattaatcaggaatattacagtaatgagg

SEQ ID NO: 35010 - DNA, 412 bp, Macaca Mulatta
tttttgtttggtatatttactaagtgcactcttttaaaacttattctataattttatgattcatgtgaattttagctcaattttcaaagttcactaatattctcagtatttaatgctaaatgctttgctacactgtaactaacctaaaaccttttagtgacaaattcctaatatgtggaaaaaagcatacacataaaggaataatattgtgaaaatgaatttgttatgataaagaaaaaataaagtggaaacttttagagtattacttcatagggcagattttgtaaactgtcgtatactgtaaagggttaaatcagcgttttgtgatttttaacagattttctgtgagtgaagtttattcttccaacaatgtctactccatacccaacccaactcacagccctatgactat

SEQ ID NO: 35011 - DNA, 656 bp, Macaca Mulatta
tcttccactcagatgacaagattctacagatcattacggaattgataaaaacagagaataattgacgctgaaattcatggtcaactgctttaaaaattaagatgaagatacagtcatgaaattatctgaaaatggatcatcacattaagtatttcattacttaaaatgttggtactagccattaacttaaaggtggtggggaaaaaagcacatactttaaatatgtgtaattttctagttcctttttaatgatgattattctgaatgtatttgccactacatttacaataaattctttggtatcgtccatgttttgctcatcgttgtgtgctttaagggcaaggcctatgtctgtggtatctgtagcttaatgttgtgattccctgtgtggctgcctcctcatctatcagtccttgatgtctgcagaatttaaaccctatagacccagaagggaaaataatctccaaaatcaattataattaaatttccatgaaaaggaacaacttcagaagtcagttatttagtatttgatactaaatttcaaaacctaaataagtgcactattaatagattccacctatttcagtaacattcagaaagcataaacatgtagttctggaggacaggcaggattgactaatactcctgtcagcctt

SEQ ID NO: 35012 - DNA, 818 bp, Macaca Mulatta
  misc_feature (1)...(818): n = A,T,C or G
gggtcttccggttctaggcgcttcgggagccgcggctaaaggtgcagacatggccaagtccaagaaccacaccacacacaaccagtcccgaaaatggcacagaaatggtatcaagaaaccccgatcacaaagatacgaatctcttaagggggtggaccccaagttcctgaggaacatgcgctttgccaagaagcacaacaagaagggcctaaagaagatgcaggccaacaatgccaaggccatgagtgcacgtgccgaggctgtcaaggccctcgtaaagcccaaggaggttaagcccaagatcccaaagggtgtcagccgcaagcttgatcgacttgcctacattgcccaccccaagcttgggaagcgtgctcgtgctcgcattgccaaggggctccggctgtgccggccaaaggccaaggccaaggccaaggatcaaaccaaggcccaggctgcagctccagcttcaattccagctcaggctcccaaaggtgcccaggccactacaaaggctacagagtaggtatctctgtctgccaacgtgaggacagaaggactggtgcgaccccccaccccccacctttggggctgcccatctgcatgggggctgggggtccctcctggtgctatttggtacaaataaaaactgagggcaggaaaaattacaaataaagnnnnnnnnnnnnnnnnnnngtgggccgccttcgggccctgaaaaaacttttctagaacaattccttttggggccgcggggccccattagggtaaaggtgaaaatggggcccaaaacctgggtttcccaaaggaaaaatccctgg

SEQ ID NO: 35013 - DNA, 835 bp, Macaca Mulatta
  misc_feature (1)...(835): n = A,T,C or G
gggctctctttcccatcttgcaagatggcgggtgaaaaagttgagaagccagatactaaagagaagaaacccgaagccaagaaggctgatgctggtggcaaggtgaaaaagggtaacctcaaggctaagaagcccaagaaggggaagccccattgcagccgcaaccctgtccttgtcagaggaattggcaggtattcccgatctgccatgtattccagaaaggccatgtacaagaggaagtactcagccgctaaatccaagnnnnnnnnnnnnnnnnnnnngaaggttcttgcaactcttacaaaaccagttggtggtgacaagaacggcggtacccgggtggttaaacttcgcaaaatgcctagatattatcctactgaagatgtacctcgaaagctgttgagccacggcaaaaaacccttcagtcagcacgtgagaaaactgcgagccagcattacccccgggaccattctgatcatcctcactggacgccacaggggcaagagggtggtttttctgaaacagctggctagtggcttgttacttgtgactggacctctggccctcatccagttcctcctccaagaacccaccaagaaattttgtcattgccaccttcacccaaatccgatatcagccacggctcacaatccccaaaaattcttacccgatgccttcccttccagaaaagaaaaaacctgtcggaaaggcccccaaccacccccgaaaatggggagatacttttccactcgcccaacatgcgacaaactcccatacatctccccgggacctagtcgccacagaatatgtgcctctcacaaacacgctgccgtgt

SEQ ID NO: 35014 - DNA, 4099 bp, Macaca Mulatta
  misc_feature (1)...(4099): n = A,T,C or G
atacgctggcagtgatgtctgtggacctgggcagtgagtccatgaaggtggccatcgtcaaacctggagtgcccatggaaattgtcttgaataagnggaatctcggaggaaaaccccagtgattgtgaccctgaaagaaaatgaaagattctttggagacagtgcagcaagcatggnnattaagaatccaaaggctacgctgcgttacttccagcacctcctggggaagcaggcagataacccccacgtagctctttaccaggcccgcttcccggagcatgagctgactttcgacccacagaggcagactgtgcactttcagatcagcnngcagctgcagttctcacctgaggaagtgttgggcatggttctcaattactctcgttctctagctgaagattttgcagnnnnnnnnnnnnnnnnnnnnnnnnnnnnnnnnnnnnnnnnnnnnnnnnnnnnnnnnnnnnnnnnnnnnnnnnnnnnnnnnnnnnnnnnnnnnnnnnnnnnnnnnnnnnnnnnnnnnnnnnnnnnnnnnnnnnnnnnnnnnnnnnnnnnnnnnnnnnnnnnnnnnnnnnnnnnnnnnnnncagaatatcatgttctatgacatgggctcgggcagcactgtatgcaccattgtgacctaccagatggtgaagactaaggaagctgggatgcagccgcagctgcagatccggggagnnnnnnnnnnnnnnnnnnnnnnnnnnnnnnnnnnnnnnnnnnnnnnnnnnnnnnnnnnnnnnnnnnnnnnnnnnnnnnnnnnnnnnnnnnnnnnnnnnnnnnnnnnnnnnnnnnnnnnnnnnnnnnnnnnnnnnnnnnnnnnnnnnnnnnnnnnnnnnnnnnnnnnnnnnnnnnnnnnnnnnnnnnnnnnnnnnnnnnnnnnnnnnnnnnnnnnnnnnnnnnnnnnnnnnnnnnnnnnnnnnnnnnnnnnnnnnnnnnnnnnnnnnnnnnnnnnnnnnnnnnnnnnnnnnnnnnnnnnnnnnnnnnnnnnnnnnnnnnnnnnnnnnnnnnnnnnnnnnnnnnnnnnnnnnnnnnnnnnnnnnnnnnnnnnnnnnnnnnnnnnnnnnnnnnnnnnnnnnnnnnnnnnnnnnnnnnnnnnnnnnnnnnnnnnnnnnnnnnnnnnnnnnnnnnnnnnnnnnnnnnnnnnnnnnnnnnnnnnnnnnnnnnnnnnnnnnnnnnnnnnnnnnnnnnnnnnnnnnnnnnnnnnnnnnnnnnnnnnnnnnnnnnnnnnnnnnnnnnnnnnnnnnnnnnnnnnnnnnnnnnnnnnnnnnnnnnnnnnnnnnnnnnnnnnnnnnnnnnnnnnnnnnnnnnnnnnnnnnnnnnnnnnnnnnnnnnnnnnnnnnnnnnnnnnnnnnnnnnnnnnnnnnnnnnnnnnnnnnnnnnnnnnnnnnnnnnnnnnnnnnnnnnnnnnnnnnnnnnnnnnnnnnnnnnnnnnnnnnnnnnnnnnnnnnnnnnnnnnnnnnnnnnnnnnnnnnnnnnnnnnnnnnnnnnnnnnnnnnnnnnnnnnnnnnnnnnnnnnnnnnnnnnnnnnnnnnnnnnnnnnnnnnnnnnnnnngtggagtctgtatttgagacactagtggaggacagcccagaagaggaatctactctcaccanaacttggcaacaccatttccagcctgtttggaggcggtaccacaccagatgccaaggagaacggtactgatactgtccaggnnnnnnnnnnnnnnnnnnnnnnnnnnnnnnnnnnnnnnnnnnnnnnnnnnnnnnnnnnnnnnnnnnnnnnnnnnnnnnnnnnnnnnnnnnnnnnnnnnnnnnnnnnnnnnnnnnnnnnnnnnnnnnnnnnnnnnnnnnnnnnnnnnnnnnnnnnnnnnnnnnnnnnnnnnnnnnnnnnnnnnnnnnnnnnnnnnnnnnnnnnnnnnnnnnnnnnnnnnnnnnnnnnnnnnnnnnnnnnnnnnnnnnnnnnnnnnnnnnnnnnnnnnnnnnnnnnnnnnnnnnnnnnnnnnnnnnnnnnnnnnnnnnnnnnnnnnnnnnnnnnnnnnnnnnnnnnnnnnnnnnnnnnnnnnnnnnnnnnnnnnnnnnnnnnnnnnnnnnnnnnnnnnnnnnnnnnnnnnnnnnnnnnnnnnnnnnnnnnnnnnnnnnnnnnnnnnnnnnnnnnnnnnnnnnnnnnnnnnnnnnnnnnnnnnnnnnnnnnnnnnnnnnnnnnnnnnnnnnnnnnnnnnnnnnnnnnnnnnnnnnnnnnnnnnnnnnnnnnnnnnnnnnnnnnnnnnnnnnnnnnnnnnnnnnnnnnnnnnnnnnnnnnnnnnnnnnnnnnnnnnnnnnnnnnnnnnnnnnnnnnnnnnnnnnnnnnnnnnnnnnnnnnnnnnnnnnnnnnnnnnnnnnnnnnnnnnnnnnnnnnnnnnnnnnnnnnnnnnnnnnnnnnnnnnnnnnnnnnnnnnnnnnnnnnnnnnnnnnnnnnnnnnnnnnnnnnnnnnnnnnnnnnnnnnnnnnnnnnnnnnnnnnnnnnnnnnnnnnnnnnnnnnnnnnnnnnnnnnnnnnnnnnnnnnnnnnnnnnnnnnnnnnnnnnnnnnnnnnnnnnnnnnnnnnnnnnnnnnnnnnnnnnnnnnnnnnnnnnnnnnnnnnnnnnnnnnnnnnnnnnnnnnnnnnnnnnnnnnnnnnnnnnnnnnnnnnnnnnnnnnnnnnnnnnnnnnnnnnnnnnnnnnnnnnnnnnnnnnnnnnnnnnnnnnnnnnnnnnnnnnnnnnnnnnnnnnnnnnnnnnnnnnnnnnnnnnnnnnnnnnnnnnnnnnnnnnnnnnnnnnnnnnnnnnnnnnnnnnnnnnnnnnnnnnnnnnnnnnnnnnnnnnnnnnnnnnnnnnnnnnnnnnnnnnnnnnnnnnnnnnnnnnnnnnnnnnnnnnnnnnnnnnnnnnnnnnnnnnnnnnnnnnnnnnnnnnnnnnnnnnnnnnnnnnnnnnnnnnnnnnnnnnnnnnnnnnnnnnnnnnnnnnnnnnnnnnnnnnnnnnnnnnnnnnnnnnnnnnnnnnnnnnnnnnnnnnnnnnnnnnnnnnnnnnnnnnnnnnnnnnnnnnnnnnnnnnnnnnnnnnnnnnnnnnnnnnnnnnnnnnnnnnnnnnnnnnnnnnnnnnnnnnnnnnnnnnnnnnnnnnnnnnnnnnnnnnnnnnnnnnnnnnnnnnnnnnnnnnnnnnnnnnnnnnnnnnnnnnnnnnnnnnnnnngtagggagagaatggctgccagtggttgatgggtcctggccattggaagggtatctggggttgctggggagtttccactcctctctggtgatccttccttccctcccttcctctcccaccattcgatcagcattctttcaggccagtgtcttcagagcctcggttaccaggtttggtttccgagtgcctatctgtactctttcctccctctgcgggcttctctttccctgagcctccctcccccgttcccatccagcttctttcccgctgggtttccttggcttcctgctgcaaattgggcagttctctgccccttgcctaaaaacctgtacctctggattggtggaagtaaatctggaaggattctcactcgtatttccgacccctagtggccagaggagggagggacacagtgaagaagggagtccaccacctctccaaagaggaaagccacgtagagaggttggcatggggtgcccacatcctgcaagctctgtcataatctgcatctttccagcagcctggtaccccaggttcctgtaactccctgcctcctcctctcttctgctgttctgctcctcccagacagagcctttccctcaccccctgacccctgggctgaccaaatgtgctttctactgtgagcccctatcccaaggtcctggggaaaggagagaccatggcgtgaatgtagagatgccacctccctctcttcgaggcaggcctgtggatgaaggaggagggtcagggctggccttcctctgtgcatcgctctgctaggatggggacccctgacccaccatgcctatgcctagggagcccgtctccagtattccgtctgtagcagaagctagggctgccaccccaggtccacgacaagaatgaacctgg

SEQ ID NO: 35015 - DNA, 401 bp, Macaca Mulatta
ctgtctgcatattgcatagccttgtcctcctgtgtgcctgagctcctcccttttcagtaagattattagtcctgcatgtctgtgagctgcctttcatcaccacttttcctgagtggggcttaattttattttggaaagatatctccaagatgaggtccacccccacagcagcagatctcaagtagaaattgcccatttgttaccagctggagggacacccctgggtttttgtacaaagctatttgatgagcctgagccttggggactcagcaggctggagcttggggcctggtggaccatcacctggtgtctgtaagtggacccagtctcccacaggtgatatcaacctgaggggggcatctttagaggcaggcacatgggcagccctgttcccttcgcct

SEQ ID NO: 35016 - DNA, 808 bp, Macaca Mulatta
  misc_feature (1)...(808): n = A,T,C or G
ggggtcgtcatcgttgcccgaccgctttccggagactgtagtcgaaggccctgagtcagccataatggcaggtgaagaaattaatgaagactatccagtagaaattcatgagtatttgtcagcgtttgagaattccattggtgctgtggatgagatgctgaagaccatgatgtctgtttctagaaatgagttgttgcagaagttggacccacttgaacaagcaaaagtggatttggtttctgcatacacattaaattcaatgttttgggtttatttggcaactcaaggagttaatcctaaggaacatccagtaaaacaggaattggaaagaatcagagtatatatgaacagagtcaaggaaataacagacaagaaaaaggctggcaagctggacagaggtgcagcttcaagatttgtaaaaaatgccctctgggaaccaaaaccaagaaatgcatcaaaagttgccaataaaggaaaaagtaaaagttaactttttggttttgatgtacacatattcaaaaagtacnnnnnnnnnnnnnnnnnnnnccacaaaataattctgtggcaggacaaggtttaaatgtatttcttattgaattaatatgtaaatttacagtaaatatgtaaagctaaatactttccctttccaaagattgttatctttattggatttgcactgaggattttaacattggggaaatatttatatatttaataatttaccatctccttttgatgaagaccctctaatttcctttaaaaaagggtcaatcttgccaaataaccatttttttaagcagctgtggaa

SEQ ID NO: 35017 - DNA, 585 bp, Macaca Mulatta
  misc_feature (1)...(585): n = A,T,C or G
tggtttcttctgagctgactcaggaccctgcagtgtctgtggccttgggacagacagtcaggatcacttgccaaggagacagcctcagaagctattatgcaagctggtaccagcagaagccaggccaggcccctgtgctggtcgtctatggtaacaacaaccggccctcagggatcccagagtgattctctggctccagctcaggaaacacagcttccttgaccatcactggggctcaggtggaagatgaggctgactattactgtgactcctgggacagcagnnnnnnnnnnnnnnnnnnnnnnnnnnnnnnnnnnnnnnnnnggtcagcccaaggctgccccctcggtcactctcttcccgccctcctctgaggagcttcaagccaacaaggccacactagtgtgtctgatcagtgacttctacccgggagccgtggaagtggcctggaaggcagatggcagcgctgtcaacgcgggagtggagaccaccaaaccctccaaacagagcaacaacaagtacgcggccagcagctacctgagcctgacgtccgaccagtggaagtcccacaagagctacagctgc

SEQ ID NO: 35018 - DNA, 1039 bp, Macaca Mulatta
  misc_feature (1)...(1039): n = A,T,C or G
ctgtaatcccagcactttgggaggccgaggcgggcggatcacgaggtcaggagatcgagaccatcctggctaacacgagagatcccgtctctactaaaaatannnnnnnnnnnnnnnnnnnnnnnnnnnnnnnnnnnnnnnnnnnnnnnnnnnnnnnnnnnnnnnnnnnnnnnnnnnnnnnnnnnnnnnnnnnnnnnnnnnnnnnnnnnnnnnnnnnnnnnnnnnnnnnnnnnnnnnnnnnnnnnnnnnnnnnnnnnnnnnnnnnnnnnnnnnnnnnnnnnnnnnnnnnnnnnnnnnnnnnnnnnnnnnnnnnnnnnnnnnnnnnnnnnnnnnnnnnnnnnnnnnnnnnnnnnnnnnnnnnnnnnnnnnnnnnnnnnnnnnnnnnnnnnnnnnnnnnnnnnnnnnnnnnnnnnnnnnnnnnnnnnnnnnnnnnnnnnnnnnnnnnnnnnnnnnnnnnnnnnnnnnnnnnnnnnnnnnnnnnnnnnnnnnnnnnnnnnnggcagcactgggctctggggtcagtttggtcttgaagctgggttggggacagggaaaatttgcagctcaaagactgtaaaactgaagctgtgaggccgaggggcctaaggccctgacacccggccccccggcccatgtcctcacttgcagctgttcgcagtgggtggtttcgacggcctgaggcgcttgcacagcgtggagcgctatgaccccttctccaacacctgggcggccgccgcgcccctcccggaggccgtgagctcagcggcggtggcatcctgcgcgggccagctcttcgtgatcgggggcgccaggcagggcggtgtcaacacggacaaggtnnnnnnnnnnnnnnnnnnnnnnnnnnnnnnncctgcggtcccagcacccttctcacagcgctgtctcgaggccatctcctttgaggacaccatctatgtcatgtggggtctcatgagcaaaatcttcacctatgatccaggcacagatgtgtggggggaggcagctgtcctccccagtcctgtggtaagtggaggcttca

SEQ ID NO: 35019 - DNA, 991 bp, Macaca Mulatta
  misc_feature (1)...(991): n = A,T,C or G
ctaaccggcctcctgcaaagctcaacctgctaacctgccaggtgaagaccaaccctgaggagaagaagtgctttgaccttatttcacnnnnnnnnnnnnnnnnnnnnnnnnnnnnnnnnnnnnnnnnnnnnnnnnnnnnnnnnnnnnnnnnnnnnnnnnnnnnnnnnnnnnnnnnnnnnnnnnnnnnnnnnnnnnnnnnnnnnnnnnnnnnnnnnnnnnnnnnnnnnnnnnnnnnnnnnnnnnnnnnnnnnnnnnnnnnnnnnnnnnnnnnnnnnnnnnnnnnnnnnnnnnnnnnnnnnnnnnnnnnnnnnnnnnnnnnnnnnnnnnnnnnnnnnnnnnnnnnnnnnnnnnnnnnnnnnnnnnnnnnnnnnnnnnnnnnnnnnnnnnnnnnnnnnnnnnnnnnnnnnnnnnnnnnnnnnnnnnnnnnnnnnnnnnnnnnnnnnnnnnnnnnnnnnnnnnnnnnnnnnnnnnnnnnnnnnnnnnnnnnnnnnnnnnnnnnnnnnnnnnnnnnnnnnnnnnnnnnnnnnnnnnnnnnnnnnnnnnnnnnnnnnnnnnnnnnnnnnnnnnnnnnnnnnnnnnnnnnnnnnnnnnnnnnnnnnnnnnnnnnnnnnnnnnnnnnnnnnnnnnnnnnnnnnnnnnnnnnnnnnnnnnnnnnnnnnnnnnnnnnnnnnnnnnnnnnnnnnnnnnnnnnnnnnnnnnnnnnnnnnnnnnnnnnnnnnnnnnnnnnnnnnnnnnnnnnnnnnnnnnnnnnnnnnnnnnnnnnnnnnnnnnnnnnnnnnnnnnnnnnnnnnnnnnnnnnnnnnnncagtgggaacctggataaacagacagggaaaggcagcacggccctgcactactgctgcctgaccgacaatgccgagtgcctcaagttgctcctgcgagggaaggcctccatcgagatannnnnnnnnnnnnnnnnnnnnnnnngacattgccaagcgcctcaagcatgtagcactgtgaggagctg

SEQ ID NO: 35020 - DNA, 836 bp, Macaca Mulatta
  misc_feature (1)...(836): n = A,T,C or G
gaaagagatgacgagcaggatgtgtcactaatgcttcacctcaccctttggaagaaaggaaagctgtttcctcctggagccctgagcgggcaggaggtggaccaccctggcttaaatgacacacctattcccaggagcagcagaggtggaggcaagcagtgactcctgagagacagtccccactcactttgtgtgctcttaaccttctgagtgccgctagcccagacctgtggaccaagcagaccgcaacgtgaaagaaggaccagccccttgattgttctggctggggaattgtccacgaggaagcctctgcacttccacacatggcacagttctgcctgtgacctgccgcctaagctttactggaattcaggttttgagactgagatgcttgtttgtatttttccacttatctgtcttgtcagctggccgacttctctgtgattggttttctaagtgccgggtgaattttggacctctggatgtgcagcaagtttttatgcaataaaccttcctttcaggcctctaaaagctcctgctctggtctgtggtttaacactgtgcagggctgtggagctctgagagacctgannnnnnnnnnnnnnnnnnnnnnnnnactgtccctgccgaggcatccatagtatttccctaataagtagttttatcagggacactccatggggtggcttgtctctgccccaaaacagggtcttcacattctaactgcagggaagagactggttactagcgtcaagctgacaagttaccagttcacctgatcagaatgtattttttataaccaccgtcattctttgtctcttcagttgaagatattc

SEQ ID NO: 35021 - DNA, 1623 bp, Macaca Mulatta
  misc_feature (1)...(1623): n = A,T,C or G
acagggcatctcgggcaagagactccaatatggtgagggcagcagcagagctggccgtgagctgcctgcctcatgcccatgcattgaaccataatgagatccagcgggccctggtgcagtgcaaggaacagnnnnnnnnnnnnnnnnnnnnnnnnnnnnnnnnnnnnnnnnnnnnnnnnnnnnnnnnnnnnnnnnnnnnnnnnnnnnnnnnnnnnnnnnnnnnnnnnnnnnnnnnnnnnnnnnnnnnnnnnnnnnnnnnnnnnnnnnnnnnnnnnnnnnnnnnnnnnnnnnnnnnnnnnnnnnnnnnnnnnnnnnnnnnnnnnnnnnnnnnnnnnnnnnnnnnnnnnnnnnnnnnnnnnnnnnnnnnnnnnnnnnnnnnnnnnnnnnnnnnnnnnnnnnnnnnnnnnnnnnnnnnnnnnnnnnnnnnnnnnnnnnnnnnnnnnnnnnnnnnnnnnnnnnnnnnnnnnnnnnnnnnnnnnnnnnnnnnnnnnnnnnnnnnnnnnnnnnnnnnnnnnnnnnnnnnnnnnnnnnnnnnnnnnnnnnnnnnnnnnnnnnnnnnnnnnnnnnnnnnnnnnnnnnnnnnnnnnnnnnnnnnnnnnnnnnnnnnnnnnnnnnnnnnnnnnnnnnnnnnnnnnnnnnnnnnnnnnnnnnnnnnnnnnnnnnnnnnnnnnnnnnnnnnnnnnnnnnnnnnnnnnnnnnnnnnnnnnnnnnnnnnnnnnnnnnnnnnnnnnnnnnnnnnnnnnnnnnnnnnnnnnnnnnnnnnnnnnnnnnnnnnnnnnnnnnnnnnnnnnnnnnnnnnnnnnnnnnnnnnnnnnnnnnnnnnnnnnnnnnnnnnnnnnnnnnnnnnnnnnnnnnnnnnnnnnnnnnnnnnnnnnnnnnnnnnnnnnnnnnnnnnnnnnnnnnnnnnnnnnnnnnnnnnnnnnnnnnnnnnnnnnnnnnnnnnnnnnnnnnnnnnnnnnnnnnnnnnnnnnnnnnnnnnnnnnnnnnnnnnnnnnnnnnnnnnnnnnnnnnnnnnnnnnnnnnnnnnnnnnnnnnnnnnnnnnnnnnnnnnnnnnnnnnnnnnnnnnnnnnnnnnnnnnnnnnnnnnnnnnnnnnnnnnnnnnnnnnnnnnnnnnnnnnnnnnnnnnnnnnnnnnnnnnnnnnnnnnnnnnnnnnnnnnnnnnnnnnnnnnnnnnnnnnnnnnnnnnnnnnnnnnnnnnnnnnnnnnnnnnnnnnnnnnnnnnnnnnnnnnnnnnnnnnnnnnnnnnnnnnnnnnnnnnnnnnnnnnnnnnnnnnncagtacatccaccaccgcttgattcacctgactcctgcggactacgacgactttgtgaatgcgatccggagcgcccgcagcgccttctgcctgacgcccatgggcatgatgcagttcaacgacatcctacagaacctcaagcgcagcaaacagaccaaggagctgtggcagcgggtctcactcgagatggccaccttctccccctgagtctttcacctgtagggtcctatacagggacccaggcctgtggctatgggggcccctcacacagggggagtgaagcttggcttttctggtggatcaacactcagttccctggtagcccagactgacagctgctcttgggc

SEQ ID NO: 35022 - DNA, 313 bp, Macaca Mulatta
actgtcctctgggagagaggtgctgcatgggcccctccccgcctgctaaggagactcctccttttccaggtggttgaacaggccctgaacgtgaggacagaatgacttggtttctccagaaactggaagcctcatgggctgaggaactgcctcccacccacagcagaacccggtggacataatcctttctcctcatggctgccctgactctctgaagtggcttgggactctgggctgactgtgggggacacatggccatcttgagcatcacacagactggcgggccgtgctgcaaccatgtccttcctgcagt

SEQ ID NO: 35023 - DNA, 513 bp, Macaca Mulatta
gatgacatcaccagcgcagagtcggagagcagcgaggaggaggagggggagcagggcgacccccagaaacgcgacccggcagcagcagctggagtgggatgactccaccctcagctactgacccgcgcccccggccatcttggtttctgcttccaaagactctgctgccatctgttctcccagtcccaagggtccacgatgtacaaagtcatttcagccagtaggtgtgcagacccctccccgccacgatcgtcgccgtgcttggtgtgtaggaccctaggctcccgcctgccctctgcctggtcgctctcttcagtcccacgaggagccgacacgtcctctctggccgccatccggctcgcacaggggcctcgcagcgcctcaggccctgcatttgtgtctggagtctcccccgccccggggagaggacgctggcccctcacactccagaaaagccatgccagctggactcgttgacaaagggtaaaacatgctcactcccacccggtaatc

SEQ ID NO: 35024 - DNA, 82 bp, Macaca Mulatta
tacatgcctgcaacatcagctatgcaaggagcctacttgccacagtatgcacacatgcagacgacagcggttcctgttgagg

SEQ ID NO: 35025 - DNA, 787 bp, Macaca Mulatta
gatcgaacggttggaagtaagcagccttgcccaaacgtccagtgcagtggcctccagtaccgatggcagcatccacacagactctgtggatggaacaccagaccctcagcgcacaaaggctgccattgctcacctgcagcagaagatcctgaagctcacagaacaaatcaagattgcacaaacagcccgggacgacaacgttgctgaatacttgaagcttgccaacagcgcagacaaacagcaggctgcccgcatcaagcaggtctttgagaagaagaaccagaaatcggcccaaactatcctccagctgcaaaagaaacttgagcactaccacaggaagctcagagaggtggagcagaatgggatcccccggcagccaaaggatgtcttcagggacatgcaccagggtctgaaggatgtgggagcaaaggtgactggcttcagtgaaggtgtggtggatagtgtcaaaggtgggttttccagcttctcccaagccacccattcagcagcaggcgctgtagtctcaaagccaagagagattgcctcactcattcggaacaaatttggcagtgcagacaacatccccaacctaaaggactctttagaggaagggcaagtggatgatgcggggaaggctttgggagtgatttcgaactttcagtctagcccaaaatatggtagtgaaagaagattgtttctagtgcacttcaggctcagtggggagccaacagcaccacaggggggcatcgcttgtaggagcatcaagcctccaaaaccaaacaccctg

SEQ ID NO: 35026 - DNA, 4460 bp, Macaca Mulatta
  misc_feature (1)...(4460): n = A,T,C or G
ggagaatgtgtgcaagtgtggctatgcccagagccagcacatggagggcacccagatcaaccaaagcgagaaatggaactacaagaaacacaccaaggaatttcctacggacgcctttggggatattcagtttgagacactggggaagaaagggaaagtatatccgtctgtcctgcgacacggacgcagaaatcctctacgagctgctgacccagcactggcacctgaaaacacccaacctggtcatttccgtgaccgggggcgccaagaacttcgccctgaagccgcgcatgcgcaagatcttcagccggctcatctacatcgcgcagtccaaaggtnnnnnnnnnnnnnnnnnnnnnnnnnnnnnnnnnnnnnnnnnnnnnnnnnnnnnnnnnnnnnnnnnnnnnnnnnnnnnnnnnnnnnnnnnnnnnnnnnnnnnnnnnnnnnnnnnnnnnnnnnnnnnnnnnnnnnnnnnnnnnnnnnnnnnnnnnnnnnnnnnnnnnnnnnnnnnnnnnnnnnnnnnnnnnnnnnnnnnnnnnnnnnnnnnnnnnnnnnnnnnnnnnnnnnnnnnnnnnnnnnnnnnnnnnnnnnnnnnnnnnnnnnnnnnnnnnnnnnnnnnnnnnnnnnnnnnnnnnnnnnnnnnnnnnnnnnnnnnnnnnnnnnnnnnnnnnnnnnnnnnnnnnnnnnnnnnnnnnnnnnnnnnnnnnnnnnnnnnnnnnnnnnnnnnnnnnnnnnnnnnnnnnnnnnnnnnnnnnnnnnnnnnnnnnnnnnnnnnnnnnnnnnnnnnnnnnnnnnnnnnnnnnnnnnnnnnnnnnnnnnnnnnnnnnnnnnnnnnnnnnnnnnnnnnnnnnnnnnnnnnnnnnnnnnnnnnnnnnnnnnnnnnnnnnnnnnnnnnnnnnnnnnnnnnnnnnnnnnnnnnnnnnnnnnnnnnnnnnnnnnnnnnnnnnnctcaaagaaattcttgaaagttctcacctattaacagttattaaaatggaagaagctggggacgaaattgtgagcaatgccatctcctacgctctnnnnnnnnnnnnnnnnnnnnnnnnnnnnnnnnnnnnnnnnnnnnnnnnnnnnnnnnnnnnnnnnnnnnnnnnnnnnnnnnnnnnnnnnnnnnnnnnnnnnnnnnnnnnnnnnnnnnnnnnnnnnnnnnnnnnnnnnnnnnnnnnnnnnnnnnnnnnnnnnnnnnnnnnnnnnnnnnnnnnnnnnnnnnnnnnnnnnnnnnnnnnnnnnnnnnnnnnnnnnnnnnnnnnnnnnnnnnnnnnnnnnnnnnnnnnnnnnnnnnnnnnnnnnnnnnnnnnnnnnnnnnnnnnnnnnnnnnnnnnnnnnnnnnnnnnnnnnnnnnnnnnnnnnnnnnnnnnnnnnnnnnnnnnnnnnnnnnnnnnnnnnnnnnnnnnnnnnnnnnnnnnnnnnnnnnnnnnnnnnnnnnnnnnnnnnnnnnnnnnnnnnnnnnnnnnnnnnnnnnnnnnnnnnnnnnnnnnnnnnnnnnnnnnnnnnnnnnnnnnnnnnnnnnnnnnnnnnnnnnnnnnnnnnnnnnnnnnnnnnnnnnnnnnnnnnnnnnnnnnnnnnnnnnnnnnnnnnnnnnnnnnnnnnnnnnnnnnnnnnnnnnnnnnnnnnnnnnnnnnnnnnnnnnnnnnnnnnnnnnnnnnnnnnnnnnnnnnngctgtagagctcttcactgagtgttacagcagcgatgaagacttggcagaacagctgctggtctattcctgtgaagcctggggtggaagcaactgtctggagctggcggtggaggcaacggaccagcatttcatcgcccagcctggggtccangaattttctttctaagcaatggtatggagagatttcacgagacaccaagaactggaagattatcctgtgtctctttattatacccttggtgggctgtggctttgtatcatttaggnnnnnnnnnnnnnnnnnnnnnnnnnnnnnnnnnnnnnnnnnnnnnnnnnnnnnnnnnnnnnnnnnnnnnnnnnnnnnnnnnnnnnnnnnnnnnnnnnnnnnnnnnnnnnnnnnnnnnnnnnnnnnnnnnnnnnnnnnnnnnnnnnnnnnnnnnnnnnnnnnnnnnnnnnnnnnnnnnnnnnnnnnnnnnnnnnnnnnnnnnnnnnnnnnnnnnnnnnnnnnnnnnnnnnnnnnnnnnnnnnnnnnnnnnnnnnnnnnnnnnnnnnnnnnnnnnnnnnnnnnnnnnnnnnnnnnnnnnnnnnnnnnnnnnnnnnnnnnnnnnnnnnnnnnnnnnnnnnnnnnnnnnnnnnnnnnnnnnnnnnnnnnnnnnnnnnnnnnnnnnnnnnnnnnnnnnnnnnnnnnnnnnnnnnnnnnnnnnnnnnnnnnnnnnnnnnnnnnnnnnnnnnnnnnnnnnnnnnnnnnnnnnnnnnnnnnnnnnnnnnnnnnnnnnnnnnnnnnnnnnnnnnnnnnnnnnnnnnnnnnnnnnnnnnnnnnnnnnnnnnnnnnnnnnnnnnnnnnnnnnnnnnnnnnnnnnnnnnnnnnnnnnnnnnnnnnnnnnnnnnnnnnnnnnnnnnnnnnnggtaccacgtatgactttgcccactgcaccttcactgggaatgagtccaagccactgtgcgtggagctggatgagcacaacctgccccggttccctgagtggatcaccatccccctggtgtgcatctacatgttatccaccaacatcctgctggtcaacctgctggtcgccatgtttgnnnnnnnnnnnnnnnnnnnnnnnnnnnnnnnnnnnnnnnnnnnnnnnnnnnnnnnnnnnnnnnnnnnnnnnnnnnnnnnnnnnnnnnnnnnnnnnnnnnnnnnnnnnnnnnnnnnnnnnnnnnnnnnnnnnnnnnnnnnnnnnnnnnnnnnnnnnnnnnnnnnnnnnnnnnnnnnnnnnnnnnnnnnnnnnnnnnnnnnnnnnnnnnnnnnnnnnnnnnnnnnnnnnnnnnnnnnnnnnnnnnnnnnnnnnnnnnnnnnnnnnnnnnnnnnnnnnnnnnnnnnnnnnnnnnnnnnnnnnnnnnnnnnnnnnnnnnnnnnnnnagcttaatgatctcaagggtcttctgaaagaaattgctaataaaataaaataaaactgtatgaactctaatggagaaaatctaattatagcaagnnnnnnnnnnnnnnnnnnnnnnnnnnnnnnnnnnnnnnnnnnnnnnnnnnnnnnnnnnnnnnnnnnnnnnnnnnnnnnnnnnnnnnnnnnnnnnnnnnnnnnnnnnnnnnnnnnnnnnnnnnnnnnnnnnnnnnnnnnnnnnnnnnnnnnnnnnnnnnnnnnnnnnnnnnnnnnnnnnnnnnnnnnnnnnnnnnnnnnnnnnnnnnnnnnnnnnnnnnnnnnnnnnnnnnnnnnnnnnnnnnnnnnnnnnnnnnnnnnnnnnnnnnnnnnnnnnnnnnnnnnnnnnnnnnnnnnnnnnnnnnnnnnnnnaacatctctcctaatgaataagaacctggtcatgctctgtactgtgtctttgtttatttccaattgattgtctacctttcccttttttgtattatgtgactgattagttggcatattcttaaaagtctcccaaattaggccagattctgaaacatgccgcagcaagaggaccctgctgtcttcaggaaaagtgttttcatttctcaggatgcttcttacctgtcagaggagtgacgaggcagtctcttgctctcttggactcaccaggctcctattaaaggaatcatccccattcctaaatatgtgaaaagtcacccaaaatcaaccttgaaaggcactactgactttgttcttattggatactcctcttatttattatttttttcattaaaaataatagctggctattatagaaaatttagaccatgtagagatgtagaaagaacctacattgtcccccattaccttaaggtaatcactgctaacaatttctggatgatttttccagtctattttttttctatgtatgcctcaattatcttacaaaattttacagaatattatcatactacatatatacttttatgtaagctttttcacttaatattttatcaaagatgtttttattgtattcatagccttcttaaacattatatcaataattgcataataggcaacctctagtgatttccataattttgctcattgaagactgtttccaattgataattggatgagcatctttgtgcatgaatctttttgctgtatttgggaaaattttccaaggttagattccaagaaatatttatnnnnnnnnnnnnnnnnnnnnnnnnnnntatttattattaaaccatttataaggctttttcgtaaatgtatagcaaataggaattattaacttgagcataagatatgagatacaagagcctaaactattaaaataaaatataatatttaaccctataggtaagaagaagtcaatatgcttatt

SEQ ID NO: 35027 - DNA, 912 bp, Macaca Mulatta
  misc_feature (1)...(912): n = A,T,C or G
gggattccagcggcggacagcacccgggccgagatgtctcgctcagtggccttagccgtgctggcgctactctctctttctggcctggaggctatccagcgtactccaaagattcaggtttactcacgccatccaccagagaatggaaagccaaatttcctgaattgctatgtgtctggatttcatccatctgatattgaagttgacttactgaagaatggagagaaaatgggaaaagtggagcattcagacttgtctttcagcaaagactggtctttctatctcttgtactacactgaattcacccccaatgaaaaagatgagtatgcctgccgtgtgaaccatgtgactttgtcagggcccaggacagttaagtgggatcgagacatgtaagcagcatcatggaggtttgaagatgccgcatttggattggatgaattccaaattctgcttccttgctttttaatattgatatgcttatacagtttatgcaaaaaatgcagagttataataatgttaacacagcagatcttctttatattctacttgagtgctatctcctgttgagatctgcgcactttgagctgactagggattcatgtctcttattgcatactactccatgaatagcaatatcatccgctatggatatggtgttgatatttattcagaacnnnnnnnnnnnnnnnnnnnnnnnnnnnnnnnnnnnnnnnnnnnnnnnnnnnnnnnnnnnnnnnnnnnnnnnnnntnnnnnnnnnnnnnnnnnntnnnnnnaaaannnaananannaaaaaaataagataattttataaattataaataataattaaaantattctttaattttaaannnnnnnnnnnnnnnnnnnnnnnnnnnnnnnnnnnnnnnnnnnnngannnnnnnnnnnnncc

SEQ ID NO: 35028 - DNA, 854 bp, Macaca Mulatta
  misc_feature (1)...(854): n = A,T,C or G
ctctggggaccagtgagcagatctgggacaannnnnnnnnnnnnnnnnnnnnnnnnnnnnnnnnnnnnnnnnnnnnnnnnnnnnnnnnnnnnnnnnnnnnnnnnnnnnnnnnnnnnnnnnnnnnnnnnnnnnnnnnnnnnnnnnnnnnnnnnnnnnnnnnnnnnnnnnnnnnnnnnnnnnnnnnnnnnnnnnnnnnnnnnnnnnnnnnnnnnnnnnnnnnnnnnnnnnnnnnnnnnnnnnnnnnnnnnnnnnnnnnnnnnnnnnnnnnnnnnnnnnnnnnnnnnnnnnnnnnnnnnnnnnnnnnnnnnnnnnnnnnnnnnnnnnnnnnnnnnnnnnnnnnnnnnnnnnnnnnnnnnnnnnnnnnnnnnnnnnnnnnnnnnnnnnnnnnnnnnnnnnnnnnnnnnnnnnnnnnnnnnnnnnnnnnnnnnnnnnnnnnnnnnnnnnnnnnnnnnnnnnnnnnnnnnnnnnnnnnnnnnnnnnnnnnnnnnnnnnnnnnnnnnnnnnnnnnnnnnnnnnnnnnnnnnnnnnnnnnnnnnnnnnnnnnnnnnnnnctgccattctgccagactagaaatttggggacttactcatgctaggctcgagggagaagaaaaacccttcagtattctccttaggacttatctgcatgactgttgtagatttggctgatccaatcaacatgtggggttctcggtgtggggctggggagctgaaggactttatggagctgttgctttggaggaaccttaagggaaaggagtagaagctcaggcctctgaaggatctcagctcctcctctctgtaatttgtgctttaagcnnnnnnnncctaaaataaactcaaatttatcctca

SEQ ID NO: 35029 - DNA, 933 bp, Macaca Mulatta
  misc_feature (1)...(933): n = A,T,C or G
gacaccatcaagagaaattggaggctagtaactgtgatcacccgcagaactcacctacgctagaaaggcttggaaggaagaggaagtggactgaaaaacaagattctagtcaaaagaaatccctagagccaaaaacaaaagnnnnnnnnnnnnnnnnnnnnnnnnnnnnnnnnnnnnnnnnnnnnnnnnnnnnnnnnnnnnnnnnnnnnnnnnnnnnnnnnnnnnnnnnnnnnnnnnnnnnnnnnnnnnnnnnnnnnnnnnnnnnnnnnnnnnnnnnnnnnnnnnnnnnnnnnnnnnnnnnnnnnnnnnnnnnnnnnnnnnnnnnnnnnnnnnnnnnnnnnnnnnnnnnnnnnnnnnnnnnnnnnnnnnnnnnnnnnnnnnnnnnnnnnnnnnnnnnnnnnnnnnnnnnnnnnnnnnnnnnnnnnnnnnnnnnccaagaatacattgaaaagcataatttgtacagctctgagagtgaagacaggaatgctggggtcatcctggcccctttgcagagaaacactgcagaagctaagacataggaattctacagcatgatattttgtacttcccatttggggatctgaaacgatctgggtgttactaactggggaaagaagttgtgatctgttgcctaaactaaagcttaaaagtttagtaaaaatcatctgggtgcagtggctcacgcctgtaatcccagcagtttgggaggctgaggcgggtggatcacaaggtcaggagagcgagaccatcctggccacaatatggtgaaaccccatctctactaaaaatacaaaaattagctgtgtgtggtggcatgtgcctgtaatcccagctactcgggaggctgaggcaggagaatcccttgaacctgggaggcagaggttgcagtgagccaagattgcaccattgcactccagcctgggcgacaga

SEQ ID NO: 35030 - DNA, 1333 bp, Macaca Mulatta
  misc_feature (1)...(1333): n = A,T,C or G
agctcgatgccaagaagagcccgctggcgctgttggcgcaaacatgttcgcagatcgggaaacccgacccctcgccctcctccaaactctcctcggttgcctccaacgggggcagcgcgggcggtgccggcggcggcgccgcgggcgacaaggacaccaaatcgggccccctcaagctgagcgacatcggcgagaggacaagtcgagtttcaagccgtactccaaacccgnnnnnnnnnnnnnnnnnnnnnnnnnnnnnnnnnnnnnnnnnnnnnnnnnnnnnnnnnnnnnnnnnnnnnnnnnnnnnnnnnnnnnnnnnnnnnnnnnnnnnnnnnnnnnnnnnnnnnnnnnnnnnnnnnnnnnnnnnnnnnnnnnnnnnnnnnnnnnnnnnnnnnnnnnnnnnnnnnnnnnnnnnnnnnnnnnnnnnnnnnnnnnnnnnnnnnnnnnnnnnnnnnnnnnnnnnnnnnnnnnnnnnnnnnnnnnnnnnnnnnnnnnnnnnnnnnnnnnnnnnnnnnnnnnnnnnnnnnnnnnnnnnnnnnnnnnnnnnnnnnnnnnnnnnnnnnnnnnnnnnnnnnnnnnnnnnnnnnnnnnnnnnnnnnnnnnnnnnnnnnnnnnnnnnnnnnnnnnnnnnnnnnnnnnnnnnnnnnnnnnnnnnnnnnnnnnnnnnnnnnnnnnnnnnnnnnnnnnnnnnnnnnnnnnnnnnnnnnnnnnnnnnnnnnnnnnnnnnnnnnnnnnnnnnnnnnnnnnnnnnnnnnnnnnnnnnnnnnnnnnnnnnnnnnnnnnnnnnnnnnnnnnagtaagccggccggctccagccccttggccggagcgtctccgccgtccgtgatgacagccagtttgtgccgggacccgtactgcctcagttaccactgcgctagccacctggcaggggcggcggccgccagcgcttcgtgcgcacatgatccggccgctgcggccgcggcgctgaagtccggataccccttggtgtaccccacgcacccgctgcacggtgtgcactcctcgctaacggccgccgcggaaaaaggcgccacaccgccctccctggccggccaccccctctacccctacggctttatgctccctaacgacccgctcccccacatctgcaactgggtgtcggccaacgggccgtgcgacaagcgcttcgccacgtcagaagagctgctgagccacttgcggacccatacggcattccccgggacagacaaactgctgtcgggctaccccagctcgtcgtctctggccagcgccgccgcggccgccatggcttgccacatgcacatccccacctcgggcgcgccaggcagcc

SEQ ID NO: 35031 - DNA, 1335 bp, Macaca Mulatta
  misc_feature (1)...(1335): n = A,T,C or G
agcccggaggaaccacccccgccctcctcagcctgatcctggaagagactcagggcaccccagccnnnnnnnnnnnnnnnnnnnnnnnnnnnnnnnnnnnnnnnnnnnnnnnnnnnnnnnnnnnnnnnnnnnnnnnnnnnnnnnnnnnnnnnnnnnnnaggtaacgttcaccaagcggaagttcgggctgatgaagaaggcctatgagctgagcgtgctctgcgactgtgagatagccctcatcatcttcaacagcgccaaccgcctcttccagtacgccagcacggacatggaccgcgtgctgctgaagtacacggagtacagcgagccccacgagagccgcaccaacactgatatcctcgagnnnnnnnnnnnnnnnnnnnnnnnnnnnnnnnnnnnnnnnnnnnnnnnnnnnnnnnnnnnnnnnnnnnnnnnnnnnnnnnnnnnnnnnnnnnnnnnnnnnnnnnnnnnnnnnnnnnnnnnnnnnnnnnnnnnnnnnnctgcagctcctgctatgcccagcccagacatggtgtacggggccctgccaccaccaggctgtgaccccagtgggcttggggaggcactgcccgcccagagccgcccatctcccttccgaccagcagcccccaaagccgggcccccaggnccccaggcctggtgcaccctctcttctcaccaagccacctcacgagcaagacaccacccccactgtacctgccgacnnnnnnnnnnnnnnnnnnnnnnnnnnnnnnnnnnnnnnnnnnnnnnnnnnnnnnnnnnnnnnnnnnnnnnnnnnnnnnnnnnnnnnnnnnnnnnnnnnnnnnnnnnnnnnnnnnnnnnnnnnnnnnnnnnnnnnnnnnnnnnnnnnnnnnnnnnnnnnnnnnngccgaagcctgggcgaggagggccccccaacccgcggcgcctccccgccgacccccccagtcagcatcaagtccgagcgcctctctccggcccccgggggccccggcgactttcctaagaccttcccctaccccttgctcctcgcccggtccctggcagagcctctgcggcccgggcccgccctgcgccggctgcccttggccgacggctggccccggtaggagacccctggtggcacaggcccaggactctcgccggcacggcgagggcacgtggggaccccacctccctccaggcctcttcagagaagacttgacagtgacggccccctccgcggtgggggcttggnnnnnnnnnntggactcaatccatgctggggggactcctttccttcttcctctttgtgtgtatacctaaaaataaaacgcgcgtggcgtccgggaccag

SEQ ID NO: 35032 - DNA, 643 bp, Macaca Mulatta
tatcaaactctacaccagtctgtaattggctcaatgatgagatcatcaatttctacatgaatatgctgatggagcgaagtaaagagaagggcttgccaagtgtgcatgcatttaatacgtttttcttcactaaattaaaaacggctggttatcaggcagtgaaacgttggacaaagaaagtagatgtattttctgttgacattcttttggtgcccattcacctgggagtgcactggtgtctagctgttgtggactttagaaagaagaatattacctattacgactctatgggtgggataaacaatgaagcctgcagaatcctcttgcaatacctaaagcaagaaagcattgacaagaaaaggaaagagtttgacaccaatggctggcagctcttcagcaagaaaagccaggaaattccacagcagatgaatggaagtgactgtgggatgtttgcctgcaaatatgctgactatattaccaaagacagaccaatcaactttacacagcaacacatgccatacttccggaagcggatggtctgggagatcctccaccgaaaactcttgtgaagactgtctcagttagcagaccttgaccatgtgggggaccagctctttgaagtctaaagccagagaccttggaa

SEQ ID NO: 35033 - DNA, 756 bp, Macaca Mulatta
agctgggcggctacgagccgctgttcacatgagcgcccagcagccgtccatcatccccttcacggcccaggcctacgaggagctgtcccggcagtttgacccccacccactggccatgcagttcatcagccagtacagccctgaggacatcgtcacggcgcagattgagggcagctccggggcgctgtggcgcatcagcccacccagccgcgcccagatgaagcgggagctctacaacggcacggctgacatcaccctgcgcttcacctggagcttccagagggacctggccaagggaggcaccgtggagtacgccaacgagaagcacatgctggccctggcccccaacagcactgaacggcggcagctggccagcctgctcgagggcacctcggaccagtctgtggtcatcccaaatctcttccccaagtacatccgtgcccccaatgggcccgaagccaaccctgtgaagcagctgcagcccaacgaggaggccgactacctcggcgtgcgcatccagctgcggagggagcagggtgctggggccaccggcttccttgaatggtgggtcatcgagctgcaggagtgccggaccgactgcaacctgctgcccatggtcatcttcagcgacaaagtcagcccaccgagcctcggcttcctggctggctacgggatcatggggctgtatgtctccatcgtgctggtcatcggcaagttcgtgcgtggattcttcagcgagatctcacactccatcat

SEQ ID NO: 35034 - DNA, 933 bp, Macaca Mulatta
  misc_feature (1)...(933): n = A,T,C or G
tccttcaacagaaactgcaactttttgctcaaaaaccatctcaggatactgagaagtctctggaacctgtgagtactgttcaggtagagcctgcagttaagactgtaaaccaacagcctgtggcagcaccaatagtcaaagaagaaaaacaacctgagaaagtcatcagcaaagaccttgttatagagaggcctcgaccagattcaagaccagcaattaaaaaagaatcaactttacctcccaggaccttctggaaaggaagctaggataagagattgggtttccagatcaaggatacagaagtcgaaggcgaagtgaaatattactccagaggtcgaagctatagagtttcttatggagggcgtggcaggggtggtaggggacacactcgagattatcctcagtatagagacaataagccaagagcagagcatgtaccctcagggcctctcagacagcgagaagaaagtgaaacacggagtgagagctccgattttgaagttgtccccaaaagaagacgacagcggggttcagagactgacacagacagtgaaattcatgaaagtgcaagcgacaaggatagtttaagtaaaggcaaacttcccaaaagagaggaacggcctgaaaacaaaaagcctatgaagcctcaatcttctttcaagcctgataatcatgttcgaatagataatagactgttagaaaagccttatgtaagggatgacgataaatctaaaccaggctttcttcctaaaggagagcctacnaggagaggcagagggggaacattcangcgtgggtggaaggatccctggagnncgtcatcacgcccttccactttacgaagacagcttatcgggacatcagtggaacccaggcagtcagaagttcctaaccagagatggagagccaccagaagaacgagcagtttattct

SEQ ID NO: 35035 - DNA, 1061 bp, Macaca Mulatta
  misc_feature (1)...(1061): n = A,T,C or G
ggcagatttccttcttctccagtatctactttccccctcagctcccagccatctgtaaaaacacaaccctttgttctcccaaatctgaatcaaattactcttttgcctcctttttaatgtcagtcaggatatcagcctttgcacaggctggctgcgtgttcttgtaaaacatgttaccttctgtgagccttggttttttcaaatctgtaaaattagaggattgagctaaagaaacttgaatgctccatttaggcctatcattttattaagtatgattgacacagcccatgggctagaacacactctacaaaatgactaggaaaacagaaagaatatgatttcctgattagagaggttgattttcctcaatgaaaccaaatacaaggaggatcttgaacaaaaatgacagatacaaagtatttctatcctgagtagtaatctcacacttcatcctacggagtcagcctccacagataggaattccctnnnnnnnnnnnnnnnnnnnntttgaaagacagagtcttcactctgtttgctccgggtgggactggcaatggccttgaatctccatctcactggaaccgtctgccctccctggggtccaagcgaattctctgtggcctccagtctccccaggtagactggggattacaaatcggcccgccattcttgcccctgtctacttattttgcctctttttgactagaaatacctcggggtttcaccactgcttgggctattgcctccgtctttccaatctcctgaccttagggtgatctgcccccccttggcctcccaaaatggctggggattgcagacgtgaacccaccacgccctgggctggaaaacttactatttgttgggggaaaacaaaaccccttaaaatggtccgaaaccaaaaattcatttatgttggataagggggttcttggtnnnnnnnnnnnnnnnnnnnnnntccggccttccccctttggggggcctttaattatgtgtctccaaacataaggacatgggaaaatttgtcccnnnnnnnnnnnnnnnnnnnnnnnnnnnnnnnnntc

SEQ ID NO: 35036 - DNA, 458 bp, Macaca Mulatta
aaaagttccagcaccctgggtctgacatgcggcaggaaaagccctcgagccccagcccgatgccttcctccacaccgagccccagcctgaacttggggaacacggatgaggccatccgggacaactcacaggtgaacgccgtcacggtgctcacgctcctggacaagctggtgaacatgctggacgccgtgcaggagaaccagcacaagatggagcagcgacagatcagtttggagggctccgtgaagggcatccagaacgacctcaccaagctctccaagtaccaggcctccaccagcaacacggtgagcaaactgctggagaagtcccgcaaggtcagcgcccacacgcgcgcggtcaaagagcgcatggacaggcagagcgcacaggtgaagcggctggagaacaaccacgcccagctcctccgacgcaaccatttcaaagtgctcatcttccag

SEQ ID NO: 35037 - DNA, 1683 bp, Macaca Mulatta
  misc_feature (1)...(1683): n = A,T,C or G
gaatatagtgttaggcttctaaaagagctgtggtagagggagaaaactgtcaaaggaaatcagtaactgttgaaggaaataccacaaacgccctccttccaggctgactaatggcttatgggagcaaatgagccacagaaacgatacgagcaactgctgttctttcaaaatacccaggcagaggaactggcagacgatgggcaggcaannnnnnnnnnnnnnnnnnnnnnnnnnnnnnnnnnnnnnnnnnnnnnnnnnnnnnnnnnnnnnnnnnnnnnnnnnnnnnnnnnnnnnnnnnnnnnnnnnnnnnnnnnnnnnnnnnnnnnnnnnnnnnnnnnnnnnnnnnnnnnnnnnnnnnnnnnnnnnnnnnnnnnnnnnnnnnnnnnnnnnnnnnnnnnnnnnnnnnnnnngttgttgaaatggatgaaaacaacggacttttacttttagaactgaatcctcctaacccttgggactcagagcccagatctcctgaagagttggattttggagaagtnnnnnnnnnnnnnnnnnnnnnnnnnnnnnnnnnnnnnnnnnnnnnnnnnnnnnnnnnnnnnnnnnnnnnnnnnnnnnnnnnnnnnnnnnnnnnnnnnnnnnnnnnnnnnnnnnnnnnnnnnnnnnnnnnnnnnnnnnnnnnnnnnnnnnnnnnnnnnnnnnnnnnnnnnnnnnnnnnnnnnnnnnnnnnnnnnnnnnnnnnnnnnnnnnnnnnnnnnnnnnnnnnnnnnnnnnnnnnnnnnnnnnnnnnnnnnnnnnnnnnnnnnnnnnnnnnnnnnnnnnnnnnnnnnnnnnnnnnnnnnnnnnnnnnnnnnnnnnnnnnnnnnnnnnnnnnnnnnnnnnnnnnnnnnnnnnnnnnnnnnnnnnnnnnnnnnnnnnnnnnnnnnnnnnnnnnnnnnnnnnnnnnnnnnnnnnnnnnnnnnnnnggtcataaaatactgaatacagtggactgcaccagacccaatgggggaaggctccctacgaaggttgctctaatgatgagtgattttgctggaggagcatcaggctttccaatgactttcagtggtggaaaatttactggtaatattttatatgaaagtgataccaagtatcaggcatggcacattgctaaatggctgtgagagtaaatacaaatgtaattgagacatggtccctccctacaagaagcatgcaatcttattgggaaacgagacttgtaagttgcagattacaaactaaggtttctagctcaaaatgtgatgcagcatgaaggaaatgttgagatctgagagcacctcaggaggagccaagaaaaagaatcacttggattcaccatgtagaccatagagcagaacaggaaaggcctgaaatgggtcatccaggcttaggtgctcttggaatatggttcctaatggggtgtgtnnnnnnnnnnnnnnnnnnnnnnnnnnnnnnnntgtggatgttcatatcagggagcagtgcacccacagagggtcctctagtcggggacctctagtgcacccagaggagggtcctctggttgggggtcttaggcaggagcccttctgctctgggtccaagagtggggttggggttggcttgggggaagtgtgtatcctcaacactagcattgtaagtgctcaataaatgtccacttaataaattaatatatctgataagtga

SEQ ID NO: 35038 - DNA, 795 bp, Macaca Mulatta
  misc_feature (1)...(795): n = A,T,C or G
aatcttagcaagtgcggggaagagctgggccggctaaagctagttcttctggagctcaacttcttgccaaccacagggaccaagctgaccaaacagcagctcattctggcccgtgacatactggagatcggggcccagtggagcatcctgcgcaaggacatcccctccttcgagacgctacataggcgccaagagcccggtttcaaaaanaantttggctttaaacnttaaaaccgtanntcttgcgacttttaaacaaaangtgcgaaggccaaggcgtactcaccccgaaagataccaaggcccctaataataggcagcccaagggcctacctattgggggggcgcattcgaaaacccctacgctacttnccaccagttaggggcccttaggggttccgcccccaaaggggaagaaccccctggggcgggttggtggccttaaggaaaggttttccgcgaaccgaacttgtgggaagattatttgggcatggcccgtggccgttgtccccttggccccacaagtggaaccaatactccaagaaacccgaaagccgtgcttaacaatccaaangcaacccntaggtgtaccctaggagcaatacctgatggagggcagctacaacaaagtgttcctggccaagggtaacatccccgctgagagctacaccttcttcattgacatcctgctggacaccatcagggatgagatcgctgggtgcatcgagaaggcctacgagaaaatccttttcactgaggccacccggatcctcttcttcaacacacccaaaaaga

SEQ ID NO: 35039 - DNA, 71 bp, Macaca Mulatta
tccaggaagcccaggtgtttcgaggacttgcttctacggtttctttgtctgcggaatcagggaagaatgaa

SEQ ID NO: 35040 - DNA, 365 bp, Macaca Mulatta
  misc_feature (1)...(365): n = A,T,C or G
ctagcaaacagaagaggaagttttcttcattctttaagagcctcgtcattgagctggacaaggagctgtatgggcctgacaatcacctggtggagnagtggcaccggatgcccaccacccaggagacagatggcttccaggtaaaacggcctggagacctcaacgtcaagtgcaccctcctgctcatgctggatcatcagnagcctccccagtacaaattggacccccgattggcaaggctgctgggagtgcacacacagacgagggccgccatcatgcaggccctgtggctttacatcaagcacaaccagctgcaggatgggcacgaacgggaatacatcaactgcaaccgttacttccgccag

SEQ ID NO: 35041 - DNA, 868 bp, Macaca Mulatta
  misc_feature (1)...(868): n = A,T,C or G
ggattctgtggttctataataagttttgatataatcttggcttcttaaaaactgtgtatcattaaaatatatgttctgcaagaattaaaactgagtccatgaaaatatcataggaagacataaaactttaaaaggcaactcaaagatgatggaaacgcacttacaagtggtgaccaaaaattttaggtgaagttgagcactctaattagagaactggaggaaccacatataacacttaacttcccctaccctgcccttccccaaaagacaccatgacaaacctagnnnnnnnnnnnnnnnnnnagaaagagaatgaactgtggaatttattggcagccaaggaatgtgtccaagacacatgctgaggttttgaataaaaagtgaacttttgtaatttgaattgggtcccgcttagttcttgaattgttatgaaaatcctatatctgtttgtatatttgcaaaccctttgtattataattgttgatattttccctttttaaaaaataccattgaaatcagcatgacaaaaataacactgttggcacttataggtaaacgtgattgattcagtatcttagagtttacagttttggtggttttaaaaaaacctgaannnnnnnnnnnnnnnnnnnnngcaacattttctgtatactgtaaaagtttataataaattgaactggttttggtcgaagctctttgtggagttaaaattccccaagggaaattttgaaatttttcccnnnnnnnnnnnnnnnnnnnnnnngatatcctggcaaaatgatccgtgtaggaaacctactatgtagtaccctgttttgcgccggcctttgggctccaccgagaaaaactttttttatgccacatttca

SEQ ID NO: 35042 - DNA, 465 bp, Macaca Mulatta
  misc_feature (1)...(465): n = A,T,C or G
cagagtgcctttacacaaacctacggattggcagaaaaagatgctgatatggtcaggtcgcttcaaaaaggaagatgaaatcccagagactgtctcgtnnnnnnnnnnnnnnnnnnnnnnnnnnnnnnnnnnnnnnnnnnnnnnnnnnnnnnnnnnnnnnnnnnnnnnnnnnnnnnnnnnnnnnnnnnnnnnnnnnnnnnnnnaggctgcccaaagaaaccagactttaacacgcttgaacttagaaaagaaagctcgtctgagagaggaagcagctatgaacgccaaaacagaatagcagaggtatctgtgttggctggattttgaaaatccgaggaattatgttgcaacgagcctgtattaaaaaggatgtggtatgaggatccatttcataaagcatggtgtgcccaaacctgtaccatttccgtatttctgctgtagaagtagaagtaaattttcttaaat

SEQ ID NO: 35043 - DNA, 279 bp, Macaca Mulatta
  misc_feature (1)...(279): n = A,T,C or G
ggttccagaatatcttaaccatgtaagtaaacgtttagaggaagaaggagacagagtgatcacttacttggaccacggcacacagnnnnnnnnnnnnnnnnnnnnnnnnnnnnnnnnnnnnnnnnnnnnnnnnnnnnnnnnnnnnnnnnnnnnnnnnnnnnggcttgaccacttactggacgagaacagagtgccggacctcgcgcagatgtaccagctgttcagccgggttaggggcgggcagcaggcgctgctgcagcactggagcgagtacatcaa

SEQ ID NO: 35044 - DNA, 557 bp, Macaca Mulatta
  misc_feature (1)...(557): n = A,T,C or G
aagacaggtgactagaaatattnnnnnnnnnnnnnnnnnnnnnnnnnnnnnnnnnnnnnnnnnnnnnnnnnnnnnnnnnnnnnnnnnnnnnnnnnnnnnnnnnnnnnnnnnnnnnnnnnnnnnnnnnngcaccccatcaatgtgagacaagaccccagcatccctatctatggactccgacagtccatcttattaaataccaggcttcaggactgctatgtggactcaccagctctcaccaacatctggatggccagaacgtgtgcaaagcagaacattaatgccacagcaccagctaccacttcctcttgggaagttgtaaggaacccattaattgccaattccttctccctggttaagcttgtactcaggcggcaactgaagaataagtgctgcccagcaccacgcaagtgtggagaagcaaaactctcgaagagattaaaacacaaggacgattcagtgatgaaagccacccagcaggccaggaaaagaaactccatcagttccaagagcaagcggccagcagggcacaggaggcctgcaggaggcattagaga

SEQ ID NO: 35045 - DNA, 864 bp, Macaca Mulatta
  misc_feature (1)...(864): n = A,T,C or G
ggggtggctattgtgggaagtcataaaccacagatagattaacctaagaatcctggcccttctccacactccaccatgcagaacaaacatcctcttaagcaatcaacgtagaatgtttgggtaatagtcataattacccacatatagtaattaatatatggtaattaatagatccttgatgtgatgttcttttgtgtatcgccttcattctaaagttctctggccgggcgcggtggctttnnnnnnnnnnnnnnnnnnnnnnnnnnnnnngatcacttgacnnnnnnnnnnnnnnnnnnnnncagccaacatggctnnnnnnnnnnnnnnnnnnnnngacaataattatggtgacacctgcctgtagtcacatctactcgggaggctgatgcacgatgatcacttgtaaccaagaagtggaggttgcaatgagcctaatatcgcaccactgctcttccagcctggtccaacagaatgagacttcatactcagaaataaaaataaaaatatgtattaaagttggtttccccgaaagaagacaaatgttcttcatttcaagtaaatggaaccccactctaccccggaaatattgggggggaatttacaagtccaaatttcaacgttccggccattattacgaaaaggaactaccaaggtcatttctcaatagatttgaaacaaaaaaccggttcccatttcccactttaccacagaaaaaagggcccctcctacttgggctttgcaaaaaaggttttatataatttctgggcccctacaaatttccatttttttcatcatacatatcacagggtaattataaccataaaatttggagaancaatctttaatccaactaatcccaaa

SEQ ID NO: 35046 - DNA, 1099 bp, Macaca Mulatta
  misc_feature (1)...(1099): n = A,T,C or G
gggcctgacctagcagtctgacctagcagtcaacatgaaggctgtcattattctggggcttgtcctcctttctgtcacggtccagggcaagatctttgaaaggtgtgagttggccagaactctgaaaagattgggactggatggctacaggggaatcagcctagcaaactgggtgtgtttggccaaatgggagagtaattataacacacaagctacaaactacaatcctggagaccaaagcactgattatgggatatttcagatcaatagccactactggtgtaataatggcaaaaccccaggagcagttaatgcctgtcatatatcctgcaatgctttgctgcaagataacatcgctgatgctgtaacttgtgcaaagagggttgtcagtgatccacaaggcattagagcatgggtggcatggagaaatcactgtcaaaacagagatgtcagtcagtatgttcaaggttgtggagtgtaattgcagaattttccttcttcagctcatttcgtctctttctcacattaagggagtagtaattaagtgaaagatcacactaccattatttccccttcaaagaaataatatttttacagaagcaggagcaaaatatggcctttcttctaagagacgtaatgttcactaatgtggttattttatattaagcctacaacagttttcagtttgcaaatagagctaatactggtgcaaatttatctaaaaaccttggttatcaaatacatttccagtacattcagttcttatcaaagaaataacccagacttactcttgaatgatatgagtatgtccactattacgtaaaaaatataaccaaagggtatcttcagttgatcttgggcaaatacagcagcatagatgcctcctctgtcagtctctccaaacggtaaataacctttgtcggtgatgactttaagggtgatccntgcgaatgagtgcngtaagtgcccaggggccaaagtccagaaactctagaaacggaattcttagacccgttcgttcctctnnnnnnnnnnnnnnnnnnnnnnnnnnnnnngcccccatcacaccacaaaaaaacatcaagaacaaccaacacca

SEQ ID NO: 35047 - DNA, 1047 bp, Macaca Mulatta
  misc_feature (1)...(1047): n = A,T,C or G
ttaagaagacaaacatggcatcaagttcccagagaaaaagaatgagtcctaagcctgagcttactgaagagcagaagcaggagatccgggaagcttttgatcttttcgatgcggatggaactggcaccatagatgttaaagaacttaaggcaagctctngtggcaatgagggccctgggctttgaacctaagaaagaagaaattaagaaaatgataagtgaaattgacaaagaagggacaggaaaaatgaactttggtgactttttaactgtgatgacccagaaaatgngtctgagaaagataccaaagaagaaatcctgaaagctttcaagctctttgatgatgatgaaactgggaagatttcgttcaaaaatctgaaacgcgtggccaaggagttgggtgagaacctgactgatgaggagctgcaggnnnnnnnnnnnnnnnnnnnnnnnnnnnnnnnnnnnnnnnnnnnnnnnnnnnnnnnnnnnnnnnnnnnnnnnnnnnnnnnnnnnnnnnnnnnnnnnnnnnnnnnnnnnnnnnnnnnnnnnnnnnnnnnnnnnnnnnnnnnnnnnnnnnnnnnnnnnnnnnnnnnnnnnnnnnnnnnnnnnnnnnnnnnnnnnnnnnnnnnnnnnnnnnnnnnnnnnnnnnnnnnnnnnnnnnnnnnnnnnnnnnnnnnnnnnnnnnnnnnnnnnnnnnnnnnnnnnnnnnnnnnnnnnnnnnnnnnnnnnnnnnnnnnnnnnnnnnnnnnnnnnnnnnnnnnnnnnnnnnnnnnnnnnnnnnnnnnnnnnnnnnnnnnnnnnnnnnnnnnnnnnnntcatgcatttccacatatccacaaacacaggacgactttagacaagcacatgttacacttgtgtcaccacaagcagtcattcttgagtggctccagtttttatttgacacttgagtttagttttctctttaataaaacccagtgaagtcttgcactggcatttggatgtgtgttaatgctatttgttttgtcttaaaaataaaacctttctcagtttgaacttgtgttctcta

SEQ ID NO: 35048 - DNA, 1367 bp, Macaca Mulatta
  misc_feature (1)...(1367): n = A,T,C or G
ttagcagtcccgtatgtgcatgcctgcgtttgaaaatggcagagggaaacagcaatgaagaggtgattcacttgaacaactttcactgccatcggggacaaggtaannnnnnnnnnnnnnnnnnnnnnnnnnnnnnnnnnnnnnnnnnnnnnnnnnnnnnnnnnnnnnnnnnnnnnnnnnnnnnnnnnnnnnnnnnnnnnnnnnnnnnnnnnnnnnnnnnnnnnnnnnnnnnnnnnnnnnnnnnnnnnnnnnnnnnnnnnnnnnnnnnnnnnnnnnnnnnnnnnnnnnnnnnnnnnnnnnnnnnnnnnnnnnnnnnnnnnnnnnnnnnnnnnnnnnnnnnnnnnnnnnnnnnnnnnnnnnnnnnnnnnnnnnnnnnnnnnnnnnnnnnnnnnnnnnnnnnnnnnnnnnnnnnnnnnnnnnnnnnnnnnnnnnnnnnnnnnnnnnnnnnnnnnnnnnnnnnnnnnnnnnnnnnnnnnnnnnnnnnnnnaggtgacataaaaatagaaaagaggatgttctttcttgaaaataagcgacgacattgtaggtcctatgaccggcgtgctctccttccagctgtgcaacaagagcaggagttctatgagcagaaaatcaaagagatggcagannnnnnnnnnnnnnnnnnnnnnnnnnnnnnnnnnnnnnnnnnnnnnnnnnnnnnnnnnnnnnnnnnnnnnnnnnnnnnnnnnnnnnnnnnnnnnnnnnnnnnnnnnnnnnnnnnnnnnnnnnnnnnnnnnnnnnnnnnnnnnnnnnnnnnnnnnnnnnnnnnnnnnnnnnnnnnnnnnnnnnnnnnnnnnnnnnnnnnnnnnnnnnnnnnnnnnnnnnnnnnnnnnnnnnnnnnnnnnnnnnnnnnnnnnnnnnnnnnnnnnnnnnnnnnnnnnnnnnnnnnnnnnnnnnnnnnnnnnnnnnnnnnnnnnnnnnnnnnnnnnnnnnnnnnnnnnnnnnnnnnnnnnnnnnnnnnnnnnnnnnnnnnnnnnnnnnnnnnnnnnnnnnnnnnnnnnnnnnnnnnnnnnnnnnnnnnnnnnnnnnnnnnnnnnnnnnnnnnnnnnnnnnnnnnnnnnnnnnnnnnnnnnnnnnnnnnnnnnnnnnnnnnnnnnnnnnnnnnnnnnnnnnnnnnnnnnngaagaaaaaatgactgctgcccgcattagaaaatgccacaagtgtgggactggcctcatcaaatctgaaggctgcaaccgcatgtcttgccgctgtggtgctcagatgtgctacctctgtcgagtttctatcaatggatatgaccatttctgccaacatccccgctccccaggagccccttgccaagagtgttcaaggtgctctctctggaccgatcccactgn

SEQ ID NO: 35049 - DNA, 1558 bp, Macaca Mulatta
  misc_feature (1)...(1558): n = A,T,C or G
aagccatatccagaagacccagcagtttataaaccactctcccaggaagaactgcaaaggatnnnnnnnnnnnnnnnnnnnnnnnnnnnnnnnnnnnnnnnnnnnnnnnnnnnnnncgcaaacatttggctagtgtacgtgtcgtacaaaaaaacctcgtctttgttgtaggtttatctcagcgcctagcagacccagaggtnnnnaggttttaaaacgaccagaatattttgggaagtttggtaaaatacataaagttgtcatcaataatagcacatcatatgcaggctcacagnnnnnnnnnnnnnnnnnnnnnnnnnnnnnnnnnnnnnnnnnnnnnnnnnnnnnnnnnnnnnnnnnnnnnnnnnnnnnnnnnnnnnnnnnnnnnnnnnnnnnnnnnnnnnnnnnnnnnnnnnnnnnnnnnnnnnnnnnnnnnnnnnnnnnnnnnnnnnnnnnnnnnnnnnnnnnnnnnnnnnnnnnnnnnnnnnnnnnnnnnnnnnnnnnnnnnnnnnnnnnnnnnnaggcgggtaaacaccaagaatatgaacagaagctacttcaagaattatataaattaaatcccaattttcttcagctatctacgggttcagttgataaaaataagaacaaagtgacaccactgcagannnnnnnnnnnnnnnnnnnnnnnnnnnnnnnnnnnnnnnnnnnnnnnnnnnnnnnnnnnnnnnnnnnnnnnnnnnnnnnnnnnnnnnnnnnnnnnnnnnnnnnnnnnnnnnnnnnnnnnnnnnnnnnnnnnnnnnnnnnnnnnnnnnnnnnnnnnnnnnnnnnnnnnnnnnnnnnnnnnnnnnnnnnnnnnnnnnnnnnnnnnnnnnnnnnnnnnnnnnnnnnnnnnnnnnnnnnnnnnnnnnnnnnnnnnnnnnnnnnnnnnnnnnnnnnnnnnnnnnnnnnnnnnnnnnnnnnnnnnnnnnnnagaaacaatcccagtatcatcctctacagactggcaagcagcttttggctttggttcttctaaacaaccagaggatgacttgggttttgatcccttcgatgtcactcgaaaagccttagcagacctgattgagaaggaactgtccgttcaagaccaaccttccctttcacccacatctcttcagaactcctcttcacacactacaaccgccaaaggtccaggctctggattcctgcatcctgctgcagctacaaatgccaattctctcaatagtaccttttcagtcttgccccagaggttccctcaatttcagcagcaccgagcggtttataattcattcagttttccaggccaggcagcccgctatccttggatggcctttccacgcaatagcatcatgcacttgaaccacacagcaaaccccacctcaaatagtaatttcttggacttgaatctcccgccacagcacaacacaggtctgggagggatccctgtagcaggncaggggaagaagaggtgaaggtttcgaccatgccactgtcagcctcttcccattcattacaacaaggacagcagcctacaagtctccacactactgtggcctga

SEQ ID NO: 35050 - DNA, 1103 bp, Macaca Mulatta
  misc_feature (1)...(1103): n = A,T,C or G
gggagttgagaaatacaaggaaattcagtaaagccagggaatttacaataacatttccgtttccatcattgaataagtcttattcagtcatcagtgaggttaatgcactaatcatggattacgttattttgaacatgttattgcagtgattctcaaattaactattggtgtaagatttttgtcattatgtgtttaaatgttattctgaattttttaccttagttatcattaatgtagttcctgattgaacatgtgataatctaatacctgtgaaaactgattaatcagctgccaataatatctaatatttttcatcatgcacgaattaataatcatcatactctagaatcttgtcattcactacatgaataagcaaatgttgtcttcaaaagaatgcacaagaaccacaattaagatgtcacaatattttgaaagtacaaagtatactaaaagagggtgtgtgtattcacacacagttactcgcttccatttttatgacctttcaactatagataataactcttagagaaactaatttaatattagaatttctattatgaatcatgttaaagcatgacatttctttcacaatagcactatttttaaataaatttataggctttaaggtacgaagtatttaatagatctaatcaaatatgttggttgattcatgggctataataaagcaggaaacaattataaaaaacttcaatcaattggaactgttacaaaaaccacttgagaaatttcatgagcactttaaaatctgaactttcaagcttgctattaaatcatttagaatgtttacatttactaaggtgtgctgggtcatgtaaaatattaggcactaatattttcatagaaattaggctggagaaagaaggaagaaatggttttcttaaatatgtacaanaaagttactgtggtatctatgagttatcatcttagctgtgttaaaaaggaattttttacttgtggcagaaaatggtaatggatagtaaaaaattttaaagcactaaaatttttttttcataaccttttcataaataaaagtttaaataaattaggtttttaattaaacgggaaattttcattaagtttta

SEQ ID NO: 35051 - DNA, 1022 bp, Macaca Mulatta
  misc_feature (1)...(1022): n = A,T,C or G
gggtcggctcgtgctcatcatcctgtgctctgtggtcttctctgccgtctacttcctcctgtgctgctgggccggcctgcctctctgcctggccacctgcctggaccaccacttctccacagactccaggcccactgtgccgggccccttgcacttcagtggatatagcagtgtgacagatgggaagnnagccgctggtccgcgagccctgccgcagctgtgctgtggtgtccagctccggccagatgctgggctcaggcctgggtgctgagatcgacggtgccgagtgcgtgttccgcatgaaccaggcgcccaccgtgggctttgaggcggacgtgggccagcgcagtaccctgcgtgtcatctcacacacaagcgtgccgctgctgctgcgcaactactcacactacttccagaaggcccgagacacgctctacgtggtatggggccagggcaggcacatggaccgggtgctcggcggccgcacctaccgcacgctgctgcagctcaccaggatgtaccccggcctgcaggtgtacaccttcactgagcgcatgatggcctactgcgaccaaatcttccaagacgagacgggcaagaaccgnnnnnnnnnnnnnnnnnnnnnnnnnnnnnnnnnnnnnnnnnnnnnnnnnnnnnnnnnnnnnnnnnnnnnnnnnnnnnnnnnnnnnnnnnnnnnnnnnnnnnnnnnnnnnnnnnnnnnnnnnnnnnnnnnnnnnnnnnnnnnnnnnnnnnnnnnnnnnnnnnnnnnnnnnnnnnnnnnnnnnnnnnnnnnnnnnnnnnnnnnnnnnnnnnnnnnnnnnnnnnnnnnnnnnnnnnnnnnnnnnnnnnnnnnnnnnnnnnnnnnnnnnnnnnnnnnnnnnnnnnnnnnnnnnnnnnnnnnnnnnnnnnnnnnnnnnnnnnnnnnnnnnnnnnnnnncctctgggatgtcccgtcccaggccatcacactccacaaaaacatttaatttatggatcctgcctcctgccacgtgctgggtgga

SEQ ID NO: 35052 - DNA, 141 bp, Macaca Mulatta
tttacaatgtccattacaccatgagtatcaatgggaaattacaagatgggtcaatggaaatagatgctgggaacaacttggagacctttaaaatgggaagtggagctgaagaagcaattgaagttaatgatttccagaatg

SEQ ID NO: 35053 - DNA, 261 bp, Macaca Mulatta
gtcacgcccgggccaggcctggagtggcgtgctgggcgtgcgcggctgcggtatgaagtgttggtcccagcggttcagcagaggtacggaagtgctgtaggccggaatgttaccgactgtcggatctgtggatgaggaagaggatcctgcggaggaagattgtcctgaattggttcccattgagacgaagcaaagcgaggaggaggaaaagtctgagacgcggcgccaagatcccagtcacaattatcaccgggtatatag

SEQ ID NO: 35054 - DNA, 855 bp, Macaca Mulatta
  misc_feature (1)...(855): n = A,T,C or G
gaaggattacacagtgcgtggcctccttggcaaagctacagatgacttctgtgaggatgggaggctggtagagaagacaacctataccacgtgaccagagagaagctggaccgcattctggccatgatccaaggctcccatcagaaggccctggtgatgtnnnnnnnnnnnnnnnnnnnnnnnnnnnnnnnnnnnnnnnnnnnnnnnnnnnnnnnnnnnnnnnnnnnnnnnnnnnnnnnnnnnnnnnnnnnnnnnnnnnnnnnnnnnnnnnnnnnnnnnnnnnnnnnnnnnnnagaggtgcagtgcatgcatgagacgcagaaagagctgcgaaagttggttcatgaaatcggcctggagctaaagaccactgctgtctgctcccaagtgcggcgcacgcgcgacggcttcttcacgctcgacagcgccctcctgaggacccagtgggacctgcacaatatccaggatgctatccgggctgctgccccccaggtagcttcagagctggagaagagcttgggcccgcagctggacaccaaggagctccccagtcgggaatggtcctgggaatcccagggcccgagctctatcttggtgccggagaggggtgcagggcactgaatgcccaggcagctgctggggcagtgaatggataaatagaagagctgctatgagctcgacctgatagctgtgcagaaagtgagagcaggagcaccttttctacgtgtgacacgaaactcaagctgtaacagaaagatcaatggacttgacccaactgaaaaggaaaaacttcggtatggaggaaaagacagtaaacaaatgacagactgataggaagtactggcaggccaggcg

SEQ ID NO: 35055 - DNA, 313 bp, Macaca Mulatta
  misc_feature (1)...(313): n = A,T,C or G
gtgcagctgactagaccatgttgccttgtgaattttgtgaggagctctacccagaggaactgctgattgaccatcagnncagacaagctgtaacccttcacgtgccttacctccactcaatactggcagctcttcccctagaggggtggaggaacatgatgtcatcttccagaacttcttgcaacaggctgcaagtaagcagttagactctttgatgggcctgagcagttcacgccttgtggaggagagcatcatcatcccctgtgaattctgtggggtacagctggaagaggaggtgctgttccatcaccag

SEQ ID NO: 35056 - DNA, 120 bp, Macaca Mulatta
gaaactgccagaggcatgcagcattggtgatggaaagccctttgtcatgaatctgcagaatctgtatatggcagtcaccaaacaagaggtccaagtgggacagaagcatcaaggcactgg

SEQ ID NO: 35057 - DNA, 874 bp, Macaca Mulatta
  misc_feature (1)...(874): n = A,T,C or G
ntctgaacaggaattaagaataactcaaagtgaatttgatcgtcaagcagagattaccagacttctgctagagggaatcagcagtacacatnnnnnnnnnnnnnnnnnnnnnnnnnnnnnnnnnnnnnnnnnnnnnnnnnnnnnnnnnnnnnnnnnnnnnnnnnnnnnnnnnnnnnnnnnnnnnnnnnnnnnnnnnnnnnnnnnnnnnnnnnnnnnnnnnnnnnnnnnnnnnnnnnnnnnnnnnnnnnnnnnnnnnnnnnnnnnnnnnnnnnnnnnnnnnnnnnnnnnnnnnnnnnnnnnnnnnnnnnnnnnnnnnnnnnnnnnnnnnnnnnnnnnnnnnnnnnnnnnnnnnnnnnnnnnnnnnnnnnnnnnnnnnnnnnnnnnnnnnnnnnnnnnnnnnnnnnnnnnnnnnnnnnnnnnnnnnnnnnnnnnnnnnnnnnnnnnnnnnnnnnnnnnnnnnnnnnnnnnnnnnnnnnnnnnnnnnnnnnnnnnnnnnnnnnnnnnnnnnnnnnnnnnnnnnnnnnnnnnnnnnnnnnnnnnnnnnnnnnnnnnnnnnnnnnnnnnnnnnnnnnnnnnnnnnnnnnnnnnnnnnnnnnnnnnnnnnnnnnnnnnnnnnnnnnnngttaagagactgaaaatagcagccatcagaaaccggcctttctgccgataaagttgcatggtaaatatttcattacagaattcatgttagagctttcatgccaagaatgttttcttacaaaattctctttttattgaggtttcactaataagcagcttctacttttgagcctcaacctaaagcagaactgttttctactggatttttcattaacagcaagctttttcttttatgtaaaataaatctattgtg

SEQ ID NO: 35058 - DNA, 1260 bp, Macaca Mulatta
  misc_feature (1)...(1260): n = A,T,C or G
ggtacagatggcattgtcccagtctgttcccttctcggccacagagcttctcctggcctctgccatcttctgcctggtattctgggtgctcaggggttcgaggcctcgggtccccaaaggcctgaaaagtccaccagagccatggggctggcccctgctcgggcatgtgctgaccctggggaagaacccgcacctggcactggcaaggatgagccagctctacggagacgtgctgcagatccgcattggctccacacccgtgctggtgctgagcggcctggataccatccggcaggccctggtgcggcagggcaacgatttcaagggccggcctgacctctacagcttcaccttcatcactgatggccagagcatgtccttcagcccagactctggaccggtgtgggctgcccgccggcgcctggcccagaacgccctcaacaccttctccatcgcctctgacccagcctcctcatcctcctgctacctggaggagcatgtgagcaaggaggctgaggccctgatcagcaggttgcaggagctgatggcagggcctgggcacttcgacccttacaatcaagtggtggtgtcagtggccaacgtcatcggtgccatgtgcttcggacagcacttccccgagagcagtgatgagatgctcagccttgtgaagaacagtcatgagttcgtggagagtgcctcctccgcgaaccccgtggacttcttccctatccttcgctacctgcccaaccctgccctgcagaggttcaaggccttcaaccagaggttccggcggttcctgcagaaaacagtccaggaacactatcaggactttgacaagnnnnnnnnnnnnnnnnnnnnnnnnnnnnnnnnnnnnnnnnnnnnnnnnnnnnnnnnnnnnnnnnnnnnnnnnnnnnnnnnnnnnnnnnnnnnnnnnnnnnnnnnnnnnnnnnnnnnnnnnnnnnnnnnnnnnnnnnnnnnnnnnnnnnnnnnnnnnnnnnnnnnnnnnnnnnnnnnnnnnnnnnnnnnnnnnnnnnnnnnnnnnnnnnnnnnnnnnnnnnnnnnnnnnnnnnnnnnnnnnnnnnnnnnnnnnnnnnnnnnnnnnnnnnnnnnnnnnnnnnnnnnnnnnnnnnnnnnnnnnnnnnnnnnnnnnnnnnnnnnnnnnnnnnnnnnnagcacaacaagggacacaacactgaacggcttctacatccccagggaatgctgtgtcttcataaaccactggcaggtcacccacgaccc

SEQ ID NO: 35059 - DNA, 3173 bp, Macaca Mulatta
  misc_feature (1)...(3173): n = A,T,C or G
ggataacatgctcttttgtgattcgtgtgaccgaggttttcacatggagtgttgtgatccaccactcacccgtatgccaaaaggnnnnnnnnnnnnnnnnnnnnnnnnnnnnnnnnnnnnnnnnnnnnnnnnnnnnnnnnnnnnnnnnnnnnnnnnnnnnnnnnnnnnnnnnnnnnnnnnnnnnnnnnnnnnnnnnnnnnnnnnnnnnnnnnnnnnnnnatcaaaaggtcccttcagcaaagttcgaactggccctggaaggggtaggaaacgaaaaatgactctttccagccaatcagcatcatcatcatcagaagaaggatatttagaacggatagatggcttggacttctgcagagatagcagtgtctccttgaagttcaacaagaaaaccaaagggctcattgatggccttaccaaattttttaccccttcccctgatggtcggaaagctcgtggggaagtggtggactactctgagcaatatcgaatcagaaagaggggcaacaggaaatcaagcacttcagattggcccacagnnnnnnnnnnnnnnnnnnnnnnnnnnnnnnnnnnnnnnnnnnnnnnnnnnnnnnnnnnnnnnnnnnnnnnnnnnnnnnnnnnnnnnnnnnnnnnnnnnnnnnnnnnnnnnnnnnnnnnnnnnnnnnnnnnnnnnnnnnnnnnnnnnnnnnnnnnnnnnnnnnnnnnnnnnnnnnnnnnnnnnnnnnnnnnnnnnnnnnnnnnnnnnnnnnnnnnnnnnnnnnnnnnnnnnnnnnnnnnnnnnnnnnnnnnnnnnnnnnnnnnnnnnnnnnnnnnnnnnnnnnnnnnnnnnnnnnnnnnnnnnnnnnnnnnnnnnnnnnnnnnnnnnnnnnnnnnnnnnnnnnnnnnnnnnnnnnnnnnnnnnnnnnnnnnnnnnnnnnnnnnnnnnnnnnnnnnnnnnnnnnnnnnnnnnnnnnnnnnnnnnnnnnnnnnnnnnnnnnnnnnnnnnnnnnnnnnnnnnnnnnnnnnnnnnnnnnnnnnnnnnnnnnnnnnnnnnnnnnnnnnnnnnnnnnnnnnnnnnnnnnnnnnnnnnnnnnnnnnnnnnnnnnnnnnnnnnnnnnnnnnnnnnnnnnnnnnnnnnnnnnnnnnnnnnnnnnnnnnnnnnnnnnnnnnnnnnnnnnnnnnnnnnnnnnnnnnnnnnnnnnnnnnnnnnnnnnnnnnnnnnnnnnnnnnnnnnnnnnnnnnnnnnnnnnnnnnnnnnnnnnnnnnnnnnnnnnnnnnnnnnnnnnnnnnnnnnnnnnnnnnnnnnnnnnnnnnnnnnnnnnnnnnnnnnnnnnnnnnnnnnnnnnnnnnnnnnnnnnnnnnnnnnnnnnnnnnnnnnnnnnnnnnnnnnnnnnnnnnnnnnnnnnnnnnnnnnnnnnnnnnnnnnnnnnnnnnnnnnnnnnnnnnnnnnnnnnnnnnnnnnnnnnnnnnnnnnnnnnnnnnnnnnnnnnnnnnnnnnnnnnnnnnnnnnnnnnnnnnnnnnnnnnnnnnnnnnnnnnnnnnnnnnnnnnnnnnnnnnnnnnnnnnnnnnnnnnnnnnnnnnnnnnnnnnnnnnnnnnnnnnnnnnnnnnnnnnnnnnnnnnnnnnnnnnnnnnnnnnnnnnnnnnnnnnnnnnnnnnnnnnnnnnnnnnnnnnnnnnnnnnnnnnnnnnnnnnnnnnnnnnnnnnnnnnnnnnnnnnnnnnnnnnnnnnnnnnnnnnnnnnnnnnnnnnnnnnnnnnnnnnnnnnnnnnnnnnnnnnnnnnnnnnnnnnnnnnnnnnnnnnnnnnnnnnnnnnnnnnnnnnnnnnnnnnnnnnnnnnnnnnnnnnnnnnnnnnnnnnnnnnnnnnnnnnnnnnnnnnnnnnnnnnnnnnnnnnnnnnnnnnnnnnnnnnnnnnnnnnnnnnnnnnnnnnnnnnnnnnnnnnnnnnnnnnnnnnnnnnnnnnnnnnnnnnnnnnnnnnnnnnnnnnnnnnnnnnnnnnnnnnnnnnnnagaagactcagtgagggggttgagccctgccgaggacagctcaagaaaagccctgaggctctgaagtgcagattaacagaaggaaatgagaggctgccccgccgctacagtgaaggtgacagggctgtcctcaggggcttcagtgagagcagcgaggaggaggaagagccggaaagccctcggtcaagctcgccaccaattctcacaaagcccacgctgaagcgaaagnagaaaccatttctccaccgaaggaggagagtccgaaagcgcaaacaccacaatagcagtgtagtcacggaaactatttctgagaccactgaagtgttagatgaaccttttgaagattctgactccgagaggccaatgccaagattagaacccacatttgagatcgatgaagaagaggaggaagaggatgaaaatgaacttttccctagagnnnnnnnnnnnnnnnnnnnnnnnnnnnnnnnnnnnnnnnnnnnnnnnnnnnnnnnnnnnnnnnnnnnnnnnnnnnnnnnnnnnnnnnnnnnnnnnnnnnnnnnngacactcctatcctaaagccagtatctctcttgcgaaaacgtgatgtgaagaattctcctcttgagccagatacatccacacctttgaaaaagaaaaagggatggcccaaaggcaagagtcgcaaaccaatccactggaagaaaagacctggtcgaaaaccaggatttaagttgagtcgggaaatcatgccagtttctactcaagcatgcgtcattgagcccgttgtccccattcctaaagctggacgtagacccaagatccaggagagtgaagaaactgttgagccaaaagaagacatgcccctannnnnnnnnnnnnnnnnnnnnnnnnnnatgcaagcagaggcagaagaagctgaagagggtgaggaagaggatgcagccagcagtgaagtcccagtagcctctccagcagacagcagcaatagtcctgagaccgaaactaaggagcccgaggtggaggaggaagaagagaagccccgtgtctcnnnnnnnnnnnnnnnnnnnnnnnnnnnnnnnnnnnnnnnnnnnnnnnnnnnnnnnnnnnnnnnnnnngatgcagctgcagagactgcccagaatgatgaccacgatgctgatgatgaggatgatggccacctggagtccacaaagaaaaaggagc

SEQ ID NO: 35060 - DNA, 424 bp, Macaca Mulatta
gatgtcaaggttcgctttgtcattcgaggctgtggacaatactattcctaccgctgccaagaaaaacgcaacacctactttgtagagtactggtatcaggcccagtgctgccagtacgattattgcaactcctggtcaagcccccaactccagagcttcctgccggagccccatgacaggcccctggccctgcctctgtctgactcccagattcagtggttctaccaggccctgaacctctcactacccgtccccaatttccatgctgggaaggagcctgatggcctggaccccgtggtcacattgcccctgaacctgggcttgtcttttgctgagctgcgccgcatgtacttgttcctcaatagttcaggacttttgcttcttcaacagcctggactctgacacctcacccttcctgaattcc

SEQ ID NO: 35061 - DNA, 583 bp, Macaca Mulatta
  misc_feature (1)...(583): n = A,T,C or G
tactcctaagctcctcccccggcggcgagccagggagaaaggatggccggtcgggcggcgcggttggtcctgctagctggggccgcggcgctggcgagcggctcccagggcgaccgtgagccggtgtaccgcgattgcgtactgcagtgcgaagagcagaactgctctgggggcgctctgaatcacttccgctcccgccagccaatctacatgagtctagcannnnnnnnnnnnnnnnnnnnnnnnnnnnnnnnnnnnnnnnnnnnnnnnnnnnnnnnnnnnnnnnnnnnnnnnnnnnnnnnnnnnnnnnnnnnnnnnnnnnnnnnnnnnnnnnnnnnnnnnnnnnnnnnnnnnnnnnnnnnnnnnnnnnnnnnnnnnnnnnnnnnnnnnnnnnnnnnnnnnnnnnnnnnnnnnnnnnnnnnnnnnnnnnnnnnnnnnnnnnnaggactgtggggctgcagcacccagctgtggtcagtgccttccgagctctcctgctgctaatgctgaccgtgcacgtctcctacctgagcctcatccgcttcgactatggctacaacctggtggccaacgtggctattgg

SEQ ID NO: 35062 - DNA, 229 bp, Macaca Mulatta
agtaatagtagacgtcgccatgaaagtgaagaaggagatagtcacaggagacacaaacacaaaaaaatctaaaagaagcaaagaaggaaaagaagcaggcagtgagcctgcccctgaacaggagagcaccgaagctacacctgcagaataggcatggttttggccttttgtgtatattagtaccagaagtagatactataaatcttgttatttttctggataatgttta

SEQ ID NO: 35063 - DNA, 616 bp, Macaca Mulatta
ccaaagaagagaagaaaagatgtctggttctgcctccaatgaaaaccgtgaagggacacttttggattccaggggtagcgagagggatgaccattatagggagagttctggaaatgccagcgcggagagcagccacttctttgcatatctggtgactgcagccattcttgtggcagtcctctatatcgctcatcacaacaagcggaagatcattgcttttgtcctggaaggaaaaagatctaaagtcacccggcggccaaaggccagtgactaccaacgtttggaccagaagtcataacagaatggtatattcctctggaaaaagatgaacgtcaccaatggattgtgctgctctcgtatcagctttgaaattataagtccttgagaaccttgtgctacctgctgatttgtgtctaaatccaaagaaatgaagaacaaagtactgtgacctaagagacaccctcctctaggatttagtggcaagtcctgggctggccgaggtagggggtagcttaggggatagcacctgaacttatggtgacatcgtacttcctgtgttccctttattgatgctggtggcttccatccattcctcctctgagtgtgagtggagggc

SEQ ID NO: 35064 - DNA, 483 bp, Macaca Mulatta
  misc_feature (1)...(483): n = A,T,C or G
aggtccggtgttggggtgtccgagctgcggctggagaggagtggccttacccgcttgnnnnnnnnnnnnnnnnnnnnnnnnnnnnnnnnnnnnnnnnnnnnnnnnnnnnnnnnnnnnnnnnnnnnnnnnnnnnnnnnnnnnnnnnnnnnnnnnnnnnnnnnnnnnnnnnnnnnnnnnnnnnnnnnnnnnnnnnnnnnnnnnnnnnnnnnnnnnnnnnnnnnnnnnnnnnnnnnnnnnnnnnnnnnnnnnnnnnnnnnnnnnnnnnnnnnnnnnnnnnnnnnnnnnnnnnnnnnnnnnnnnnnnnnnnnnnnnnnnnnnnnnnnnnnnnnnnnnnnnnataactaatgatgccagagaagatgaaatggaagacattctgactcaagtgggtagtatcctgggaaatctaaaagacatggccttgaacataggcaatgagattgatgctcaaaatccgcaaataaaacgaatcacagacaaggn

SEQ ID NO: 35065 - DNA, 1092 bp, Macaca Mulatta
  misc_feature (1)...(1092): n = A,T,C or G
atctgccaaagccacctgggagatctacaagaccatccagtccttgcccaaggccctgcaggaacgctacctgctcgtgcgctatgaggacctggtccgagcccctgtggcccagacttcccaaatgtatgaattcgtggggttggaattcttgccccatcttcagacctgggtgcataacatcacccgaggcaagggcatgggtgaccatgccttccaaacaaatgccagggatgccctaaatgtctcccaggcttggcgctggtctttgccctatgaaaaggtttctcgacttcagaaagcctgtggcgatgccatgaatttgctgggctaccgccacgtcagatctgaacaagaacagagaaacctgttgctggatcttctgtctacatggactgtccctgagcaaaaccactaagagggttgagaaggctttgcctccacctggtgtcagcctcagtcacnnnnnnnnnnnnnnnnnnnnnnnnnnnnnnnnnnnnnnnnnnnnnnnnnnnnnnnnnnnnnnnnnnnnnnnnnnnnnnnnnnnnnnnnnnnnnnnnnnnnnnnnnnnnnnnnnnnnnnnnnnnnnnnnnnnnnnnnnnnnnnnnnnnnnnnnnnnnnnnnnnnnnnnnnnnnnnnnnnnnnnnnnnnnnnnnnnnnnnnnnnnnnnnnnnnnnnnnnnnnnnnnnnnnnnnnnnnnnnnnnnnnnnnnnnnnnnnnnnnnnnnnnnnnnnnnnnnnnnnnnnnnnnnnnnnnnnnnnnnnnnnnnnnnnnnnnnnnnnnnnnnnnnnnnnnnnnnnnnnnnnnnnnnnnnnnnnnnnnnnnnnnnnnnnnnnnnnnnnnnnnnnnnnnnnnnnnnnnnnnnnnngaaggaagtgggaacaaggttggatgcctacttgtgagcttgatcatcactgctatcggtaatcagaaatatgaaacaaaatctctgcacaaaagagcaagctcttaagttcacagggtgcctgggctgcatttgaatatcacttcccctctgcattttcctatcacataggagactttgacctgtgaagctgccatctgttaatactaaaattccaaaataag

SEQ ID NO: 35066 - DNA, 269 bp, Macaca Mulatta
  misc_feature (1)...(269): n = A,T,C or G
gctcgatggcaagagacttcctataacctcttcaccttccgctgcctctttctgctgccactgactgccatggccatctgctatagccacattgtcctcagtgtgtccagccctcagacaaggaaggggagccatgngcccctgctggtgaatttgccctctgccgctcctttgacaattgtccccgtgttcgtctctgggccctgagactggccctgcttatcttgctgaccttcatcctctgctggacaccttattacctactgggt

SEQ ID NO: 35067 - DNA, 637 bp, Macaca Mulatta
tgtggattcaaaataagaactatagagttagacgggaaaacaatcaagcttcaaatatgggacacagcaggccaggaaagatttcgaacaagtcacctccagttattacagaggagcccatggcatcatagttgtgtatgatgtgacagatcaggagtccttcaataatgttaaacagtggctgcaggaaatagatcgttatgccagtgaaaatgtcaacaaattgttggtagggaacaaatgtgatctgaccacaaagaaagtagtagactacacaacagcaaaggaatttgctgattcccttggaattccgtttttggaaaccagtgctaagaatgcaacgaatgtagaacagtctttcatgacgatggcagctgagattaaaaagcgaatgggtcccggagcaacagctggtggtgctgagaagtccaatgttaaaattcagagcactccggtcaagcagtcaggtggaggttgctgctaaaatttgcctccgtccttttctcacagcaatgaatttgcaatctgaacccaagtgaaaaaacaaaattgcctgaattgtactgtatgtagctggactacaacagattcttaccgtctccacaaaggtcagagattgtaaatggtcaatactgac

SEQ ID NO: 35068 - DNA, 797 bp, Macaca Mulatta
gggttctggactcaggattgtgtgccagcttcagaggatgctctccatagccgtagaggtggacaggacccccacctgcagctccaataaaattgctgagatgatgtttgggtttgtgctggacattcctgagaggagccaaagagagatgttctttaccaccatggaaagccaccttctgcgctgcaaagtgttagagatcatattcctccacagctgcgagacacccacccgcctgcctctgtctctggctcaggccctctactttctgaataattctacgtcactgctcaagtgtcagtcagataaaagccagtggcagacttgggacgaattggttgagcatctgcagtttctgttgtccagttatcaacatgttttaagagaacacttaagcgagttccgtgatcgaccgaaaggacttaataatcaaaaggattaagcccaaaccccagcaaggagatgacatcacagtggtggacgtagagaagcagattgaggccttccgcagccgcctgatccagatgctggggggagcctctttgtccctcaacttccaagacaaagggcacttggttgaaacttcctgctctttctatgcatgcggaactttgaacccggacgcagaaacccctctcaaaaggggctgggaaccgcttcctgaagggccttgtccaagccaccgtaatggccaaaagaatacaaccctaggaaactctttattcttcccaacttacctttaaaagccttcccaaaagttaagggaaaagccgggccctaaaatatctttatacaaa

SEQ ID NO: 35069 - DNA, 714 bp, Macaca Mulatta
  misc_feature (1)...(714): n = A,T,C or G
gggggcggccttcatgctgggctcgctgcttcggacgttcaagcagatggttccttcatcagcttcaggccaagttcgaagtcactatgtagactggagaatgtggcgcgatgtgaagagacgaaaaatggcctatgaatacgcagatgagaggctacgtattaattcactcaggaagaataccattttgccaaaaattcttcaggacgtggctgatgaagaaatcgctgccctcccccgggatagctgtcccgttagaatcaggaatcggtgtgttatgacgtcccgtccgcgtggtgtgaagcggcgctggaggcttagtcgtatagtcttccgtcacttagctgaccacgggcaactttctgggatccagcgagcaatgtggtaaatgagctccagaacctattgagcttgcagggaagccagttccagcaagaaaagatttttttaatagaccaaaccctaagctctacagcggcccagtacagttgtttggcctacctgatgctatctctaaactacttttaaaatgaagaaatttgggtgtttcatgtcagtgaattatctttttctctttggacttaataaaacatactggttcccnnnnnnnnnnnnnnnnnnnnnnnnnnnnnnnnnnnnnnnnnnnnnnnnnnnnnnnncttgttcgggccggccttccggcccccttggaaaaagactttttctcaaaaaccc

SEQ ID NO: 35070 - DNA, 1960 bp, Macaca Mulatta
  misc_feature (1)...(1960): n = A,T,C or G
ttatttctacaatttcgggtggaaggattatggtgtagcatctcttactactatcctagatatggtgaaggtgatgacatttgccttacaggaaggaaaagtagctatccattgtcatgcagggcttggtcgaacaggtnnnnnnnnnnnnnnnnnnnnnnnnnnnnnnnnnnnnnnnnnnnnnnnnnnnnnnnnnnnnnnnnnnnnnnnnnnnnnnnnnnnnnnnnnnnnnnnnnnnnnnnnnnnnnnnnnnnnnnnnnnnnnnnnnnnnnnnnnnnnnnnnnnnnnnnnnnnnnnnnnnnnnnnnnnnnnnnnnnnnnnnnnnnnnnnnnnnnnnnnnnnnnnnnnnnnnnnnnnnnnnnnnnnnnnnnnnnnnnnnnnnnnnnnnnnnnnnnnnnnnnnnnnnnnnnnnnnnnnnnnnnnnnnnnnnnnnnnnnnnnnnnnnnnnnnnnnnnnnnnnnnnnnnnnnnnnnnnnnnnnnnnnnnnnnnnnnnnnnnnnnnnnnnnnnnnnnnnnnnnnnnnnnnnnnnnnnnnnnnnnnnnnnnnnnnnnnnnnnnnnnnnnnnnnnnnnnnnnnnnnnnnnnnnnnnnnnnnnnnnnnnnnnnnnnnnnnnnnnnnnnnnnnnnnnnnnnnnnnnnnnnnnnnnnntttgaccctctgtggaaaaggcggaatgatgagggcggtctacccctttttcatgtgaaaaggcggctcaggtacagagaatcagatttatagagggccgagacgctcctggaggaaggggagcctccacagacagtgcctgtgcaggtcttggttgaccacaaccccaggcagcagaagcgcataagccattgttacatcccacagtctccagaaccagacttacataaggaagccttggttcgcagcacactttctttctggagtcagtataagtttggagggctggaagggctcaaagataatggctcaccaattttccatggacggatcattccaaaggaagcacagcagagtagagctttctctgcagatgtttcaggcccacacagccctggggaaccagtttcacccaactttgcaaatgtccgtaaggatccaaaccctactcaccagcaagtgtctcactgtcagtgtaaaactcatggtgttgggagccctgggtctgtcaggcagaacagcaggacaccccaaagacctctggacagtggctgcagtctgaaagcacagttcttggttgaacatgaaacccaggacagtaaagatctggctgaagcagcttcacactctacattacagtctgaattgagtgctgaggcaagaagaatactggcggccaaagctctagcaaatttaaatgaatctgtagaaaaggaggaactannnnnnnnnnnnnnnnnnnnnnnnnnnnnnnnnnnnnnnnnnnnnnnnnnnnnnnnnnnnnnnnnnnnnnnnnnnnnnnnnnnnnnnnnnnnnnnnnnnnnnnnnnnnnnnnnnnnnnnnnnnnnnnnnnnnnnnnnnnnnnnnnnnnnnnnnnnnnnnnnnnnnnnnnnnnnnnnnnnnnnnnnnnnnnnnnnnnnnnnnnnnnnnnnnnnnnnnnnnnnnnnnnnnnnnnnnnnnnnnnnnnnnnnnnnnnnnnnnnnnnnnnnnnnnnnnnnnnnnnnnnnnnnnnnnnnnnnnnnnnnnnnnnnnnnnnnnnnnnggttaattttgattctgaaaatggaccaatagtttacaacaccctgaagaaaatatttaagcacacgctggaagaaaaaagaaaaatgacaaaagatggccctaagcctggcctctagctttccctcgtggtgaatatttcagacctaaagatccagatagtatctctgttcatatgtgaataagtcgaagtttgtggggctactttttctcatagcactttattttgaatgtcgttgatttgtgctgagaatggttgtccctatttga

SEQ ID NO: 35071 - DNA, 2478 bp, Macaca Mulatta
  misc_feature (1)...(2478): n = A,T,C or G
atcggcacgagcgcaaaggagatgaagaaggcattcctgctgttgttattgacatgtcaggactgcgggagaaggatgacatccagagggcagaatgcatgttgcagcaggcggagaggctgggctgccggcagtttgtcacagccacagatgttgtccgagggaaccccaagttgaacttggcttttattgccaacctctttaacagataccctgccctgcacaaaccagagaaccaggacattgactggggggctcttgaaggtgagacgagagaagagcggacatttagaaactggatgaactccctgggtgttaaccctcgagtcaatcatttgtacagtgacttatcagatgccctggtcatcttccagctctatgaaaagattaaagttcctgttgactggaacagagtaaacaaaccgccataccccaaactgggaggcaatatgaagaagcttgagaattgtaactatgcggtagaattggggaagaatcaagcgaagttctcactggttggcatcggtggacaagatctcaatgaaggaaaccgcactctcacattggccttgatttggcagctaatgagaaggtatacactgaatatcctcgaagaaattggtggtggtcagaaggtcaatgatgacattattgtcaactgggtgaatgaaacgttgagggaagcacagaaaagttcatccatctctagtttcaaggacccgaagattagtacaagtctgcccgttctggacctcatcgatgccatccaaccaggttccattaactatgaccttctgaagacagaaaatctgaatgatgatgagaaactcaacaatgcaaagtatgccatctctatggcccgaaaaattggagcaagagtgtatgccctaccagaagacctggttgaagtgaaccccaaaatggtcatgaccgtgtttgcctgccttatggggaaaggaatgaagagggtgtgaggcccggtggggccgggtgggaggcggtgcactcactcctgactgcccagcacagatgctccgggatgattcaagccattccaaagttcaccttggtgacattctacaagattccaaaaagcacatattagggcagccaagtagcctctcctgtatttaacaaaaagtgcttcattctttgcaggaggcgcaacctcctatatataggtttctattcttgacttttttgcttcttcgaaaatctagaggaaaagaaagaagttattttccaagtacccttctcgcttttgccattagtcgaggatagaagctgcagtgatattaattttgatgtaatctttcaaacccgcttcatgtggcttcccttttctttgttcaagatgagggccaggaggggaatcatcacacctgctctaaaccctgttcctggaggtcagcctttgatctgttgcaagcccctctttctgtcccttcttcgtaccctgcctcccatgactttgctcctcatgcacttggaaccatgccttctggaggccccatctcttctggccatccttgtctctgggccacttggagcgtctgataaatcagtcaagctgttgaagtctcaggagtctctggtagcctgcagaagtaagccttatcatcagaacctttcctcaaaactggagtcccagatgtcatcaggttttgtttttttttcagccactaagaacccctctgtttttaactctagaatttgggcttggactagatctaacatcttgaaaatactttgccctctagagccttaactcttaatggaaggttggatccaaggagggtgtaatggagcatcaagccactcgggggcagcatggagctgtaactaagcatcctttagggtgctgcctctccaggcattcagccctcacattagattctagttactgtggtatggctaatatctgtccacatttggaagcaatcctgccttgctttagcttctagagcttagcatatctggttgttgtcaggccatattatcaatgtttacttttttggtactataaaagctttctgccacccctaaactccagaggggacaatatgtgccaatgaatagcacccctatgcacatacacacacacctggccagctgtcaagggtagaatgaatctatgctggataagaaatggcgggattgtgttatgaagagctaatttactggacaaagaatgcaaagcaaacaagaccatttgatttgagcactctcttagttaacaattcccctaacaatgaggtaaagcacagcttgtgaccgattaatccttttggaaaggccacaagatcactgaacgctgaggaaaactttcgatgaactgtcgctactgggtcaccgagttcccccgtagctagggnnnnnnnnnnnnnnnnnncattattattttctttcctattctcannaacatagacaaacaataaaaaaagaaaacatgatatagacaacagaaaaaacaaaaaa

SEQ ID NO: 35072 - DNA, 525 bp, Macaca Mulatta
tggccagcgggaccccagcccccagaatacccctggcctcctgcccctgaggtggaccaccgacctcaggaggagccagacctggacccaccccgggaagagtacagataatgggcttcccccagccgttctgctcccaggcatctccagacacccacgccctctccactctgattccccgtgaactcttcccaatttagcccgtctccttaaacctcttcctcattccctcggttttattctgaacccagaaggtggtgttctcaatatttcctgtcccctcctgagatccgtacttagccctcacattgcccgttttttcctctgacagcctaagcctactcttctacctcacctccgggcctcggccccacctacctccctccccgtcttcctgcccgcgcgatcgctggggcagggctgcggtactgtgttcccttctgccacctggtggccggcggcaggaattatcagtagacagctgttgcttccatgaaacggaaaaataaaaatcacgttttctta

SEQ ID NO: 35073 - DNA, 319 bp, Macaca Mulatta
  misc_feature (1)...(319): n = A,T,C or G
agaaaatacacacaggagagaaaccttatgaatgtaacaaatgtgagaaaacatttcgccacaaatcaaacttccttttacatcagaaatcccacaaggaataagttccagcaaagtaataaattccaacaaagcaacaaatcaaataacttacacaatgcgaaactgtgagtatgtatagaggagtaaaatcttnnnnnnnnnnnnntatggaaaaattttctgccataagtccatcctcaccataacatcagagaaatcatgtaggaaagaaatactttgtttaataaatgtattattcattgtgaactatgaaaat

SEQ ID NO: 35074 - DNA, 736 bp, Macaca Mulatta
  misc_feature (1)...(736): n = A,T,C or G
gagtttagaagtaatgtcagaaaatgttaagcatgtccgtattaagaaaatataaggtttctaattgtcttattaatatggtaattcaagtgaattagaaatatttaactgcaatcttgaattataaagttgagatatatgtatctctctcaagatctcaacttgatgtaaagtaaatgagcagttacctggcggnnnnnnnnnnnnnnaataactgatttaatccataatctcataacaaacatagcttcacctcagtattttctttctttcttcgttcaacagtgctccaataagggaatgctagaaaataggtgagaagtactgaaagacnnnnnnnnnnattgattagaaaaggtctctagggtcttcgaatgctggnnnnnnnnnnnnnnnnnngtctttcccatctgtggcagctaaaacaaaaatcactcaaaatattcaggtttacatgttagctctctctcatagggagttgccatacctcacagttcaaagtgtattctatagatcagtaacattatactgacatgtaattgcagtttactatgcagcaaaaatgattcaagaagaaaaataacctacagtgtctatatacctttgtatacacaattgcttaagttactctgcttttaacatttgtacttggataaaatgcttatgtctgtataggaatgtcacagtacaagatgctgctagcccaggcacaaagtattaaaattattttgtgaag

SEQ ID NO: 35075 - DNA, 813 bp, Macaca Mulatta
  misc_feature (1)...(813): n = A,T,C or G
gggtcctttcagtataatgtcttagattaaagacgttgcctttaatatctgttgggaaggaaatgtccagacttttcaaatctcttattatatgtttcctttttttgtttacatagggaacaatgtttatagtcgtgtgtacagtgggggtctacaacaagaagtgtatattttcaaacaattttttaatgatttaacaatttttgtaaatcattttcaggcttctgcagctgtattctcactgtgaatcccttgcttgctcatgcataagtgtatttgcaataccaaatatacaggtttagtatttttgcctgttagtgatcgtttcacatgtgtaacgttttggttgagatgttaaatggtggacgagtactgtggatgtgaatgtgggaagtaattttaatcatatgtaattggtcacaagggctaatttgcagtaactatttgctgttttattttaacaatgccttgttgctttgtatgcattaatgttttggatgtaaagattgtgtgtctatcccaacagggagcccagtatttaaattggacaacctaatgtttacactactttgaggtggccaaatgtaaaccaaaagccttaattaaagtggtgcaatttttgtataactttgcctccgttagttcataaatttgggattgccatgccggacaagttatttttctaatatattatttcttttttagcccccctcgggccttcnnnnnnnnnnnnnannnnnnnnnnnnntggcccgccgggcccccattgggtaagtaaaaaggggtccaaaccggttttcctaagaaataccc

SEQ ID NO: 35076 - DNA, 5502 bp, Macaca Mulatta
  misc_feature (1)...(5502): n = A,T,C or G
ggggagccctgccagctttgtcctgccannnnnnnnnngagttccaggcactgtgcagcagtgggcttggcattaccacggatggtcgannnnnnnnnnnnnnnnnnnnnnnnnnnnnnnnnnnnnnnnnnnnnnnnnnnnnnnnnnnnnnnnnnnnnnnnnnnnnnnnnnnnnnnnnnnnnnnnnnnnnnnnnnnnnnnnnnnnnnnnnnnnnnnnnnnnnnnnnnnnnnnnnnnnnnnnnnnnnnnnnnnnnnnnnnnnnnnnnnnnnnnnnnnnnnnnnnnnnnnnnnnnnnnnnnnnnnnnnnnnnnnnnnnnnnnnnnnnnnnnnnnnnnnnnnnnnnnnnnnnnnnnnnnnnnnnnnnnnnnnnnnnnnnnnnnnnnnnnnnnnnnnnnnnnnnnnnnnnnnnnnnnnnnnnnnnnnnnnnnnnnnnnnnnnnnnnnnnnnnnnnnnnnnnnnnnnnnnnnnnnnnnnnnnnnnnnnnnnnnnnnnnnnnnnnnnnnnnnnnnnnnnnnnnnnnnnnnnnnnnnnnnnnnnnnnnnnnnnnnnnnnnnnnnnnnnnnnnnnnnnnnnnnnnnnnnnnnnnnnnnnnnnnnnnnnnnnnnnnnnnnnnnnnnnnnnnnnnnnnnnnnnnnnnnnnnnnnnnnnnnnnnnnnnnnnnnnnnnnnnnnnnnnnnnnnnnnnnnnnnnnnnnnnnnnnnnnnnnnnnnnnnnnnnnnnnnnnnnnnnnnnnnnnnnnnnnnnnnnnnnnnnnnnnnnnnnnnnnnnnnnnnnnnnnnnnnnnnnnnnnnnnnnnnnnnnnnnnnnnnnnnnnnnnnnnnnnnnnnnnnnnnnnnnnnnnnnnnnnnnnnnnnnnnnnnnnnnnnnnnnnnnnnnnnnnnnnnnnnnnnnnnnnnnnnnnnnnnnnnnnnnnnnnnnnnnnnnnnnnnnnnnnnnnnnnnnnnnnnnnnnnnnnnnnnnnnnnnnnnnnnnnnnnnnnnnnnnnnnnnnnnnnnnnnnnnnnnnnnnnnnnnnnnnnnnnnnnnnnnnnnnnnnnnnnnnnnnnnnnnnnnnnnnnnnnnnnnnnnnnnnnnnnnnnnnnnnnnnnnnnnnnnnnnnnnnnnnnnnnnnnnnnnnnnnnnnnnnnnnnnnnnnnnnnnnnnnnnnnnnnnnnnnnnnnnnnnnnnnnnnnnnnnnnnnnnnnnnnnnnnnnnnnnnnnnnnnnnnnnnnnnnnnnnnnnnnnnnnnnnnnnnnnnnnnnnnnnnnnnnnnnnnngacgtggacgagtgtgcaagggacccactgctctgccggggaggcacttgcaccaacacggatgggagctacaagtgccagtgaacccctgggcacgagctgacagccaagggcactgcctgtgagnnnnnnnnnnnnnnnnnnnnnnnnnnnnnnnnnnnnnnnnnnnnnnnnnnnnnnnnnnnnnnnnnnnnnnnnnnnnnnnnnnnnnnnnnnnnnnnnnnnnnnnnnnnnnnnnnnnnnnnnnnnnnnnnnnnnnnnnnnnnnnnnnnnnnnnnnnnnnnnnnnnnnnnnnnnnnnnnnnnnnnnnnnnnnnnnnnnnnnnnnnnnnnnnnnnnnnnnnnnnnnnnnnnnnnnnnnnnnnnnnnnnnnnnnnnnnnnnnnnnnnnnnnnnnnnnnnnnnnnnnnnnnnnnnnnnnnnnnnnnnnnnnnnnnnnnnnnnnnnnnnnnnnnnnnnnnnnnnnnnnnnnnnnnnnnnnnnnnnnnnnnnnnnnnnnnnnnnnnnnnnnnnnnnnnnnnnnnnnnnnnnnnnnnnnnnnnnnnnnnnnnnnnnnnnnnnnnnnnnnnnnnnnnnnnnnnnnnnnnnnnnnnnnnnnnnnnnnnnnnnnnnnnnnnnnnnnnnnnnnnnnnnnnnnnnnnnnnnnnnnnnnnnnnnnnnnnnnnnnnnnnnnnnnnnnnnnnnnnnnnnnnnnnnnnnnnnnnnnnnnnnnnnnnnnnnnnnnnnnnnnnnnnnnnnnnnnnnnnnnnnnnnnnnnnnnnnnnnnnnnnnnnnnnnnnnnnnnnnnnnnnnnnnnnnnnnnnnnnnnnnnnnnnnnnnnnnnnnnnnnnnnnnnnnnnnnnnnnnnnnnnnnnnnnnnnnnnnnnnnnnnnnnnnnnnnnnnnnnnnnnnnnnnnnnnnnnnnnnnnnnnnnnnnnnnnnnnnnnnnnnnnnnnnnnnnnnnnnnnnnnnnnnnnnnnnnnnnnnnnnnnnnnnnnnnnnnnnnnnnnnnnnnnnnnnnnnnnnnnnnnnnnnnnnnnnnnnnnnnnnnnnnnnnnnnnnnnnnnnnnnnnnnnnnnnnnnnnnnnnnnnnnnnnnnnnnnnnnnnnnnnnnnnnnnnnnnnnnnnnnnnnnnnnnnnnnnnnnnnnnnnnnnnnnnnnnnnnnnnnnnnnnnnnnnnnnnnnnnnnnnnnnnnnnnnnnnnnnnnnnnnnnnnnnnnnnnnnnnnnnnnnnnnnnnnnnnnnnnnnnnnnnnnnnnnnnnnnnnnnnnnnnnnnnnnnnnnnnnnnnnnnnnnnnnnnnnnnnnnnnnnnnnnnnnnnnnnnnnnnnnnnnnnnnnnnnnnnnnnnnnnnnnnnnnnnnnnnnnnnnnnnnnnnnnnnnnnnnnnnnnnnnnnnnnnnnnnnnnnnnnnnnnnnnnnnnnnnnnnnnnnnnnnnnnnnnnnnnnnnnnnnnnnnnnnnnnnnnnnnnnnnnnnnnnnnnnnnnnnnnnnnnnnnnnnnnnnnnnnnnnnnnnnnnnnnnnnnnnnnnnnnnnnnnnnnnnnnnnnnnnnnnnnnnnnnnnnnnnnnnnnnnnnnnnnnnnnnnnnnnnnnnnnnnnnnnnnnnnnnnnnnnnnnnnnnnnnnnnnnnnnnnnnnnnnnnnnnnnnnnnnnnnnnnnnnnnnnnnnnnnnnnnnnnnnnnnnnnnnnnnnnnnnnnnnnnnnnnnnnnnnnnnnnnnnnnnnnnnnnnnnnnnnnnnnnnnnnnnnnnnnnnnnnnnnnnnnnnnnnnnnnnnnnnnnnnnnnnnnnnnnnnnnnnnnnnnnnnnnnnnnnnnnnnnnnnnnnnnnnnnnnnnnnnnnnnnnnnnnnnnnnnnnnnnnnnnnnnnnnnnnnnnnnnnnnnnnnnnnnnnnnnnnnnnnnnnnnnnnnnnnnnnnnnnnnnnnnnnnnnnnnnnnnnnnnnnnnnnnnnnnnnnnnnnnnnnnnnnnnnnnacattgatgagtgtggggagatccccgccatctgtgccagtggtgtctgcatcaaccagatggggagcttccgctgcgagtgccccacaggcttcaactacaacagcatcctgctggcttgtgaagnagatgtcgatgagtgtggcagcagggagagtccctgccagcagaatgccgactgcatcaacgtccccggcagctaccgctgcnnnnnnnnnnnnnnnnnnnnnnnnnnnnnnnnnnnnnnnnnnnnnnggacggaatgagtgtcgggagatcccgaatgtctgtagccatggcgactgcatggacacagaaggcagctacatgtgtctgtgtcaccgtggataccaggcctctgcagaccacaccctgtgcatgnnnnnnnnnnnnnnnnnnnnnnnnnnnnnnnnnnnnnnnnnnnnnnnnnnnnnnnnnnnnnnnnnnnnnnnnnnnnnnnnnnnnnnnnnnnnnnnnnnnnnnnnnnnnnnnnnnnnnnnnnnnnnnnnnnnnnnnnnnnnnnnnnnnnnnnnnnnnnnnnnnnnnnnnnnnnnnnnnnnnnnnnnnnnnnnnnnnnnnnnnnnnnnnnnnnnnnnnnnnnnnnnnnnnnnnnnnnnnnnnnnnnnnnnnnnnnnnnnnnnnnnnnnnnnnnnnnnnnnnnnnnnnnnnnnnnnnnnnnnnnnnnnnnnnnnnnnnnnnnnnnnnnnnnnnnnnnnnnnnnnnnnnnnnnnnnnnnnnnnnnnnnnnnnnnnnnnnnnnnnnnnnnnnnnnnnnnnnnnnnnnnnnnnnnnnnnnnnnnnnnnnnnnnnnnnnnnnnnnnnnnnnnnnnnnnnnnnnnnnnnnnnnnnnnnnnnnnnnnnnnnnnnnnnnnnnnnnnnnnnnnnnnnnnnnnnnnnnnnnnnnnnnnnnnnnnnnnnnnnnnnnnnnnnnnnnnnnnnnnnnnnnnnnnnnnnnnnnnnnnnnnnnnnnnnnnnnnnnnnnnnnnnnnnnnnnnnnnnnnnnnnnnnnnnnnnnnnnnnnnnnnnnnnnnnnnnnnnnnnnnnnnnnnnnnnnnnnnnnnnnnnnnnnnnnnnnnnnnnnnnnnnnnnnnnnnnnnnnnnnnnnnnnnnnnnnnnnnnnnnnnnnnnnnnnnnnnnnctgtgtcaacaccgatggatccttccgctgtgagtgtccccttggctattgcctcgacttcaccagcatcaactgtgtggngacacagacgagtgctctgtcggccacccctgtgggcagggcacatgcaccaacgtcatcggaggcttcgaatgtgcctgtgctgacggctttgagcctggccccatgatgacctgtgaggngacatcgacgaatgctccctgaacccgctgctctgtgccttccgctgccacaataccgagggctcctacctgtgcacctgcccagccggctacaccctgcgggaggatggggccatgtgtcgagnnnnnnnnnnnnnnnnnnnnnnnnnnnnnnnnnnnnnnnnnnnnnnnnnnnnnnnnnnnnnnnnnnnnnnnnnnnnnnnnnnnnnnnnnnnnnnnnnnnnnnnnnnnnnnnnnnnnnnnnnnnnnnnnnnnnnnnnnnnnnnnnnnnnnnnnnnnnnnnnnnnnnnnnnnnnnnnnnnnnnnnnnnnnnnnnnnnnnnnnnnnnnnnnnnnnnnnnnnnnnnnnnnnnnnnnnnnnnnnnnnnnnnnnnnnnnnnnnnnnnnnnnnnnnnnnnnnnnnnnnnnnnnnnnnnnnnnnnnnnnnnnnnnnnnnnnnnnnnnnnnnnnnnnnnnnnnnnnnnnnnnnnnnnnnnnnnnnnnnnnnnnnnnnnnnnnnnnnnnnnnnnnnnnnnnnnnnnnnnnnnnnnnnnnnnnnnnnnnnnnnnnnnnnnnnnnnnnnnnnnnnnnnnnnnnnnnnnnnnnnnnnnnnnnnnnnnnnnnnnnnnnnnnnnnnnnnnnnnnnnnnnnnnnnnnnnnnnnnnnnnnnnnnnnnnnnnnnnnnnnnnnnnnnnnnnnnnnnnnnnnnnnnnnnnnnnnnnnnnnnnnnnnnnnnnnnnnnnnnnnnnnnnnnnnnnnnnnnnnnnnnnnnnnnnnnnnnnnnnnnnnnnnnnnnnnnnnnnnnnnnnnnnnnnnnnnnnnnnnnnnnnnnnnnnnnnnnnnnnnnnnnnnnnnnnnnnnnagacctggacgaatgcacctcccggcagcacaactgtcagttcctctgtgtcaacactgtgggcgccttctcctgccgctgtccacccggcttcacccagcgccaccaggcatgcttc

SEQ ID NO: 35077 - DNA, 215 bp, Macaca Mulatta
  misc_feature (1)...(215): n = A,T,C or G
gccagagacctagggcctggcgccctaaggaatcgccccaagacgagcctctggcccgggggctgttggagcatgtgcagggggacacagnntgtttgacagttgccagactatgtttacatttctggttctactcagccaactgcccacagctaccctggggtttcctcattgcacaagaggtccaaaggcttctaagcatgcgggagaagaag

SEQ ID NO: 35078 - DNA, 183 bp, Macaca Mulatta
gccccaggatgactactcggtcctatttgaagactcctcctatgcagacggctattcccctcccctcaatgtggctcagaggtacgtggtggcttgtaaggagcccaagaaaaagtgacgctgcctggcggactcaccatcccccaacgacacagggcaggacagcagaggatatgctgggat

SEQ ID NO: 35079 - DNA, 142 bp, Macaca Mulatta
cagctatggctggattggagatggattcgtggtcatctctaggattagcccaaaccccaagtgtgggaaaaatggggtgggtgtcctgatttggaaagttgcagtgaaccgacagttcgcagcctattgttacaactcttct

SEQ ID NO: 35080 - DNA, 764 bp, Macaca Mulatta
  misc_feature (1)...(764): n = A,T,C or G
ggggcagtagctttagcaagcagatggtcacaatctgttttctaaatcattttttattaaatgaatccaaagtatcctagctctttgtcaaagatggtatatagaaatgtttttaaagattagtgatgctgtgctttttgaattgttgcagtgttggagatgccattttcacctttttaaaaagatgcattttatttgcagattgtgaagttcttgcaaactcttactacagaaacgttttaagtaaattctcaggcatgttggcaaatatggcacatgtatacattttaggaaatgttgcttttcttaatcttttaaaaatatacctaatgagacattccactattataatgcgtaatgctcagctttttgtaaggaagtatttaattgtattttgtgttaatacaggcatttcacacaataatttgttcttaatgcagccactataacttgataagtcattgcactatttaaaaatttttagtaatatcatgaatttaatttgcttaagatttagtacatttcagaacttgaacttttgacaaactgcattgggaaaagaagtctgttaatagtgatttagtctccccacctcattcccacccccaacaaagcactatcattttcatttggaatgggtattttctgtttcatgatgtatttttaaatagagttcaggatcggcaattcagttcaacacaagtttgttgagnctttaaaatgtatttgaatatttaaataggcatttaaaatttcaaattagc

SEQ ID NO: 35081 - DNA, 548 bp, Macaca Mulatta
ctccattatcctcatgcctttgggaaagacttaacaaaaacaacgtttcatctggggaattgggctaggcggtgaggtggtactcaactttccagttagagacagcccagttttctggtttagtcattatgtctcaaattgaaacagtctcttttgagtgaattctcagtttttcagcccctctccactctgctttcccaaatggattctgtgtgaccaagagtttatatggcttcatggcagcaaggaaacagtcaacctcagcgtcacatgcactggtcctcagagtgccctgtgaatcctattggtttctgggtcagcgtcatcattctcttcaagtttggggcttggggaaaaaattagatcagctacggcatataaaaaagtcttttgtttcacatatgtgtaataacttatttatttttttatcctgctatacaaatatgtaattaaccaatgaggactcatgacgtaatagtgtatgtatgtaaagggaaatatggacttagtcataaactgttaaggtaaaagacgtggatttacctgct

SEQ ID NO: 35082 - DNA, 648 bp, Macaca Mulatta
ctcaactaggaccttaatgggtgctgtccctaagccctgtccttttgttccacctctagcgttctctcattctatcccacccacctatgtttgcctgttccccactttccatgcacttcctcactcagactcctattctcaccttgacctacaaccagacaatgcttctatccaagcaatttgtgcagtgggatgagctactttgccagctagaggccgccaagcaagtgaagccagcagaggaatgacagctgctccccatcccaaggtgggcctgggcagtcaggctccagggccctatgccaacctgtctttgttacaaggcagaggaagctttgtatttattggattcaaggcccacctctctactcaggtggagctctaaagttggaggtcaggtgaccagaggtttgtagtttgcaacacccaccctcccccccatcagtgttcttattccagtgacaataaaccatagagatgactggaggagtgtgctagcttcttggtctaggatgggggtggtggggggcagaagtggcagcctgcctaatcgttggactgggaactaaactcatcctggtttggctttctgacaggtgtagagctaagaagatgaaggctctcatttgattgtgtgaataggatatt

SEQ ID NO: 35083 - DNA, 3011 bp, Macaca Mulatta
  misc_feature (1)...(3011): n = A,T,C or G
gagggagctcctgttttagccctgccacctacctgggggccctctggctaccagtgtccttggagggcctccttgctgcttctcccactaaggtagattttccccaccctgcttaaggctccacaatggccaagggtcttcagctgtcaaaatctgggttctgagtagcatagggcaagaaagcacagaggtatagattgagccctataggactgtttgtgcttacagtggcaagaggcaggactggtatggtgtagtatccatgctgtggctggctggagacttggccctgctcccagacaactcccacccaagctctttagctgcctctacttcccttcagcatgagcatttggggaatgttgctgactggtgctacctctgccctgagaactctgccacggaacctacttctttccctcttctgccctggcctccccactcaccagctttctgctgtgtccctaggagctctggagccttaggaccatggacactctcaacaggaaccaaataggccctggatgcaagacccagaccatggtgcannnnnnnnnnnnnnnnnnnnnnnnnnnnnnnnnnnnnnnnnnnnnnnnnnnnnnnnnnnnnnnnnnnnnnnnnnnnnnnnnnnnnnnnnnnnnnnnnnnnnnnnnnnnnnnnnnnnnnnnnnnnnnnnnnnnnnnnnnnnnnnnnnnnnnnnnnnnnnnnnnnnnnnnnnnnnnnnnnnnnnnnnnnnnnnnnnnnnnnnnnnnnnnnnnnnnnnnnnnnnnnnnnnnnnnnnnnnnnnnnnnnnnnnnnnnnnnnnnnnnnnnnnnnnnnnnnnnnnnnnnnnnnnnnnnnnnnnnnnnnnnnnnnnnnnnnnnnnnnnnnnnnnnnnnnnnnnnnnnnnnnnnnnnnnnnnnnnnnnnnnnnnnnnnnnnnnnnnnnnnnnnnnnnnnnnnnnnnnnnnnnnnnnnnnnnnnnnnnnnnnnnnnnnnnnnnnnnnnnnnnnnnnnnnnnnnnnnnnnnnnnnnnnnnnnnnnnnnnnnnnnnnnnnnnnnnnnnnnnnnnnnnnnnnnnnnnnnnnnnnnnnnnnnnnnnnnnnnnnnnnnnnnnnnnnnnnnnnnnnnnnnnnnnnnnnnnnnnnnnnnnnnnnnnnnnnnnnnnnnnnnnnnnnnnnnnnnnnnnnnnnnnnnnnnnnnnnnnnnnnnnnnnnnnnnnnnnnnnnnnnnnnnnnnnnnnnnnnnnnnnnnnnnnnnnnnnnnnnnnnnnnnnnnnnnnnnnnnnnnnnnnnnnnnnnnnnnnnnnnnnnnnnnnnnnnnnnnnnnnnnnnnnnnnnnnnnnnnnnnnnnnnnnnnnnnnnnnnnnnnnnnnnnnnnnnnnnnnnnnnnnnnnnnnnnnnnnnnnnnnnnnnnnnnnnnnnnnnnnnnnnnnnnnnnnnnnnnnnnnnnnnnnnnnnnnnnnnnnnnnnnnnnnnnnnnnnnnnnnnnnnnnnnnnnnnnnnnnnnnnnnnnnnnnnnnnnnnnnnnnnnnnnnnnnnnnnnnnnnngagagcccccggctgggtgggcagctgcctgtggtggccatcagcctgagtgaatacccagcttctggtgctctcagtcaacccaccagcatccctggcagccctaagttccagcctccagtccctgctccccgaaacaagattggcacactccaggaccgccctcccagccctttccgtgagcctccaggcaatgagcgggtgctaacaactagcccctcacgccaactggtgggccgaacattttcatatttgttagccacccgtaccctgcagcctcctgagagtccccgcctgggccggcggggcctggacannnnnnnnnnnnnnnnnnnnnnnnnnnnnnnnnnnnnnnnnnnnnnnnnnnnnnnnnnnnnnnnnnnnnnnnnnnnnnnnnnnnnnnnnnnnnnnnnnnnnnnnnnnnnnnnnnnnnnnnnnnnnnnnnnnnnnnnnnnnnnnnnnnnnnnnnnnnnnnnnnnnnnnnnnnnnnnnnnnnnnnnnnnnnnnnnnnnnnnnnnnnnnnnnnnnnnnnnnnnnnnnnnnnnnnnnnnnnnnnnnnnnnnnnnnnnnnnnnnnnnnnnnnnnnnnnnnnnnnnnnnnnnnnnnnnnnnnnnnnnnnnnnnnnnnnnnnnnnnnnnnnnnnnnnnnnnnnnnnnnnnnnnnnnnnnnnnnnnnnnnnnnnnnnnnnnnnnnnnnnnnnnnnnnnnnnnnnnnnnnnnnnnnnnnnnnnnnnnnnnnnnnnnnnnnnnnnnnnnnnnnnnnnnnnnnnnnnnnnnnnnnnnnnnnnnnnnnnnnnnnnnnnnnnnnnnnnnnnnnnnnnnnnnnnnnnnnnnnnnnnnnnnnnnnnnnnnnnnnnnnnnnnnnnnnnnnnnnnnnnnnnnnnnnnnnnnnnnnnnnnnnnnnnnnnnnnnnnnnnnnnnnnnnnnnnnnnnnnnnnnnnnnnnnnnnnnnnnnnnnnnnnnnnnnnnnnnnnnnnnnnnnnnngggagagtatggagccctctaatgaggaaaatctcaaggaggagtgcagcagcactgannnnnnnnnnnnnngcacgaagacacacctagcaccaagctccagggagaggtgctagccctggaagaggagcgggctcaggtgctggggcgcgtggaacagctcaaggtccgtgtgaaggagctagagcagcagctgcaggagtcagcccgagaggnaggccgaaatggagcgagcactgctgcagggagagagggaggcagnnnnnnnnnnnnnnnnnnnnnnnnnnnnnnnnnnnnnnnnnnnnnnnnnnnnnnnnnnnnnnnnnnnnnnnnnnnnnnnnnnnnnnnnnnnnaaggaggcagaggccctggagactgagacaaaggtctttgaggacttggagttccagcagttggagcgggagagccgcgtggaggaggagcgtgagctggctggtcaggggctgctccggagcaaggctgagctgctccgcagcat

SEQ ID NO: 35084 - DNA, 854 bp, Macaca Mulatta
ggggctttcccttcggcgcgccactgaagatcctggtgtcgccatgggccgccgccccgcccgttgttaccggtattgtaagaacaagccgtacccaaagtctcgcttctgccgaggtgtccctgatgccaagattcgcatctttgacctggggcggaagaaggcaaaagtggatgagtttccgctctgtggccacatggtgtcagatgaatatgagcagctgtcctctgaagccctggaggctgcccgaatttgtgccaataagtacatggtaaaaagttgtggcaaggatggcttccatatccgggtgcggctccaccccttccacgtcatccgcatcaacaagatgttgtcctgtgctggggccgacaggctccaaacgggcatgcgaggtgcttttggaaagccccagggcactgtgggcagggttcacatttggccaagttatcatgttccatccgcaccaagctgcagaacaaggagcatgtgattggagggcctgccgcggggccaagtttcaagtttcctggccgcccagaaaattccacatctcaaaagaagtgggggcttctcccaaatttcaatggctgatgaaattttaaagaacttgggtggctgaaaaaaggggctcattcccaaaatgggttgtggggggtcaaattaacattccccaaatccgggggtcccctcttgggacaaatggggggggggcccgtgtcactctcatggaaggggtgtttccaataagtgcgtggcccccccttttataactcaagtaccttcccagaaattccttcccgggtcaagatgatcggatgtactacgaattcgctttcataaataaaacttggtcg

SEQ ID NO: 35085 - DNA, 345 bp, Macaca Mulatta
ctgccttctcaagcagagcggcagcttatcaaactcagcccacaactttgtttacatgggtggggagatggaacaggggaatacagagtgggatggtcaggacctgggccactgtgaccaaaatggggacttcctgggtagggaggtcactccctctactcactgagctagaattagggaggattatcaccccaaccgttgcaatgggaggtggagggacaggctcagcatcctcattgtctacatgaggcccaaatgtgtgaagtgcgatttctgcttttgtgtaccccaccaccccattaccacagctgcctttgtgtttgtgtcaataaaaagccaaaccct

SEQ ID NO: 35086 - DNA, 2148 bp, Macaca Mulatta
  misc_feature (1)...(2148): n = A,T,C or G
cagggtcactgaaatctcccaggaagccccagagctttcctgaggctgcccggccttgatcaactcgggaagacaaaatcgagccattatctcctcttggaaaggaatcttgccagaaaaacgggatttcaggcccctccctccctgcctgggcgcctggccaccagaaggctctgccgagcaccaagaggtctctgggctcttgtcagctgcttttgaacctgaggttcctgtgtcattgagccagaaatcagaccaccgaagctcactcccttcctctccatctctccctctcttcgagactctggcggtggcctgtgatcctgaagacagctctgcagccaactggtgcttcggcctttgcgctgtcccggggccagcttccctcgacctggggaggccatggcctgtggaggaggcccaggtaaaggctggcagctgttgctggctctcctctctgcttctggaagcttccgcctcactcagaatgggcaggacagacccactgactggacttcagagtctggagggttccattggtcaggggaaagtgggcacgtggcctcttgctgtgccccttgtcacagacccgaggagcaactctgtcccctgagcattgggggtcctggggaagaggtggacacacagctccctccaactggcattcggcaacaggagcctggacttctgtgcaagaaagggagacccaagggtgaacagtggnnnnnnnnnccctagagaacaaacatccaattcctaggtggttaccaatcatgacttcctgcaaatcaacgccaggagagcaacttacattcatttctttgtcttaaaacgtagcagcaactggccccacaactcctgtcaatgtaatttattccaccaccacctaacaggatagagtggagggagtttggataaatgggctgagctgggcttctcttcctccccacagaggggagatctcagcactttgtccggagctgnnnnnnnnnnnnnnnnnnnnnnnnnnnnnnnnnnnnnnnnnnnnnnnnnnnnnnnnnnnnnnnnnnnnnnnnnnnnnnnnnnnnnnnnnnnnnnnnnnnnnnnnnnnnnnnnnnnnnnnnnnnnnnnnnnnnnnnnnnnnnnnnnnnnnnnnnnnnnnnnnnnnnnnnnnnnnnnnnnnnnnnnnnnnnnnnnnnnnnnnnnnnnnnnnnnnnnnnnnnnnnnnnnnnnnnnnnnnnnnnnnnnnnnnnnnnnnnnnnnnnnnnnnnnnnnnnnnnnnnnnnnnnnnnnnnnnnnnnnnnnnnnnnnnnnnnnnnnnnnnnnnnnnnnnnnnnnnnnnnnnnnnnnnnnnnnnnnnnnnnnnnnnnnnnnnnnnnnnnnnnnnnnnnnnnnnnnnnnnnnnnnnnnnnnnnnnnnnnnnnnnnnnnnnnnnnnnnnnnnnnnnnnnnnnnnnnnnnnnnnnnnnnnnnnnnnnnnnnnnnnnnnnnnnnnnnnnnnnnnnnnnnnnnnnnnnnnnnnnnnnnnnnnnnnnnnnnnnnnnnnnnnnnnnnnnnnnnnnnnnnnnnnnnnnnnnnnnnnnnnnnnnnnnnnnnnnnnnnnnnnnnnnnnnnnnnnnnnnnnnnnnnnnnnnnnnnnnnnnnnnnnnnnnnnnnnnnnnnnnnnnnnnnnnnnnnnnnnnnnnnnnnnnnnnnnnnnnnnnnnnnnnnnnnnnnnnnnnnnnnnnnnnnnnnnnnnnnnnnnnnnnnnnnnnnnnnnnnnnnnnnnnnnnnnnnnnnnnnnnnnnnnnnnnnnnnnnnnnnnnnnnnnnnnnnnnnnnnnnnnnnnnnnnnnnnnnnnnnnnnnnnnnnnnnnnnnnnnnnnnnnnnnnnnnnnnnnnnnnnnnnnnnnnnnnnnnnnnnnnnnnnnnnnnnnnnnnnnnnnnnnnnnnnnnnnnnnnnnnnnnnnnnnnnnnnnnnnnnnnnnnnnnnnnnnnnnnnnnnnnnnnnnnnnnnnnnnnnnnnnnnnnnnnnnnnnnnnnnnnnnnnnnnnnnnnnnnnnnnnnnnnnnnnnnnnnnnnnnnnnnnnngtgtttcgccagttaagcacctgtgactccagtacctactactggtttttggttggttgttctgtcttttttttaattaaataaaaacatttttaaaatgt

SEQ ID NO: 35087 - DNA, 185 bp, Macaca Mulatta
tggtgatatatcccagctcagacagtcaggcgcaccctccggagctgctgttctcagcctcactgcccgccctgggcttcagcacctattcagtagcccaggtgcctcgttggaagccccaggcccgcgcaccccagcccatccccaggagatcctggtcccctgctttaaccatcgaaaatgag

SEQ ID NO: 35088 - DNA, 86 bp, Macaca Mulatta
gaggggtgttttcatggcgcgatgcactgtgacttgttattcaagttgtatgtctactgttccatctatcacgttttatacctttc

SEQ ID NO: 35089 - DNA, 264 bp, Macaca Mulatta
ggcgcacaggtctgcgcagcggccccggcaagctgcgcgggcaggaccggaggacacgcggcggaggcggaggaagccagcgccggcccccggggtgcacgcccagccagcccccaggcccagccctgcctctgtccggacctaccacacttcctttattggcctgggtttttaggcttctcttaactttggctttagactgttgcaccctcctcacaatccttgctctgacgtggcctccctcgctctgccagcctcaaattt

SEQ ID NO: 35090 - DNA, 790 bp, Macaca Mulatta
  misc_feature (1)...(790): n = A,T,C or G
ggaatgtctgattgaaacacaaatttacatgcatgtttgttacaaaaaatgaaaaagtcacaatttgtcagctctgatttaaaattgcaattatttttaaggtgtataccatcgaagagaatgggtatttttttgtatgtattctggaagaannnnnnnnnnnnnnnnnnnnnnnnnnnntattccaaaacctcatttgccttattttgttctttaaaaggaacacttaactatttttaatttttaagtctacccgctgagaaggggacaaggtttacgtcatgtactaaaataatagacaatgtatcgctttaaagattaaaattccgtatatttgnnnnnnnnnnnnnnnnnnnnnnnnnnnnnnnnnnnnnnnnnnnnnnnnnnnnnnnnnnnnnnnnnnnnnnnnnnnnnnnnnnnnnnnnnnnnnnnnnnnnnnnnnnnnnnnnnnnnnnnnnnnnnnnnnnnnacccccccccgccccccccaaaaatcttttaaaaacctctgttgtggggggcccgcggccnnnnnnnnnnnnnnnnnnnngccccaaatgtttttccaagaaagaccgcgggccaaacaaagggtgtggttaannnnnnnnnnnnnnnnnnnnngccgggggaaacagaagnnnnnnnnnnnnnnnnnnnnngggggtgttccgaggaggttcatttgggagatataaaccgaggggggcccctcgagcggcctcctcttaaaaaaatttaaaccccccccgcgcagaagggacaatnnnnnnnnnnnnnnnnnnnnnnnn

SEQ ID NO: 35091 - DNA, 650 bp, Macaca Mulatta
gcgaggtggggcacggggaggcgggaggccggcggaggggccaggtcctgttcccccgcagccccggggtgcggcccgggtgagcgcggccgccttatcttcggggcgtctttcttaggtgaaagaaaatggcccgaaccaagcagactgctcgtaaatccaccggtgggaaagcgccccgcaaacagctggccacaaaagccgccaggaaaagcgctccctctaccggcggggtgaagaagcctcatcgttacaggcccgggaccgtggcgcttcgagagattcgccgttatcagaagtcgaccgagctgctcattcggaagctgcccttccagaggttggtgagggagatcgctcaggatttcaaaaccgacctgaggtttcagagcgcggccattggtgcgctgcaggaggctagtgaagcgtacctggtgggtctgttcgaagatactaatctgtgtgccatccacgctaagagagtcaccatcatgcccaaagacatccagttggctcgccggatacggggagagagagcttaagtgaaggcagtttttatggcgttttgtagtaaattctgtaaaatactttggtttaatttgtgactttttttgtaagaaattgtctataaatatgttgcatttgtacttaag

SEQ ID NO: 35092 - DNA, 590 bp, Macaca Mulatta
ttgagatggctgggtcaaagttggccatgtgtggagagtgcttggcccctagaactggaggaggatgggttagacagactccttagtgtctttgtctaatcactcagggacagtaaggagctctctggatgggggcaggggagtggggagggcaatgtcaatgagggccagaggtggagcgagggcaagactgtgtctgcacaccaaccacacctgctagtccacgcatccgctagcatggcgggtttccacctgaagcacaggctgaggacagatttcaaagctccattttatgcactagtcagggcagggatggaatgtaaaggaacaatgagaacttctctcatttgtcccattgtacagggctttctcaccatcttttcactgatgctacaaataagcatggccttgggaattacccaaatcagtccacatccctggggatgctttcctgatggctccatcctagctgacctctggcctccaccactctgaggataaacccccataccccagctcacatcctaactgccctgcaggtgattctgcccttcccagctggcatgggggctctgccaggcagggcccag

SEQ ID NO: 35093 - DNA, 1507 bp, Macaca Mulatta
  misc_feature (1)...(1507): n = A,T,C or G
cacacatcaagtccttggaagccagggctgaactgtcatctccaagaagaggaagggtcctggccctgaccatggggctcccttgataggagggatcacaaacttggcttcctggggggcgtcgtggggtgcgctgcctgccaggagaccccattcctggtcacggggttctgtcccacacagtggcaggagccatgcatgattcttggcggaagaaggtccacacagctgtgtggtctttgtggcccggcagggaagcccccacatcagccgcaagggaacttcccaaagctcagcaggtgcctcttccagccgtcccccaggtcttctcttggccgctgtcctgagccttgatccatagctgacacttctagaaaagtctttaccgagaaacagaccggctgcatgggcggtggggagtgcagtcgcccagggcctggaatcggaggggcctgtggccaaggctgtcctgaaattcttaatcattttacctctgaacttgtggggttttttgttgttgttntttgaggcagactctcgctctgtcgcccaggctggagtgcggtggcgcgatctcggctcactgcgagttccgcctcccnnnnnnnnnnnnnnnnnnnnnnnnnnnnnnnnnnnnnnnnnnnnnnnnnnnnnnnnnnnnnnnnnnnnnnnnnnnnnnnnnnnnnnnnnnnnnnnnnnnnnnnnnnnnnnnnnnnnnnnnnnnnnnnnnnnnnnnnnnnnnnnnnnnnnnnnnnnnnnnnnnnnnnnnnnnnnnnnnnnnnnnnnnnnnnnnnnnnnnnnnnnnnnnnnnnnnnnnnnnnnnnnnnnnnnnnnnnnnnnnnnnnnnnnnnnnnnnnnnnnnnnnnnnnnnnnnnnnnnnnnnnnnnnnnnnnnnnnnnnnngtggaaagccaggcccggacacctcttgggcatcgtctgttggggtgaccctcccacacccagcctggaaccctagccagctcagcctccgtccgctgagaaatcaaggtgaccttgtggctcagccctcagggggcactcaccacacaagaggtccctttcaagaccccctgtttggggctggagcccccaggaatggttggggcagcttcctggggcnnnnnnnnnnnnnnnnnnggggcctgggagctgagggcatctcatctccccacaagcgtctgctgctgctcctggctgccacccatccccgtaagatgctgagagctggatacttttctgtgcaggggcatgggaaagagagaaagcctggcagaggggtgggagctaagaagcaaagggcgtggaagggccactgtgcactttcgaagactctgcttgccattggccaccccacctctccctgccctcatccaaggacggacaggcctggcaggtgggccggagccatgcggcagaagcatcccaggcctggcctcagaggaaggggccacagtgaaagaggaggctgtctgcacccacctccccagcctttatctctgggacct

SEQ ID NO: 35094 - DNA, 333 bp, Macaca Mulatta
tggtaaaatagaagtaagacatttatttagaaaatttgtttttatgataaaagtatgagctgcttgaaaaggagtgcgcctgttatttttgttgtgttctgcgtaatctttactgctcattttccccacgagactcagtgtttactcagggcatgaaaggagaccacaagctggagtcctcagagtgctgctgtctaaatatgggacctaagggatcataagcgagagggcttatctcttttcccctgtgatccactcacctctcaacatctcagtgtatgcatctcaggaaaggacatcataaagggaatgcactctctcctatcccaagtg

SEQ ID NO: 35095 - DNA, 140 bp, Macaca Mulatta
  misc_feature (1)...(140): n = A,T,C or G
ctacgcgagatgggctccgaagggtgnggtggaaccagcagcacgagaacctggagaagctgaacatgcaagccatcctcgatgccacaatcagccagggcgagcccattcaggagctgctggtcacccatgggaaggtn

SEQ ID NO: 35096 - DNA, 708 bp, Macaca Mulatta
  misc_feature (1)...(708): n = A,T,C or G
nnnnnnnnnnnnnnnnnnnnnngtgctgcgtgtnnnnnnnnnnnnnnnnnnnnnnnnnnatnnnnnnnnnnnnnngcacctggccatgtgcatttgcttaagaggagcattggtagtctcagagcttctgcgaggcaggaagagccatgacgccctgccagagaactgtcaggcctcagccctcagaggacatctttgagtggaaggtggatgtgttgtcagctgttgcaagtaagacagggacggtgtgtcctggtgtgctttgtgtcttaggttgagataagtcgaagagtgactctggaaaaactccctcctgtcctcgtgctacacctgaaacgattcgtttatgagaagactggtgggtgccagaagcttatcaaaaatattgaatatcctgtggacttggaaattagtaaagaactgctttctccaggggttaaaaataagaattttaaatgccacagaacctatcggctctttgcagtggtctaccatcacggcaacagtgcgacgggcggccattacactacagacgtcttccagatcggtctgaatggctggctgcgcatcgatgaccagacagtcaaggtgatcagccagtaccaggtggtgaaaccaactgctgaacggcacagactacctcctgtattaccgccgagtggacctgctctaaacctctgtgcgctgtgtgtgtcccagtgcccgctc

SEQ ID NO: 35097 - DNA, 612 bp, Macaca Mulatta
  misc_feature (1)...(612): n = A,T,C or G
gcccgcctcttctgcatcttctttgcccttgtggggatcccgttgaacctcgtggtgctcaaccgactggggcatctcatgcagcagggagtaaaccactgctccagcaggctggggggcacctggcagnnnnnnnaaggcgcggtggctggccggctctggcgcccttctctctggcctcctgctcttcctgctgctgccacccctgctgttctcccacatggagggctggagctacatggagggcttctacttcgccttcattaccctcagcaccgtgggctttggcgactacgttattggnnnnnnnnnnnnnnnnnnnnnnnnnnnnnnnnnnnnnnnnnnnnnnnnnnnnnnnnnnnnnnnnnnnnnnnnnnnnnnnnnnnnnnnnnnnnnnnnnnnnnnnnnnnnnnnnnnnnnnnnnnnnnnnnnnnnnnnnnnnnnnnnnnnnnnnnnnnnnnnnnnnnnnnnnnnnnnnnnnnnnnnnnnnnnnnnnnnnnnnnnnnnnnnnnnnnnnnnnnnnnnnnnnnnnnnnnnnnnnnnnnnnnnnnnnnnnnnnnnnnnnnnnnnnnnnnnnnnnnnnnnnctgcaggctgttgcaaggacagctag

SEQ ID NO: 35098 - DNA, 433 bp, Macaca Mulatta
cccaacccttggatagcagggagatgctggaggggtagggtcaggaagagtatgtgagagcagtaatttcccaagactgccctctgcgggactgtatttcagaaaacacactgggtggggctacctctccattcgcatgtactgccccagcctctccccatcccccgctgatgcacatccatagccgcactgttccacaatggcagtagaatgctgcagaaggcgcaaggattcctccagtccaccttcaaagaaaaagtcaccaatcacatttggtaggttagggaacattaaacacattagtgagcagaagaaaatctgaatgaacaggaattggtaatctacctaactgaacacagatgaactcaggcggttggtaacaggaggtaaagaacggcgctaactgcagaacagctgccccccaccttcccag

SEQ ID NO: 35099 - DNA, 524 bp, Macaca Mulatta
cgggaaatgcagtttctatctaccattaggctgattgtccaaatgatttgtgaagctgtttttagaagatgagaaactaaggattcttctgttttatagctatttgccttaagaacttagattctgattgaattcataatacttatttctgaagatgtctttgactgtaaatttaggaattaagatgcaaagtcccatgtgtcctctgatctaaagttgcatggttggtctgaaaatacagttgggcttaatgttgagttctagtactcctgaatggcgcagttgttatgaatattaataaatcattttttaacttatgtaaaatacagatcataatattctataggtaatgtttaataaactgcctgaataatatacaatttgtctctcttttggttgtaaactgaggttaacagaggaataatgaaaggaatgataaaacatcaaacagtcaccaaagtactgttttctctaattttgttttatgtagcacttcgagtaacttatcaaaatattaatttaat

SEQ ID NO: 35100 - DNA, 523 bp, Macaca Mulatta
ggggaggggcccagcctggacaccctcctattattgccatgggttccagtttgcttccccaacctacagggcctagaggtgcccagcctagggaaagagtggacccagcccctgacccttggcccttggaatggagcatagtccagatggccctggctctagcaccaactcataagcctccaccccaggcccatctccttagggccactgagctcctattggagccaggcttgctagactctaggccactgggtccagctccaagcaggcagactaaaaagttctggcccccaggctggctgaactctgggatcctaattccaggctctaggtgaggtggacttaggtcctgggctccaggataggccaggggccttcagggctgcagcaggtagctgccttcatggctgggcttctggggtggtggggccttctcaggacaggggccagggctggagttgggacttgattcagagagagagtcaacgtcagcagagcgagaatggcaggcccagcagaggat

SEQ ID NO: 35101 - DNA, 268 bp, Macaca Mulatta
cttcatgtggcctttataaatatgcatttgagacagagttatatgcagaagttgaaaatgcctggaagacttctggtttctttcactacttgtcctgcctttttgtgttgctgccagatttggatgatatgatattcagaggggcaccttaatcaaagccattcttcaacaagacccacctggcagaagattgcacacataattcaagatggctagtcaacctcccgaagaccctgcggagtctcaggcctctgatgagctcgagtgc

SEQ ID NO: 35102 - DNA, 342 bp, Macaca Mulatta
tcagcccattttccttagcatcccaaaattcaggttgggcagagtcccatggagctttctctcttggtgctcaaaccactgtgacaggctggggttctgggggtggatgcagatgctgcgttgagccaggtgaagcacgaaagcctggagatgacagtccccatcagcctcctgcagttccacccggatgaccttcctcagtagcttgtctgagagtggctttcggtagagctgagtacagcaggcagtgctgggtggcagtaggaatgctgctgtagggtctgggctcaggagcaatgacaggagcaggaggctgcagaaggttggtgggggccccttcat

SEQ ID NO: 35103 - DNA, 996 bp, Macaca Mulatta
ttctgaatggcatagcacttcaagagcatatcttgatagtctaccagatgtgaaaatcgtcaagatagaagtgtcctgatggaggagacaatgcagacagcagtaacacagctcttaatatgcctgttattcctataaatactattgcagaagccgtacttgaaatgattaacagaggacagattcaaataacaattaatggattcagtattagcaatggactggcaactactcagatcaacaataaggctgcaactggagaggaggttccccgtaccattattgtaaccacccgttctcagtatgggttaccagaagatgccattgtatactgtaactttaatcagctgtataaaattgacccttctactttgcagatgtgggcaaatattctgaagcgtgttcccaatagtgtactctggctgttgcgttttccagcagtaggagagccgaatattcaacagtatgcacaaaacatgggcctgccccagaaccgtatcattttttcacctgttgctcctaaaaaggaacatgtcaggagaggccacctggctgatgtctgcttggacactccacttcgtaatgggcacaccacaggggatggatgatcctctggggcaggggacccccccatgggtgaactaatgccccaagaatagacctccttggcctttcctcaaagtttggcaagcctttccccaagcctttaaccttggctttaaagccctggacttttgaagcctcctatttgccctaaaacacacccgacaccagtgatgtaagggaaagtaaactctatcccttgttgttaaaaccttggggaaaaaactggacatcctataacaaatataccggcgtaagaaacaaatctttccggtggtgcctcaaaaattccttgtggtaataacacctaagaataatttttttcttagcgccccccctctctggaatttccaaacaccactcccgtaaaagtccaaaattaacttccgcaat

SEQ ID NO: 35104 - DNA, 206 bp, Macaca Mulatta
actgtaagtaacatggtgtcttcttccgtctttttcctgttaagggtcaacgccactattctatttcatatttaccatttttttcttttaaaagaatccatgtggtgggtcattgtagaaaatttagacaatatgcaaatatgccaaaagaaaaagaaatgatgcagcctgtaaccacactgtgtgtaggtgctctctgtgtgggt

SEQ ID NO: 35105 - DNA, 222 bp, Macaca Mulatta
ttgtgttgggcccgtccttgcccggttgtgcctggcttggcgtctggtggagagaggggcctcttcggtgtctactgagtaaggggacaacttcaggccggggcctgcctcctgcgcagagtaagccggtaaatgtttgtgaaatcaatgcgtggataaaggaacacatgccatccaagtaacgatggcttttcctggagggaaaggataggctgttgctct

SEQ ID NO: 35106 - DNA, 685 bp, Macaca Mulatta
  misc_feature (1)...(685): n = A,T,C or G
ggacgcctggagtgaccagaaggggcagatccacctggatccccagcaggactaccagctgctgcaggtggagaggacgccagaaggcctggccctgcttttcaagaggccctttggcacctgcgaccccaaggattacctcattgnnnnnnnnnnnnnnnnnnnnnnnnnnnnnnnnnnnnnnnnnnnnnnnnnnnnnnnnnnnnnnnnnnnnnnnnnnnnnnnnnnnnnnnnnnnnnnnnnnnnnnnnnnnnnnnnnnnnnnnnnnnnnnnnnnnnnnnnnnnnnnnnnnnnnnnnnnnnnnnnnnnnnnnnnnnnnnnnnnnnnnnnnnnnnnnnnnnnnnnnnnnnnnnnnnnnnnnnnnnnnnnnnnnnnnnnnnnnnnnnnnnnnnnnnnnnnnnnnnnnnnnnnnnnnnnnnnnnnnnnnnnnnnnnnnnnnnnnnnnnnnnnnnnnnnnnnnnnnnnnnnnnnnnnnnnnnnnnnnnnnnnnnnnnnnnnnnnnnnnnnnnnnnnnnnnnnnnnnnnnnnnnnnnnnnnnnnnnnnnnnnnnnnnnnnnnnnnnnnnnnnnnnnnnnnnnnnnnnnntttactacccggaggaagccggcattgccttcggggccctagaaacctccagatacgtccgcctggaagttcactaccacaacccgctggtgatagaagg

SEQ ID NO: 35107 - DNA, 478 bp, Macaca Mulatta
aaaaaccaagtgggctgggagttcctttccttcagggacgggccatgtttccctcattccttatcagtagagaccgaaaggggcagcttcctttccactcccgaggggccgtcatgctacccatgtagccttcagacaggtgacttgtgtctcaatccccgagtgatgtgggagagggtgtgggtggatcttttcctgggagccagatggacggtgctccagatgttagttaagtcaacagctgggctaggcaacacctggtggaaaagtcagtgggagtcagaggtaccagacagggtgggccagatgtgggtgagagttcacctgccagtcagcatatcatctgctctcctggcctcggcaagggtgagcagggcgcttgccatcttccatgatataataggtaggagaaggagcacaggcatcacagctggaaggatgtgaggggagtacacctcagtacattttagtcctattc

SEQ ID NO: 35108 - DNA, 153 bp, Macaca Mulatta
tgcacttgctgaaagacacaagggcctgactggggtggaaggcagggcggcccccagctgtcatcaattaaaggcaaaggcaattgaatcttaacaggcacggtgcgtgactgcgagcgtgaagccagggaagggggctgggtgcacggcgca

SEQ ID NO: 35109 - DNA, 4142 bp, Macaca Mulatta
  misc_feature (1)...(4142): n = A,T,C or G
gcctcgcaccagagaccggttaagaagagggattggaggtccatcacttcactaacccaggaaggacttatctttcgcttcagccagacctcaccccaattctgtgaatcagcggaggacggcaaaactgcagagtcagaggaggctgtgcaaggagcagagaccagggctcacacaggtggccccagcccaggccctggcccaggcccaggagcctgcttccctgcatcgctgaggaggaacagcaccatgctgggtcctcacctcccatctccgccccttgcgcccagcgaagggaggcctaccccctgcgccttccagatccctgatggaagctacaggtgtctggctctgnnnnnnnnnnnnnnnnnnnnnnnnnnnnnnnnnnnnnnnnnnnnnnnnnnnnnnnnnnnnnnnnnnnnnnnnnnnnnnnnnnnnnnnnnnnnnnnnnnnnnnnnnnnnnnnnnnnnnnnnnnnnnnnnnnnnnnnnnnnnnnnnnnnnnnnnnnnnnnnnnnnnnnnnnnnnnnnnnnnnnnnnnnnnnnnnnnnnnnnnnnnnnnnnnnnnnnnnnnnnnnnnnnnnnnnnnnnnnnnnnnnnnnnnnnnnnnnnnnnnnnnnnnnnnnnnnnnnnnnnnnnnnnnnnnnnnnnnnnnnnnnnnnnnnnnnnnnnnnnnnnnnnnnnnnnnnnnnnnnnnnnnnnnnnnnnnnnnnnnnnnnnnnnnnnnnnnnnnnnnnnnnnnnnnnnnnnnnnnnnnnnnnnnnnnnnnnnnnnnnnnnnnnnnnnnnnnnnnnnnnnnnnnnnnnnnnnnnnnnnnnnnnnnnnnnnnnnnnnnnnnnnnnnnnnnnnnnnnnnnnnnnnnnnnnnnnnnnnnnnnnnnnnnnnnnnnnnnnnnnnnnnnnnnnnnnnnnnnnnnnnnnnnnnnnnnnnnnnnnnnnnnnnnnnnnnnnnnnnnnnnnnnnnnnnnnnnnnnnnnnnnnnnnnnnnnnnnnnnnnnnnnnnnnnnnnnnnnnnnnnnnnnnnnnnnnnnnnnnnnnnnnnnnnnnnnnnnnnnnnnnnnnnnnnnnnnnnnnnnnnnnnnnnnnnnnnnnnnnnnnnnnnnnnnnnnnnnnnnnnnnnnnnnnnnnnnnnnnnnnnnnnnnnnnnnnnnnnnnnnnnnnnnnnnnnnnnnnnnnnnnnnnnnnnnnnnnnnnnnnnnnnnnnnnnnnnnnnnnnnnnnnnnnnnnnnnnnnnnnnnnnnnnnnnnnnnnnnnnnnnnnnnnnnnnnnnnnnnnnnnnnnnnnnnnnnnnnnnnnnnnnnnnnnnnnnnnnnnnnnnnnnnnnnnnnnnnnnnnnnnnnnnnnnnnnnnnnnnnnnnnnnnnnnnnnnnnnnnnnnnnnnnnnnnnnnnnnnnnnnnnnnnnnnnnnnnnnnnnnnnnnnnnnnnnnnnnnnnnnnnnnnnnnnnnnnnnnnnnnnnnnnnnnnnnnnnnnnnnnnnnnnnnnnnnnnnnnnnnnnnnnnnnnnnnnnnnnnnnnnnnnnnnnnnnnnnnnnnnnnnnnnnnnnnnnnnnnnnnnnnnnnnnnnnnnnnnnnnnnnnnnnnnnnnnnnnnnnnnnnnnnnnnnnnnnnnnnnnnnnnnnnnnnnnnnnnnnnnnnnnnnnnnnnnnnnnnnnnnnnnnnnnnnnnnnnnnnnnnnnnnnnnnnnnnnnnnnnnnnnnnnnnnnnnnnnnnnnnnnnnnnnnnnnnnnnnnnnnnnnnnnnnnnnnnnnnnnnnnnnnnnnnnnnnnnnnnnnnnnnnnnnnnnnnnnnnnnnnnnnnnnnnnnnnnnnnnnnnnnnnnnnnnnnnnnnnnnnnnnnnnnnnnnnnnnnnnnnnnnnnnnnnnnnnnnnnnnnnnnnnnnnnnnnnnnnnnnnnnnnnnnnnnnnnnnnnnnnnnnnnnnnnnnnnnnnnnnnnnnnnnnnnnnnnnnnnnnnnnnnnnnnnnnnnnnnnnnnnnnnnnnnnnnnnnnnnnnnnnnnnnnnnnnnnnncctgtaccccagctccgaccccaagtcttctcatctgaagggccaggctgttcctgccagcaagacaggcattctggaggagtcaatggcccgccggggcagccgcaaatccatgtttaccttcgtggagaagcccaaggtgaccccgaatccagacctgctggatctggtacagacagcggacgagaagcggcggcagagggaccagggggaggtaggcgtggaggaggagcccttcgcactgggggccgaggcctccaacttccagcaggagccagcacctcgcgacagggccagccccgcggcggtagaggaggcggtcccagagtgggcctcctgcctcaagtcaccccgcatccaggccaagccgaagcccaaacccaaccagaacctctccgaggcctctgggaagggggctgagctctatgcccgccgccagtcacggatggagaaatatgtcatcgagtcttcaagnnnnnnnnnnnnnnnnnnnnnnnnnnnnnnnnnnnnnnnnnnnnnnnnnnnnnnnnnnnnnnnnnnnnnnnnnnnnnnnnnnnnnnnnnnnnnnnnnnnnnnnnnnnnnnnnnnnnnnnnnnnnnnnnnnnnnnnnnnnnnnnnnnnnnnnnnnnnnnnnnnnnnnnnnnnnnnnnnnnnnnnnnnnnnnnnnnnnnnnnnnnnnnnnnnnnnnnnnnnnnnnnnnnnnnnnnnnnnnnnnnnnnnnnnnnnnnnnnnnnnnnnnnnnnnnnnnnnnnnnnnnnnnnnnnnnnnnnnnnnnnnnnnnnnnnnnnnnnnnnnnnnnnnnnnnnnnnnnnnnnnnnnnnnnnnnnnnnnnnnnnnnnnnnnnnnnnnnnnnnnnnnnnnnnnnnnnnnnnnnnnnnnnnnnnnnnnnnnnnnnnnnnnnnnnnnnnnnnnnnnnnnnnnnnnnnnnnnnnnnnnnnnnnnnnnnnnnnnnnnnnnnnnnnnnnnnnnnnnnnnnnnnnnnnnnnnnnnnnnnnnnnnnnnnnnnnnnnnnnnnnnnnnnnnnnnnnnnnnnnnnnnnnnnnnnnnnnnnnnnnnnnnnnnnnnnnnnnnnnnnnnnnnnnnnnnnnnnnnnnnnnnnnnnnnnnnnnnnnnnnnnnnnnnnnnnnnnnnnnnnnnnnnnnnnnnnnnnnnnnnnnnnnnnnnnnnnnnnnnnnnnnnnnnnnnnnnnnnnnnnnnnnnnnnnnnnnnnnnnnnnnnnnnnnnnnnnnnnnnnnnnnnnnnnnnnnnnnnnnnnnnnnnnnnnnnnnnnnnnnnnnnnnnnnnnnnnnnnnnnnnnnnnnnnnnnnnnnnnnnnnnnnnnnnnnnnnnnnnnnnnnnnnnnnnnnnnnnnnnnnnnnnnnnnnnnnnnnnnnnnnnnnnnnnnnnnnnnnnnnnnnnnnnnnnnnnnnnnnnnnnnnnnnnnnnnnnnnnnnnnnnnnnnnnnnnnnnnnnnnnnnnnnnnnnnnnnnnnnnnnnnnnnnnnnnnnnnnnnnnnnnnnnnnnnnnnnnnnnnnnnnnnnnnnnnnnnnnnnnnnnnnnnnnnnnnnnnnnnnnnnnnnnnnnnnnnnnnnnnnnnnnnnnnnnnnnnnnnctccgctgcttcagagcgctttgcctcgcctccgcctgcgctcctctccggggtccttctgctggctgcggactcagcccaccactgctgtctgacgcttttcttcctgcccccctccgaggcctggctctgttttagggagaccactgggcccaggcctcagccccagttcttcctggcttgctgtcactgctgtaggggtgggggacgtcccaggggatccccaggaggagagccctgtaggaggctgtgcagatgtgggtgtgccacagggagggtggcccctagccatgtatccattggctgttttggcttcagattcaaccaagatctgcctgactaaaagaagccacctcagtgcactggaacggggcccagggggaggcaggagaggagggttctggtcccatgtcaccctcccatttgctgtgtgactttggcccactcacgttctctctttgggcctcagttttatcatttatacaaagagggcttttctagctgtaacaatctgtgaggattgagaggataggatggttctttgaa

SEQ ID NO: 35110 - DNA, 764 bp, Macaca Mulatta
ggaacctaggacattgtttaacataacacagggttcagtggtgtcattaaagacacacttttttttgccttgacctcagttggtttgttttgccttaggctaatccacctctcaatcacaagagctgctgctattacttcacttttacatcttcgtaaaattgtatctcaaaggcagaaaaggccattctctcatttgttttatccatgaagaagacttttaacaaaaacctccggaagatttcccctcagtttccattgacttagatcagattacagagaaaggcaatgtctgacatttttagtctgttagaagtggactctgttgaaaagaaaagctaagctaggtgtggagaatggaattggaagcccactgccttcccataagaaaagtttgccataatttactcatttttttctgttagacattttgattatctgcagcttattactacaagcagtggcagagtgaatgtccttgtacattttgaggtacatgcttaattatgttcttgagacagtttctaaaagtggaatgattgatttgactggttcacagggctttaattgtacaatttctctccctaattagtactatatgtgggtgacctccctcccctgccaaaatactccttggccaaattgaaggaattcttttttatttaattggtggccataaaaaaaaggggaatgtccctttttaaaaattgggaatttccttcaataaacaaaaaaggtggaatatgcccacggggtggttattgg

SEQ ID NO: 35111 - DNA, 332 bp, Macaca Mulatta
ccacaggagtttgtcaagcttcaagttagccaagaagagttcctctgtatgaaagtattgttacttcttaatacaattcctttggaaggactacgaagtcaaacccagtttgaggagatgaggtcaagctacattagagagctcatcaaggcaattggtttgaggcaaaaaggagttgtgtctagctcacagcgtttctatcaacttacaaaacttcttgataacttgcatgatcttgtcaaacaacttcatctgtactgcttgaatacatttatccagtcccgggcactgagtgttgaatttccagaaatgatgtctgaagttattgctgc

SEQ ID NO: 35112 - DNA, 150 bp, Macaca Mulatta
gtacagattatagtgtttccagaagatggcattcatggattcaactttacaagaacatccatttatccatttttggacttcatgccgtctccccaggtggtcgggtggaacccatgcctggagcctcgccgtttcaatgacacggaggtg

SEQ ID NO: 35113 - DNA, 754 bp, Macaca Mulatta
tgggcccttgtttccccaaggtggggcaatatcttcaggccaggggttcaccccaattcggcttagggaaagggccacttgggcttggcccaagaaagtttcggcattttctttgggaaggttgttcagcagtggggtcccaaaacagacttggagcaatggtcatcaccccggatgcctatgggagccagatcccgagcaatgggcagggtcatgcccattattcccccccttggaagcagagtacgcagcttgtccaacctgaccctcgaaggcagccacactggcggtgttgatgatgaccccacgttggcctccctggtccggttcattctggcccatctcaccagccaccaggcggatcacattgaaggtgcccatgagattcacattaagaactcgctggaagtcttccaaggtatgggcctggctcttctttaagttgtatgtcttgatagccaccgcgatgcctgcacagttgacagctacatccacacggccaaacttttcttttgctagagccagagctgtttgcacatccttctcagaggtcacgtcggctggggcgaaaacgcagttgtttcctaacttcttggcctgggcctccccacccgagttgggcaggtccagaagcacagcggaggctccctgccccaccagtcgctccgccgtgaccaggcccaggcccgaggctcctccggttattaccgccaccaggcccttcacgctccgacacgctgctgccatctttccc

SEQ ID NO: 35114 - DNA, 209 bp, Macaca Mulatta
agcatcccacccgggcccccactacctcctgccccccatccacgaggtcattcactctcatcgtggggccacggccacgctgccctgtgtcctgggcaccacgcctcccagctataaggtgcgctggaacaaggtggagcctggggagctccgggaactctgatcctcgtcacaacggactgccgcccgggggtatggcccctgggagg

SEQ ID NO: 35115 - DNA, 406 bp, Macaca Mulatta
  misc_feature (1)...(406): n = A,T,C or G
agggagtggtatgggtatcactttccggagctggtgaagatcatcaacgacaatgccacatactgccgtcttgcccagtttattggaaaccgaagggaactgaatgaggaaaagctggagaagctggaggagctgacaatggatggggccaaggctaaggctattctggatgcctcacggtcctccatgggnggcatggacatatctgccattgacttgataaacatcgagagcttctccagtcgtgtggtgtctttatctgagtaccgccagagcctacacacttacctgcgctccaagatgagccaagtagcccccagcctgtcagccctaattggggaagcggtnggtaggtgcacgtctcatcgcacatgctggcagcctcaccaacctggccaagtatcca

SEQ ID NO: 35116 - DNA, 220 bp, Macaca Mulatta
atctgtctgtggttgtatgaaatgaaaaaaggggcagagtgcaaagacccacactcacgcacacgcgcttcttctcccatacgcaccccttcaaactttattcggaaccttcctctgctgttctggggccgccattgtaaaagcttgggctccctctaatagcttgccccacccaccccccctcgctcagttattctgcatgcggggttggctctctcta

SEQ ID NO: 35117 - DNA, 936 bp, Macaca Mulatta
  misc_feature (1)...(936): n = A,T,C or G
aaatctacctcaaaaagactgcttctcgttaagacaaaacttgatcctcctcgggaacgttccaaatcagactcttacacacttgatccagataccctccgcaagaagaaaatgcccctcacagaacctttgaggggacggtcaacatcaccaaaaccaaaatcagtaccaaaggattctacagattccccaggatctgaaaatagagctccctctccccatgtggtacaggaaaacctccacagtgaggtggtcgaagtctgcacctcaagtactttaaaaacaaatagtctaacagacagcacctgcgacgacagcagtgaatttaagagtgtggatgaaggttcaaataaagttcattttagcattggaaaagcaccactgaaagatgaacaggaaatgagagcatcccccaaaataagtcgaaaatgtgctaatagacacaccaggcccaaaaaagaaaaatcgagttttcttttcaaaggagatggatccaagcctttagagccagccaagcaagccatgtctccttctgtggccgaatgtgccagagctgtgtttgcttccttcctctggcatgaaggcatagtacatgatgcaatggcttgttcttctttcctaaagtttcatcctgaactttccaaagaacatgctcctataaggagtagtttaaatagccaacagcctacagaggaaaaagaaccaagttaaaaaatagacattcgttggaaatatcatctgcactgaatatgtttaatattgcaccccatggaccagatatatctaagatgggtagcatcaacaaaaacaaggtattatctatgcttaaagaaccacctctgcatgaanaatgcgaggatggnaaaactgagaccacttttgaaatgtcatgcatcccacaatgaaagctaaatctcctctcccttaactttacac

SEQ ID NO: 35118 - DNA, 208 bp, Macaca Mulatta
  misc_feature (1)...(208): n = A,T,C or G
tctgggcagatcaccctgctgaagcttgaacagaacacgtgttcagtcatcacaaccctcaaaggacatgaaggtagnaggtagtgtcacctgcctctggtgggaccctattcagcggttactcttctcaggagcatctgacaacagcatcatcatgtgggacatcggaggaagaaaaggccggacgctcttacttcagggccatcan

SEQ ID NO: 35119 - DNA, 255 bp, Macaca Mulatta
agtcatttcagcgagggcctctgctgaagccgtgagtcgtgttgaatgactcagctctgtcgttcctggtcccagaactgggatccattgatagaagtgctctctggaagtccctggggtcacgtggctcctccacccagccctgggagccgtgggtcattcagagccccagcagggacagatgaagaaactgagggctgggcagtgagtcggaggcaaggttagcagagcgcccagatgtctagtctgggagag

SEQ ID NO: 35120 - DNA, 921 bp, Macaca Mulatta
gggcttttttttttcggctctctgatcagcaccatggcggttggcaagaacaagcgccttacgaaaggcggcaaaaagggagccaagaagaaagtggttgatccattttctaagaaagattggtatgatgtgaaagcacctgctatgttcaatataagaaatattggaaagacgctcgtcaccaggacccaaggaaccaaaattgcatctgatggtctcaagggtcgtgtgtttgaagtgagtcttgctgatttgcagaatgatgaagttgcatttagaaaattcaagctgattactgaagatgttcagggcaaaaactgcctgactaacttccatggcatggatcttaccccgtgacaaaatgtgttccatggtcaaaaagtggcagacaatggattgaagctcattgttgatgtcaaagaactaccgatggggttactttgcttcgatctggttctagtgttgggtccttacctaaaaaaaacagcaaacaaatccaaatgacggggaagaaacctccttaatgtccttcagtcagctaaaacagagttccagacccaaaattccccgaaaagaaataaattgaattgggaaaattccctggtgactactcaagaagggtgtgcaccaaacccaaattggtaccttggataaaagaaagctggcgtcctaattattaatatgcgaacttccatgacccagccccttctgtgaaaaaaacaacaataaggaacaacaggacttttgcgccactatcgcaattttaattcccactcctccgcatagatatggacctttcctgggctcagcacaaagcctaacaccacatggccgtactctattaaaagaccacacgaggctttgtaaatcggcgcggtaaaaggccttccccgggcacacctattcacagggggagtgaag

SEQ ID NO: 35121 - DNA, 631 bp, Macaca Mulatta
gcaacaccctccgggccctgggccacgactcgcctctcaaccagttcctggcaggcgcggcggcgggcgccatccagtgcgtcatctgctgccccatggagctggccaagacgcggctgcagctgcaggacgcgggcccggcacgcacctacaagggctcgctggactgcctcgtgcagatctacgggcacgagggtctgcgtggcgtcaaccggggcatggtgtccacgctgctgcgagagacgcccagcttcggcgtctacttcctaacctacgacgcgctcacacgggcgctgggctgcgagccgggcgaccgcctgctggtgcccaagctgctgctggcaggtggcacgtcgggtatcatgtcctggctctccacctaccctgtggacgtggtcaagtcacggctgcaggccgacgggctgcggggagccccgcgctactgcggcatcctggactgcgtgcgccagagctaccgcgctgagggctggcgcgtcttcacacggggactggcgtccacgctgctgcgcgccttccccgtcaacgccgccaccttcgccacggtcaccgtggtgctcacctacgcgcgcggcgaagaggccgggcccgagggcgaggctgtgcccgccgc

SEQ ID NO: 35122 - DNA, 594 bp, Macaca Mulatta
ccagagtcaacctcctgtgacaccctcccagagtcaacctcgggtgatgccttcccagagtcaacctcctgtgacaccctcccagagtcaacctcgggtgatgccttctcagagtcaacctcctgtgatgccctcccagaggcaacctcagttgacaccttcccagagtcagcgtcctgtgacaccctcccagagccaaccttgggtgacaccctcccagagtcaacctcatgtgacactttcccggagtcaaagtgggaaaccaaagcaatcagtaccatttccaaaatctgtatctggaaaaggtacattaaaaaaataattcctagtatgtttctacttactcttcattgtttaaaataatttgaaagtttatttttctgaaaaccttgccactttatatttcctaaaaaagccatggcatatgtgtagcataccagtttttaacttgttgtttttcagcttccaaatcctttcttctctttcattctactgtgcaggaaccatatttcttctaaaccagccctcatcctatagggatttgcaacagggagaaagaataggaaattagaaatctgggagatctcttttctt

SEQ ID NO: 35123 - DNA, 953 bp, Macaca Mulatta
  misc_feature (1)...(953): n = A,T,C or G
ggggaggacgcgggtgctgacgagttcctgcctctgctgagcctcgtcttggcccactgtgaccttcctgagctgctgctggaggccgagtacatgtcagagctgctggagcccagcctgctcaccggagagggtgnggtggctactacctgaccagcctgtctgccagcctggccttgctgagtggcctgggtcaggcccacaccctcccactgagtccctcgcaggagctacggcgctccctcagcctctgggagcagcgccgcctgcctgccacccactgcttccagnagcacctcctccgagtagcctatcnnnnnnnnnnnnnnnnnnnnnnnnnnnnnnnnnnnnnnnnnnnnnnnnnnnnnnnnnnnnnnnnnnnnnnnnnnnnnnnnnnnnnnnnnnnnnnnnnnnnnnnnnnnnnnnnnnnnnnnnnnnncctgtacaaggaccagggctaccaccgcctgccccctggagccctggcccgcaggctgcccaccactggctaccttgtctaccgccgggcagagtggcctgagacccaggaggctgcaacagagaaggagggcagagggcagtcagaggcaaggagcagaggggaggagcaagggtgccagggagatgaggacgctggggtcaaagccagccccagggacactcgggaagagtctgacacaactgctgaagggggccagggtcgagcccgtgaaggccctgctcagccaggggagccagaggcagagggaagccaggcagcagaggagtagcttgaagtggccagaagggtcgtttggggcgggagaccttgcgcctgctgagaagtccttttagcgccagcagccccacccagggccctgtccagtgtctgccaccacctttgtctgatacttgtctccagggaagctgagggaactgccacatctgaggaactggaataaagatgagggggc

SEQ ID NO: 35124 - DNA, 515 bp, Macaca Mulatta
acagccatggaggaggtgaggatgctccctgtcccccatatgccttttggtgtcccatacaagcttttggggagtgggtgagagtcactactgttggtagctaggcagaacgtgaggtacccgtctctttgatgtcccagtatgcatagcagttcctactctgtgcccttcccccaaatccctaagactgtgtctctgaaagttcttaggatgccatggactggggtggtgatggtggcattgccctcagccatttcctgtctaactgttctgccatcattcccacagacatgtcaaaccgccctgtctgcagacatttcatgatgaagggcaactgccgctatgagaacaactgtgccttctaccacccgggtgtcaatgggcccccactgccctagggaccatttgcctgccccgttcacacaacccctgtggactgcagcctcgctccttctaccctgttatggcttctgtgaggcccattttcccttttccccagctgatgaggagccggc

SEQ ID NO: 35125 - DNA, 750 bp, Macaca Mulatta
gggtgaccaggagtcgacgtgtgcagaagtccttatagtccagggcctgtttccctgtagcagctccctattgctggagaaggagaaaggtgcccaagatcctttcaggattaatttattcaaaaaggaaattaaaaatactcaatatgcaaaagtcttgtgaagaaaatgagggaaaaccacagaacatgccaaaggccgaggaagatcgccctttggaggatgtaccacaggaggcagaaggaaatcctcaaccttccgaagaaggtataagccaggaggcagaaggaaaccccagaggagagccgaatcaacctggccagggatttaaagaggacacacccgttaggcatttgaaccctgaagaaatgataagaggagtaggtgagcttgaaaggcttagggaagagataagaagagtaagaaacaagtttgtgatgatgcattggaagcaaagacattcacgcagccgtccttatcctgtgtgctttaagccttgaattcatttttgcctaatattaaaatctggccccaacctttctttcggttagaattttctgatgaatcttttgaactcccatttttacttttaataatcctgatgaaatttttgtttttaagatagttttcctttgggtacccagcaccctcatttggaaattttggaatttttggaccccattttttccacgggtcctaatttttttcaaattgggaaaaccttttcccattacatttgtggcaatgggc

SEQ ID NO: 35126 - DNA, 540 bp, Macaca Mulatta
  misc_feature (1)...(540): n = A,T,C or G
tgcggctgggaacttcctgtgccccgccggcgccttgtcnnnnnnnnnnnnnnnnnnnnnnnnnnnnnnnnnnnnnnnnnnnnnnnnnnnnnnnnnnnnnnnnnnnnnnnnnnnnnnnnnnnnnnnnnnnnnnnnnnnnnnnnnnnnnnnnnnnnnnnnnnnnnnnnnnnnnnnnnnnnnnnnnnnnnnnnnnnnnnnnnnnnnnnnnnnnnnnnnnnnnnnnnnnnnnnnnnnnnnnnnnnnnnnnnnnnnnnnnnnnnnnnnnnnnnnnnnnnnnnnnnnnnnnnnnnnnnnnnnnnnnnnnnnnnnnnnnnnnnnnnnnnnnnnnnnnnnnnnnnnnntgagcaccaaggtcactgtgagcccgctgcagaggctggggaacaagaccgagattgcccacagcgtgctctacctggccagccctctggcttcctatgtgacgggggctgtgctggtggccgatggcggggcatggttgacgttcccaaacgatgtcaaagggctggcggatttcgcatccttctcttctaagctcta

SEQ ID NO: 35127 - DNA, 653 bp, Macaca Mulatta
  misc_feature (1)...(653): n = A,T,C or G
aaccagcctccccaaaaggaattctccatcccacgagcccacgcttggccgagcccttacaatgactacggaggaaagaaagagggcagctaactctgtcctgaagactgggacaaacacagctgggcggcagatccagcgggagctcaaagggatgtgggcgaaatcttgagtcttctgagaaaactgtacaagacgctacgggaagagcttgcctccctcccacgtcaaccacaattcttccatgctggggctgatgtggactaacacgactccagttcttannnnnnnnnnnnnnnnnnnnnnnnnnnnctcatccttagcatacttcttttaagtgggagtctcaggcaactcaagtttagacccttactnnnnnnnnnnnnnnnnnaaacaggatcttgctctgtcacccaggcttgagtgcagtggtgtgatcacagcccactgcagcctcgacctcccgtgctcgagcagtcctcccatctccgcctcccaaagtgctgggactacaggcatgagccacagctcccggcctagacccttactcttgctgttactttccatggactaaaggtctggtcatctgagcgcacgttggctcacacagctctaggggccagctgcctctaagtcacagtggcttttgtgag

SEQ ID NO: 35128 - DNA, 136 bp, Macaca Mulatta
gccgggccgacggcatcgcggaggtcgcctatgtgaccaggaaacatgctgagccggcttcaggaactgcgcaaggaggaggagacgctgctgcggttgaaggcagccctgcacgaccagctgaaccgcctcaagg

SEQ ID NO: 35129 - DNA, 1089 bp, Macaca Mulatta
  misc_feature (1)...(1089): n = A,T,C or G
ccttacggcacatgaccagggatgaagaaaatactgccaacagtttgttgaactacagaattgtggagcaaactcccaaacttcccatggatggactcttcctaatccaaaacctatgttggaatgttacagttaggtaaacagtccttgaagaagcaagatactcctcagtacaacctaacgatagaggtgtctgacaaagnnnnnnnnnnnnnnnnnnnnnnnnnnnnnnnnnnnnnnnnnnnnnnnnnnnnnnnnnnnnnnnnnnnnnnnnnnnnntatggaaacctgactcttgctgaagacacaaacgttgggtccaccatcttaaccatccaggccactgatgctgatgagccatttactgggagttctaaaattctgtatcatgtcataaagggagacagtgagggacgcctaggggttgacacagatccccacaccaacaccggatatgtaataattaaaaagnnnnnnnnnnnnnnnnnnnnnnnnnnnnnnnnnnnnnnnnnnnnnnnnnnnnnnnnnnnnnnnnnnnnnnnnnnnnnnnnnnnnnnnnnnnnnnnnnnnnnnnnnnnnnnnnnnnnnnnnnnnnnnnnnnnnnnnnnnnnnnnnnnnnnnnnnnnnnnnnnnnnnnnnnnnnnnnnnnnnnnnnnnnnnnnnnnnnnnnnnnnnnnnnnnnnnnnnnnnnnnnnnnnnnnnnnnnnnnnnnnnnnnnnnnnnnnnnnnnnnnnnnnnnnnnnnnnnnnnnnnnnnnnnnnnnnnnnnnnnnnnnnnnnnnnnnnnnnnnnnnnnnnnnnnnnnnnnnnnnnnnnnnnnnnnnnnnnnnnnnnnnnnnnnnnnntaggggggtcttccttgagctctgtgtcacagttccacctgatccttacggatgtgaatgacaaccctcccaggctggccaaggactacatggacttgtacttctgccatcccctcagtgcacctggaagtctcattttcgaggctactgatgatgatcagcacttatttcggggtccccactttacattttccatcgccagtgaaagcctacagaacgactggcaagtttccaaaatcaatggt

SEQ ID NO: 35130 - DNA, 1620 bp, Macaca Mulatta
  misc_feature (1)...(1620): n = A,T,C or G
tcactgtgtccagtggaggccgaatcatgcgttcctgggagactaacatcgggggcctgaattgggagataaccttggacagtggcagnnnnnnnnnnnnnnnnnnnnnnnnnnnnnnnnnnnnnnnnnnnnnnnnnnnnnnnnnnnnnnnnnnnnnnnnnnnnnnnnnnnnnnnnnnnnnnnnnnnnnnnnnnnnnnnnnnnnnnnnnnnnnnnnnnnnnnnnnnnnnnnnnnnnnnnnnnnnnnnnnnnnnnnnnnnnnnnnnnnnnnnnnnnnnnnnnnnnnnnnnnnnnnnnnnnnnnnnnnnnnnnnnnnnnnnnnnnnnnnnnnnnnnnnnnnnnagtctctcgacttagaatttggaagtggattccaaccccgggtcctgcccacccagcccaacccagtggacgcttcccgggcccagttcttcctgcacttgtccccaagccactatgctctgctgcagtaccattacggcaccctgagtttgcttaaaaacttcccacagnnnnnnnnnnnnnnnnnnnnnnnnnnnnnnnnnnnnnnnnnnnnnnnnnnnnnnnnnnnnnnnnnnnnnnnnnnnnnnnnnnnnnnnnnnnnnnnnnnnnnnnnnnnnnnnnnnnnnnnnnnnnnnnnnnnnnnnnnnnnnnnnnnnnnnnnnnnnnnnnnnnnnnnnnnnnnnnnnnnnnnnnnnnnnnnnnnnnnnnnnnnnnnnnnnnnnnnnnnnnnnnnnnnnnnnnnnnnnnnnnnnnnnnnnnnnnnnnnnnnnnnnnnnnnnnnnnnnnnnnnnnnnnnnnnnnnnnnnnnnnnnnnnnnnnnnnnnnnnnnnnnnnnnnnnnnnnnnnnnnnnnnnnnnnngctgtatatccaggtgttcttgaagaaggatgactcagtgggctaccgggctttggtgcagacggaggatcatctgctacttttcctgcagcagttggcagggaaggtggtactgtggagccgtgaggagtccctggcagaagtggtgtgcctagagatggtggacctccccctgactggggcacaggccgagctggaaggagaatttggcaaaaaggcannnnnnnnnnnnnnnnnnnnnnnnnnnnnnnnnnnnnnnnnnnnnnnnnnnnnnnnnnnnnnnnnnnnnnnnnnnnnnnnnnnnnnnnnnnnnnnnnnnnnnnnnnnnnnnnnnnnnnnnnnnnnnnnnnnnnnnnnnnnnnnnnnnnnnnnnnnnnnnnnnnnnnnnnnnnnnnnnnnnnnnnnnnnnnnnnnnnnnnnnnnnnnnnnnnnnnnnnnnnnnnnnnnnnnnnnnnnnnnnnnnnnnnnnnnnnnnnnnnnnnnnnnnnnnnnnnnnnnnnnnnnnnnnnnnnnnnnnnnnnnnnnnnnnnnnnnnnnnnnnnnnnnnnnnnnnnnnnnnnnnnnnnnnnnnnnnnnnnnnnnnnnnnnnnnnnnnnnnnnnnnnnnnnnnnnnnnnnnnnnnnnnnnnnnnnnnncaaggtcacagcttttccagccactcggaatgtcttgcgacagctacacgagcttgccccttccattttcttctatttggtggatgcggagcagggacggctatgtggatatcggcttcgaaag

SEQ ID NO: 35131 - DNA, 288 bp, Macaca Mulatta
  misc_feature (1)...(288): n = A,T,C or G
ncgcccgccttggcctcccaaagtgctgggattacaggcgtgagccaccactcccggccctgagaatatatttattaaagccacctcttcactgaaagttaccgaaagggtcggtttaggaagtaaatgaagggtcagtgaacagagtcagatgcagaagtgggcttgtcatgggtagggctttcagcgtacgataaaaggatcgtttgttttttaaaaagtgttggaaaaactggttttccagttggaaacagtaaaggtggtaagctttgtgtgtaaaaaagaaaa

SEQ ID NO: 35132 - DNA, 788 bp, Macaca Mulatta
  misc_feature (1)...(788): n = A,T,C or G
ggggctttctttgctgcgtctactgcaagaatgaagaccattctcagcaatcagactgtcgacattccagaaaatgtcgacattaccctgaagggacgcacagttatcgtgaagggccccagaggaactctgcggagggacttcaatcacatcaatgtagaactcagtcttcttnnnnnnnnnnnnnnnnnnnttcgggttgacaaatggtggggtaacagaaaggaactggctaccgttcggactatttgtagtcatgtacagaacatgatcaagggtgttacactgggcttccgttacaagatgaggtctgtgtatgctcacttccccatcaacgttgttatccaggagaatgggtctcttgttgaaatccgaaatttcttgggtgaaaaatacatccgcagggttcggatgagaccaggtgttgcttgttcagtatctcaagcccagaaagatgaattaatccttgaaggaaatgacattgaacttgtttcaaattcagcggctttgattcagcaagccacaacagttaaaaacaaggatatcaggaaatttttggatggtatctatgtctctgaaaaaggaactgttcagcaggctgatgaataagatctaagagttatccagctacagaaagaagatgccagatgactcctaagacctacttgtgatatttaaatgatgcaataaaagacctggttgatttgggaagcctaaatatggaaaacttaatagctaggttttatgggcggcgttgggccacgccttcgggccctcttggggttttg

SEQ ID NO: 35133 - DNA, 810 bp, Macaca Mulatta
tgaacctgtgcgtcatcagcctgtaccgctactgggccatctccaggcccttccgctacgacctcaagatgacccagcgcatggccttggtcatcgtcggcctggcctggaccttgtccatcctcatctccttcattccggtccagctcaactggcacagggaccaggcgggctcttggggcgggctggatctgactaacaacctggccaactggacgccctgggaggaggacgtttgggaacccgacgtgagggcagagaactgtgactccagcctgaatcgaacctacgccatctcttcctcgctcgtcagcttctacatccctgtggccatcatgatcgtgacctacacgcgcatctaccgcatcgcccaggtgcagatccgcaggatttcctccctggaaagggccgcagagcacgcgcagagctgccggagcagcgcagcctgcgcgcccgacaccagcctgcgcgcttccatcaagaaggagaccaaggttttcaagaccctgtccgtgatcatgggggtcttcgtgtgttgctggctgcccttcttcatccttaactgcatggtccctttctgcagtggacaccccgaaggccctccggccggcttcccctgcgtcagtgagaccaccttcgacgtcttcgtctggttcggttgggccaactcctcactcaaccccatcatctatgccttcaacgccgacttccggaaggtgtttgcccagctgctggggtgcagccacgtctgctcccgcacgccggtgaagacggtgaacatcagcaatgagctcatctcctacaaccaag

SEQ ID NO: 35134 - DNA, 1913 bp, Macaca Mulatta
  misc_feature (1)...(1913): n = A,T,C or G
ttactgctgtgggtcgtttgaatcctaatatgacaagcagcatgcttggtaatgctcatataagtacaagcaatattcctagtgctgctagtgtgagtgttgggcctggagttaccagtggtgttaatgtgaatatcttgagtggcatgggcaatggtactatttcttcctccgctgccgttagcagtgtccctattgcagctgcagggatgactgggggatcggtttcaagtcagcagcaacaaccaacagttaacacttcgaggttcagagttgtgaagttagattctagttctgagccctttaaaaaaggtagatggacttgcactgagttctatgaaaaagaaaatgctgtacctgctacagaaggtgtgctgataaataaagtggtggagactgtaaagcaaaatccgatagaagtgacttctgaaagggagagcactagtgggagttcagtgagcagtagtgtcagcacactgagtcactatacagagagtgtgggaagtggagagatgggagctcctactgtggtggtgcnctctccaaggtgtgaccctccagcagatggattttggtagcactggtccacagagtattccagcagttagtatgccacagagtatttctcagtcacagatctcacaagtacagttgcagtctcaagaactgagctatcagcaaaagcaaagtcttcagccagtacctctgcaagccactatgagtgctgcaactggtatccagccatcgcctgtaaatgtggttggtgtaacttcagctttaggtcagcagccttccatttccagtttggctcaaccccagctcccatattctcaggcggctcctnnnnnnnnnnnnnnnnnnnnnnnnnnnnnnnnnnnnnnnnnnnnnnnnnnnnnnnnnnnnnnnnnnnnnnnnnnnnnnnnnnnnnnnnnnnnnnnnnnnnnnnnnnnnnnnnnnnnnnnnnnnnnnnnnnnnnnnnnnnnnnnnnnnnnnnnnnnnnnnnnnnnnnnnnnnnnnnnnnnnnnnnnnnnnnnnnnnnnnnnnnnnnnnnnnnnnnnnnnnnnnnnnnnnnnnnnnnnnnnnnnnnnnnnnnnnnnnnnnnnnnnnnnnnnnnnnnnnnnnnnnnnnnnnnnnnnnngcctgttggccaggctcacgcagcagtgtctgctgtacctactggcagtcagattgcaactattggtcagcaagcaaacatacctactgcagtgcagcagccctctacccaggttccaccttcagttattcagcaaggtgctcctccatcttcgcaagtggttccacctgctcaaactgggattattcatcagggagttcaaactagcgctgcaagccttcctcaacaattggttattgcatcccaaagtaccttgttaactgtgcctccccagccacaaggagtagaaccagtagctcaaggagttgtttcacagcagttgcctgcagttagtcctttgccctctgctagcagtatttctgttacaagtcaggttagttcaactggtccttctggaatgccttctgccccagcaaacttggttccaccacaaaatatagcacaaacccctgctacccaaaatggtaatttggttcaaagtgttagtcaatctcccttgatagcaactaatataaatttgcctttggcacaacagataccactaagttctacccagttctctgcacaatcattagctcaggcaattggaagccaaattgaagatgccaggcgcccagcggagccctccttagttggcttacctcagactatcagtggtgacagtgggggaatgtcagcagtttcagatgggagtagcagcagcctagcagcctctgcttctcttttcccgttgaaggtgctaccgctgacgacacccctggtggatggcgaggat

SEQ ID NO: 35135 - DNA, 2294 bp, Macaca Mulatta
  misc_feature (1)...(2294): n = A,T,C or G
gttcatggatcctcactctccttggtttccagtacgtcgtcaatttattctacannnnnnnnnnnnnnnnnnnnnnnnnnnnnnnnnnnnnnnnnnnnnnnnnnnnnnnnnnnnnnnnnnnnnnnnnnnnnnnnnnnnnnnnnnnnnnnnnnnnnnnnnnnnnnnnnnnnnnnnnnnnnnnnnnnnnnnnnnnnnnnnnnnnnnnnnnnnnnnnnnnnnnnnnnnnnnnnnnnnnnnnnnnnnnnnnnnnnnnnnnnnnnnnnnnnnnnnnnnnnnnnnnnnnnnnnnnnnnnnnnnnnnnnnnnnnnnnnnnnnnnnnnnnnnnnnnnnnnnnnnnnnnnnnnnnnnnnnnnnnnnnnnnnnnnnnnnnnnnnnnnnnnnnnnnnnnnnnnnnnnnnnnnnnnnnnnnnnnnnnnnnnnnnnnnnnnnnnnnnnnnnnnnnnnnnnnnnnnnnnnnnnnnnnnnnnnnnnnnnnnnnnnnnnnnnnnnnnnnnnnnnnnnnnnnnnnnnnnnnnnnnnnnnnnnnnnnnnnnnnnnnnnnnnnnnnnnnnnnnnnnnnnnnnnnnnnnnnnnnnnnnnnnnnnnnnnnnnnnnnnnnnnnnnnnnnnnnnnnnnnnnnnnnnnnnnnnnnnnnnnnnnnnnnnnnnnnnnnnnnnnnnnnnnnnnnnnnnnnnnnnnnnnnnnnnnnnnnnnnnnnnnnnnnnnnnnnnnnnnnnnnnnnnnnnnnnnnnnnnnnnnnnnnnnnnnnnnnnnnnnnnnnnnnnnnnnnnnnnnnnnnnnnnnnnnnnnnnnnnnnnnnnnnnnnnnnnnnnnnnnnnnnnnnnnnnnnnnnnnnnnnnnnnnnnnnnnnnnnnnnnnnnnnnnnnnnnnnnnnnnnnnnnnnnnnnnnnnnnnnnnnnnnnnnnnnnnnnnnnnnnnnnnnnnnnnnnnnnnnnnnnnnnnnnnnnnnnnnnnnnnnnnnnnnnnnnnnnnnnnnnnnnnnnnnnnnnnnnnnnnnnnnnnnnnnnnnnnnnnnnnnnnnnnnnnnnnnnnnnnnnnnnnnnnnnnnnnnnnnnnnnnnnnnnnnnnnnnnnnnnnnnnnnnnnnnnnnnnnnnnnnnnnnnnnnnnnnnnnnnnnnnnnnnnnnnnnnnnnnnnnnnnnnnnnnnnnnnnnnnnnnnnnnnnnnnnnnnnnnnnnnnnnnnnnnnnnnnnnnnnnnnnnnnnnnnnnnnnnnnnnnnnnnnnnnnnnnnnnnnnnnnnnnnnnnnnnnnnnnnnnnnnnnnnnnnnnnnnnnnnnnnnnnnnnnnnnnnnnnnnnnnnnnnnnnnnnnnnnnnnnnnnnnnnnnnnnnnnnnnnnnnnnnnnnnnnnnnnnnnnnnnnnnnnnnnnnnnnnnnnnnnnnnnnnnnnnnnnnnnnnnnnnnnnnnnnnnnnnnnnnnnnnnnnnnnnnnnnnnnnnnnnnnnnnnnnnnnnnnnnnnnnnnnnnnnnnnnnnnnnnnnnnnnnnnnnnnnnnnnnnnnnnnnnnnnnnnnnnnnnnnnnnnnnnnnnnnnnnnnnnnnnnnnnnnnnnnnnnnnnnnnnnnnnnnnnnnnnnnnnnnnnnnnnnnnnnnnnnnnnnnnnnnnnnnnnnnnnnnnnnnnnnnnnnnnnnnnnnnnnnnnnnnnnnnnnnnnnnnnnnnnnnnnnnnnnnnnnnnnnnnnnnnnnnnnnnnnnnnnnnnnnnnnnnnnnnnnnnnnnnnnnnnnnnnnnnnnnnnnnnnnnnnnnnnnnnnnnnnnnnnnnnnnnnnnnnnnnnnnnnnnnnnnnnnnnnnnnnnnnnnnnnnnnnnnnnnnnnnnnnnnnnnnnnnnnnnnnnnnnnnnnnnnnnnnnnnnnnnnnnnnnnnnnnnnnnnnnnnnnnnnnnnnnnnnnnnnnnnnnnnnnnnnnnnnnnnnnnnnnnnnnnnnnnnnnnnnnnnnnnnnnnnnnnnnnnnnnnnnnnnnnnnnnnnnnnnnnnnnnnnnnnnnnnnnnnnnnnnnnnnnnnnnnnnnnnnnnnnnnnnnnnnnnnnnnnnnnnnnnnnnnnnnnnnnnnnnnnnnnnnnnnnnnnnnnnnnnnnnnnnnnnnnnnnnnagctctatggaaggcgtgccccctgggaggatcctgccaagtgggtgatggacacatatccatgggcagccagcccgcaacaacatgagtggcctcccctgttgcagttacggcctgaggatgtcggcttcgatggctactccatgcctcgggaaggatcgacaagcaagcaggtgccccccagtgatgctgaaggcgatccgctg

SEQ ID NO: 35136 - DNA, 770 bp, Macaca Mulatta
ccctcataaatgtgtgtgttgtgtctaacacataaaaactgctggactattgtgaagaaatggtctagtcagtgagtccaatatgtcaactcactacaaaatcactcagatagttgttaaataggaaagactgggaagctcagtaaaaattgttgaactgttggtccagacagactgaatctttgttaaaatgttggaacgaggaagagcagaacacaatgtttctctgaagtcagtggtcatagaccatgaaacaaaaacaaagtcttaaaaatagaatgtgatttgctatgacatttcttgagctgactatctctctcccattgtccttttagctgtagtggtgtttgccttcatcctctgctggctgcccttccatgtaggacgatatttattttccaaatcctttgagcctggctccttggagattgctcagatcagccagtactgcaacctcgtgtcctttgtcctcttctacctcagcgctgccatcaaccccattctgtacaacatcatgtccaagaagtaccgggtggcagtgttcagacttctgggattcgaacccttctcccagagaaagctctccactctgaaggacgaaagttctcgggcctggacagaatctagtattaatacatgacctagcacattgctgagtacagtcaccgcttattattctaaacaagaagacatagcacagcagaacttgggaggaagctgaaggttaattttggaattaggaacacatagatacggaaacatttcggagg

SEQ ID NO: 35137 - DNA, 83 bp, Macaca Mulatta
aaattgattcgaaattctccaaaccttcatgttttccatctgaagtgtaactccttttcagattttgagtctctcatgactag

SEQ ID NO: 35138 - DNA, 2734 bp, Macaca Mulatta
  misc_feature (1)...(2734): n = A,T,C or G
agaaagacgacactcaaaatctgctcaagaatttggagtctaatgcgcagacccccttggaaactggctccccatcaaggaggaggaagagagaagtgcagatgtcaaaggacaaggaagctgttgatgngaatgtgagccgccttccaacagcaatatcacagcattcgccctgaaggccaaagtcatctaccccatcaatcagaagttccggngcctctggccgatggctcctccaacccgtctctgcatganaacttaaagcaggctgttttgccgcaccagccggtagaggcctccccttccagcagcctggggagcctgaagcagggtgaagaagacgactgcagctcctcatccagcgtccactcggccaccagcgatgacaggtttctcagccgcaccttccctcgggtgaacgccttnnnnnnnnnnnnnnnnnnnnnnnnnnnnnnnnnnnnnnnnnnnnnnnnnnnnnnnnnnnnnnnnnnnnnnnnnnnnnnnnnnnnnnnnnnnnnnnnnnnnnnnnnnnngatgtttattcagatttttaaaatgtgcctccttgaccttcttcctaaaaagaagtcagatgatgaattctaccagaagatcctttcaaaacaggaaaannnnnnnnnnnnnnnnnnnnnnnnnnnnnnnnnnnnnnnnnnnnnnnnnnnnnnnnnnnnnnnnnnnnnnnnnnnnnnnnnnnnnnnnnnnnnnnnnnnnnnnnnnnnnnnnnnnnnnnnnnnnnnnnnnnnnnnnnnnatggaagctttctggaaacagatggcgaacatccagcactttcttgtggaccagtttaagtgttccagctccaaagcccgacagctcgtgatgactctgacggaaagaatgattgccgctgaagggctattgtgcgatctcaggagctgcaggctctgnnnnnnnnnnnnnnnnnnnnnnnnnnnnnnnnnnnnnnnnnnnnnnnnnnnnnnnnnnnnnnnnnnnnnnnnnnnnnnnnnnnnnnnnnnnnnnnnnnnnnnnnnnnnnnnnnnnnnnnnnnnnnnnnnnnnnnnnnnnnnnnnnnnnnnnnnnnnnnnnnnnnnnnnnnnnnnnnnnnnnnnnnnnnnnnnnnnnnnnnnnnnnnnnnnnnnnnngagtttgtccagcgaggcaaagacctggtcaaggtgtctctggctcaccaggtggaggggacggcaaaactcacgctggcccaagaggaggaacggagaagcttcatggctgaggcccagccgactgctgacccagaaaagtttctcnnnnnnnnnnnnnnnnnnnnnnnnnnnnnnnnnnnnnnnnnnnnnnnnnnnnnnnnnnnnnnnnnnnnnnnnnnnnnnnnnnnnnnnnnnnnnnnnnnncaggagctgtactgcagcaccatggacactttccagaagttcgtggacgccctgttccttcagacgctccctggcatgactggcctccccgcagaagaatgtgactacttgaggcaggaagtccaggagaacgctgcctggcagctggggaagtcagatcgcttccggaggcagcagtgggaactcttccaggagctccaagagcgagaccagcaggtgncaggtgtggatggaggagtgtgcgctgtccagcgtgctgcagacacacctgcgggaggaccacaaaggcaccatccgcggcgtcttgggccgacttggcggcctcactgaagagtnnnnnnnnnnnnnnnnnnnnnnnnnnnnnnnnnnnnnnnnnnnnnnnnnnnnnnnnnnnnnnnnnnnnnnnnnnnnnnnnnnnnnnnnnnnnnnnnnnnnnnnnnnnnnnnnnnnnnnnnnnnnnnnnnnnnnnnnnnnnnnnnnnnnnnnnnnnnnggggtcctcctcagtgccatggacgagcatcagtggcagctgctcagggccctggnnnnnnnnnnnnnnnnnnnnnnnnnnnnnnnnnnnnnnnnnnnnnnnnnnnnnnnnnnnnnnnnnnnnnnnnnnnnnnnnnnnnnnnnnnnnnnnnnnnnnnnnnnnnnnnnnnnnnnnnnnnnnnnnnnnnnnnnnnnnnnnnnnnnnnnnnnnnnnnnnnnnnnnnnnnnnnnnnnnnnnnnnnnnnnnnnnnnnnnnnnnnagaggacactgatggagacagcagtggagagcgtctatgtgaccagcactggtgtcagtcgcctggtgcaggcatattaccagcatatcggaaggatcatggaggaccacgaggagagaaaactgcagcacttgaagaccctgcagggtnnnnnnnnnnnnnnnnnnnnnnnnnnnnnnnnnnnnnnnnnnnnnnnnnnnnnnnnnnnnnnnnnnnnnnnnnnnnnnnnnnnnnnnnnnnnnnnnnnnnnnnnnnnnaggatgctgtcccagcagaagaggttcctggcccagttcccggtgcaccagcagatgcgtctgcacgcccagcaacagcaggcaggagtcatggaccttctggaagcccagctggagacccagctgcaggnnnnnnnnnnnnnnnnnnnnnnnnnnnnnnnnnnnnnnnnnnnnnnnnnnnnnnnnnnnnnnnnnnnnnnnnnnnnnnnnnnnnnnnnnnnagagaagcccctaaggactaaaaagaagaagcccctgccccgggaaagaggggacctgggggtgcccaacgatgaggacctcgcctccggggaccacacctcaggctcactcag

SEQ ID NO: 35139 - DNA, 1283 bp, Macaca Mulatta
  misc_feature (1)...(1283): n = A,T,C or G
tttttcccaggtcatgagtctcgggcttcagaagctctgtgctgggcagaaggacagcgactctttagtgctggactcaatggcgagattatggagtatgatttacaggcattaaacatcaagtatgctgtggatgtctttggaggacctatttggagcatggctgtcagccccagtggctctcaacttttnnnnnnnnnnnnnnnnnnnnnnnnnnnnnnnnnnnnnnnnnnnnnnnnnnnnnnnnnnnnnnnnnnnnnnnnnnnnnnnnnnnnnnnnnnnnnnnnnnnnnnnnnnnnnnnnnnnnnnnnnnnnnnnnnnnnnnnnnnnnnnnnnnnnnnnnnnnnnnnnnnnnnnnnnnnnnnnnnnnnnnnnnnnnnnnnnnnnnnnnnnnnnnnnnnnnnnnnnnnnnnnnnnnnnnnnnnnnnnnnnnnnnnnnnnnnnnnnnnnnnnnnnnnnnnnnnnnnnnnnnnnnnnnnnnnnnnnnnnnnnnnnnnnnnnnnnnnnnnnnnnnnnnnnnnnnnnnnnnnnnnnnnnnnnnnnnnnnnnnnnnnnnnnnnnnnnnnnnnnnnnnnnnnnnnnnnnnnnnnnnnnnnnnnnnnnnnnnnnnnnnnnnnnnnnnnnnnnnnnnnnnnnnnnnnnnnnnnnnnnnnnnnnnnnnnnnnnnnnnnnnnnnnnnnnnnnnnnnnnnnnnnnnnnnnnnnnnnnnnnnnnnnnnnnnnnnnnnnnnnnnnnnnnnnnnnnnnnnnnnnnnnnnnnnnnnnnnnnnnnnnnnnnnnnnnnnnnnnnnnnnnnnnnnnnnnnnnnnnnnnnnnnnnnnnnnnnnnnnnnnnnnnnnnnnnnnnnnnnnnnnnnnnnnnnnnnnnnnnnnnnnnnnnnnnnnnnnnnnnnnnnnnnnnnnnnnnnnnnnnnnnnnnnnnnnnnnnnnnnnnnnnnnnnnnnnnnnnnnnnnnnnnnnnnnnnnnnnnnnnnnnnnnnnnnnnnnnnnnnnnnnnnnnnnnngggtcctgagaacattatctgcagctgtatctccccgtgtggaagttggatagcctattctacagtttctcggttttttctctatcggctgaannnnnnnnnnnnnnnnnnnnnnnnnnnnnnggtttccaaaatgccaccattccttcgctgtgcccttcagattttgttttctgaagattcaacaaagctctttgtggcatcaaatcaaggagctctgcatattgttcagctgtcgggaggaagcttcaagcacctgcatgctttccagcctcagtcag

SEQ ID NO: 35140 - DNA, 686 bp, Macaca Mulatta
aagcccccagtcaggtctggacggcagcaactctacgctgtccggcagtgccagcagcggcgtctcctccttgagtgagagtaactttgggcactcctcggaggtcccacctcgcactgacaccatggactccatgccaagccaagcatggaatgctgacgaagatcttgagccaccctacctccctgtccactacagcctctctgagtctgccgtcctggactccatcaaggcccagccatgccgaagccactcagccccagggtgcgtcatccctcaggaccccatggacccgcctgcgctgccgcccaagccctaccacccccgcctgccagccctggagcacgatgagggggtgctgctgcgtgaagagactgagaggcctcgaggcctgcaccgcaaggcttcattgcctcctgggagcgctaaggaggagcaggcccgcatggcttgggagcacggccgaggggagcagtgaggggcaatgaggcggctgggatgccgccctcagtaagcagcttgccaaccactccaggtctgaaaagcaagtcccccagcccgaccccagggagccagagaggcttggcactcaggagagaaccaccccaagtctccattctactgccgtgaactcatgtgttgccatgtacagaggccacagcagcatgaagggttgtggcttccct

SEQ ID NO: 35141 - DNA, 1759 bp, Macaca Mulatta
  misc_feature (1)...(1759): n = A,T,C or G
gtgtcccaccgcgtgcacttgcaacctgcagatctctgatctgggcctcaacgtaaactgccaggagcgaaagatcgagagcatcgctgaactgcagcccaagccctacaaccccaagaaaatgtatctgacagagaactatatcgctgtcgtgcgcaggacagacttcctggaggccacggggctggacctcctgcacctggggaacaaccgcatctcgatgatacaggaccgcgctttcggggatctcaccaacctgaggcgcctgtacctgaatggcaataggatcgagaggctaagcccggagttattctatggcctgcagagcctgcagtatctcttcctccagtacaatctcattcgcgagattcagtctggaacttttgacccggtcccaaacctccagctgctattcttgaataacaacctcctgcaggccatgccctcgggcgtcttctctggcctgaccctcctcangctaaacctgaggagtaatcacttcacctccttgccggtgagtggagtttnnnnnnnnnnnnnnnnnnnnnnnnnnnnnnnnnnnnnnnnnnnnnnnnnnnnnnnnnnnnnnnnnnnnnnnnnnnnnnnnnnnnnnnnnnnnnnnnnnnnnnnnnnnnnnnnnnnnnnnnnnnnnnnnnnnnnnnnnnnnnnnnnnnnnnnnnnnnnnnnnnnnnnnnnnnnnnnnnnnnnnnnnnnnnnnnnnnnnnnnnnnnnnnnnnnnnnnnnnnnnnnnnnnnnnnnnnnnnnnnnnnnnnnnnnnnnnnnnnnnnnnnnnnnnnnnnnnnnnnnnnnnnnnnnnnnnnnnnnnnnnnnnnnnnnnnnnnnnnnnnnnnnnnnnnnnnnnnnnnnnnnnnnnnnnnnnnnnnnnnnnnnnnnnnnnnnnnnnnnnnnnnnnnnnnnnnnnnnnnnnnnnnnnnnnnnnnnnnnnnnnnnnnnnnnnnnnnnnnnnnnnnnnnnnnnnnnnnnnnnnnnnnnnnnnnnnnnnnnnnnnnnnnnnnnnnnnnnnnnnnnnnnnnnnnnnnnnnnnnnnnnnnnnnnnnnnnnnnnnnnnnnnnnnnnnnnnnnnnnnnnnnnnnnnnnnnnnnnnnnnnnnnnnnnnnnnnnnnnnnnnnnnnnnnnnnnnnnnnnnnnnnnnnnnnnnnnnnnnnnnnnnnnnnnnnnnnnnnnnnnnnnnnnnnnnnnnnnnnnnnnnnnnnnnnnnnnnnnnnnnnnnnnnnnnnnnnnnnnnnnnnnnnnnnnnnnnnnnnnnnnnnnnnnnnnnnnnnnnnnnnnnnnnnnnnnnnnnnnnnnnnnnnnnnnnnnnnnnnnnnnnnnnnnnnnnnnnnnnnnnnnnnnnnnnnnnnnnnnnnnnnnnnnnnnnnnnnnnnnnnnnnnnnnnnnnnnnnnnnnnnnnnnnnnnnnnnnnnnnnnnnnnnnnnnnnnnnnnnnnnnnnnnnnnnnnnnnnnnnnnnnnnnnnnnnnnnnnnnnnnnnnnnnnnnnnnnnnnnnnnnnnnnnnnnnnnnnnnnnnnnnnnnnnnnnnnnnnnnnnnnnnnnnnnnntatgacttgagacgcccccatcagtatttgcatccgggggcaggggacagcaggttacgggaaccggtgctctacagccccccgagtgctgtctttgtagaacccaaccggaacgaatatctggagttaaaagcaaaactaaacgttgagccggactacctcgaagtgctggaaaaacagaccacatttagccagttctaa

SEQ ID NO: 35142 - DNA, 633 bp, Macaca Mulatta
tctgctacgacagacttagcccaagaagaacaagtatattgtgtgtttgtctctttctcctctccaatctagcaaagatgtccgcctttaacacccatttttctttagaaacacaaaagaaaacaaggaaggcaatgaaactgagaggcttctgaatgtgagggtcgcctgggtgagagggcttatgtctaggaaggctgctgttaacggacgccatgctctcttccaggtttgttggtggaccaaagtaagatctatagcagagccttctactcctgtgcagctggcatggccctggctgctgtgtgcctcgccctggtgagaccgtgtaagatgggactgtgccagcgtcatcattcaggtgaaacaaaggtagtgagccatcgtgggaagactttacaggacattcctgaagactttctggaaatggatcttgcaaaaaatgagcacagagttcacgtgcagatggagccagtatgacacacttactcacaacaacagccactgtgttggctggagagggatggggtgggcccgacggggacacaaggaggtagaggagctaacccctctactccactttcaaaactacattttaaagggaatgtgtatgtgaagagcactacgaacatc

SEQ ID NO: 35143 - DNA, 748 bp, Macaca Mulatta
aggttgaatcactggacaatgccacatactttgtggatggtgtgggtcttgggagtcatcatcagcctctccaaggaagaatcctccaatcaggcttctctgtcttgtgaccacaatggtatttgcaagggcagctcaggatctttaaactccattccctcagtgctcacagaagctgtaaaatgccttgacctgtccaacaacaggatcacctacattagcaacagtgacctacagaggtatgtgaacctccaagctctggtgctgacatccaatggaattaacacaatagaggaagattctttttcttccctgggcagacttgaacatttagacttatcctataattacttatctaatttatcgtcctcctggttcaagcccctttcttctttaaaattcttaaacttactgggaaatccttacaaaaccctcggggaaacatctcttttttctcatctcacaaaattgcgaatcctgagagtaggaaatatggacaccttcactaagattcaaagaaaagattttgctggacttaccttccttgaggaacttgagattgatgcttcagatctacagagctatgagccaaaaagtttgaagtcaattcagaatgtaagtcatctgatccttcataggaagcagcatattttactgctggagatttttgtagatcttacaagttccgtggaatgtttggaactgcgagaaaggtgatttgaacactttccatttttcagaactatcc

SEQ ID NO: 35144 - DNA, 116 bp, Macaca Mulatta
gggaaatgtgttctgcttgatcagggaaggaagaggaattgcatagcaataggactcgactttacagttaggaagtggatgctctagggtggatttattaattttaaagaaaattg

SEQ ID NO: 35145 - DNA, 645 bp, Macaca Mulatta
  misc_feature (1)...(645): n = A,T,C or G
ggtggagcaattgctatagaggtaaatatgattaactttacattccatctttcctctgctctcaaacccaacaagcaggtaatctacttctagcaagtggtgaaggtaagagaaacatctgtataggaggcaagagatctaagttcttttgaaggcctgccctctgctctgtatctcaattactgttcttcatttcagttattcttacctactattcaattcccttaatcttttcttcttggggggctgtcttagggtcagggagattgcagaagccccagaactagaagcagccctgagacatggggaattggagctgaaggaggaatggcaggatgaagaattccctannnnnnnnnnnnnnnnnnnnnnnnnnnnnnnnnnnnnnnnnnnnnnnnnnnnnnnnnnnnnnnnnctgcaggtacccccagcactttagccctgtgtggccagcgccccatgcgcaagcgtctttctgccccagagttgcggctgagtctgactaaggggcctggaaatgatggagcttcgcccacccagtctacgccttcctctcctgatggcagttctgacctggaggtagacgaattggagacaccttcagactcggagcagctggacagtggacatgaatttgaatgggaa

SEQ ID NO: 35146 - DNA, 4376 bp, Macaca Mulatta
  misc_feature (1)...(4376): n = A,T,C or G
tcacattctttcgcgggaaaaattcgaaagtggattttctgtaattttgacaggtgnnnnnnnnnnnnnnnnnnnnnnnnnnnnnnnnnnnnnnnnnnnnnnnnnnnnnnnnnnnnnnnnnnnnnnnnnnnnnnnnnnnngttctatatactcatcaaaagatgaagaagtcaaaagtgtggcaagatggaattctgaagatcactccctttggaaacaaannnnnnnnnnnnnnnnnnnnnnnnnnnnnnnnnnnnnnnnnnnnnnnnnnnnnnnnnnnnnnnnnnnnnnnnnnnnnnnnnnnnnnnnnnnnnnnnnnnnnnnnnnnnnnnnnnnnnnnnnnnnnnnnnnnnnnnnnnnnnnnnnnnnnnnnnnnnnnnnnnnnnnnnnnnnnnnnnnnnnnnnnnnnnnnnnnnnnnnnnnnnnnnnnnnnnnnnnnnnnnnnnnnnnnnnnnnnnnnnnnnnnnnnnnttttcaaggaccacgtcaggttccgaagaaaatggttattacagaaagtggtgaatcagctgcatcacatgatgctaagaaacctggctccactattttttctccattctacagcatgcctcctttgtttcctactgttggcaataaagatgtaaataatatactggcagaccctgagaacattgtgacttacaagaacagagagagaaatgccatggatttttcttcagttttttctccatccttccagattaacccagaagtgctgtgtgaagaaaagtatttttgctctcctatcaattctggaaataagctttcagactctttactgaccaatgagcctgtgaaaagagatagtttagcatcttactgttcaggagtttcacaaaacatcagaagcaaagcgcagatattagctcttctgaagtctgaatcatctagtacatgtgaggaactaaattctgagatgacagagcattttcctcaaaaacaaccacagggaagtttaaaaattgctactaaaccgaagcacctaattcaacaggaagagtgtgctgagatgaagagcacagaaaatttatactaccagtatcaatcagaaaataccannnnnnnnnnnnnnnnnnnnnnnnnnnnnnnnnnnnnnnnnnnnnnnnnnnnnnnnnnnnnnnnnnnnnnnnnnnnnnnnnnnnnnnnnnnnnnnnnnnnnnnnnnnnnnnnnnnnnnnnnnnnnnnnnnnnnnnnnnnnnnnnnnnnnnnnnnnnnnnnnnnnnnnnnnnnnnnnnnnnnnnnnnnnnnnnnnnnnnnnnnnnnnnnnnnnnnnnnnnnnnnnnnnnnnnnnnnnnnnnnnnnnnnnnnnnnnnnnnnnnnnnnnnnnnnnnnnnnnnnnnnnnnnnnnnnnnnnnnnnnnnnnnnnnnnnnnnnnnnnnnnnnnnnnnnnnnnnnnnnnnnnnnnnnnnnnnnnnnnnnnnnnnnnnnnnnnnnnnnnnnnnnnnnnnnnnnnnnnnnnnnnnnnnnnnnnnnnnnnnnnnnnnnnnnnnnnnnnnnnnnnnnnnnnnnnnnnnnnnnnnnnnnnnnnnnnnnnnnnnnnnnnnnnnnnnnnnnnnnnnnnnnnnnnnnnnnnnnnnnnnnnnnnnnnnnnnnnnnnnnnnnnnnnnnnnnnnnnnnnnnnnnnnnnnnnnnnnnnnnnnnnnnnnnnnnnnnnnnnnnnnnnnnnnnnnnnnnnnnnnnnnnnnnnnnnnnnnnnnnnnnnnnnnnnnnnnnnnnnnnnnnnnnnnnnnnnnnnnnnnnnnnnnnnnnnnnnnnnnnnnnnnnnnnnnnnnnnnnnnnnnnnnnnnnnnnnnnnnnnnnnnnnnnnnnnnnnnnnnnnnnnnnnnnnnnnnnnnnnnnnnnnnnnnnnnnnnnnnnnnnnnnnnnnnnnnnnnnnnnnnnnnnnnnnnnnnnnnnnnnnnnnnnnnnnnnnnnnnnnnnnnnnnnnnnnnnnnnnnnnnnnnnnnnnnnnnnnnnnnnnnnnnnnnnnnnnnnnnnnnnnnnnnnnnnnnnnnnnnnnnnnnnnnnnnnnnnnnnnnnnnnnnnnnnnnnnnnnnnnnnnnnnnnnnnnnnnnnnnnnnnnnnnnnnnnnnnnnnnnnnnnnnnnnnnnnnnnnnnnnnnnnnnnnnnnnnnnnnnnnnnnnnnnnnnnnnnnnnnnnnnnnnnnnnnnnnnnnnnnnnnnnnnnnnnnnnnnnnnnnnnnnnnnnnnnnnnnnnnnnnnnnnnnnnnnnnnnnnnnnnnnnnnnnnnnnnnnnnnnnnnnnnnnnnnnnnnnnnnnnnnnnnnnnnnnnnnnnnnnnnnnnnnnnnnnnnnnnnnnnnnnnnnnnnnnnnnnnnnnnnnnnnnnnnnnnnnnnnnnnnnnnnnnnnnnnnnnnnnnnnnnnnnnnnnnnnnnnnnnnnnnnnnnnnnnnnnnnnnnnnnnnnnnnnnnnnnnnnnnnnnnnnnnnnnnnnnnnnnnnnnnnnnnnnnnnnnnnnnnnnnnnnnnnnnnnnnnnnnnnnnnnnnnnnnnnnnnnnnnnnnnnnnnnnnnnnnnnnnnnnnnnnnnnnnnnnnnnnnnnnnnnnnnnnnnnnnnnnnnnnnnnnnnnnnnnnnnnnnnnnnnnnnnnnnnnnnnnnnnnnnnnnnnnnnnnnnnnnnnnnnnnnnnnnnnnnnnnnnnnnnnnnnnnnnnnnnnnnnnnnnnnnnnnnnnnnnnnnnnnnnnnnnnnnnnnnnnnnnnnnnnnnnnnnnnnnnnnnnnnnnnnnnnnnnnnnnnnnnnnnnnnnnnnnnnnnnnnnnnnnnnnnnnnnnnnnnnnnnnnnnnnnnnnnnnnnnnnnnnnnnnnnnnnnnnnnnnnnnnnnnnnnnnnnnnnnnnnnnnnnnnnnnnnnnnnnnnnnnnnnnnnnnnnnnnnnnnnnnnnnnnnnnnnnnnnnnnnnnagggatgaaaaaatccagttctctggagaatgagaaccttcaaaggctttcattagtaagtagaacccaggttccacttattactttgccacctactgatgggccagctgacttagactctcatttgtgtgtgatcaactctaacacataccagtcttctggttcccccatgctcaacttgtgtgaaaagtcagcagttctatcttttagcattgagcctgaggaccaaaatgaaacctctttctctgaagaatctggggaagtgactccaggggatgtttcacttctcaataatatatctactcagagcaagtggctgaaatatcaaaacacatcccaatgcaacgtgactactccggacagagttgataagagaataactgatggcttttttgctgaggctgtttctgggatgcattttagagacataagtaaaagacagggtgatgttgtcaatgaaaactctttgaactctgtgcatttgcaaatgataaaaggcatgctctatcaacagcagcaggattttagcagccaagaattggtttccagaaagaaagtactttctctgaatttaaagcagacttctaagacagaggaaattaaaaatgtattaggagagtctacctgctacaactatagtgtaaaggatttacaggnnnnnnnnnnnnnnnnnnnnnnnnnnnnnnnnnnnnnnnnnnnnnnnnnnnnnnnnnnnnnnnnnnnnnnnnnnnnnnnnnnnnnnnnnnnnnnnnnnnnnnnnnnnnnnnnnnnnnnnnnnnnnnnnnnnnnnnnnnnnnnnnnnnnnnnnnnnnnnnnnnnnnnnnnnnnnnnnnnnnnnnnnnnnnnnnnnnnnnnnnnnnnnnnnnnnnnnnnnnnnnnnnnnnnnnnnnnnnnnnnnnnnnnnnnnnnnnnnnnnnnnnnnnnnnnnnnnnnnnnnnnnnnnnnnnnnnnnnnnnnnnnnnnnnnnnnnnnnnnnnnnnnnnnnnnnnnnnnnnnnnnnnnnnnnnnnnnnnnnnnnnnnnnnnnnnnnnnnnnnnnnnnnnnnnnngtgactccaggatatttaacacaggaaggagctcgacctggcatggttttaagtgatattaagagtattggcttgtacttaagaagtcaaaagataccactctatgaggaatgccagcttttgttgannnnnnnnnnnnnnnnnnnnnnnnnnnnnnnnnnnnnnnnnnnnnnnnnnnnnnnnnnnnnnnnnnnnnnnnnnnnnnnnnnnnnnnnnnnnnnnnnnnnnnnnnnnnnnnnnnnnnnnnnnnnnnnnnnnnnnnnnnnnatgatctttgggtggtttcaaaaaccctagactttgagctggatacttttattgcatgtagtgctttctttggaccatcgtctatcaatgagatagaaatactgcctttgaaaggctatttcccttccaactggcccactaac

SEQ ID NO: 35147 - DNA, 465 bp, Macaca Mulatta
gccacgtccactttgatagacaagctgcatgactcggtggtcatggtcacccaggagagtgacagcagcttactggtcaaggttggcttcctgaagatcctgcacaggtatgagattaccttcactctgcccccagtgcacaggctgagcaaggacgtccgtgaggcacctgtccccagcctgcacctcaagctcctcagtgtggtgcccgtccctgaaggttatagtgtcaagtgcgagtactcagcacacaaagagggcgtcctcaaagaggagatactgctagcctgcgaaggtggcaccggcacctgtgtgcgcgtgacggtgcaggcccgcgtcatgggtgagagtaccgacaccacggcacgcccatgctgctggacggtgtcaagtgcgtgggcgccgagctggaatatgactcagagcacagcgactggcatggctttgactgaggcctgaggcccc

SEQ ID NO: 35148 - DNA, 802 bp, Macaca Mulatta
  misc_feature (1)...(802): n = A,T,C or G
ttatgggaaaacaaactaatgcagtccagggcagtagatggatttcattcagaagagcagcagcttctactgcaagttcaacagcagcatcaaccnnnnnnnnnnnnnnnnnnnnnnnnnnnnnnnnnnnnnnnnnnnnnnnnnnnnnnnacagtacctcagcaagcgcagacccagcaggtccttattcctgcatcacagcaagnnnnnnnnnnnnnnnnnnnnnnnnnnnnnnnnnnnnnnnnnnnnnnnnnnnnnnnnnnnnnnnnnnnnnnnnnnnnnnnnnnnnnnnnnnnnnnnnnnnnnnnnnnnnnnnnnnnnnnnnnnnnnnnnnnnnnnnnnnnnnnnnnnnnnnnnnnnnnnnnnnnnnnnnnnnnnnnnnnnnnnnnnnnnnnnnnnnnnnnnnnnnnnnnnnnnnnnnnnnnnnnnnnnnnnnnnnnnnnnnnnnnnnnnnnnnnnnnnnnnnnnnnnnnnnnnnaggtactggctcctcttcctggaggtatttcaccacagacaggagtcatcatccagcctcagcaaatcttatttacaggaaataagactcaagttatacctacgacagtggcagcacctacaccagcccaagcacagataactgcaactggccagcagcaaccgcaggcccagcctgctcaaacacaagctccattggtcttacaagttgatggaactggggatacatcnnnnnnnnnnnnnnnnnnnnnnnnnnnnnnnnnnnnnnnnnnnnnnnnnnnnnnnnnnnngaaagatggagctgaagatgggcaggtggaagaag

SEQ ID NO: 35149 - DNA, 838 bp, Macaca Mulatta
  misc_feature (1)...(838): n = A,T,C or G
ggggctttctcgctccccggccatcttagtggctgcttttgcttgggggccgtcccgcacctgaggcaggaagatggtggccgcaaagaagacgaaaaagtcgctggagtcgatcaactctaggctccaactcgttatgaaaagtgggaagtacgtcctggggtacaagcagactctgaagatgatcagacaaggcaaagcgaaattggtcattctcgctaacaactgcccagctttgaggaaatctgaaatagagtactatgcaatgttggctaaaactggtgtccatcactacagtggaaataatattgaactgggcacagcatgcggaaaatactacagagtgtgcacactggctatcattgatccaggtgactctgacatcattagaagcatgccagaacagactggtgaaaagtaaaccatgcaaaattttcctttaataaaatttaattgttttaccaacanaaccacctttttaaaataattccttgtcgggccccctcggcccctcaaaaaagctttctaaaaccattccttttggccgcgcggggccccagtaggttaattgaaacatgggccatagcctgtttccccaagaaaaatctgggtccatgaacaagtggccttgggaattcccccccaannnnnnnnnnnnnnnnnnnnnnnnaaacccgaagcggtttctgaaacaaattccccaaatgggagattcctgaagggccctttaccggggaatctaatccacaccgggaagtcccaagggcaaggctcccatttttccaattttaggccccccggcccttggcccatctctttttggaattaatcttgtttc

SEQ ID NO: 35150 - DNA, 1067 bp, Macaca Mulatta
  misc_feature (1)...(1067): n = A,T,C or G
agtggctctgtagtgttgttgcgctccagtgcagcatattgaaacatttatctgctaagcagatgccttcgcattgggactctgaacagacagagaaggctgatattaagcctgttattgtgactgacggctcaatcaccacctccttgcaaacagctgacaagacacctacaccttcccactaccccttgtcctgcccctcagggattagcacccagaattccttgagctgctctccaccccaccagcccccagccctagaggacatcggctgcagttcttgtgcagaaaaatccaagaaaaccccttgtgggactgccaatgggccagtgaacacagaggtgaaagctaatggcccacacctctacagcagcccggaggattccacggacccccggcgacttccaggcgctaacacccccctaccaggcctctcacaccggcaaggctgaagccggcccctcacgccaccagcggctgggggccttcaaaacgacaccgtcggcatcannnnnnnnnnnnnnnnnnnnnnnnnnnnnnnnnnnnnnnnnnnnnnnnnnnnnnnnnnnnnnnnnnnnnnnnnnnnnnnnnnnnnnnnnnnnnnnnnnnnnnnnnnnnnnnnnnnnnnnnnnnnnnnnnnnnnnnnnnnnnnnnnnnnnnnnnnnnnnnnnnnnnnnnnnnnnnnnnnnnnnnnnnnnnnnnnnnnnnnnnnnnnnnnnnnnnnnnnnnnnnnnnnnnnnnnnnnnnnnnnnnnnnnnnnnnnnnnnnnnnnnnnnnnnnnnnnnnnnnnnnnnnnnnnnnnnnnnnnnnnnnnnnnnnnnnnnnnnnnnnnnnnnnnnnnnnnnnnnnnnnnnnnnnnnnnnnnnnnnnnnnnnnnnnnnnnnnnnnnnnnnnnnnnnnnnnnnnnnnnnnnnnnnnnnngaaatcgagataaatatgctggacgagaagctgatcaagtttctggccttgcagagaatacatcagcttttcccctcccgggtccaaccttcaccgggcagtgtcgggacacatcagctggcttctggagggcaccacacagaagn

SEQ ID NO: 35151 - DNA, 167 bp, Macaca Mulatta
acatatttctggacccactcctcactggggtcagcacagacctgccggcttcgcttggttaggaagatgacaccgggcttggagcactggctgctcgtctcaaagtagtcagctatgaaattctgtggaatctgccgggaggtgtagctgaagcagcaggcggtcgg

SEQ ID NO: 35152 - DNA, 399 bp, Macaca Mulatta
actttcattaactttttaaaatttcaagctaaagaagcagtattggggctacttttcagaagttaaatgctgcctgttttctataattcatttttttttcttctctagtgtatgtctgcctcctatcaagaagctaaatgtaagttgaaatcctacttacaacaacatggctatggatcctggattgtgaaatctccctgcatagagcaatttaacatgtgaaataggcaatccattgtcacattaaaaatcttgtattgtttggtatgttttgactagtaaaaatgtttttaaaatattggtggttttcaactttcagaatcagagtcttagcaatagcaatgtgcagtgattgctgaaaatttctaaatattcctgccaaattacattgaaacatta

SEQ ID NO: 35153 - DNA, 1428 bp, Macaca Mulatta
  misc_feature (1)...(1428): n = A,T,C or G
gtgagcctgcggttgctgcttaaccgcgtagtttgagccatttctgcgtctggcgggcccttctgaacttgtcacctttgcctggggtcgcaacgaccagatgatcgatgatccaagcaagggaaaagaagccttggcggagagcggaggnnnnnnnnnnnnnnnnnnnnnnnnnnnnnnnnnnnnnnnnnnnnnnnnnnnnnnnnnnnnnnnnnnnnnnnnnnnnnnnnnnnnnnnnnnnnnnnnnnnnnnnnnnnnnnnnnnnnnnnnnnnnnnnnnnnnnnnnnnnnnnnnnnnnnnnnnnnnnnnnnnnnnnnnnnnnnnnnnnnnnnnnnnnnnnnnnnnnnnnnnnnnnnnnnnnnnnnnnnnnnnnnnnnnnnnnnnnnnnnnnnnnnnnnnnnnnnnnnnnnnnnnnnnnnnnnnnnnnnnnnnnnnnnnnnnnnnnnnnnnnnnnnnnnnnnnnnnnnnnnnnnnnnnnnnnnnnnnnnnntgccagcaaatctgagaacaaactgcaagtgacttaacccagtctcaagactccatcataaataattctcacttctttgaacaaggtgatgtcccctcccaggttgaggcagaactatctataattcatacaggacagaaaccttcacagaatgggaagtgtaaacaatccttcagtgatgttgccatctttgatcttcctcagcagttacactcaggagagaagtctcatacatgcaaggagtgtggaaaaagcttctgttacatctcagctcttcgtattcaccagagagttcacttgagagagaaactctctaagtgtgacatgcgtggtaaggaattcagtcagagttcatgtctgcaaactcatgagagagtctacactggagagaaaccattcaaatgtgagcagtgtgggaaagccttcagatgtagagcgatacttcaagttcattgcaaattacacacaggagagaaaccttatatttgtgagaaatgtgggagggccttcattcacgatttccagcttcagaaacatcagagaattcatactggggagaagccattcaaatgtgaaatatgtggtaagtgcttctgtcttaggtcaagtcttaataggcattgcatggtccacacagcagagaaactgtacaaatctgaggagtgtggaaaagccttcattgataggctagatttgcataagcatcagatgattcacacaggacagaaaccgtacaattgtaaagaatgtgggaagagcttcagatggtcctcatatcttttgattcatcagcgaatccacagtggagaaaaaccatacagatgtgaggagtgtgggaagggctacattagtaagtcaggtcttaacttgcaccagagggtccacaccggagagagaccttataattgtaaggaatgtgggaagagctttagccgggc

SEQ ID NO: 35154 - DNA, 420 bp, Macaca Mulatta
agcacatgcagatgacgatccaggctctccaggatgaattacggatccagagggacctgaatcagctgtttcagcaagatagtagcagtaggactggcgaaccttgtgtagcagagctgacagaggagaactttcagaggcttcatgctgagcatgagcggcaggccaaagagctatttcttcttcgaaagacattggaggaaatggagctgcgtatagagactcaaaagcagaccctaaacgctcgggatgaatccattaagaagcttctggaaatgttgcagagcaaaggactttctgccaaggctaccgaggaagaccatgagagaacaagacgactggcagaggcagagatgcacgttcatcatctagaaagccttttggagcagaaggagaaagagaacaatatgttgagagagg

SEQ ID NO: 35155 - DNA, 639 bp, Macaca Mulatta
  misc_feature (1)...(639): n = A,T,C or G
caggtacttctcccagcagctggtctcttacagttacaggatgtgaagaagacttgttgtgaatttttgnnnnnnnnnnnnnnnnnnnnnnnnnnnnnnnnnnnnnnnnnnnnnnnnnnnnnnnnnnnnnnnnnnnnnnnnnnnnnnnnnnnnnnnnnnnnnnnnnnnnnnnnnnnnnnnnnnnnnnnnnnnnnnnnnnnnnnnnnnnnnnnnnnnnnnnnnnnnnnnnnnnnnnnnnnnnnnnnnnnnnnnnnnnnnnnnnnnnnnnnnnnnnnnnnnnnnnnnnnnnnnnnnnnnnnnnnnnnnnnnnnnnnnnnnnnnnnnnnnnnnnnnnnnnnnnnnnnnnnnnnnnnnnnnnnnnnnnnnnnnnnnnnnnnnnnnnnnnnnnnnnnnnnnnnnnnnnnnnnnnnnnnnnnnnnnnnnnnnnnnnnnnnnnnnnnnnnnnnnnnnnnnnnnnnnnnnnnnnnnnnnnnnnnnnnnnnnnnnnnnnnnnnnnnnnnnnnnnnnnnnnnnnnnnnnnnnnnnnnnnnnnnnnnnnnnnnnnnnnnnnnttgatggtggtggttgggggccaagcaccaaaggctatccggagtgtggaatgctatgacgttaaagaagaaaggtggcaccaagtag

SEQ ID NO: 35156 - DNA, 2756 bp, Macaca Mulatta
  misc_feature (1)...(2756): n = A,T,C or G
aatatggaccggcaccattatgagatgttcaccaagttcggggatgatgggttccttattcacctggacaacgccagagggnnnnnnnnnnnnnnnnnnnnnnnnnnnnnnnnnnnnnnnnnnnnnnnnnnnnnnnnnnnnnnnnnnnnnnnnnnnnnnnnnnnnnnnnnnnnnnnnnnnnnnnnnnnnnnnnnnnnnnnnnnnnnnnnnnnnnnnnnnnnnnnnnnnnnnnnnnnnnnnnnnnnnnnnnnnnnnnnnnnnnnnnnnnnnnnnnnnnnnnnnnnnnnnnnnnnnnnnnnnnnnnnnnnnnnnnnnnnnnnnnnnnnnnnnnnnnnnnnnnnnnnnnnnnnnnnnnnnnnnnnnnnnnnnnnnnnnnnnnnnnnnnnnnnnnnnnnnnnnnnnnnnnnnnnnnnnnnnnnnnnnnnnnnnnnnnnnnnnnnnnnnnnnnnnnnnnnnnnnnnnnnnnnnnnnnnnnnnnnnnnnnnnnnnnnnnnnnnnnnnnnnnnnnnnnnnnnnnnnnnnnnnnnnnnnnnnnnnnnnnnnnnnnnnnnnnnnnnnnnnnnnnnnnnnnnnnnnnnnnnnnnnnnnnnnnnnnnnnnnnnnnnnnnnnnnnnnnnnnnnnnnnnnnnnnnnnnnnnnnnnnnnnnnnnnnnnnnnnnnnnnnnnnnnnnnnnnnnnnnnnnnnnnnnnnnnnnnnnnnnnnnnnnnnnnnnnnnnnnnnnnnnnnnnnnnnnnnnnnnnnnnnnnnnnnnnnnnnnnnnnnnnnnnnnnnnnnnnnnnnnnnnnnnnnnnnnnnnnnnnnnnnnnnnnnnnnnnnnnnnnnnnnnnnnnnnnnnnnnnnnnnnnnnnnnnnnnnnnnnnnnnnnnnnnnnnnnnnnnnnnnnnnnnnnnnnnnnnnnnnnnnnnnnnnnnnnnnnnnnnnnnnnnnnnnnnnnnnnnnnnnnnnnnnnnnnnnnnnnnnnnnnnnnnnnnnnnnnnnnnnnnnnnnnnnnnnnnnnnnnnnnnnnnnnnnnnnnnnnnnnnnnnnnnnnnnnnnnnnnnnnnnnnnnnnnnnnnnnnnnnnnnnnnnnnnnnnnnnnnnnnnnnnnnnnnnnnnnnnnnnnnnnnnnnnnnnnnnnnnnnnnnnnnnnnnnnnnnnnnnnnnnnnnnnnnnnnnnnnnnnnnnnnnnnnnnnnnnnnnnnnnnnnnnnnnnnnnnnnnnnnnnnnnnnnnnnnnnnnnnnnnnnnnnnnnnnnnnnnnnnnnnnnnnnnnnnnnnnnnnnnnnnnnnnnnnnnnnnnnnnnnnnnnnnnnnnnnnnnnnnnnnnnnnnnnnnnnnnnnnnnnnnnnnnnnnnnnnnnnnnnnnnnnnnnnnnnnnnnnnnnnnnnnnnnnnnnnnnnnnnnnnnnnnnnnnnnnnnnnnnnnnnnnnnnnnnnnnnnnnnnnnnnnnnnnnnnnnnnnnnnnnnnnnnnnnnnnnnnnnnnnnnnnnnnnnnnnnnnnnnnnnnnnnnnnnnnnnnnnnnnnnnnnnnnnnnnnnnnnnnnnnnnnnnnnnnnnnnnnnnnnnnnnnnnnnnnnnnnnnnnnnnnnnnnnnnnnnnnnnnnnnnnnnnnnnnnnnnnnnnnnnnnnnnnnnnnnnnnnnnnnnnnnnnnnnnnnnnnnnnnnnnnnnnnnnnnnnnnnnnnnnnnnnnnnnnnnnnnnnnnnnnnnnnnnnnnnnnnnnnnnnnnnnnnnnnnnnnnnnnnnnnnnnnnnnnnnnnnnnnnnnnnnnnnnnnnnnnnnnnnnnnnnnnnnnnnnnnnnnnnnnnnnnnnnnnnnnnnnnnnnnnnnnnnnnnnnnnnnnnnnnnnnnnnnnnnnnnnnnnnnnnnnnnnnnnnnnnnnnnnnnnnnnnnnnnnnnnnnnnnnnnnnnnnnnnnnnnnnnnnnnnnnnnctccaatgtgcatggacgatctttaaggctcagagagagtaagcaaaatcacacaatcgtgtggtttagacctattccaaagtgttcttttcactgtaacaaaaaacccaacagtatcccacccaatttatgaagtnnnnnnnnnnnnnnnnnnnnnnnnncagctagacatgggctcacacctgtaatcctagcattttgggcctaggcaggcagatcacttgggctcaggagctcgagaccagcctgggtaacatggcaaaaccctgtctctacnnnnnnnnnnnnnnnnnnnnnnnnnnnnnnnnaatcaactctttaacagagaaaccttaatcccaaagatttccttaactgttgtggccctactgcagcacagggctccccacttcatctcctgtctctcctgcttcaagttctttcttccctctggatgaagaaccaggagatcacacacaggaatgggaaaatatctgggtaaaaacgatcaaagaacagcacaaaatggtttgggacttccnnnnnnnnnnnnnnnnnnnnnnnnnnnnnnnnnnnnnnnnnnnnnnnnnnnnnnnnnnnnnnnnnnnnnnnnnnnnnnnnnnnnnnnnnnnnnnnnnnnnnnnnnnnnnnnnnnnnnnnnnnnnnnnnnnnnnnnnnnnnnnnnnnnntggtatacctaccttattattcacttatccttcaaccttccattactttttgattaaacaaaattaagactcatttctcaaaaatatcagaaaaccaannnntcattcttactcaagttcttccaacatgttcattttgaactgttaatgtcccatgaaataaaaattctcttgactc

SEQ ID NO: 35157 - DNA, 1782 bp, Macaca Mulatta
  misc_feature (1)...(1782): n = A,T,C or G
ggcccacctaccaatggttccgagatgggacccccctttctgatggtcagagcaacaacacagtcagcagcaaggagcggaacctgacgctccggccagctggtcctgagcatagtgggctctattcctgctgcgcccannnnnnnnnnnnnnnnnnnnnnnnnnnnnnnnnnnnnnnnnnnnnnnnnnnnnnnnnnnnnnnnnnnnnnnnnnnnnnnnnnnnnnnnnnnnnnnnnnnnnnnnnnnnnnnnnnnnnnnnnnnnnnnnnnnnnnnnnnnnnnnnnnnnnnnnnnnnnnnnnnnnnnnnnnnnnnnnnnnnnnnnnnnnnnnnnnnnnnnnnnnnnnnnnnnnnnnnnnnnnnnnnnnnnnnnnnnnnnnnnnnnnnnnnnnnnnnnnnnnnnnnnnnnnnnnnnnnnnnnnnnnnnnnnnnnnnnnnnnnnnnnnnnnnnnnnnnnnnnnnnnnnnnnnnnnnnnnnnnnnnnnnnnnnnnnnnnnnnnnnnnnnnnnnnnnnnnnnnnnnnnnnnnnnnnnnnnnnnnnnnnnnnnnnnnnnnnnnnnnnnnnnnnnnnnnnnnnnnnnnnnnnnnnnnnnnnnnnnnnnnnnnnnnnnnnnnnnntgcccacccatggcagggtgtaccagaagggccacgaactggtgttggccagtattgctgaaagtgatgctggtgtctacacctgccacgcggccaacctggctggtcagcggagacaggacgtcaacatcactgtggccannnnnnnnnnnnnnnnnnnnnnnnnnnnnnnnnnnnnnnnnnnnnnnnnnnnnnnnnnnnnnnnnnnnnnnnnnnnnnnnnnnnnnnnnnnnnnnnnnnnnnnnnnnnnnnnnnnnnnnnnnnnnnnnnnnnnnnnnnnnnnnnnnnnnnnnnnnnnnnnnnnnnnnnnnnnnnnnnnnnnnnnnnnnnnnnnnnnnnnnnnnnnnnnnnnnnnnnnnnnnnnnnnnnnnnnnnnnnnnnnnnnnnnnnnnnnnnnnnnnnnnnnnnnnnnnnnnnnnnnnnnnnnnnnnnnnnnnnnnnnnnnnnnnnnnnnnnnnnnnnnnnnnnnnnnnnnnnnnnnnnnnnnnnnnnnnnnnnnnnnnnnnnnnnnnnnnnnnnnnnnnnnnnnnnnnnnnnnnnnnnnnnnnnnnnnnnnnnnnnnnnnnnnnnnnnnnnnnnnnnnnnnnnnnnnnnnnnnnnnnnnnnnnnnnnnnnnnnnnnnnnnnnnnnnnnnnnnnnnnnnnnnnnnnnnnnnnnnnnnnnnnnnnnnnnnnnnnnnnnnnnnnnnnnnnnnnnnnnnnnnnnnnnnnnnnnnnnnnnnnnnnnnnnnnnnnnnnnnnnnnnnnnnnnnnnnnnnnnnnnnnnnnnnnnnnnnnnnnnnnnnnnnnnnnnnnnnnnnnnnnnnnnnnnnnnnnnnnnnnnnnnnnnnnnnnnnnnnnnnnnnnnnnnnnnnnnnnnnnnnnnnnnnnnnnnnnnnnnnnnnnnnnnnnnnnnnnnnnnnnnnnnnnnnnnnnnnnnnnnnnnnnnnnnnnnnnnnnnnnnnnnnnnnnnnnnnnnnnnnnaagcctgtgccggaggagtcggagggccctggcagccctcccccttacaagatgatccagaccattgggttgtcggtgggtatagctgtggcctacatcatcgccgtgatgggtctcatgttctactgcaagaagcgctgcaaatccaagcggctgcagaagcagcccgagggcgaggagccagagatggaatgcctcatcggt

SEQ ID NO: 35158 - DNA, 322 bp, Macaca Mulatta
gatggggttttttgtatataaatattcaaaatatccaagccagcacaactcaatagcctcatgccttcagtcttgaggaacccccaagtgaacattcacacctccattcaggccagtgcctgcgttttatggacacagtcaagatatgttaacactctaagtaacatcagccaggctcactgcatgcccagcctgacacctggccccctgcccactcctctgcccttctcagcacagtgataccaagagcacatgcagaggtcccattctgacaataaaaactcattaagaatttagcttttgatgacaatcattcatactc

SEQ ID NO: 35159 - DNA, 1721 bp, Macaca Mulatta
  misc_feature (1)...(1721): n = A,T,C or G
caactactgtgattataaagactacagggaaactatactgagcaaaccaatgttgttctttattaatgtacagaccaaaaaagacagctcaaaagnnnnnnnnnnnnnnnnnnnnnnnnnnnnnnnnnnnnnnnnnnnnnnnnnnnnnnnnnnnnnnnnnnnnnnnnnnnnnnnnnnnnnnnnnnnnnnnnnnnnnnnnnnnnnnnnnnnnnnnnnnnnnnnnnnnnnnnnnnnnnnnnnnnnnnnnnnnnnnnnnnnnnnnnnnnnnnnnnnnnnnnnnnnnnnnnnnnnnnnnnnnnnnnnnnnnnnnnnnnnnnnnnnnnnnnnnnnnnnnnnnnnnnnnnnnnnnnnnnnnnnnnnnnnnnnnnnnnnnnnnnnnnnnnnnnnnnnnnnnnnnnnnnnnnnnnnnnnnnnnnnnnnnnnnnnnnnnnnnnnnnnnnnnnnnnnnnnnnnnnnnnnnnnnnnnnnnnnnnnnnnnnnnnnnnnnnnnnnnnnnnnnnnnnnnnnnnnnnnnnnnnnnnnnnnnnnnnnnnnnnnnnnnnnnnnnnnnnnnnnnnnnnnnnnnnnnnnnnnnnnnnnnnnnnnnnnnnnnnnnnnnnnnnnnnnnnnnnnnnnnnnnnnnnnnnnnnnnnnnnnnnnnnnnnnnnnnnnnnnnnnnnnnnnnnnnnnnnnnnnnnnnnnnnnnnnnnnnnnnnnnnnnnnnnnnnnnnnnnnnnnnnnnnnnnnnnnnnnnnnnnnnnnnnnnnnnnnnnnnnnnnnnnnnnnnnnnnnnnnnnnnnnnnnnnnnnnnnnnnnnnnnnnnnnnnnnnnnnnnnnnnnnnnnnnnnnnnnnnnnnnnnnnnnnnnnnnnnnnnnnnnnnnnnnnnnnnnnnnnnnnnnnnnnnnnnnnnnnnnnnnnnnnnnnnnnnnnnnnnnnnnnnnnnnnnnnnnnnnnnnnnnnnnnnnnnnnnnnnnnnnnnnnnnnnnnnnnnnnnnnnnnnnnnnnnnnnnnnnnnnnnnnnnnnnnnnnnnnnnnnnnnnnnnnnnnnnnnnnnnnnnnnnnnnnnnnnnnnnnnnnnnnnnnnnnnnnnnnnnnnnnnnnnnnnnnnnnnnnnnnnnnnnnnnnnnnnnnnnnnnnnnnnnnnnnnnnnnnnnnnnnnnnnnnnnnnnnnnnnnnnnnnnnnnnnnnnnnnnnnnnnnnnnnnnnnnnnnnnnnnnnnnnnnnnnnnnnnnnnnnnnnnnnnnnnnnnnnnnnnnnnnnnnnnnnnnnnnnnnnnnnnnnnnnnnnnnnnnnnnnnnnnnnnnnnnnnnnnnnnnnnnnnnnnnnnnnnnnnnnnnnnnnnnnnnnnnnnnnnnnnnnnnnnnnnnnnnnnnnnnnnnnnnnnnnnnnnnnnnnnnnnnnnnnnnnnnnnnnnnnnnnnnnnnnnnnnnnnnnnnnnnnnnnnnnnnnnnnnnnnnnnnnnnnnnnnnnnnnnnnnnnnnnnnnnnnnnnnnnnnnnnnnnnnnnnnnnnnnnnnnnnnnnnnnnnnnnnnnnnnnnnnnnnnnnnnnnnnnnnnnnnnnnnnnnnnnnnnnnnnnnnnnnnnnnnnnnnnnnnnnnnnnnnnnnnnnnnnnnnnnnnnnnnnnnnnnnnnnnaaagtttctgtgttatgcattttgataacactactgatgatccttccatttatattttaaatattatgtactgcattttcacaattaaaacttttcttagcattcaa

SEQ ID NO: 35160 - DNA, 262 bp, Macaca Mulatta
cagctttcatgttacagacccagcaccttgttctacctctggagtcacagctggattaactaaattaactacaagaaaggacaactataatgcagagagagagtttttacagggtgctactataacagaggcttgcgatggcagtgatgatatttttgggttgagtactgatagtctgtctcgtttacgaagcccatctgttttggaagttagagaaaagggctatgaacgattaaaagaagaactcgcaaaagctcagagg

SEQ ID NO: 35161 - DNA, 480 bp, Macaca Mulatta
  misc_feature (1)...(480): n = A,T,C or G
aattctcaatgaaaattatttgactgaattacataaggattcatttgaaggcctgctatccctccagtatttnnnnnnnnnnnnnnnnnnnnnnnnnnnnnnnnnnnnnnnnnnnnnnnnnnnnnnnnnnnnnnnnnnnnnnnnnnnnnnnnnnnnnnnnnnnnnnnnnnnnnnnnnnnnnnnnnnnnnnnnnnnnnnnnnnnnnnnnnnnnnnnnnnnnnnnnnnnnnnnnnnnnnnnnnnnnnnnnnnnnnnnnnnnnnnnnnnnnnnnnnnnnnnnnnnnnnnnnnnnnnnnnnnnnnnnnnnnnnnnnnnnnnnnnnnnnnnnnnnnnnnnnnnnnnnnnnnnnnnnnnnnnnnnnnnnnnnnnnnnngatcttacctagccatatggcctgctgcctctgccaatttaaaaacagcattgaggctgtctgcaagacagtcaagctgcatgcaacagtgcatgtctgacaaacacc

SEQ ID NO: 35162 - DNA, 446 bp, Macaca Mulatta
tgaggaggtcagccagccatgtcaggaggtccctgacatcagccagtcatgccaggacatttctgaggcgctcagccagccatgtcaggaggtccctgacatcagccagcaatgccaggagaaccatgacaatggtaaccacacatgccaggaggtccctcagatcagccagccgtgccagaaggccagccaactgtgccagaaagtctctgaggaagtttgccagctatgtctggagaaccccgaggaggtcagccagccatgccagggggtctctgtggaggctggcaagctggtccataggtcccacgtaggggttggtggcttggtccaggaaacccctgtagaagttggcagcccagctgaagagatccctgaggaggtcagccagccataccaggagttctctgtggaggttggcaggctggcccaggagccttctgcga

SEQ ID NO: 35163 - DNA, 142 bp, Macaca Mulatta
atcagaggcatgcagagagttaggcttttctagcaacttgctctgcagctcttgtgatcttctcggacagttcaacctgcttcagctggatcctgattgcagaggatgctgtcaggaggaagcacaatttgaaaccaaaaag

SEQ ID NO: 35164 - DNA, 791 bp, Macaca Mulatta
catgtaagttcttttacaagctagcgatctggggctctgccttttttgaagtccgcctcacttggacgtatggttttagctgattttatacttatgtataattttcagacaaaattgctactactaatcctaggtgagggtaagagtttgtgagtatattccaggtctccagcactaacttcttattttattctaaatcattaggtgattcaccgatgggtgccttgcagcagagatccaggtactagatcccacatcgacaaggcagtacttctggtccagattgatgataaatatgtgactgtaattgaaactggggtactagaacttggggctgaagtgtgagccagtgttttataaagacatttctttatccctctcaattccaaggcattggaaaaagagaggagcgagcagaagatgcctgcaagtatcactttgatcctatgtgggagagactgaaaacagaatgagcttggttaagcgcctctcctttgcccctcaccctgactcctgtcactgtctccatccccaaataaagctgaaatatttttttaagttagctgccgagaaaacattttgcatgaaggataaagttctgttaaaatacatccttaaaaaaagtttttcctacgcattgcctatgctttaaatcaacaaactcttcatttctaaactatgatctcatatttttctaatttctttgccaaaaataattgccatgttttgtcatagaacatgaaattcatttaccttaatttttaaaaacagacaagtgtagaaatgttccc

SEQ ID NO: 35165 - DNA, 392 bp, Macaca Mulatta
  misc_feature (1)...(392): n = A,T,C or G
gcccacgcttcatgacttcggagtacaattccaagtatctcagggagcctctagaccagccagnnnnnnnnnnnnnnnnnnnnnnnnnnnnnnnnnnnnnnnnnnnnnnnnnnnnnnnnnnnnnnnnnnnnnnnnnnnnnnnnnnnnnnnnnnnnnnnnnnnnnnnnnnnnnnnnnnnnnnnnnnnnnnnnnnnnnnnnnnnnnnnnnnnnnnnnnnnnnnnnnnnnnnnnnnnnnnnnnnnnnnnnnnnnnnnnnnnnnnnnnnnnnnnnnnnnnnnnnnnnnnnnnnnnnnnnnnnnnnnnnnnnnnnnnnnnnnnnnnnngtgccccctctctgcccagaacccggcaacgtgagccaccagcagttccagccacttcatcggatgcaa

SEQ ID NO: 35166 - DNA, 288 bp, Macaca Mulatta
  misc_feature (1)...(288): n = A,T,C or G
gcccaagactggcctgctgatgaccatcctgagtgtgatcttcagccaggggaattgtgcccctgaagaggaagtctggaannnnnnnnnnnnnnnnnnnnnnnnnnnnnnnnnnnnnnnnnnnnnnnnnnnnnnnnnnnnnnnntcctcaccaaagatttagtgcaagagcagtagctggagtatcgggaagtgcccaacagcagttctccaagctatgaattcctgtggggtccacaagcctttgctgaaaccagcaagatgaaagtcctagagtttttggccaag

SEQ ID NO: 35167 - DNA, 630 bp, Macaca Mulatta
  misc_feature (1)...(630): n = A,T,C or G
ggggcctttcggtccttgagcacggggcaacaaggtcgtgagaacgaggtcttggtgaggtgcagccatttcatccatcctcggtctgcgcctttcgcagagcttccagcagcgctatgttgggccacagcatccggaggttcacaacctctgtggtccgtaggagccactatgaggagggccctgggaagaatttgccattttcagtggaaaacaagtgggcgttactagttaagatgtgtttgttctttggatctgcattttctgtacccttccttgtagtaagacaccaactgcttaaacaataaggatgtttcagttcgtccatttaccagatatgaagagcattttaagagatacagcctctggaaatggatcaaactctaactcatggcatgctagatattgtttttcataacttatgacannnnnnnnnnnnnnnnnnnnnnnnnnnnnnnnnnnncgggccgctccgccctcaagaacttttctgacctttcctttggccccgggcccattaggaaatgaactggcctaactgtttcaagaaaaccggcatgaacaggctggatccccaaaaaaaacccggggaaccaactttaaaatcccaaggattaaggtttcgggtcc

SEQ ID NO: 35168 - DNA, 437 bp, Macaca Mulatta
cctgatgctcgagctggtgcctgtccggggctcctggaggcagctgaggggtgtgggctcactgcggtctaaaggcaagagccagaacattgcacagctcattctccacgtgcttttgttccacaccatgtcccgtcctgtccccctcagccccttgtgcggagtcccagatgaccccacgggtccccatcctctcctgaacggatgcttctgtctctctagcactgaccctcttgccgcaaagctgcacagcatcctcactgatgaggcgtttgagttttactgtagccagtgccacaaacaaatcaaccgccttgaggatctttccgcccgcctgagtgatcttgaaatgaataggtaactgacgagcgcctggccttgctgtctgttcccagggtgtgggggactcccgatacccacagccccgttgagggcct

SEQ ID NO: 35169 - DNA, 485 bp, Macaca Mulatta
  misc_feature (1)...(485): n = A,T,C or G
cggaaggctcctcaggagcaacggagaagatgaagaaagggttgtctgacttcctaggggtgatctcagacacctttgccccctcaccagacaaaaccatcgactgcgatgtcatcaccctgatgggcacaccatctggcacagctgagccctatgatggcaccaaggnnnnnnnnnnnnnnnnnnnnnnnnnnnnnnnnnnnnnnnnnnnnnnnnnnnnnnnnnnnnnnnnnnnnnnnnnnnnnnnnnnnnnnnnnnnnnnnnnnnnnnnnnnnnnnnnnnnnnnnnnnnnnnnnnnnnnnnnnnnnnnnnnnnnnnnnnnnnnnnnnnnnnnnnnnnnnnnnnnnnnnnnnnnnnnnnnnnnnnnnnnnnnnnnnnnnnnnnnnnnnnnnnnnnnnnnnnnncaggagcaggcccggagggacgccctgaagcagcgggcggaacagagcatctctgaagaacctggctgggaggaggaggaa

SEQ ID NO: 35170 - DNA, 379 bp, Macaca Mulatta
cgtgtatgaataacaacattgactataaattatgaagctgagtatatttcacatatataatgtatgcatattttatgatagttcattgtatgatatttcatgtgaagcatttattatctctatttataattaagaacttacagcttttatgaggaaatcattgctgttttccattgtaatttgtaccccatatatgtagtacttaactatcattgtttgaacctctaaagttttgaattgtaaagacgttcagttctaaatcaatgatgagaatgtatctctgggtaggttttgtttcattatgaattcttattttatatttagtataaagcaaatagaatttttgttagataatgttgtacacaataaaatttgagtg

SEQ ID NO: 35171 - DNA, 124 bp, Macaca Mulatta
gtacgtgtttgagaacgttggtaagaagcgaatcctcaccatcaacaagtgcacgttggcggatgacgctgcctatgaagtagctgtgaaggatgagaagtgtttcactgagctcttcgtcaaa

SEQ ID NO: 35172 - DNA, 810 bp, Macaca Mulatta
  misc_feature (1)...(810): n = A,T,C or G
ggcgatgtccggcgccgaggcaccctgcagtcctacttggactgaacaggcctgatggagcttgtggctggcctcagatacacctaagaagcttaggggcaaggttcattatcctgctttgaaaagtgcatgaactgtagtgctttaaacaatcatctccttaacaggggtcgtaagcctggtttgcttctattacttttctttgacataaagaaaataacttctgctaggtattactctctactcctaaagttatttactatttggcttcaagtataaaattttggtgaatgtgtaccaagacaaaaattagtcacctgagtaacttggccactaataattaaccatctacctctgttttttaattttctttccaaaaggcagcttgaaatgttggtcctaatcttaattttttttccttttctatagacttgagaatgtttttctctaaatgagagaaagacttagaatgtacacagatcctaaatagaatcagataatctcttttttttttataaaggagagaaagacttagaacatacacgggatcctaagtagaaccaggtaattgtctctttctaataaagaatttgggtaatttttaatttcttgttnttttaaaaaaataccctagactatgcaaaaacatcaaaagtgaatttttccatggaatgttttttaaaaattcctcatcctcaaacattggttgatatatggctacttaaaaaaccttttttccataaaacaatccttaaacctccatttttcaagggtgnnnnnnnnnnnnnnnnnnccttttttccctcctcc

SEQ ID NO: 35173 - DNA, 215 bp, Macaca Mulatta
gctagatatggcgtcctctttgcttgcgggcgagcgattggtgcgtgctttgggccccggcggggagctggagccagagcagctaccccgaaagctgcgagccgagcttgaggccgcgctgggaaagaagcacacgggcggtgatagctccagtggcccccaacgcttggtttctttccgtctcatccgggatctgcaccatcacctaagagaaa

SEQ ID NO: 35174 - DNA, 797 bp, Macaca Mulatta
  misc_feature (1)...(797): n = A,T,C or G
ggggctactgctttcagatgtccttaagaaattgaaaatgtcctcccgcatatttcgctgcaattttccaaacgtggaaattgtcaccattgcagaggcagaattttatcggcaggtttctgcaagtctcttgttctcttgctccaaagacctggaagccttcaaccctgaaagtaaggagctgttagatctggtggaattcacgaacgaaattcagactctgctgggctcctctgtagagtggctccaccccagtgatctggtctcagacaactactggtgagcaagccagacccaccgtgtacagtgtgttatagtgttaatccttgtgcatatgtgtcataatatgactatttctgtaaagaaaggacactattacatatgaaaatatctcttctttatataagagaaattactccagtcagaaggacttagaaacatgtttttttccttttaaacttttaagtcagtttttatgaagttgttataatgtttctttacttttcaatgcacacatgcttttgggatatgtttgtttttacttgggaacannnnnnnnnnnnnnnnnnnnnnnnnnnnnnnnnnnnnnnnngtaaaaaagaagcttccacaccttttgaacttaattttccantaccaaagccttctgaatgaacaagaggccccatgaacctggggttaagaagttgggtccaagaaaccttgttgttgggtttgggttttggaaagggaaacccgcaaattttttggggggagaaagggccacctttgggnttggaaataataaaacctttttt

SEQ ID NO: 35175 - DNA, 191 bp, Macaca Mulatta
ccacactcctaggttcacatccaaggctgtgtcttccttgggggaggagatggtgtcgttcatatcaggggaaggcagtcaggcaggtgttcactgccttttcttcctgagcgtgagaacactgaacccagccactgcccctgggtccctgtcctggaaatagtctaataaatccttttcccttcttgagc

SEQ ID NO: 35176 - DNA, 769 bp, Macaca Mulatta
  misc_feature (1)...(769): n = A,T,C or G
gggacataatagagatagaaagcacagaaggagcgtggatcgcaagagaagggatacttcaggactagaaagaagtcacaaatcttcaaaaggtggtagtagtagagatacaaaaggatcaaaggataagaattcccggtctgacagaaagaggtctatatcagagagtagtcgatcaggcaaaagatcttcaagaagtgaaagagaccgaaaatcagacaggaaagacaaaaggcgttaatggaagaagccaggctttcttagccattctttgcagcagaagatttcttgatataaaaggattacctgtccttgtaaggaggatgctgccttaagaattgcatgttgtaaaaaatctttttggaaaatacagactgtttgtttaccagacattcttgtactttttgcataattttgtaagagttatttatcaaaattatgtgaggttccaaaatatgtaaaaatgataataataaaaaaagattaacatcccttgtcatcttttttaaatatcctatactcttcagtaagaatctgtatattttaataggcaaatctttaagtctgttcccttctaattctgtatcatacattgctttttgtagaaataaatgtgtgccttatttcctttcccnnnaaaaacaataagtttttcatattcttcaccacaagctcaaaccaaaacgaagtcgggaaatacacaaagcaaaacatacacaagacaaaaaaataattctttttttggtggcccgccctttgggccccttaa

SEQ ID NO: 35177 - DNA, 582 bp, Macaca Mulatta
  misc_feature (1)...(582): n = A,T,C or G
cagggtcttttaaaatccaaggaccacattctttgtatgtccaaatcatcacctaccccatgcaacttacagnnnnnnnnnnnnnnnnnnnnnnnnnnnnnnnnnnnnnnnnnnnnnnnnnnnnnnnnnnnnnnnnnnnnnnnnnnnnnnnnnnnnnnnnnnnnnnnnnnnnnnnnnnnnnnnnnnnnnnnnnnnnnnnnnnnnnnnnnnnnnnnnnnnnnnnnnnnnnnnnnnnnnnnnnnnnnnnnnnnnnnnnnnnnnnnnnnnnnnnnnnnnnnnnnnnnnnnnnnnnnnnnnnnnnnnnnnnnnnnnnnnnnnnnnnnnnnnnnnnnnnnnnnnnnnnnnnnnnnnnnnnnnnnnnnnnnnnnnnnnnnnnnnnnnnnnnnnnnnnnnnnnnnnnnnnnnnnnnnnnnnnnnnnnnnnnnnnnnnnnnnnnnnnnnnnnnnnnngtttacttgccagaggtgctacaggggcaacctggcttccatccacaacttcaatactaattcccaaatccagtggtcagtcagagcgctcaaccagggtcaagtctggattggaggcaggatcacaggctcg

SEQ ID NO: 35178 - DNA, 631 bp, Macaca Mulatta
atgatatcaacggttgtgtggctaatggtccttcttataatggtgccaaatatgatgattcccatcaaagacatcaaggaaaagtcaaatgtgggttgtatggagtttaaaaaggaatttggaagaaattggcatttgctgacaaatttcatatgtgtagcaatatttttaaatttctcagccatcattttaatatccaattgccttgtaattcgacagctctacagaaacaaagataatgaaaattatccaaatgtgaaaaaggctctcatcaacatacttttagtgaccacgggctacatcatatgctttgttccttaccacattgtccgaatcccatacaccctcagccagacagaagtcataactgattgctcaaccaggatttcactcttcaaagccaaagaggctacactgctcctggctgtgtagaacctgtgctttgatcctatcctgtactatcatctctcaaaagcatttcgctcaaaggtcactgagacttttgcctcacctaaagagaccaaggctcagaaagaaaacttaagatgtgaaaataatgcataaaagacagcattttttgtgctaccaattctgccttactggaccgtaaaattaaatacagcttggaaag

SEQ ID NO: 35179 - DNA, 1833 bp, Macaca Mulatta
  misc_feature (1)...(1833): n = A,T,C or G
tcacagtccggccactgaccgcagcagcgcccttgggtagcagccgcttgcagcgggaacactgaattgccaacgagcaggagagtctcaagacgcaagaggagnnnnnnnnnnnnnnnnnnnnnnnnnnnnnnnnnnnnnnnnnnnnnnnnnnnnnnnnnnnnnnnnnnnnnnnnnnnnnnnnnnnnnnnnnnnnnnnnnnnnnnnnnnnnnnnnnnnnnnnnnnnnnnnnnnnnnnnnnnnnnnnnnnnnnnnnnnngcccccagcgcgggccttggataaccgtgaaggcgggcatccctttgacccggccgaccatccccgtgcctctgcgtccctgcgctccagcgcccgcgcggccaccatgatgcaaatctgcgacacctacaaccagaagcactcgctctttaacgccatgaatcgcttcatcggcgccgtgaacaacatggaccagacggtgatggtgcccagcttgctgcgcgacgtgcccctggctgaccccgggttagacaacgatgtcggcgtggaggtaggcggcagtggcggctgcctggaggagcgcacgcccccagtccccgactcaggaagcgccaatggcagctttttcgcgccctctcgggacatgtacagccactacgtgctgctcaagtccatccgcaacgacatcgagtggggggtcctgcaccagccgcctccaccggctgggagcgaggagggcagtgcctggaagtccaaggacatcctggtggacctgggccacttggagggtgcggacgccggcgaagaagacctggagcagcagttccactaccacctgcgcgggctgcacactgtgctctcgaaactcacgcgcaaagccaacatcctcactaacagatacaagcaggagatcggcttcggcaattggggccactgaggcgtggcgcccgcggctgcccagcaccctcttcgacccatctcaccctctctcattcctnnnnnnnnnnnnnnnnnnncctggctggggggcgggaagggcagactgcaaattggggggctgcgtacgtgcaggaggcgcggtggggctgcgtggaggagggggcctcgtgtgagagagaagaaaatggtggccggagaggggagggcccaaggaacctcctgggaggaggcctgcattctatgttggtgggaatgggactgggctgacgccctgcattcagcctgtgcctttcctggggtttcttttctgttcttttcggaggagaagggcccgagaagggccataccagggcgcggcgctgggttgccacacttgggaaagcagcccggagctgggtgctggggaaggcggggcgcatagcctcccgccgccctgcggttgggccggtggaggccacaggcgttgctaggattgcatcagtnnnnnnnnnnnnnnnnnnnnnnnnnnnnnnnnnnnnnnnnnnnnnnnnnnnnnnnnnnnnnnnnnnnnnnnnnnnnnnnnnnnnnnnnnnnnnnnnnnnnnnnnnnnnnnnnnnnnnnnnnnnnnnnnnnnnnnnnnnnnnnnnnnnnnnnnnnnnnnnnnnnnnnnnnnnnnnnnnnnnnnnnnnnnnnnnnnnnnnnnnnnnnnnnnnnnnnnnnnnnnnnnnnnnnnnnnnnnnnnnnnnnnnnnnnnnnnnnnnnnnnnnnnnnnnnnnnnnnnnnnnnnnnnnnnnnnnnnnnnnnnnnnnnnnnnnnnnnnnnnnnnnnnnnnnnnnnnnnnnnnnnnnnnnnnnnnnnnnnnnnnnnnnnnnnnnnnnnnnnnnnnnnnnnnnnnnnnnnnnnnnnnnnnnnnaatccagatgtagactatattc

SEQ ID NO: 35180 - DNA, 1119 bp, Macaca Mulatta
  misc_feature (1)...(1119): n = A,T,C or G
ggggagagttagttctttctgcccagggtagacatggcgcttgccagcgtgttggagagaccgctaccggtgaaccagcgcgggtttttcggactcgggggtcgtgcagatctgctagatataggtccagggagtcccagtgatgggctgagtctggccgcgcccggctggggtgtcccagaagagccagggatcgaaatgcttcatggaacaaccaccctggccttcaagttccgccatggagtcatagttgcagctgactccagggctacagcgggtgcttacattgcctcccagacggtgaagaaggtgatagagatcaacccatacctgctaggcaccatggctgggggcgcagcggattgcagcttctgggaacggctgttggcgcggcaatgtcgaatctatgagcttcgaaataaggaacgcatctctgtagcagctgcctccaaactgcttgccaacatggtgtatcagtacaaaggcatggggctgtccatgggcaccatgatctgtggctgggataagagaggccctggcctctactacgtggacagtgaagggaaccggatctcaggggccaccttctctgtaggttctggctctgtgtatgcgtatggggtcatggatcggggctattcctatgacctggaagtggagcaggcctatgatctggcccgtcgagccatctaccaagccacctaccgagatgcctactcaggaggtgcagtcaacctctaccacgtgcgggaggatggctggatcagagtctccagtgacaatgtagctgatctacatgagaagtacagtggctctactccctgaaagagggtggatgcagctgcttgtgtttcttgaggtgactatcattggtaatatggatacagtgacccatcccccatcctatttatagtggaagggccttcaattgtatcaatacttttaagttctggcacatttgacctctatgtgttaccagtcattaatgagctgctgcagaagtgactatttgttttactttcttgggatgttaacattacacttactcactaactctnnnnnnnnnnnnnnnnnnnnnnnnnnnnnnnnnttgttcgggccggccctcgggccccttga

SEQ ID NO: 35181 - DNA, 422 bp, Macaca Mulatta
ggaagctgaaccatctatctccagaaatgtcttcggaaagtaaagagcaacatgacctttcacccagagactcaactgaaggaaatgacagttctccatctgggatccatctggagcttcaaagggaatcaagtactgacttcaagcaatttgagaccaatgatcaatgcagaccttatcataggatccttattgagtgtcaagagaaatcagatacaaacttcaaggagtttgttattaaaaagctgcagaagaattgccagtgcagtccagccaaagccaaaaatatgattttaggtttccttcctattttgcagtggctcccaaaatacgacctaaagaaaacattttaggggatgtgatgtcggggctgattgtgggcatattattggtgccccagtccattgcttattccctgctgg

SEQ ID NO: 35182 - DNA, 457 bp, Macaca Mulatta
tcgcccgccagcccagaccccgagccgcggccgcccggagacgtcccagggaccccgccccggaggcccgcctcgcccagcgcgctgggggaactcgggttgccagtgtccccgggctcagcgcagcgcacgccctggagcgcccaggagacggagctgctgctggggacgctgctgcaaccggccgtgtggcgcgcgctgctcctggaccgccgccaggccctgcccacctaccgccgcgtgtcggccgcgctggcccggcagcaggtgcgccgcacccccgcgcagtgtcgccgccgctacaagttcctcaaggacaagtttcgcgaggcgcagggccagccgcccgggcccttcgacgagcagatccggaagctcatggggctgctgggcgacaacgggcgcaaaaggcctcgccgccgctcccccgggtccggtcgcccccagcgcggccgcc

SEQ ID NO: 35183 - DNA, 671 bp, Macaca Mulatta
  misc_feature (1)...(671): n = A,T,C or G
ggggggagcactgagcagcttctgctttcaggagtacccgccaacgagcggaacggagcaggaatcggcatctgggaacagagccctttgctcctccctcagaatgaacggagaccagaaatcagatgtttatgcccaagaaaagcaagattttgttcagcacttctcccagatcgttagggtgctgactgaggatgagatggggcacccagagacaggagatgctattgcccggctcaaggaggtcctggagtacaatgccatcggaggcaagtatcaccggggtttgacagtggtagtagcgttccgggagctggtggagccaaggaaacaggatgctgatagtctccagcgggcctggactgtgggctggtgtgtggaactgctgcaagctttcttcctggtgacagatgacatcatggattcatccctcacccgccgtggacagatctgctggtatcagaagcggggtgtgggtttggatgccatcaatgatgctatcctcctggaagcatgtatctaccgcctgctngagctctattgccggnagcagccctattacctgaacctgatcgagctcttcttgcagagttctatcagactgagattggcagaacctgnactcatcacgcccccaggcaatgtgatcttgcaatccttgaaaagttaat

SEQ ID NO: 35184 - DNA, 1828 bp, Macaca Mulatta
  misc_feature (1)...(1828): n = A,T,C or G
gtgactgtgcggaaaacacctgactgctcgtgtcctgtgcctcatagtgctgcccctggctctctacacagccacctttgctgttcacttcatggtgctgagtaaaagnnnnnnnnnnnnnnnnnnnnnnnnnnnnnnnnnnnnnnnnnnnnnnnnnnnnnnnnnnnnnnnnnnnnnnnnnnnnnnnnnnnnnnnnnnnnnnnnnnnnnnnnnnnnnnnnnnnnnnnnnnnnnnnnnnnnnnnnnnnnnnnnnnnnnnnnnnnnnnnnnnnnnnnnnnnnnnnnnnnnnnnnnnnnnnaggtcaccacctatttgcacaaggactacaacaacctgtggattatcaagaaacataacacaaattcagnnnnnnnnnnnnnnnnnnnnnnnnnnnnnnnnnnnnnnnnnnnnnnnnnnnnnnnnnnnnnnnnnnnnnnnnnnnnnnnnnnnnnnnnnnnnnnnnnnnnnnnnnnnnnnnnnnnnnnnnnnnnnnnnnnnnnnnnnnnnnnnnnnnnnnnnnnnnnnnnnnnnnnnnnnnnnnnnnnnnnnnnnnnnnnnnnnnnnnnnnnnnnnnnnnnnnnnnnnnnnnnnnnnnnnnnnnnnnnnnnnnnnnnnnnnnnnnnnnnnnnnnnnnnnnnnnnnnnnnnnnnnnnnnnnnnnnnnnnnnnnnnnnnnnnnnnnnnnnnnnnnnnnnnnnnnnnnnnnnnnnnnnnnnnnnnnnnnnnnnnnnnnnnnnnnnnnnnnnnnnnnnnnnnnnnnnnnnnnnnnnnnnnnnnnnnnnnnnnnnnnnnnnnnnnnnnnnnnnnnnnnnnnnnnnnnnnnnnnnnnnnnnnnnnnnnnnnnnnnnnnnnnnnnnnnnnnnnnnnnnnnnnnnnnnnnnnnnnnnnnnnnnnnnnnnnnnnnnnnnnnnnnnnnnnnnnnnnnnnnnnnnnnnnnnnnnnnnnnnnnnnnnnnnnnnnnnnnnnnnnnnnnnnnnnnnnnnnnnnnnnnnnnnnnnnnnnnnnnnnnnnnnnnnnnnnnnnnnnnnnnnnnnnnnnnnnnnnnnnnnnnnnnnnnnnnnnnnnnnnnnnnnnnnnnnnnnnnnnnnnnnnnnnnnnnnnnnnnnnnnnnnnnnnnnnnnnnnnnnnnnnnnnnnnnnnnnnnnnnnnnnnnnnnnnnnnnnnnnnnnnnnnnnnnnnnnnnnnnnnnnnnnnnnnnnnnnnnnnnnnnnnnnnnnnnnnnnnnnnnnnnnnnnnnnnnnnnnnnnnnnnnnnnnnnnnnnnnnnnnnnnnnnnnnnnnnnnnnnnnnnnnnnnnnnnnnnnnnnnnnnnnnnnnnnnnnnnnnnnnnnnnnnnnnnnnnnnnnnnnnnnnnnnnnnnnnnnnnnnnnnnnnnnnnnnnnnnnnnnnnnnnnnnnnnnnnnnnnnnnnnnnnnnnnnnnnnnnnnnnnnnnnnnnnnnnnnnnnnnnnnnnnnnnnnnnnnnnnnnnnnnnnnnnnnnnnnnnnnnnnnnnnnnnnnnnnnnnnnnnnnnnnnnnnnnnnnnnnnnnnnnnnnnnnnnnnnnnnnnnnnnnnnnnnnnnnnnnnnnnnnnnnnnnnnnnnnnnnnnnnnnnnnnnnnnnnnnnnnnnnnnnnnnnnnnnnnnnnnnnnnnnnnnnnnnnnnnnnnnnnnnnnnnnnnnnnnnnnnnnnnnnnnnnnnnnnnnnnnnnnnnnnnnnnnnnnnnnnnnnnnnnnnnnnnnnnnnnnnnnnntgtgtatgtgagggcacattgtccatatccctatggaatacaggccatgtaactgtggacagctgagtgtcataaactaaaatagtccaggctacagta

SEQ ID NO: 35185 - DNA, 332 bp, Macaca Mulatta
catactgttcagtcagcgtcttccttggttccagggtcctgtgcttggattgtggggaacagactccccggggggtgctgcaagagcgcttccaagtcctgaaccccacctggagtgctgaggcctatggtctggctcctgatggtgacgtctttctctcagaggagcaagtccagagctttcaggtcccatcctgcgttcaatgtggaggccatctgaaaccagatgtcgttttcttcggggacacagtgaaccctgacaaggttgattttgtgcacaagcgtgtaaaagaagccgactccctcttggtggtgggatcatccttgcaggta

SEQ ID NO: 35186 - DNA, 479 bp, Macaca Mulatta
ttaaagactcctaaaggtgtaattgactaggaaggatgtagttctacactgctgtttacctatttaaattcatccttgtgaatatctttgttgttgttgtagggacagagtctcgtgctcacccaggctggagtgcagtggcgcgatcttggctcactgcaccctccacctcccgggtttaagctattctcctgcctcagtctcccgagtagctgggactactcgtgccaccacgcccagctaagttttgcattttcagtagagacagggtttcaccatgttggccaggtttttttcgaactcctgacctcaagtgatccatctggggcagcctccgaaagtgctgggattacaggtgtgagccactgcgcccggcctcatccctgtgaatttcttattgtacaaaagttctttcactacctgtgtgcagtgctctgagaggacagacaaggctcgggtgtatatgctgaccagatctc

SEQ ID NO: 35187 - DNA, 455 bp, Macaca Mulatta
acagctttagacaaagaggccttgaagttgcctgacactgaactcctgtccccggaagctggcccagaccctggtgacttacccctcgacaaccagaggacttagggccagccctgcgtgaactgcaggggcaatggatggtgaatccctttggctcttggcaggcagactttccaggaagtggctccatgtggcttttgcttcactttcccacccattgagggagacaatcaagttcttagtcataggtggctctcagggtctaattggaggcacctggctggggtccactctgaccccggacttacctaaaagagctctccaaggggcagcctcttataatgcccttgggatctttctcctgggcttctatccctgcgaggagaggtgctgtctgctagagcctctagcccaccctctccagtggtcactcttgagccacatctgtcacttaa

SEQ ID NO: 35188 - DNA, 918 bp, Macaca Mulatta
  misc_feature (1)...(918): n = A,T,C or G
atggcggcccagaagataaacgaggggctggaacacctcgccaaagcagagaaatnnnnnnnnnnnnnnnnnnnnnnnnnnnnnnnnnnnnnnnnnnnnnnnnnnnnnnnnnnnnnnnnnnnnnnnnnnnnnnnnnnnnnnnnnnnnnnnnnnnnnnnnnnnnnnnnnnnnnnnnnnnnnnnnnnnnnnnnnnnnnnnnnnnnnnnnnnnnnnnnnnnnnnnnnnnnnnnnnnnnnaggagatgcagaaactaccagaggctgttcagctaattgagaaagccagcatgatgtatctagaaaacggcaccccagacactgcagccatggctttggagcgagctggaaagnnnnnnnnnnnnnnnnnnnnnnnnnnnnnnnnnnnnnnnnnnnnnnnnnnnnnnnnnnnnnnnnnnnnnnnnnnnnnnnnnnnnnnnnnnnnnnnnnnnnnnnnnnnnnnnnnnnnnnnnnnnnnnnnnnnnnnnnnnnnnnnnnnnnnnnnnnnnnnnnnnnnnnnnnnnnnnnnnnnnnnnnnnnnnnnnnnnnnnnnnnnnnnnnnnnnnnnnnnnnnnnnnnnnnnnnnnnnnnnnnnnnnnnnnnnnnnnnnnnnnnnnnnnnnnnnnnnnnnnnnnnnnnnnnnnnnnnnnnnnnnnnnnnnnnnnnnnnnnnnnnnnnnnnnnnnnnnnnnnnnnnnnnnnnnnnnnnnnnnnnnnnnnnnnnnnnnnnnnnnnnnnnnnnnnnnnnnnnnnnnnnnnnnnnnnnnnnnnnnnnnnnnntatgctaagctgggcctgagtttggtggttccaggagggggaatcaagaagaaatcacccgcaacaccacaggccaagcctgatggtgtcactgccacagctgctgatgaagaggaagacgaatactcaggaggactatgcta

SEQ ID NO: 35189 - DNA, 818 bp, Macaca Mulatta
gggggggaatcccaatacagctccacctacaccagaattacatggcatcaaccctgtgttcctgtccagtaatcccagccgttggagtgtagaggaggtgtacgagtttattgcttctctccaaggctgccaagagattgcggaggaatttcgctcacaggagattgatggacaggcccttttattacttaaagaagaacatcttatgagtgccatgaacatcaagctgggccctgccctcaagatctgcgccaagataaatgtcctcaaggagcacctaaggtggccctgttgcacaaaccagcctaaggcagacactccccactgtccaggttataacctggtaccagcagagattttgcagggaagaaagagctgttccaatcatgtaaccttctgtaggggattactgagacagggaagagaagtgcaagaattggttgctggtgctacatggcggcagctttgacattttctctgggttctactttattttgtaaaatctttacaattctcaccatttccacctaccttaatccaatctttataaaagaggcagtctagagaactaggactgctcagccttatcctggaatggagcatttagcccaggtcttaatcctccaagaggaggaatacatagtatggtaaggcaaggaactgggtggaatgttaggctgcctgcccaatgggagaggtagggttttgctagcttgtgtgacacaagtagcaaaatctggtacgccctctgccagtgtagctgtggctcagtatgctctttgttgtcacttaatcccttgtgaatgcatgttttctcc

SEQ ID NO: 35190 - DNA, 115 bp, Macaca Mulatta
tttaatatttcctggagtgcgactgggagctgacagtcaattcagtgattttcttgatggattgggaccagcccagcttgttggccgccaaactcttgccacccctgcaatgggt

SEQ ID NO: 35191 - DNA, 709 bp, Macaca Mulatta
ttacatacgagtagctaaagaggcttcaaatctaagaactgaattatatgtgagcccagccctgccagcctttctactcctttgcccttttcccatgttctgatgtattttgacaatgtcgtaagtgtttaccaagccgttggtctcctaagagcctcctgatggaagaacagtggggtgattcaaagttatttctatgtttgtgttaccatgttaacttttccccgagagaaagtgttaacattgagactctggccccagattggtatcttctatgaagatggatactgatgggtgacattgaaaacggcctgctttccaaatgtggttaaatgtaattggttagccccagacttgggctagagcagaaggcataggccagggtggttattgctatatgtgttacagacctcggttctcattaaagtatttattggcagaatcactttgtctttgtcttcatttactattttctcctttgccaactcttgaaattacattctccagagagtaataaaaagaagatgtctatgaaattgagactggactcttaaagtgcacttttatgagatgagaatgagtgcattgtgttttcccactgccattcatgggcataatgccactgctaaacgttgggcaggtggttctttcttaaacatgaataaacaagcaagtggctcatttggaagtttctacaggtaaaaagcta

SEQ ID NO: 35192 - DNA, 80 bp, Macaca Mulatta
  misc_feature (1)...(80): n = A,T,C or G
cactcatagtggagtctccattcatatctgttcttccttccctcgctctgtattcagggattactctgtggttntattat

SEQ ID NO: 35193 - DNA, 178 bp, Macaca Mulatta
tcacatagtggaggaaagttaaagctctcagtctctgtttttgagggctcgttgatctcaaagggttgatgcatttttcatacattagggtctctgtccatgtgtcttcctgatattgttagagaaatggcttcaggctgctggtcacagatgctgggaaaaaagaatgcattaaaca

SEQ ID NO: 35194 - DNA, 791 bp, Macaca Mulatta
aggaagagcgatggcaaggttggcgatgggacagccctctcagcctctcaggacaaccccagttctgtcatccatgtggtgaatcagaccaatgcccaaggccagcaagagattgtctactatgtgctgtctgaagccccaggagagcctcccccagcccctgagccaccctcagggggcatcatggaaaagcttcaaggaatagctgaggagccagagatccagatggtttgaaggccgcagagccagactatttcttctccaggtcctggagtttgagccaggcaagtggctgtgcccctagtggacaaccgttgccaatggatgcctttaagagtggtgctgagagcagtgtggtccactctggtctgggtttgcatcattctatggactctaaagacttcccttttctgccagactgcattttgtggggagcctgaggactttggattctttgaggggatcctagatgtgtgtgttcttgttaaagaggctgttatcaggcttaaccataaccctcaagacatgcttgacggtgattaaatccttagctcacatccattcccatctttagggctccttaggcccaaagatggcatgtgactggtccctacaagggtcctttctttgtcgccagccaaggcattgagaaccaattagccattttcctcttaaggtttcctctacaaccccaaggactttcatgattatcctcacggacaggataggaggcattgagcgtgtttattaacaaattgtttttggtaataaaagatatgcttggactctta

SEQ ID NO: 35195 - DNA, 121 bp, Macaca Mulatta
actcctgtcccttgttgggatgggaatgaaagcttaagctgctcattggaccagaagtcctactgactttatacagaactgaattaagttattgatttttgtaataaaaggtatgaaacac

SEQ ID NO: 35196 - DNA, 583 bp, Macaca Mulatta
ggaccagagcatgtgcccagcccctccaccaccagggacactgccatcgtgttagacgacacggccgtcttcgtgtctgaaccacgtcccagcacgggaattctagatgtgtgtgatctgtggacagggcagcacccccagcccacgacaagggagtcttgttttctggcttggtttggggacctgcaaatgggaggcttgaggccccctttaggctttggcagccacagatacttacgagcccttcacggacagcaggcaagggcttcggtgccgcgtgggcagtacacaggtcccgcccacactcacctgggagcacagcgcctggctcttaccagcgtctggcctagaggaagcctttgaacaacctttgggcaggtttctgcttcttctgttttgccccatggtcaagtacctggtccccaggcaggttccagctgattggcggcaggctctctgagtgatgagcttgaacctgtggtgcttctgggcagaagcttttattttttgagagtgtccaaagatgaaggtatggcaatgcctgtcctctgacttgggttaattcttgggtggcactggcatt

SEQ ID NO: 35197 - DNA, 176 bp, Macaca Mulatta
  misc_feature (1)...(176): n = A,T,C or G
aggcgggcgacttcaccaaccacaatggcacaggcgggaaatccatctacggaagccgctttcctgacgagaacttcacactgaagcacgtggggccgggtgnnnnnnnnnnngctaatgctggtcctaacaccaatggctcccagtttttcatctgcaccataaagacagactgg

SEQ ID NO: 35198 - DNA, 112 bp, Macaca Mulatta
gcaggcggcctggcgggtggcatcgagatctgcatcaccttccccactgagtacgtgaagacgcagctgcagctggacgagcgctcgcacccgccgcggtaccggggcatcg

SEQ ID NO: 35199 - DNA, 3402 bp, Macaca Mulatta
  misc_feature (1)...(3402): n = A,T,C or G
aggaggaagcagccctgctcagccaggagtttgccgaggcctggggccagaaggccaaggaaaaatatgaaccgatctggcagaacttcacggacccggagctgcgcaagatcatcggagctgtgggcaccctgggctctgccaacctgcccctggctaagcggcagcanncagtacaatgccctgctaagcaacatgagcaggatctactccaccgccaaggtctgcctccccaacaagactgccacctgctggtccctggacccannnnnnnnnnnnnnnnnnnnnnnnnnnnnnnnnnnnnnnnnnnnnnnnnnnnnnnnnnnnnnnnnnnnnnnnnnnnnnnnnnnnnnnnnnnnnnnnnnnnnnnnnnnnnnnnnnnnnnnnnnnnnnnnnnnnnnnnnnnnnnnnnnnnnnnnnnnnnnnnnnnnnnnnnnnnnnnnnnnnnnnnnnnnnnnnnnnnnnnnnnnnnnnnnnnnnnnnnnnnnnnnnnnnnnnnnnnnnnnnnnnnnnnnnnnnnnnnnnnnnnnnnnnnnnnnnnnnnnnnnnnnnnnnnnnnnnnnnnnnnnnnnnnnnnnnnnnnnnnnnnnnnnnnnnnnnnnngagacatgtgggcccagagctgggaaaacatctacgacatggtggtgcctttcccagacaagcccaacctcgacgtcaccagtactatgctgcagcaggncagggctggaatgccacgcacatgttccgggtggcagaggagttcttcacctccctggagctctcccccatgcctcccgagttctgggaagggtcgatgctggagaagccggccgacgggcgggaggtggtgtgccacgcctcggcttgggacttctacaacaggaaagacttcaggnnnnnnnnnnnnnnnnnnnnnnnnnnnnnnnnnnnnnnnnnnnnnnnnnnnnnnnnnnnnnnnnnnnnnnnnnnnnnnnnnnnnnnnnnnnnnnnnnnnnnnnnnnnnnnnnnnnnnnnnnnnnnnnnnnnnnnnnnnnnnnnnnnnnnnnnnnnnnnnnnnnnnnnnnnnnnnnnnnnnnnnnnnnnnnnnnnnnnnnnnnnnnnnnnnnnnnnnnnnnnngaaagtgacatcaattacttgctaaagatggcactggaaaaaattgccttcctgccctttggctacttggtggaccagtggcgctggggggtctttaatgggcgtactcctccttcccactacaacttcgactggtggtatcttcnnnnnnnnnnnnnnnnnnnnnnnnnnnnnnnnnnnnnnnnnnnnnnnnnnnnnnnnnnnnnnnnnnnnnnnnnnnnnnnnnnnnnnnnnnnnnnnnnnnnnnnnnnnnnnnnnnnnnnnnnnnnnnnnnnnnnnnnnnnnnnnnnnnnnnnnnnnnnnnnnnnnnnnnnnnnnnnnnnnnnnnnnnnnnnnnnnnnnnnnnnnnnnnnnnnnnnnnnnnnnnnnnnnnnnnnnnnnnnnnnnnnnnnnnnnnnnnnnnnnnnnnnnnnnnnnnnnnnnnnnnnnnnnnnnnnnnnnnnnnnnnnnnnnnnnnnnnnnnnnnnnnnnnnnnnnnnnnnnnnnnnnnnnnnnnnnnnnnnnnnnnnnnnnnnnnnnnnnnnnnnnnnnnnnnnnnnnnnnnnnnnnnnnnnnnnnnnnnnnnnnnnnnnnnnnnnnnnnnnnnnnnnnnnnnnnnnnnnnnnnnnnnnnnnnnnnnnnnnnnnnnnnnnnnnnnnnnnnnnnnnnnnnnnnnnnnnnnnnnnnnnnnnnnnnnnnnnnnnnnnnnnnnnnnnnnnnnnnnnnnnnnnnnnnnnnnnnnnnnnnnnnnnnnnnnnnnnnnnnnnnnnnnnnnnnnnnnnnnnnnnnnnnnnnnnnnnnnnnnnnnnnnnnnnnnnnnnnnnnnnnnnnnnnnnnnnnnnnnnnnnnnnnnnnnnnnnnnnnnnnnnnnnnnnnnnnnnnnnnnnnnnnnnnnnnnnnnnnnnnnnnnnnnnnnnnnnnnnnnnnnnnnnnnnnnnnnnnnnnnnnnnnnnnnnnnnnnnnnnnnnnnnnnnnnnnnnnnnnnnnnnnnnnnnnnnnnnnnnnnnnnnnnnnnnnnnnnnnnnnnnnnnnnnnnnnnnnnnnnnnnnnnnnnnnnnnnnnnnnnnnnnnnnnnnnnnnnnnnnnnnnnnnnnnnnnnnnnnnnnnnnnnnnnnnnnnnnnnnnnnnnnnnnnnnnnnnnnnnnnnnnnnnnnnnnnnnnnnnnnnnnnnnnnnnnnnnnnnnnnnnnnnnnnnnnnnnnnnnnnnnnnnnncagccgctgtacctgaacctgcatgcctatgtgcgccgggccctgcaccgccactacggggcccagcacatcaatctggaggggcccatccctgctcacctgctgggnnnnnnnnnnnnnnnnnnnnnnnnnnnnnnnnnnnnnnnnnnnnnnnnnnnnnnnnnnnnnnnnnnnnnnnnnnnnnnnnnnnnnnnnnnnnnnnnnnnnnnnnnnnnnnnnnnnnnnnnnnnnnnnnnnnnnnnnnnnnnnnnnnnnnnnnnnnnnnnnnnnnnnnnnnnnnnnnnnnnnnnnnnnnnnnnnnnnnnnnnnnnnnnnnnnnnnnnnnnnnnnnnnnnnnnnnnnnnnnnnnnnnnnnnnnnnnnnnnnnnnnnnnnnnnnnnnnnnnnnnnnnnnnnnnnnnnnnnnnnnnnnnnnnnnnnnnnnnnnnnnnnnnnnnnnnnnnnnnnnnnnnnnnnnnnnnnnnnnnnnnnnnnnnnnnnnnnnnnnnnnnnnnnnnnnnnnnnnnnnnnnnnnnnnnnnnnnnnnnnnnnnnnnnnnnnnnnnnnnnnnnnnnnnnnnnnnnnnnnnnnnnnnnnnnnnnnnnnnnnnnnnnnnnnnnnnnnnnnnnnnnnnnnnnnnnnnnnnnnnnnnnnnnnnnnnnnnnnnnnnnnnnnnnnnnnnnnnnnnnnnnnnnnnnnnnnnnnnnnnnnnnnnnnnnnnnnnnnnnnnnnnnnnnnnnnnnnnnnnnnnnnnnnnnnnnnnnnnnnnnnnnnnnnnnnnnnnnnnnnnnnnnnnnnnnnnnnnnnnnnnnnnnnnnnnnnnnnnnnnnnnnnnnnnnnnnnnnnnnnnnnnnnnnnnnnnnnnaggtacttcatcagcttcatcatccagttccagttccatgaagcactgtgccaggcagctggccacacgggccccctgcacaagtgtgacatctaccagtccaaggaggcagggcagcgcctggcgnnnccatgaagctgggcttcagtaggccgtggccagaagccatgcagctgatcacgggccagcccaatatgagcgcctcggccatgctgagctacttcaagccgctgctagactggctccgcacggagaatgagctgca

SEQ ID NO: 35200 - DNA, 102 bp, Macaca Mulatta
ggcgttcctgttttgaatcctgccttggtccctcacctggcacaaggacaagtgctgttggtatcagacccatcgcccaacactgatccagctaagtactct

SEQ ID NO: 35201 - DNA, 208 bp, Macaca Mulatta
agcactcctgtcctcatccctctgagattttgggcacattcaaatctatatcctgggaccctgtaaaggtccatgacatccgctggaactttgaaaagttcctggtggggcctgatggaatccctgtcatgcgctggtcccaccgggctaccgtcagctcagtcaagacagacatcctggcgtacttgaagcaattcaaaaccaaata

SEQ ID NO: 35202 - DNA, 580 bp, Macaca Mulatta
acaaagatggcggccgcccctgcggcgggagcgatctgggcaaaggctgcggctaaagctgcagccgggcccactgaggggctgcacgggggtagtagggggtggccctgaactggggcctggccctggctggcctctcccgccgcctcatcgggggacaggtccagcctgtggtgtccacaatgccccaagcctctgagcaccgcctgggccggacccgagagccacctgttaatatccagccccgagtgggatccaagctaccatttgcccccagggcccgcagcaaagagcgcagaaacccagcctctgggccaaaccccatgttacgacctctgcctccccggccaggtccccctgatgaacggctcaagaaactggagctgggacggggacggacctcaggccctcgacccagaggcccccttcgagcagatcatggggttcccctgcctggctcaccacccccaactgtggctttgcctctcccatctcggaccaacttagcccgttccaagtctgtgagcagtggggacttgcgtccaatggggattgccttgggagggcaccgtggcaccgg

SEQ ID NO: 35203 - DNA, 667 bp, Macaca Mulatta
ggggactgcggctagggagatgtcgctgctacggtcactgcgtgtgttcctggtcgcgcggaccgggagccactcggctgggtctcttctgcgtcagtcgccccagccacggcacacacttcatgctgggccccgtctgtctgcctcggcctccagcaaggagctcctcatgaaactgcggcggaatacaggctactcctttgtaaattgcaagaaagctctggagacttgtggcggggacctcaaacaggcagagatctggctccacaagcaggcccagaaagagggctggagcaaagctgccaagctccaagggagaaagaccaaagaaggcctgattgggctgttgcaggaaggaaacacaactgtattagtagaggtaaactgtgagacagattttgtttctagaaatttaaaatttcaacagttggtccagcaagttgcccttggaaccatgatgtattgtctgagcctaaaggatcagctctctacataccgtaaaggcttcttaattcctctgagcttctggacttccacctggcctgcagagatggctcctcacggtcatttggctttaccattgaaaacgggaaaaactgttctaatacacctcagggtgagtgtcatttggttctcctgtgtcttaaactcaatcatttatatcttt

SEQ ID NO: 35204 - DNA, 96 bp, Macaca Mulatta
tgatccagaagcagggggacaagaacgtcactatgggtcagagcaatgcacgcatgaagttgaattgggctgtggcagctggagccaaggacccag

SEQ ID NO: 35205 - DNA, 266 bp, Macaca Mulatta
  misc_feature (1)...(266): n = A,T,C or G
ggatgtggactgcgcctacctccgcaagtcagacctggaggccaacgtggaggccctgatccaggagattgacttcctgaggcggctgtatgaggaggnnggagatccacattctccagtcccacatctcagacacctctgtggttgtcaagctggacaacagccgggacctgaacatggactgcatcgtcgccgagatcaaggcacagtacgatgacattgtcacccgcagccgggcggaggctgagtcctggtaccgcagcaag

SEQ ID NO: 35206 - DNA, 129 bp, Macaca Mulatta
  misc_feature (1)...(129): n = A,T,C or G
naggctcatgtagaagacataagtggagaagagtatatagtatttggaatggtcctctttctgtgggaacacgtgccagcatggtcggtggtactgtttttccgggcacagagattaaaccagaatttg

SEQ ID NO: 35207 - DNA, 710 bp, Macaca Mulatta
acgggctcagcctggaaaccccagtcacgttcagtggaggctccacctggtgatgctcctctttctctcgcccacccaggaccccaccaatggctactacagcgtcaacaccttcaaagagcaccactcaaccccaaccatctccctctccagctgccagcccgacctgcgtcctgcgggcaagcagcgtgtgcccacaggcatgtccttcaccaacatctatagcaccctgagcggccagggccgcctctacgactacgggcagcggttcgtgctggggatgggcagctcgtccatcgagctttgtgagcgggagttccagagaggctccctcagcgacagcagctccttcctggacacgcagtgtgacagcagcgtcagcagcagcggcaagcaggacggctatgtgcagttcgacaaggccagcaaggcttctgcctcctcctcccaccactcccagtcctcgtcccagaactctgaccccagtcgacccctgcagcggcggatgcagactcacgtctaaggatcacacactgcgggtgggatgggccagggaagagggcagggcaggttccggttgtccagggacgaggggtactttgcagaggaccccagaactggccacctccaggagagcctcccagcgcctctgccaccgccttccttcgaagctctgatcaagcacaaatctgggtccccaggtgcggtgt

SEQ ID NO: 35208 - DNA, 818 bp, Macaca Mulatta
atgtggcacctcaaactttgtgcagtcctcatgatcttcctcttgctgttgggccaggtaaggagggaaggatacatatgtgtatgtgtggagtgtggagatgatagtggtggtggaacttgaaagctagactcagtcctgaggaatggttcctctgttctgggtctacagcatctggggaatgatcattcttccaaggtgtgcagcagggtgtcaacacttccatatctgaatgcctttgccgtacagacagatggttccccaataccagaagtgagttcagcaaagagaaggccacggagaatgaccccattttggagaggggtttccctcaggcccattggagcctcctgccgggatgattctgagtgtatcacaaggctatgcaggtactccacgaacctgggagtagggttggaccagagagccctggagagctgggcagaggaggacgaggggacacagaacctaagaaaaagctggaggaggagttctaggctgagactgggagctccatggaaaatccattaggcgttaggagccaagaacagctccatgtgggtaccatgaaagagtggtgcctttccattcttcagtctttcctgaactggatagatcaagtgaagaggaaggaaatgcagcataggtggccctggtcattcctagacccagtcttaaactaccctttcttttcccctagaaaaagacgctgttccttaagtgtggcccaggaatgatgtacataccaggggaagaaaggacagcagtcacctctgacaatgctccgttctatggaatattgattagctgcattttgg

SEQ ID NO: 35209 - DNA, 133 bp, Macaca Mulatta
aggtgaagaaagaagtgggtgatgtgacaattgtggtgaataatgctgggacagtatatccagccgatcttcgcagcaccaaggatgaagagattaccaaaacatttgaggtcaacatcctaggacatttttg

SEQ ID NO: 35210 - DNA, 685 bp, Macaca Mulatta
cgcccgcctccgcacacgccgggccccagcctctctccccggcagcggaggcgtgtggagaccatcctggaggagaacgtggatggcagcatcttcccgcggtgacggcgacccaaagtgtgcgacgcgccgcagcctcccacataaagttataattctccgaaggcgctctggtctttctgctgccgctccccaggacccccgagggaagcggggagtatggacgctgcctctcccatgcaccttacagacatcgggtacagagagtggggcctctcccaaaagagtggggagacgcaagtgggtgagtgtgaaagtaacaggtcagggacacgcctacccctaatcccgacctgcccccattggcaaccaggcgttctgtgggttaatgggaggcccccagtcttggggaggacggagagcctgtttcagcaagtcacacccccagaagcaaaggtagcctcagctgcagtggccctgagtgcaggtcatcccgccagggggccgggggagggctgtgctgtgggcagcggaagtgacctaagctggcatttgaagaggcaccagctgtgcccagaggaccaagagactgggaaaggggaacccctgctgcacccagaaaaaaacccaccccgtggccttcctttccatcctgaatagcctcctgtgacccccttaatgcccc

SEQ ID NO: 35211 - DNA, 118 bp, Macaca Mulatta
aggagtagttaacgtgttgctaacaactccactctgggtggtaaacaccagactgaagctgcaaggggcaaaattcaggaatgaagacattgtaccaacgaactacaaaggtatcatt

SEQ ID NO: 35212 - DNA, 1844 bp, Macaca Mulatta
  misc_feature (1)...(1844): n = A,T,C or G
aggaagagaagttaaacttcgagagaaacctaacagacaatctccacannnnnnnnnnnnnnnnnnnnnnnnnnnnnnnnnnnnnnnnnnnnnnnnnnnnnnnnnnnnnnnnnnnnnnnnnnnnnnnnnnnnnnnnnnnnnnnnnnnnnnnnnnnnnnnnnnnnnnnnnnnnnnnnnnnnnnnnnnnnnnnnnnnnnnnnnnnnnnnnnnnnnnnnnnnnnnnnnnnnnnnnnnnnnnnnnnnnnnnnnnnnnnnnnnnnnnnnnnnnnnnnnnnnnnnnnnnnnnnnnnnnnnnnnnnnnnnnnnnnnnnnnnnnnnnnnnnnnnnnnnnnnnnnnnnnnnnnnnnnnnnnnnnnnnnnnnnnnnnnnnnnnnnnnnnnnnnnnnnnnnnnnnnnnnnnnnnnnnnnnnnnnnnnnnnnnnnnnnnnnnnnnnnnnnnnnnnnnnnnnnnnnnnnnnnnnnnnnnnnnnnnnnnnnnnnnnnnnnnnnnnnnnnnnnnnnnnnnnnnnnnnnnnnnnnnnnnnnnnnnnnnnnnnnnnnnnnnnnnnnnnnnnnnnnnnnnnnnnnnnnnnnnnnnnnnnnnnnnnnnnnnnnnnnnnnnnnnnnnnnnnnnnnnnnnnnnnnnnnnnnnnnnnnnnnnnnnnnnnnnnnnnnnnnnnnnnnnnnnnnnnnnnnnnnnnnnnnnnnnnnnnnnnnnnnnnnnnnnnnnnnnnnnnnnnnnnnnnnnnnnnnnnnnnnnnnnnnnnnggagcgtggtttgaatacgcccttctctgggaggagaagctggtattcaccgaatgaggatgtggaaacagaagttctaagcatctgctttaatgagaagggtcctgctcatgccatgcctgtggttgactcaggaaacaggcaggaggatgcccatggctccaatggagatggagatggggagattgtggacgaggatgcagcggtggcggaggcccttgcggctttagaagctgctactgcattataagatttggatgaggctgattagnnnnnnnnnnnnnnnnnnnnnnnnnnnnnnnnnnnnnnnnnnnnnnnnnnnnnnnnnnnnnnnnnnnnnnnnnnnnnnnnnnnnnnnnnnnnnnnnnnnnnnnnnnnnnnnnnnnnnnnnnnnnnnnnnnnnnnnnnnnnnnnnnnnnnnnnnnnnnnnnnnnnnnnnnnnnnnnnnnnnnnnnnnnnnnnnnnnnnnnnnnnnnnnnnnnnnnnnnnnnnnnnnnnnnnnnnnnnnnnnnnnnnnnnnnnnnnnnnnnnnnnnnnnnnnnnnnnnnnnnnnnnnnnnnnnnnnnnnnnnnnnnnnnnnnnnnnnnnnnnnnnnnnnnnnnnnnnnnnnnnnnnnnnnnnnnnnnnnnnnnnnnnnnnnnnnnnnnnnnnnnnnnnnnnnnnnnnnnnnnnnnnnnnnnnnnnnnnnnnnnnnnnnnnnnnnnnnnnnnnnnnnnnnnnnnnnnnnnnnnnnnnnnnnnnnnnnnnnnnnnnnnnnnnnnnnnnnnnnnnnnnnnnnnnnnnnnnnnnnnnnnnnnnnnnnnnnnnnnnnnnnnnnnnnnnnnnnnnnnnnnnnnnnnnnnnnnnnnnnnnnnnnnnnnnnnnnnnnnnnnnnnnnnnnnnnnnnnnnnnnnnnnnnnnnnnnnnnnnnnnnnnnnnnnnnnttttacattattacttttaaatctcctttgggactggggaggctggccaaaatagtcttaaaactgcttgtgtcatatttgggttttaagttcatgactttcagaacagcaaagccatatatgcaatgtttttatgccattaaatgtctgactctaattaaaatataacaacgt

SEQ ID NO: 35213 - DNA, 143 bp, Macaca Mulatta
gcttttgcagaaatgctgaaagtgaacaaaactttgaagagcttaaatgtggagtccaacttcatcacaggagttgggattctggcactgattgatgcgttaagagataatgaaaccctggcagagctcaagattgacaatca

SEQ ID NO: 35214 - DNA, 1323 bp, Macaca Mulatta
  misc_feature (1)...(1323): n = A,T,C or G
gaagatgtttctggagaacatgaaggtggatttcttgcgcagctttaacctgagcggggtcccttcgcaggacaaaaccagggtggagccaccgcagtacatgatcgatctgtacaacaggtacacgtctgataagtcgactacgccagcgtccaacatcgtgcggagcttcagcatggaannnnnnnnnnnnnnnnnnnnnnnnnnnnnnnnnnnnnnnnnnnnnnnnnnnnnnnnnnnnnnnnnnnnnnnnnnnnnnnnnnnnnnnnnnnnnnnnnnnnnnnnnnnnnnnnnnnnnnnnnnnnnnnnnnnnnnnnnnnnnnnnnnnnnnnnnnnnnnnnnnnnnnnnnnnnnnnnnnnnnnnnnnnnnnnnnnnnnnnnnnnnnnnnnnnnagaccaagaccttcctggtgtcccaggacattcgggatgagggctgggagaccttggaagtgtccagcgccgtgaagcgttgggtccggtctgactccaccaagagcaaaaataagctggaagtgactgtggagagccacaggaagggctgtgacaagctggacatcagtgtccccccaggttccagaaacctgcccttctttgtcgtcttctccaatgaccacagcagtgggaccaaggagaccaggctggagctgagggagatgatcagccatgagcaagagagtgtgctcaagaagctgtccaaggagggctccacagaggcaggtgagagcagccacgaggaggacgcagatggccacgtggctgtggggtcgactttagccaggcggaaaaggagcaccggggctggcagccactgtcagaagacctccctgcgggtaaacttcgaggacatcggctggaacagctggatcattgcgcccaaggagtacgaagcctacgagtgtaagggtggctgcttcttccccttggctgacgatgtgacgccgacgaaacacgctatcgtgcagaccctggtgcatctcaagttccccacaaaggtgggcaaagcctgctgtgtgcccaccaaactgagccccatctccatcctctacaaggatgacatgggagtgcccaccctcaagtaccactacgagggcatgagcgtggcagagtgtgggtgcaggtagtacctgcctgcggggctggggaggcaggccaaaggggctccacatgagaggtcctgcatccccctgggcacaacaaggactgattctatctgcatgccagcctggaggaggaaagggagcctgctctccctccccaccccccaaccaaagcatacaccactgagctcaactgccagggaaggctaaggaaatggggatt

SEQ ID NO: 35215 - DNA, 175 bp, Macaca Mulatta
ggtgcgcctgaaatagccacgcaaggcgcgcacggccttcaccgaccatcagctggcgcagctggagcgcagcttcgagcggcaaaagtacctgagcgtgcaggaccgcatggaactcgccgcctcgctcaacctcaccgacacgcaggtcaagacctggtaccagaaccgcagg

SEQ ID NO: 35216 - DNA, 615 bp, Macaca Mulatta
ctggtacttttacctagtccctctcctaaagggagcacgaggaaactgaagaggctgaaaaagaggagagtttgtagctgaaaaaggaatagggatagcaaggaaacccagaactgcattcccctaagtggggccatgccctgtgactgaattgtccgtagcttgcatatggtgagaaatgtgcatgctccgtgagctggcctcttgaaacaggacttatgtttcctctatattctggttgaattttccaaacacataatttcactgagcacagatttcttatccagagataagtagaatctaactgcagactgtttgcagagtttccaggcacttagccatgttctcttcctgactcaaatccccaaaggccttcactctcactgagaatcacactaatgtcccatagatacagcaggcattgaagcacctgtcgtgatcctcttggggggagaatgaaaggttattttctgcattgcatcatcatagcttttaatataatgctacagaatcatatccacattaggtcagagttcagatatctagatatgaatacctaccctagccatatctatggtcatctctgtccttttcagcgatgttttccatattata

SEQ ID NO: 35217 - DNA, 700 bp, Macaca Mulatta
tggtcatctgtattccagcaaccactgggatgatagtttccagcattcttagtttccaccagaaaggtttccttagtcttgggtaaaccttccttggatgtctgagtgagctttatgtgcattcccatgttggtttctgtgatgtataaaagtatacctccagcttacagataggaactatgccctgatttctgagcctcgacatcatccagttagtgtttcgtgttgaaagttaaaacatgattcccttttcaggtgtgatcctgagagattcacatggtgttgcacaagtacgttttgtgacaggcaataaaatcttaagaattcttaagtctaagggacttgctcctgatcttcctgaagatctctaccatttaattaagaaagcagttgctgttcgaaagcatcttgagaggaacagaaaggataaggatgctaaattccgtctgattctgatagagagccggattcaccgtttggctcgatattataagaccaagcgagtcctccctcccaattggaaatagtaagtgtcaactcttttgttgtagtagttgttatcaagcataggagtcagccagtagttaaagtcctagtagtgaatatgttcggtcttgggggctatttggttaactgctctttgagctctggcctggtagtgggaaaacagccacaggcagtacataatcgaatgggtgtg

SEQ ID NO: 35218 - DNA, 258 bp, Macaca Mulatta
  misc_feature (1)...(258): n = A,T,C or G
gggtaagacgtgaccttttgaggtgactataactgaagattgctttacagaagacaaaaaaggnnnaggtttttgagtcatgatgcaagaatctgggactgagacaaaaagtaacggttcagccatccagaatgggtcgggcggcagcaaccacttattagagtgcggcggtcttcgggaggggcggtccaacggagagacgccagcggtggacatcggggcagctgacctcgcccacgcccagcagcagcagcaaca

SEQ ID NO: 35219 - DNA, 763 bp, Macaca Mulatta
gcttccagtccctgcagcctgctccacatttgggcacagaaggactcagacgggcactgagtgggcacgaggttttacaggagtggtcagacctcaggctttaatgaataaagacattactctccaagtcctgggctgaggtctgtgtcaccaccaatgtccccgacccaggaagaatctggaccggggggtcctggcagctccagggtccatgtggtgtccccgagtaccctcagtctctctctgcagctgatgctggacctgctgccataccagctgctgcacgtcctcctgtggacaggagagcaggttcaaggctgagcctgtgccctcttccccacacctcccaggccctgacggcattccgcctacctcccaggcctccagctcccgcctcagcctcagtttctcctccaggacctccagcagctgggcctccatggtgcgtagcctggcttcgcacctctgcagctctgcctccactgcctgcttcctgtgggtggcaaagagagtagctgaggctcggaccctgtgggtctggttatggggtcctgggggtggacaagtgtggccacagccccggcctcagtgacagggcggctgcttgtgtggctttctttccagaatgcctgactagccccccgctcctccattagcaggacaaggccctgcaggggagccccaaatcccctaagggcccccaaaagcagcttccccttacttggcaatggatggtcccgctcctggaggacttggtccaggg

SEQ ID NO: 35220 - DNA, 763 bp, Macaca Mulatta
  misc_feature (1)...(763): n = A,T,C or G
ggccagaagcagctggaaaagactcagaaatcatcacagtgaatgggattctgggagagtcagtcactttccccgtaaatatccaagaaccccagcaagttacaaacattgcttggacttctaaaacatctgttgcttttgtaacaccaggagactcagaaatggcacccatagttgctgtgacccacagaaattattatgaacggatacatgccttaggtccgaagtacgatctggtcattagcgatctgaggatggaagacgcaggagactacaaagcagacataaatacacaggctgagccctacaccaccaccaagcgctacaacctgcaagtctatcgnnnnnnnnnnnnnnnnnnnnnnnnnnnnnnnnnnnnnnnnnnnnnnnnnnnnnnnnnnnnnnnnnnnnnnnnnnnnnnnnnnnnnnnnnnnnnnnnnnnnnnnnnnnnnnnnnnnnnnnnnnnnnnnnnnnnnnnnnnnnnnnnnnnnnnnnnnnnnnnnnnnnnnnnnnnnnnnnnnnnnnnnnnnnnnnnnnnnnnnnnnnnnnnnnnnnnnnnnnnnnnnnnnnnnnnnnnnnnnnnnnnnnnnnnnnnnnnnnnnnnnnnnnnnnnnnnnnnnnnnnnnnnnnnnnnnnnnnnnnnnnnnnnnnnnnnnnnnnnnnnnnnnnnnnnnnnnnnnnnnnnnnnnnnnnnnnnnnnnnnnnnnnnnnnnnnnnnnnnnnnnnnnnggttcctgcttgaacaccttcactaagaaccctt

SEQ ID NO: 35221 - DNA, 122 bp, Macaca Mulatta
tacaggttttccagggcagccttgtggattgggaccacttcctttatgatcctggttcttcccgttgtttttgagaccgagaagttgcaaatggagcaacagcagcaactgcagcagcggca

SEQ ID NO: 35222 - DNA, 116 bp, Macaca Mulatta
ggtgaaggttgccgaactgtccccctggctggacatgtggggtttgacagcttgcctgaccagctggtgaataagtccgtcagccagggcttctgcttcaacatcctgtgcgtggg

SEQ ID NO: 35223 - DNA, 2109 bp, Macaca Mulatta
  misc_feature (1)...(2109): n = A,T,C or G
aagttctgaacttccgaggcatctggacctccccagaaggcatttaacacagaaagcacagccctgctaattaggattcttacctatctctttaagaatttcagaccaatcgagcgtcctgtctctttaagacttaggaagagacagtgtggctgcccctttaaggaggcgttgcaacaaaccatattggacagacgatgggggcgacccatcaggacccgacgggcctctgactccagcaaaacaacgaatcagcggctttcgggaatacatttctccgaaaaagacttcttcctcggttttctgatctgcacacgtggaaatttcccccagtttttcctgcagaacgggagtcgagcgatacctacccccgcgctccagcaccagttgggcgctcccggatgaggccttaccccttggatccacgtgnnnnnnnnnnnnnnnnnnnnnnnnnnnnnnnnnnnnnnnnnnnnnnnnnnnnnnnnnnnnnnnnnnnnnnnnnnnnnnnnnnnnnnnnnnnnnnnnnnnnnnnnnnnnnnnnnnnnnnnnnnnnnnnnnnnnnnnnnnnnnnnnnnnnnnnnnnnnnnnnnnnnnnnnnnnnnnnnnnnnnnnnnnnnnnnnnnnnnnnnnnnnnnnnnnnnnnnnnnnnnnnnnnnnnnnnnnnnnnnnnnnnnnnnnnnnnnnnnnnnnnnnnnnnnnnnnnnnnnnnnnnnnnnnnnnnnnnnnnnnnnnnnnnnnnnnnnnnnnnnnnnnnnnnnnnnnnnnnnnnnnnnnnnnnnnnnnnnnnnnnnnnnnnnnnnnnnnnnnnnnnnnnnnnnnnnnnnnnnnnnnnnnnnnnnnnnnnnnnnnnnnnnnnnnnnnnnnnnnnnnnnnnnnnnnnnnnnnnnnnnnnnnnnnnnnnnnnnnnnnnnnnnnnnnnnnnnnnnnnnnnnnnnnnnnnnnnnnnnnnnnnnnnnnnnnnnnnnnnnnnnnnnnnnnnnnnnnnnnnnnnnnnnnnnnnnnnnnnnnnnnnnnnnnnnnnnnnnnnnnnnnnnnnnnnnnnnnnnnnnnnnnnnnnnnnnnnnnnnnnnnnnnnnnnnnnnnnnnnnnnnnnnnnnnnnnnnnnnnnnnnnnnnnnnnnnnnnnnnnnnnnnnnnnnnnnnnnnnnnnnnnnnnnnnnnnnnnnnnnnnnnnnnnnnnnnnnnnnnnnnnnnnnnnnnnnnnnnnnnnnnnnnnnnnnnnnnnnnnnnnnnnnnnnnnnnnnnnnnnnnnnnnnnnnnnnnnnnnnnnnnnnnnnnnnnnnnnnnnnnnnnnnnnnnnnnnnnnnnnnnnnnnnnnnnnnnnnnnnnnnnnnnnnnnnnnnnnngaccaaaaggagaaagaggccaaaggggacggaagggatggagccagaggggggggtgacagtgcgtccacacacacaggtgaagggggagccactggaggaaggcatccctcttcccccgacaaagaggaggaaaaaagaaaagaaacagattgcaatgatggagtcagggacggaggcgatggagccagtggagccagagatgaagcctctggagttcccaggggggatgatggagcctcaacagccaggtggagctgagcctcaggcccaggcagccctggcagctcccaaaaagaagaggaagaaagacaaacagcaaaatgccacagtggagccagagacagaggtggtggagcctgagctcccggatgaccttgagcctcaggtagctcccacgtccaccnnnnnnnnnnnnnnnnnnnnnnnnnnnnnnnnnnnnnngactgagctgattcagccactagagtctgagctgccaggggagggacagcctgaggccagggcaactccaggatccaccaagaagaggaagaagcggagtcaggaaagctggatgccagaaacagtgcccccagaggagatgcgggggccaccgctgaattcagagcctggggaggaggctcccacagtccgagacaagaagcggannnnnnnnnnnnnnnnnnctgtgtaatctgccccagggaaactgaggaactaaaaaaagctgaaggtgcccacctaggccatctgaaggtgtcaccccaacaacccctccccag

SEQ ID NO: 35224 - DNA, 1075 bp, Macaca Mulatta
  misc_feature (1)...(1075): n = A,T,C or G
ggatcttacataacaatagaacatttgtcaaaattaagaaattaaccttgatataatactaactaaagtagaaagtttaaaaagtagagatttcagtcttttcactaatgtcattttactgttccaagacccagccttgcatttagctgtcatgtctannagtcccagtccttaccnannnagtcctgtggacaggtgtaatcattaaccaggggggatacatgatggtgaatgtattccgggtgttgttaaccctgatcactatgctaaagtggggtccgctaagatttgcaaccgaaaacttccgggggtttcccggggaaaaataaggaaaatatttgccnnnnnnnnnnnnnnnnnnnnnnnnnnnnnnnnnntatggaaaaaaagaggtggcgcccccctttttgtttccgtgggagaaaacaaacaaaagggtgggggccggggcgngnnnaaggaagtataccccncccccnnnnnnnnnnnnnnnnnnnnnnnnnnnnnnnngnnccaaaannnnaagttagcgacnnnnnnnnnnnnnnnnnnnnnnnnnnnatatttcagnnnnactccccccaagaacgagagaaaaagatgaanccantnnnnnnnnnnnnnnnnnnggcnnccnnnnnnnnaaaagggcccccnnncccagaggagggggtggccaaataaaaaaccttnctccaaaccnncnccnnncnnnnccaggtnncccnnctttcttnnttctccganncnaagagaaaaatgaacagaggcgagtcttctatgagcgcgcctnnncccccccccnccctcacnncnncccccnnnnccgtaaataatttgacttcttctataatacatttaccgacgccgagatncccgcgcctctaatcnactaagctcagatcgccgaaattgcgtgccttgttcgtgccgctctctttgtcttccctccaactctcncccccctaccgctcttcacattattttactcaatatgcacacctcctcatatgtgtctgactgaatactctttcgctcgctccacaaacttctctagcctcgtctactattcttg

SEQ ID NO: 35225 - DNA, 2331 bp, Macaca Mulatta
  misc_feature (1)...(2331): n = A,T,C or G
ngcctggggatagcggtgctcgtgttcccccccggtagcccgcagctcccggtccagctccgcccacagactcggatggcgaccgcactgagggacccggctccggnnnnnnnnnnnnnnnnnnnnnnnnnnnnnnnnnnnnnnnnnnnnnnnnnnnnnnnnnnnnnnnnnnnnnnnnnnnnnnnnnnnnnnnnnnnnnnnnnnnnnnnnnnnnnnnnnnnnnnnnnnnnnnnnnnnnnnnnnnnnnnnnnnnnnnnnnnnnnnnnnnngttgttggcatggagtggagcatgaggaaacaccttctgaacagagaatttctgtagaaggagtgccacagttcaggacttccaaagaaggttcatcttcccagaatgcctactcctgtgaaatatgtggcctggtcttgagagatattttgcacttggctgaacaccaaggaacaaactgtgggcagaaactacacacatatggaaaacaattctacatcaatgcaaatcttcaacagcaccagaggcagcacattaaagaggcacctttcacaagttacgtggacacaacctcatttacaaagagctgcacagtccacgtgtcggagaagcccttcacctgtagggagatcaggaaagacttcctggccaacatgaggtttctccatcaagaggccactcaaacaggggagaagccaaataacagtaacaagtgtgtggtggccttttacagtggaaaaagtcatcgcaactggggaaaatacagtaaagcctttagccacacagacacacttgttcaggaccagagaatcctcactagagaagggctttttgagtgcagcaaatgtgggaaagcatgtacgcgaagatgtaacctcattcagcaccagaaagtccacagtgaagaaaggccttatgaatgcaacgaatgtggaaaattctttactactactccagtttcattannnnnnnnnnnnnnnnnnnnnnnnnnnnnnnnnnnnnnnnnnnnnnnnnnnnnnnnnnnnnnnnnnnnnnnnnnnnnnnnnnnnnnnnnnnnnnnnnnnnnnnnnnnnnnnnnnnnnnnnnnnnnnnnnnnnnnnnnnnnnnnnnnnnnnnnnnnnnnnnnnnnnnnnnnnnnnnnnnnnnnnnnnnnnnnnnnnnnnnnnnnnnnnnnnnnnnnnnnnnnnnnnnnnnnnnnnnnnnnnnnnnnnnnnnnnnnnnnnnnnnnnnnnnnnnnnnnnnnnnnnnnnnnnnnnnnnnnnnnnnnnnnnnnnnnnnnnnnnnnnnnnnnnnnnnnnnnnnnnnnnnnnnnnnnnnnnnnnnnnnnnnnnnnnnnnnnnnnnnnnnnnnnnnnnnnnnnnnnnnnnnnnnnnnnnnnnnnnnnnnnnnnnnnnnnnnnnnnnnnnnnnnnnnnnnnnnnnnnnnnnnnnnnnnnnnnnnnnnnnnnnnnnnnnnnnnnnnnnnnnnnnnnnnnnnnnnnnnnnnnnnnnnnnnnnnnnnnnnnnnnnnnnnnnnnnnnnnnnnnnnnnnnnnnnnnnnnnnnnnnnnnnnnnnnnnnnnnnnnnnnnnnnnnnnnnnnnnnnnnnnnnnnnnnnnnnnnnnnnnnnnnnnnnnnnnnnnnnnnnnnnnnnnnnnnnnnnnnnnnnnnnnnnnnnnnnnnnnnnnnnnnnnnnnnnnnnnnnnnnnnnnnnnnnnnnnnnnnnnnnnnnnnnnnnnnnnnnnnnnnnnnnnnnnnnnnnnnnnnnnnnnnnnnnnnnnnnnnnnnnnnnnnnnnnnnnnnnnnnnnnnnnnnnnnnnnnnnnnnnnnnnnnnnnnnnnnnnnnnnnnnnnnnnnnnnnnnnnnnnnnnnnnnnnnnnnnnnnnnnnnnnnnnnnnnnnnnnnnnnnnnnnnnnnnnnnnnnnnnnnnnnnnnnnnnnnnnnnnnnnnnnnnnnnnnnnnnnnnnnnnnnnnnnnnnnnnnnnnnnnnnnnnnnnnnnnnnnnctgaggcagaagccgtatcacatctaccacctgtgaggtccacataatgtgcatcatttacctcctgaacctgctgaaggaagcagacctctgtttctccctatttgctagaagaaatcatgaatagtcttgagtcttcctctctgacaagttagggcatggacttgacccagctttgtgccagagaacccaatatgagtgttgttggcagcttgccaagaaggactcttctttcaagacatgttggtttcatgtgacacctccatggattttttccagcctctaagtcaccaactttggaactgcctgcctcacattgctttgttttttacaataataaaggtattattatttaagct

SEQ ID NO: 35226 - DNA, 367 bp, Macaca Mulatta
gattacagtgtgggaagaaaataaagatttaggtaaagagactgataatcagtcctagtttattttcctagttagttttgcacaaaaagaggtcagctaaacccaggagtgaaatagcttgcacaatgcactgcagaacagtgttttcagagcatccctttaaaaactgaagaccacaaaactaagttagatgctaatgttaagttagagagtcatgtcaaataaggacatatgtaatggtggcattcctatatgaggccaaaatctgtgtccagaggtcataccagggagtaaaaaagcagaagagcaccccagggaagaggccagaatccagatatttaagtaagacaggaagaaatagaattgg

SEQ ID NO: 35227 - DNA, 681 bp, Macaca Mulatta
tcttccatggattttggtggattttgaacgtaaagtcttggatgcatatgtcatctcagtcctctaaaaactgtgagacgctcctcccttctctacctcatggtggtattgtagaagtccttgcaagagtcaatgcaaagatttgttttaattgttaagatatgatgctcctatggaagcataatgttattatagaattacatatttgcatatgtatgactcccaaattttcacataaaatatatttttgtataacagctgacattcatggctttttaaaaggataaagtaataaagctggtgggggtaacagggtgacaaggtgaagggcgtggttgcagaggtcgggctcacattgtggagaaatgagcacatagtggactctgggctttcccccaggccagacttatctgcatcttagggagaggcagctgcaggctggggtcagatgaacccacccctcagttccagatctgacatcctcttcagccacttgttcaaataccttccttccctctcaaactcattctttttctcaccatctcgcactctacccaaaagcctctcctctcttccattatatcaaccttgtaactggctggttttcccccttctaatcaattctctagtctcgtataatacaaaggtcactttcattaaaaaatcgagtaggagaccaac

SEQ ID NO: 35228 - DNA, 603 bp, Macaca Mulatta
ggccgcgacccgcaccgggatcggacctgctcccgctcccgctcgcggtccccactgtcgcccaggtcccgccgcggctccgcgccggagcgcagggaagccccagagcgcccgagcctggaggacacagagccgtcggattctggggacgagatgatggacccggccagcttggaggcggaggccgaccaaggcctgtgccgccagatccgccatcagtaccgggcgctcatcaactctgtccaacaaaaccgggaggacatactgaatgctggtgacaaattaacagaggtccttgaagaggctaacactctgtttaatgaagtgtcccgagcaagagaagcagtcctagatgcccactttcttgttttggcttccgatttgggcaaagagaaagcaaagcagctgcgctcagacctgagttcctttgacatgttaagatatgttgaaactctactcacacatatgggtgtaaatccgctagaagctgaagaacttatccgtgatgaagatagtcctgattttgaattcatcgtctatgactcctggaaaatatcaggcaaaacagcagaaaacacctttaataaaagccatacattccac

SEQ ID NO: 35229 - DNA, 1079 bp, Macaca Mulatta
  misc_feature (1)...(1079): n = A,T,C or G
ccgcccgcttcctcctgcttcccatcgaagctctagagatgaatgtttccatctcttcagagatgaaccannnnnnatgcaccattatcacagaagaaattcgtgtctatagcttttaaggacttgattacatcattttcaagcctgatagttttggaatcaccattagagcttaagacacatctgccttcacttcaaccacctgtcttcataccctgacgaagtgcgccttttaacactcctttgtccttggattacttaagagttcccagaaatacatttgccaccaacagagtannnnnnnnnnnnnnnnnnnnnnnnnnnnnnnnnnnnnnnnnnnnnnnnnnnnnnnnnnnnnnnnnnnnnnnnnnnnnnnnnnnnnnnnnnnnnnnnnnnnnnnnnnnnnnnnnnnnnnnnnnnnnnnnnnnnnnnnnnnnnnnnnnnnnnnnnnnnnnnnnnnnnnnnnnnnnnnnnnnnnnnnnnnnnnnnnnnnnnnnnnnnnnnnnnnnnnnnnnnnnnnnnnnnnnnnnnnnnnnnnnnnnnnnnnnnnnnnnnnnnnnnnnnnnnnnnnnnnnnnnnnnnnnnnnnnnnnnnnnnnnnnnnnnnnnnnnnnnnnnnnnnnnnnnnnnnnnnnnnnnnnnnnnnnnnnnnnnnnnnnnnnnnnnnnnnnnnnnnnnnnnnnnnnnnnnnnnnnnnnnnnnnnnnnnnnnnnnnnnnnnnnnnnnnnnnnnnnnnnnnnnnnnnnnnnnnnnnnnnnnnnnnnnnnnnnnnnnnnnnnnnnnnnnnnnnnnnnnnnnnnnnnnnnnnnnnnnnnnnnnnnnnnnnnnnnnnnnnnnnnnnnnnnnnnnnnnnnnnnnnnnnnnnnnnnnnnnnnnnnnnnnnnnnnnnnnnnnnnnnnnnnnnnnnnnnnnnnnnnnnnnnnnnnnnnnnnnnnnnnnnnnnnnnnnnnnnnnnnnnnnnnnnnnnnnnnaggttcaaaccttgtactactcagctgatcacaagctgcttgatgggaacctactagatggacaggctgaggtgtttggcagtgatgatgaccacattcagtttgtgca

SEQ ID NO: 35230 - DNA, 1404 bp, Macaca Mulatta
  misc_feature (1)...(1404): n = A,T,C or G
agggagcgcgtccgcccggagaaggaaggccgggttgaggcgccggctttcccgggtcttctccagctgccaccgctttgctgcaaagctgacggtcgcaaaaacatgagtgactccgcgggagggcgcgctggtctnnnnnnnnnnnnnnnnnnnnnnnnnnnnnnnnnnnnnnnnnnnnnnnnnnnnnnnnnnnnnnnnnnnnnnnnnnnnnnnnnnnnnnnnnnnnnnnnnnnnnnnnnnnnnnnnnnnnnnnnnnnnnnnnnnnnnnnnnnnnnnnnnnnnnnnnnnatgccagcagacactgtgtttgataaggaaacactctnnnnnnnnnnnnnnnnnnnnnnnnnnnnnnnnnnnnnnnnnnnnnnnnnnnnnnnnnnnnnnnnnnnnnnnnnnnnnnnnnnnnnnnnnnnnnnnnnnnnnnnnnnnnnnnnnnnnnnnnnnnnnnnnnnnnnnnnnnnnnnnnnnnnnnnnnnnnnnnnnnnnnnnnnnnnnnnnnnnnnnnnnnnnnnnnnnnnnnnnnnnnnnnnnnnnnnnnnnnnnnnnnnnnnnnnnnnnnnnnnnnnnnnnnnnnnnnnnnnnnnnnnnnnnnnnnnnnnnnnnnnnnnnnnnnnnnnnnnnnnnnnnnnnnnnnnnnnnnnnnnnnnnnnnnnnnnnnnnnnnnnnnnnnnnnnnnnnnnnnnnnnnnnnnnnnnnnnnnnnnnnnnnnnnnnnnnnnnnnnnnnnnnnnnnnnnnnnnnnnnnnnnnnnnnnnnnnnnnnnnnnnnnnnnnnnnnnnnnnnnnnnnnnnnnnnnnnnnnnnnnnnnnnnnnnnnnnnnnnnnnnnnnnnnnnnnnnnnnnnnnnnnnnnnnnnnnnnnnnnnnngaatggaatcactagttccccttgtacagagtttgaaaaaacggatggaagtaccagactatgaaatnnnnnnnnnnnnnnnnnnnnnnnnnnnnnnnnnnnnnnnnnnnnnnnnnnnnnnnnnnnnnnnnnnnnnnnnnnnnnnnnnnnnnnnnnnnnnnnnnnnnnnnnnnnnnnnnnnnnnnnnnnnnnnnnnnnnnnnnnnnnnnnnnnnnnnnnnnnnnnnnnnnnnnngccagttccaaagttgcttccacattttcaggnnnnnnnnnnnnnnnnnnnnnnnnnnnnnnnnnnnnnnnnnnnnnnnnnnnnnnnnnnnnnnnnnnnnnnnnnnnnnnnnnnnnnnnnnnnnnnnnnnnnnnnnnnnnnnnnnnnnnnnnnnnnnnnnnnnnnnnnggtcaagcctggatgattactgtccttctgaccaagttgacagcattcaagaaaaggtcctcaatatgctacgtgccctctatggaaatctagacctccaagtgtatgcagcagagtcttctccatcttga

SEQ ID NO: 35231 - DNA, 512 bp, Macaca Mulatta
  misc_feature (1)...(512): n = A,T,C or G
aggcacgctcttacaataagcagatgcgacctgcaattttagatcactgttcgggaaataagtggacaaacacatctcatcaccctgagtatttagtaggagaggaggnaggccttgtatgttcatccactggactgttaccatattcactnnnnnnnnnnnnnnnnnnnnnnnnnnnnnnnnnnnnnnnnnnnnnnnnnnnnnnnnnnnnnnnnnnnnnnnnnnnnnnnnnnnnnnnnnnnnnnnnnnnnnnnnnnnnnnnnnnnnnnnnnnnnnnnnnnnnnnnnnnnnnnnnnnnnnnnnnnnnnnnnnnnnnnnnnnnnnnnnnnnnnnnnnnnnnnnnnnnnnnnnnnnnnnnnnnnnnnnnnnnnnnnnncagggatcgtggtccatcaggagtctgtgtgtgccacctatggcagtggcttaagcagcacgtgtattgtagacgttggggaccagaagacaagcgtatgctgtgtggaggatggggtgtctcatcggaatactcg

SEQ ID NO: 35232 - DNA, 138 bp, Macaca Mulatta
caggatgactaccttgacctctttggggaccccagtgtgaccggcaaagttggcactgacatccaggacaacaaatgcagctggctggtggttcagtgtctgcaacgggccactccggaacagtaccagatcctgaag

SEQ ID NO: 35233 - DNA, 810 bp, Macaca Mulatta
ggcaggagtactgccggcgtgtgccttaccgcatcgcgctctacatctactgaagcggctccaccaccccaggtgggggcatatgcccactcatccaccagcacacccaagaccaggagcctggacacacttgggactcaagggcttgtaccccacccagccctgaggatgaacagcctcagagaagaggtggtttagagcaaggaaaaaaatgaaaccagtgaccaaaatcggagatgctcttcctcctttggataaacattgggaaccattggtgcacttctctcccctaggactggctgggtcagcactgatcagggagaagctgagcagtggcttgtgggcccaggactctgggggcctggtaggacaatagctatccttcagaaacaggcaacagggctgaccactcacagctttattaatgaccagggtccccagttcagccagggagctcctcaatgagagtccttggggcaggtggcacggggcctccccaaagccgctccagctccccagtgagggcggccacctcctcggctgccacagcatgggcttggtgagccctggcgcaatctagagccaggggtgtgagggccgcctcattttcattggtccaggccaggaggaattggcactttttccgggcccggtaaagatgatctcgctcttctctaagcacagcctgtttccgggcacggcccagggtctttgccaggtctcccagtgctgccagcgtgtagcctttctggttggtcgggccctcacccagcaggatgcgagcgacctcgtgcatagcccctcgtgtgc

SEQ ID NO: 35234 - DNA, 1909 bp, Macaca Mulatta
  misc_feature (1)...(1909): n = A,T,C or G
aggttgcagtccatgagctgggaaaggaggcagtgctcttgggagaaacagcagaggcctcaagtttcaggctgaagtcagcagattcccaaccagtggacgtatcccaagatgaagaattttggaatacataccagggtctgcaagaacagctcagcaggaatactcataaagagactgagcctgtgtatgagaggnnnnnnnnnnnnnnnnnnnnnnnnnnnnnnnnnnnnnnnnnnnnnnnnnnnnnnnnnnnnnnnnnnnnnnnnnnnnnnnnnnnnnnnnnnagagcttgttgacatttgaagaagtggccatgtatttttcccaggaagaatgggagttattggatcccactcagaaggccctctacaatgatgtaatgcaggaaaactatgagactgtcatctctctannnnnnnnnnnnnnnnnnnnnnnnnnnnnnnnnnnnnnnnnnnnnnnnnnnnnnnnnnnnnnnnnnnnnnnnnnnnnnnnnnnnnnnnnnnnnnnnnnnnnnnnnnnnnnnnnnnnnnnnnnnnnnnnnnnnnnnnnnnnnnnnnnnnnnnnnnnnnnnnnnnnnnnnnnnnnnnnnnnnnnnnnnnnnnnnnnnnnnnnnnnnnnnnnnnnnnnnnnnnnnnnnnnnnnnnnnnnnnnnnnnnnnnnnnnnnnnnnnnnnnnnnnnnnnnnnnnnnnnnnnnnnnnnnnnnnnnnnnnnnnnnnnnnnnnnnnnnnnnnnnnnnnnnnnnnnnnnnnnnnnnnnnnnnnnnnnnnnnnnnnnnnnnnnnnnnnnnnnnnnnnnnnnnnnnnnnnnnnnnnnnnnnnnnnnnnnnnnnnnnnnnnnnnnnnnnnnnnnnnnnnnnnnnnnnnnnnnnnnnnnnnnnnnnnnnnnnnnnnnnnnnnnnnnnnnnnnnnnnnnnnnnnnnnnnnnnnnnnnnnnnnnnnnnnnnnnnnnnnnnnnnnnnnnnnnnnnnnnnnnnnnnnnnnnnnnnnnnnnnnnnnnnnnnnnnnnnnnnnnnnnnnnnnnnnnnnnnnnnnnnnnnnnnnnnnnnnnnnnnnnnnnnnnnnnnnnnnnnnnnnnnnnnnnnnnnnnnnnnnnnnnnnnnnnnnnnnnnnnnnnnnnnnnnnnnnnnnnnnnnnnnnnnnnnnnnnnnnnnnnnnnnnnnnnnnnnnnnnnnnnnnnnnnnnnnnnnnnnnnnnnnnnnnnnnnnnnnnnnnnnnnnnnnnnnnnnnnnnnnnnnnnnnnnnnnnnnnnnnnnnnnnnnnnnnnnnnnnnnnnnnnnnnnnnnnnnnnnnnnnnnnnnnnnnnnnnnnnnnnnnnnnnnnnnnnnnnnnttcacagaaaataatcaagacttggtctgcagccactcagtagttttctgtgttcacagaagtaaacattgttcgttttgcattgatctctccagtcattcttgaacacatccaatagatacatttgcagcgtggtcttccaaaatgaaaagcaataacatgcatgtttaattgcataccattctcttcatagtagcaggcttactaatttcaatagtctcatgaggcagaaatgaattacaacataaagtgttccaagaatgaaattggattttctttcttttgtcattggacacggtttgcaaagttgaacatcatttgagttccttaatgaactttttggcaacttctgctcttagatcctgttatcacagttttctactgtgatgaaatcatgttaacttcaccactagggaatcttcagatgaactattaatgcactaacttgtgcctctctcattggtgatgtttggaaaacagaaaacatctctaatggaatcatgggtaaacgggttggaatttgtagccatggaatataagatgtaaagaattttctgcaataaaagaaactagactt

SEQ ID NO: 35235 - DNA, 631 bp, Macaca Mulatta
gtcaacatcgcttacgcctgcaacacagtgccccagatgctggtgaacctgcctgcatccagccaagcccatctcctttgcaggctgcatgacccagacctttctcttttccacttttgctgtcacagaatgtctcctcctggtggttatgtcctatgatcggtacgtggccatctgccaccccctccgatatttggccatcatgacctggagagtctgtatcaccctagcggcaacttcctgggcccctggagttgttttatccttgattcatcttgtgttacttctacctttacccttctgtaggccccagaaaattaatcactttttttgtgaaatcttggctgttctcaaacttgcctgtgccgatacccacatcaatgagaacatggtcttggccggagcaatttctgggctggtgggacccttgtccactattgtagtttcatatatgtgcatcctctgtgctatccttcagatccaatcaagggaaggtcagaggaaagccttctccacctgcttctcccacctctgtgtacgttggactcttttatggcacagccgttatcatgtatgttggacccagatatgggaccccaaggagcagagaatatctcctgctgtttcacag

SEQ ID NO: 35236 - DNA, 3119 bp, Macaca Mulatta
  misc_feature (1)...(3119): n = A,T,C or G
ggacctaccacttctgcaccatgtggccttccttgatcgcctgtgcaagcagaaatcnnnnnnnnnnnnnnnnnnnnnnnnnnnnnnnnnnnnnnnnnncgaggcatctctggatccactgaagccatgttctcctaccaaagaagctcccactggagagcaagccactccagccccaccccagccatcctgtggttctgagggcctcctcaaggccacagggataccagagcaaacagtcacgcagcccgtgagcccttcaagatccttccccatcttccagattctgaccagctttcctgtgaggcacaagatagcatcaggcaaccaccggcagcagagaaaaagccagctcttctggggtctcccctctctgcatagcgagtccttggaggccatcttcctgagttcaggtggcccctctcctctgaagttgtctgtttgttcttctgtcttcttcaacaagcttgccttcctacctaggtccaacctgttgcttccccagtatcactcctcagcccagttttctacccatgaggcccatactatggaagatctagaagggatggcccccgatcctcagctgcttccacctccatcttctcctcctgtctcatcactacccctccatctgaggtccttccctgtagaccacaagggagttttatctggcgctgaggcacccacacagtcccctggaaccagtcccctggaagttctccctggatatgagactcagttggaaaccacaagacacaaaaagatgccccaagcttttgagcctccaatgccacccccctgccaattcccagcttctctgtcagaacccaaagaagttagccctgaaggaggacttactacatctaaggacttcttgggaaccatgggatacaaagagaaacctcaggcctctgagtcttcactgccagtcccttgcccttccctggactccctgccagaactccagggagagagttccctggaaaatccatccagatataagccccagtgggaatgcacagaaaactcaggaaacctctgggcttttgagtctccagccttggacctcaatccagggctctctggaaccagccctgaatgtgtcccaccaagatctgagacaccatggaagggcatgcagagtagagaaaatacttgggtccctgcagacccagtttcacctcccggccttcactcagtccctctcctggagtctctagtaatgggcctccagggagtcctgtctgaatccaaaactttgtgggagaccatggggcagaaagagaacctctgggcatctgattccccagaccctgttcatagcgcatctccaacttcccttatggagccacacagagtcattcctggggaaggcctcactacgtcagaagctacgtggaaagacactgagcattccaggaattcctgggtttctaggtctccatctctggccctcagcccactcccagctcttgcactggagccactcagagttagatccatgggggtcctgtctgattctgaagctagatatggaaacatacgaaagagaaagaactcctgggcctctaagcaaacagtttgtaactcaccccaagacctgcatggagtcagccctctgggagtcttgtctgattctcagtctnnnnnnnnnnnnnnnnnnnnnnnnnnnnnnnnnnnnnnnnnnnnnnnnnnnnnnnnnnnnnnnnnnnnnnnnnnnnnnnnnnnnnnnnnnnnnnnnnnnnnnnnnnnnnnnnnnnnnnnnnnnnnnnnnnnnnnnnnnnnnnnnnnnnnnnnnnnnnnnnnnnnnnnnnnnnnnnnnnnnnnnnnnnnnnnnnnnnnnnnnnnnnnnnnnnnnnnnnnnnnnnnnnnnnnnnnnnnnnnnnnnnnnnnnnnnnnnnnnnnnnnnnnnnnnnnnnnnnnnnnnnnnnnnnnnnnnnnnnnnnnnnnnnnnnnnnnnnnnnnnnnnnnnnnnnnnnnnnnnnnnnnnnnnnnnnnnnnnnnnnnnnnnnnnnnnnnnnnnnnnnnnnnnnnnnnnnnnnnnnnnnnnnnnnnnnnnnnnnnnnnnnnnnnnnnnnnnnnnnnnnnnnnnnnnnnnnnnnnnnnnnnnnnnnnnnnnnnnnnnnnnnnnnnnnnnnnnnnnnnnnnnnnnnnnnnnnnnnnnnnnnnnnnnnnnnnnnnnnnnnnnnnnnnnnnnnnnnnnnnnnnnnnnnnnnnnnnnnnnnnnnnnnnnnnnnnnnnnnnnnnnnnnnnnnnnnnnnnnnnnnnnnnnnnnnnnnnnnnnnnnnnnnnnnnnnnnnnnnnnnnnnnnnnnnnnnnnnnnnnnnnnnnnnnnnnnnnnnnnnnnnnnnnnnnnnnnnnnnnnnnnnnnnnnnnnnnnnnnnnnnnnnnnnnnnnnnnnnnnnnnnnnnnnnnnnnnnnnnnnnnnnnnnnnnnnnnnnnnnnnnnnnnnnnnnnnnnnnnnnnnnnnnnnnnnnnnnnnnnnnnnnnnnnnnnnnnnnnnnnnnnnnnnnnnnnnnnnnnnnnnnnnnnnnnnnnnnnnnnnnnnnnnnnnnnnnnnnnnnnnnnnnnnnnnnnnnnnnnnnnnnnnnnnnnnnnnnnnnnnnnnnnnnnnnnnnnnnnnnnnnnnnnnnnnnnnnnnnnnnnnnnnnnnnnnnnnnnnnnnnnnnnnnnnnnnnnnnnnnnnnnnnnnnnnnnnnnnnnnnnnnnnnnnnnnnnnnnnnnnnnnnnnnnnnnnnnnnnnnnnnnnnnnnnnnnnnnnnnnnnnnnnnnnnnnnnnnnnnnnnnnnnnnnnnnnnnnnnnnnnnnnnnnnnnnnnnnnnnnnnnnnnnnnnnnnnnnnnnnnnnnnnnnnnnnnnnnnnnnnnnnnnnnnnnnnnnnnnnnnnnnccacatggagaagcatctctcctcccctacctcaaggcttcccttgccaggggtttccaaaaggtgttagccaaatgcctgggtaaccatcgacccctacccaccaaatctagtcagtagagaaaaggctggtaatactggcacttggtatgccaagacctgaagccaaaccagggggatggtggggatgtggagacaagaaatggaaattctaataaactagctgaatta

SEQ ID NO: 35237 - DNA, 223 bp, Macaca Mulatta
aatgcctggaactcaaccggccaggacctggctggccctaacagttttccagggaagatcttgaggagaaaccccagcatcccgcgcctctgccctctccaccatccccaaaagccccaggttctagactgaagccttcctttgctcagcaatctttattcagttcttcttgggggtggaatgcctcccttcccatgctcccacccctcccatcccagagctc

SEQ ID NO: 35238 - DNA, 199 bp, Macaca Mulatta
atttctggtcccatcaagcctgaagcgggccatgctggtgttacacttgagcaaacaaggaaatcaggttttggaggatttttttggttgtttctttaaagttacaaataaatgccattgtcatgctaggatttttctcagcaaatcttctgacactgaaattcatagaaagggattttagccagcataaaatcactct

SEQ ID NO: 35239 - DNA, 709 bp, Macaca Mulatta
ggctccccccgccctccccgggtaacggcccccgcttccggtgctcagaaaccggcggtgtccacaggtggctcgcttggcttccttgtctgtaagcctttctcctagaggtctgttcctcctggcgaaccatgggggacctgccgccctacccagagcgccctccccagcagcccccggaccggaggacttcccaggcctcccagaggcagtacagtcgggaccaagttcagcccctggcagcggaccccgaggaggggcagcagatagcgccagacgcccagcgtaacgccccgggttggtcacagaggggcagcctgtcccaacaggagagcttgctgatgccccgggccttccaggctgaggaagcccggataggtagcatggagtacccatccatgaacacgggctttcccttggagttccagccccagccttactcggatgaaagcaggatccaggccgccgaggtcaccaccagcctaatgcagcggctccagcagggccaaagcagcctgttccagcaactggattccaccttcccggagcccccagtcaaccccttggacccgttcaacctctaccagacagaccagttctctgaaggtgcccagcacgggccctacataagggatgaccctgcccttcagttctcgccctctgagctgggcttcccacactacagtgccgaagtgcctgagcccgagcc

SEQ ID NO: 35240 - DNA, 820 bp, Macaca Mulatta
  misc_feature (1)...(820): n = A,T,C or G
gtctatatgagaaaccttctctctcagcccagccgggccccacggttcaggcaggagagaacgtgaccttgtcctgcagctcccagagctcgtttgacatttaccgtctatccagggatggggaggcccatggacttaggctccctgcagtgccgagggtcagtggaacattcaaggctgactttcctctgggccctgcaacccacggagggaactacagatgctttggctctttccgtgccctgccctatgtgtggtcacacccgagtgacccactgcccatttctgtcacaggnnnnnnnnnnnnnnnnnnnnnnnnnnnnnnnnnnnnnnnnnnnnnnnnnnnnnnnnnnnnnnnnnnnnnnnnnnnnnnnnnnnnnnnnnnnnnnnnnnnnnnnnnnnnnnnnnnnnnnnnnnnnnnnnnnnnnnnnnnnnnnnnnnnnnnnnnnnatgctgctgtaatggaccaagagcctgcgggggacagaacagtgaannncaggactctgatgaacaagaccctcaggaggtgacatacgcacagttggatcaccgcgttctcacacagggaaaaatcactcgcccttctcagaggcccaagacacccccaacagataccagcgtgtacacggaacttccaaatcctgagcccagatcgaaagttgtcttctatccatgagcaccaccgtcaggccttgaaggggtcttctagggagacaacagtcctttctcaaaaccggcttgccagttccaatgtaccagccgcaggaatccgaaggtgtgagtctgcatcttaggacatcgctcttcctcacaccac

SEQ ID NO: 35241 - DNA, 2848 bp, Macaca Mulatta
  misc_feature (1)...(2848): n = A,T,C or G
ggttcaacttctcgtcttgttgttcttcttatactataggctgtttgctctggtttagtcaaaaagccatgtagaatgcctgccttttgaagaccaattttaaggtgtctagtaatacagcannnnnnnnnnnnnnnnnnnnnnnnnnnnnnnnnnnnnnnnnnnnnnnnnnnnnnnnnnnnnnnnnnnnnnnnnnnnnnnnnnnnnnnnnnnnnnnnnnnnnnnnnnnnnnnnnnnnnnnnnnnnnnnnntatgaaaatgtacaaatccatatgggtaccatccatcctgaattttgtgatgaaatggatgctggtgggctaggcaaaatgatattttaccagaaaagtgcaaagctatttcactgccataaatgcttcttcaccagcaagatgtactctaacgtatactatcacatcacatccaaacatgcatccccagacaaatggaatgataaacctaaaactcagttgaacaaagaaacagatcctgtgaaaagccctcctcttcctgaacaccagaaaataccctgcaattctgcagaaccaaaacccatacctgccctttcaatggaaacacagaaacttggttcagttttgtctccagaatcaccaaaacctactcctcttactcccctggagcctcagaaacctggctctgttgtttctcctgagctacagacaccttctcttccttctcctgagccttcaaaacctgcctctgtttcttctcctgaacctccaaaaccagtccctgtttgtgaatctcagaaacctgcccctgttccttctccagaaccacagaaacttgcccctgtatctcctgagcccgtaaaggctactcttcctaatcccaaaccccagaagcactctcatttcccagaaacactgggcccaccttcagcctcatctccagagtcaccagttctagctgcttccccagaaccttgngggaccatccccagctgcatctccagaatctcggaaatcagcccggactacctcccctgagnnnnnnnnnnnnnnnnnnnnnnnnnnnnnnnnnnnnnnnnnnnnnnnnnnnnnnnnnnnnnnnnnnnnnnnnnnnnnnnnnnnnnnnnnnnnnnnnnnnnnnnnnnnnnnnnnnnnnnnnnnnnnnnnnnnnnnnnnnnnnnnnnnnnnnnnnnnnnnnnnnnnnnnnnnnnnnnnnnnnnnnnnnnnnnnnnnnnnnnnnnnnnnnnnnnnnnnnnnnnnnnnnnnnnnnnnnnnnnnnnnnnnnnnnnnnnnnnnnnnnnnnnnnnnnnnnnnnnnnnnnnnnnnnnnnnnnnnnnnnnnnnnnnnnnnnnnnnnnnnnnnnnnnnnnnnnnnnnnnnnnnnnnnnnnnnnnnnnnnnnnnnnnnnnnnnnnnnnnnnnnnnnnnnnnnnnnnnnnnnnnnnnnnnnnnnnnnnnnnnnnnnnnnnnnnnnnnnnnnnnnnnnnnnnnnnnnnnnnnnnnnnnnnnnnnnnnnnnnnnnnnnnnnnnnnnnnnnnnnnnnnnnnnnnnnnnnnnnnnnnnnnnnnnnnnnnnnnnnnnnnnnnnnnnnnnnnnnnnnnnnnnnnnnnnnnnnnnnnnnnnnnnnnnnnnnnnnnnnnnnnnnnnnnnnnnnnnnnnnnnnnnnnnnnnnnnnnnnnnnnnnnnnnnnnnnnnnnnnnnnnnnnnnnnnnnnnnnnnnnnnnnnnnnnnnnnnnnnnnnnnnnnnnnnnnnnnnnnnnnnnnnnnnnnnnnnnnnnnnnnnnnnnnnnnnnnnnnnnnnnnnnnnnnnnnnnnnnnnnnnnnnnnnnnnnnnnnnnnnnnnnnnnnnnnnnnnnnnnnnnnnnnnnnnnnnnnnnnnnnnnnnnnnnnnnnnnnnnnnnnnnnnnnnnnnnnnnnnnnnnnnnnnnnnnnnnnnnnnnnnnnnnnnnnnnnnnnnnnnnnnnnnnnnnnnnnnnnnnnnnnnnnnnnnnnnnnnnnnnnnnnnnnnnnnnnnnnnnnnnnnnnnnnnnnnnnnnnnnnnnnnnnnnnnnnnnnnnnnnnnnnnnnnnnnnnnnnnnnnnnnnnnnnnnnnnnnnnnnnnnnnnnnnnnnnnnnnnnnnnnnnnnnnnnnnnnnnnnnnnnnnnnnnnnnnnncaggaatcaagcagtgatcaagagcaggttgatgtggaatccattgattttagcaaagagaacaaaatggacatgactagtccagagcagtctagaaatgtgctacagtttactgaagaaaaagaagcttttatctctgaagaggagattgcaaaatatatgaagcgtggaaaaggaaagtattattgcaaaatttgttgctgtcgtgctatgaaaaaaggtgctgttttgcatcatttggttaataagcataatgttcatagcccttacaaatgcacaatttgtggaaaggcttttcttttggaatctctccttaaaaatcatgtagcagcccatgggcagagtttacttaaatgtccacgttgtaattttgaatcaaatttcccacgaggttttaagaaacatttaactcattgtcaaagccggcataatgaagaggcaaataaaaagctaatggaagctcttgaaccgccactggaggagcagcaaatttgatagctcagtatgaatatttgttctacaaaggtgttcgttgaaaccattctttgtaagtatagcttatcaaatagcctagttggatatgtagatgacatgtggtgtaccgtgtttcactgtctcagttgtgttacaaagaatgagcatttgattatttttttctggtctgtgtctatgtggctatcttgtaagtcaatcaatttctaaatggtccagatggattaaactt

SEQ ID NO: 35242 - DNA, 742 bp, Macaca Mulatta
  misc_feature (1)...(742): n = A,T,C or G
ttggtggccaggagctcaggacgtacacccagtggagcaataacaaccccatctggtcaatgccgctggattttggggatgtgctcctggccacaggggggcccctgaggttgcaggtctgggatcaggactctggctgggacgatgacctccttggcacctgtgatcaggctcccaagtctggttcccatgaggcgagatgcaacctgaaacatggccacctgaaattccgctatcacgccaggtgcttgccccacctgggaggaggcacctgcctggactacgtcccccaaatgcttctgggggagcctccaggaaaccggagtggggccgtgtggtgagaacagtgagctcggagaggactcgtgtgcttggactgaaggggttctcacagtgggagccagggctgtcttcgtattcccattagaccaagctcgtccaacccgaggcccgcatgtggcccgggatggctttgaatgtggcccaacacaaattcgcaaactttctcgaaacattatgagatttttgttttgcnnnnnnnnnnnnnnnnnnnnctcatcacctatggttagtgttagtgtattttatgtgtggcccaacacaattcttcttccgatgtggcccagagaaggcaaagattggcaccccatcgatagattgacaggggactcccactattttcagggaggggtgggtttacggcaacccgatcacctgtcaactgctagcctctgtcgtctcg

SEQ ID NO: 35243 - DNA, 930 bp, Macaca Mulatta
  misc_feature (1)...(930): n = A,T,C or G
gggcctggttggagaactgacgacactacttactgatagatcaaaaaactacaccagtaggttgattcaatcaagatgtatgtagaccgaaaactacaccaataggctgattcaatcaagatttgtgctcgcaataggctgattcaatcaagatgtgtgtttgctatgttctaagtccaccttctgtcccattcgtgttagatcgttgaaaccctgtatccctttgaaacactggaagagctagtaaattgtaaatgaagtaattctgtgttcctcttgactgttatttttcttagtggggggcctttggaaggcactgtgaatttgctattttgatgtagtgttacaagatggaaaattgattcctctgactttgctattgatgtagtgtgatagaaaattgacctctctgaactggctccttcccagtcaaggttatctggtttgattgtataattcgcaccaagaagttaaaatgttttattactctctgttctgatgacaggcagagagtcacattgtgtgatttaatttcagtcagtcaatagatggcatccctcatcaaggtgccagatggtgataacagtaagggactactgatgttctgtgatacatcaggtttcagcacacaacttacatttctttgccttcaaattgaggcatttattatgatgttcataggttccctcttgtttgaaagtttctaattattaaaatggtgtccggaattattgtattttcccttaggatttcagtggaacttatcttcattaaatttagctggtaccaggttgatatgacttggtaatattatggtcaacttttagtcttagttttcgtttgtgcttttggataatatcgcttttatacaataaaatactgtttttcctccnnnnnnnnannaaannnnnaaaagannaaaattgtcgg

SEQ ID NO: 35244 - DNA, 792 bp, Macaca Mulatta
gggctccttgcagagccggcgccggaggagacgcacgcagctcacattgtgttctccgcactgctgttactgaggtctccagcgccttctccctcctgtgtaaaatggcaactcttaaggaaaaactcattgcaccagttgcggaagaagaggcaacagtcccaaacaataagatcactgtagtgggtgttggacaagttggtatggcgtgtgctatcagcattctgggaaagtctctggctgatgaacttgctcttgtggatgttttggaagataagcttaaaggagaaatgatggatctgcagcatgggagcttatttcttcagacgcctaaaattgtggcagataaagattattctgtgactgccaattccaagattgtagtggtaactgcaggagtccgtcagcaagaaggggagagtcggctcaatctggtgcagagaaatgttaatgtcttcaaattcattattcctcagatcgtcaagtacagtcctgattgcatcataattgtggtttccaacccagtggacattcttacatatgttacctggaaactaagtggattacccaaacaccgcgtgattggaagtggatgtaatctggattctgctagatttcgctaccttatggctgaaaaacttggcattcatcccagcagctgccatggatggattttggggggaaacatggcgactccaagtgtggcctgtgtggaatggcgtgaaatgttggcaagggggtttccctcttccaagaattggaaatccagaaaatggggaacacgggaacaaa

SEQ ID NO: 35245 - DNA, 145 bp, Macaca Mulatta
cactctacgaaagctaacacactgaaggaagatccaacaagggacctgaaacagcttctccaagagttgagaagcgtgatcaatgaggagccagctgtgtctctgagcaagacagaggaagatggaagaacatctctgggagcct

SEQ ID NO: 35246 - DNA, 659 bp, Macaca Mulatta
  misc_feature (1)...(659): n = A,T,C or G
accaggagacgggactgcaccttgatatgggctgcacagtggagaagggggaccatgtggcttacagctggagtgaaaaggcgggcaccgacccactgcacccagccaacagctcccacctcctgtccctcaccctcggcccccagcatgctgacaatatctatatctgcactgtgagcaacgccatcagcaacaattcccagaccttcagcccgtggcccagatgcaggacagaccactcagaaacaaagccatgggcaatgtatgctgggctgttagggggtgccatcatgattctcatcatggtggtaatactacagttgagaaaaagaggtaaaacggaccattaccagacaacannnnnnnnnnnnnnnnnnacaatctatgcccaagtccagaaaccaggtactcttcagaagaaacttgaccccttcccagctcaggacccttgcaccaccatatatgttgctgccacagagcctgtcccagagtctgtccaggaaacaaattccatcacagtctatgctagtgtgacacttccagagagctgataccaaagacccaacaaagggactttctgaaggaaaatggaaaaacaaaatgaacactgaacttggccccaggccccaagttcctctgacagacatgtcacatctgta

SEQ ID NO: 35247 - DNA, 388 bp, Macaca Mulatta
gactggcaagccaagaggtggccgctccagaggggtgcccagtcaggccgcaccggccaccagcctcccccagccctggagggagcatcctgggctgggggcctgcctctgtctgtgccggcgccgccaaccctacccacacgactgcctggtgctcccgccagcccacagggcctccgtgcccaggtccccagtggggcagccctccccacagacgagcccccacgcggtgccacggcacgtcccccttgtgacgctttccagaccaacacgacttctccctgctttgtagcggcttcgccgggctccctgtgctccagggccatcgggtgggcgtcctcgggcctcaaggggcttggccctgaccaggggcccacacgcctgcact

SEQ ID NO: 35248 - DNA, 315 bp, Macaca Mulatta
acctggcaggataggagggtccccagataacttgactttacaatctttagctcaaacccagagtcttccactgggtgacactgggaatgggtcacctgtctcagggcagtcctgaccctggttcctggcaccccccctccaaacccatatctcccttccacaggtgttaacaagtaaaggtgatgcgtgggccaagtacatggcagaagtgaaaaagtgcaaagcccaccagtgcggtgacgatgataaaactcggcccctggtgaaatgacgccccccccccgcctgcccatggcctgggactctctgcgatgt

SEQ ID NO: 35249 - DNA, 652 bp, Macaca Mulatta
tttgatttttcttacccagtgttaattgaattcttgcttttagacaacttccttttgtagtggtgaaccttgccctttagtacagttcaagtgaatctggataattgttcatctttgctttagcttagataccatgtagtggtctgtgtctacaggaagctggttctgtctgcttccacagtctgcttagaaaactgtctgacttcatgaatatagagaccaagtttaccacttctgatgaagagaccaattaagattcattcctcattctgtttctttccggtgggagaagagtccccatgaaataaaatgaaactgattccatgtgctagtacgtgtaggcttctcccttctgcaaagcttagcaatttgtaggaagctttgatctttttgtccaaaaaaaggaatgtctgacaggcttaagcttttgtccccttgcacttagactcgaagttagtaaatccttaagggcttttgaatagcagacttccacaagattacatttaggatttctagcatacttttaatttcagattttcagctgactttagctatagtatacagtaggttaagactcatgtctatgatttttactctaagaccagcaaaaggacagcagtctaatatgtttagttaagattcatttcagtag

SEQ ID NO: 35250 - DNA, 181 bp, Macaca Mulatta
cctggcctcatgaccctgggacagtctcctctcctccccagggtgtctgctgttctctaccctacctctttccaatatacactttaaccctgtcataattggcccatagaaacaaattacaaacttagactatttaaaactgctgccctttttagattcacataaaaatttacctcctgca

SEQ ID NO: 35251 - DNA, 822 bp, Macaca Mulatta
  misc_feature (1)...(822): n = A,T,C or G
gacgaggctcgtgccgaattcggcacgagggactaccnttaacccacctaagtaaatgtgggaaacatccgatacaaatctcatagctaatggcataattagaaatctaatcatttacttaaacatagagttgtcttcctaaagatttgttctttcagaaaaatgtttttccaattagtataaaactctacaaattccctcttggtataaaattcaagatgtggaaattctaactttctcaaaatttaaaagcttgtattttctaacttggcaaaagacttatccttagaaagagaagcatacattgatttccaattaaaaatttgctggcattaaaaataagcacatttacataagaccccatacatagagtgagactcctggaaccgggagacaaagctaccccatctggaaaggtactatgtgttcatgtcgttcaaaagatgtgattttttttataataaactcnnnnnnnnnnnnnnnnnnnnnnnnnnnnnnnnnnnnnnnnnnnnnnnnnnnnnnnnnnnnnnnnnnnnnnnnnnnnnnnnnnnnnnnnnnnnnnnnnnnnnnnnnnnnnnnnnnnnnnnnnnnnnnnnnnnnnnnnnnnnnnnnnnnnnnnnnnnnnnnnnnnnnnnnnnnnnnnnnnnnnnnnnnnnnnnnnnnnnnnnnnnnnnnnnnnnnnnnnnnnnnnnnnnnnnnnnnnnnnnnnnnnnnnnnnnnnnnnnnnnnnnnnnnnnnnnnnnnnnnnnnnnnnnnnnnnnnnnnnnnnnnnnnnnnnnnnnccctttagatcacggaaaccgaaatgggtgatgtgtcagt

SEQ ID NO: 35252 - DNA, 6959 bp, Macaca Mulatta
  misc_feature (1)...(6959): n = A,T,C or G
cttgaagaaatgttgacacctgaagaaaaagctttactctatgaagcaattggctatagtgaaacagcagttgatccaactttgccaaaaacannnnnnnnnnnnnnnnnnnnnnnnnnnnnnnnnnnnnnnnnnnnnnnnnnnnnnnnnnnnnnnnnnnnnnnnnnnnnnnnnnnnnnnnnnnnnnnnnnnnnnnnnnnnnnnnnnnnnnnnnnnnnnnnnnnnnnnnnnnnnnnnnnnnnnnnnnnnnnnnnnnnnnnnnnnnnnnnnnnnnnnnnnnnnnnnnnnnnnnnnnnnnnnnnnnnnnnnnnnnnnnnnnnnnnnnnnnnnnnnnnnnnnnnnnnnnnnnnnnnnnnnnnnnnnnnnnnnnnnnnnnnnnnnnnnnnnnnnnnnnnnnnnnnnnnnnnnnnnnnnnnnnnnnnnnnnnnnnnnnnnnnnnnnnnnnnnnnnnnnnnnnnnnnnnnnnnnnnnnnnnnnnnnnnnnnnnnnnnnnnnnnnnnnnnnnnnnnnnnnnnnnnnnnnnnnnnnnnnnnnnnnnnnnnnnnnnnnnnnnnnnnnnnnnnnnnnnnnnnnnnnnnnnnnnnnnnnnnnnnnnnnnnnnnnnnnnnnnnnnnnnnnnnnnnnnnnnnnnnnnnnnnnnnnnnnnnnnnnnnnnnnnnnnnnnnnnnnnnnnnnnnnnnnnnnnnnnnnnnnnnnnnnnnnnnnnnnnnnnnnnnnnnnnnnnnnnnnnnnnnnnnnnnnnnnnnnnnnnnnnnnnnnnnnnnnnnnnnnnnnnnnnnnnnnnnnnnnnnnnnnnnnnnnnnnnnnnnnnnnnnnnnnnnnnnnnnnnnnnnnnnnnnnnnnnnnnnnnnnnnnnnnnnnnnnnnnnnnnnnnnnnnnnnnnnnnnnnnnnnnnnnnnnnnnnnnnnnnnnnnnnnnnnnnnnnnnnnnnnnnnnnnnnnnnnnnnnnnnnnnnnnnnnnnnnnnnnnnnnnnnnnnnnnnnnnnnnnnnnnnnnnnnnnnnnnnnnnnnnnnnnnnnnnnnnnnnnnnnnnnnnnnnnnnnnnnnnnnnnnnnnnnnnnnnnnnnnnnnnnnnnnnnnnnnnnnnnnnnnnnnnnnnnnnnnnnnnnnnnnnnnnnnnnnnnnnnnnnnnnnnnnnnnnnnnnnnnnnnnnnnnnnnnnnnnnnnnnnnnnnnnnnnnnnnnnnnnnnnnnnnnnnnnnnnnnnnnnnnnnnnnnnnnnnnnnnnnnnnnnnnnnnnnnnnnnnnnnnnnnnnnnnnnnnnnnnnnnnnnnnnnnnnnnnnnnnnnnnnnnnnnnnnnnnnnnnnnnnnnnnatcgagttttatcaccttgttggagattgtgaactatctgtggtagaaattcatgttttaggattgggcacagaaattgagattagaacatacgatttgaaagcaaatgcctttttgaaagagttctgcttaaaatgcccagaatacttgnnnnnnnnnnnnnnnnnnnnnnnnnnnnnnnnnnnnnnnnnnnnnnnnnnnnnnnnnnnnnnnnnnnnnnnnnnnnnnnnnnnnnnnnnnnnnnnnnnnnnnnnnnnnnnnnnnnnnnnnnnnnnnnnnnnnnnnnnnggtaaatttttcctctttggatattcatttacacactgaagcacttctgaatacaataaattatcttcataatatccttccgcaatcagaggaaaaatcagcgccagtgtccactacagagactgaagacaaaggagatgtcatnnnnnnnnnagctttaaaactatccacgaatgaagatatcattactttgcagattttagcagaattatcatgtttacagatctttattcaagatcagaagcgtaacatatctgaaattaagattgaagnnnnnnnnnnnnnnnnnnnnnnnnnnnnnnnnnnnnnnnnnnnnnnnnnnnnnnnnnnnnnnnnnnnnnnnnnnnnnnnnnnnnnnnnnnnnnnnnnnnnnnnnnnnnnnnnnnnnnnnnnnnnnnnnnnnnnnnnnnnnnnnnnnnnnnnnnnnnnnnnnnnnnnnnnnnnnnnnnnnnnnnnnnnnnnnnnnnnnnnnnnnnnnnnnnnnnnnnnnnnnnnnnnnnnnnnnnnnnnnnnnnnnnnnnnnnnnnnnnnnnnnnnnnnnnnnnnnnnnnnnnnnnnnnnnnnnnnnnnnnnnnnnnnnnnnnnnnnnnnnnnnnnnnnnnnnnnnnnnnnnnnnnnnnnnnnnnnnnnnnnnnnnnnnnnnnnnnnnnnnnnnnnnnnnnnnnnnnnnnnnnnnnnnnnnnnnnnnnnnnnnnnnnnnnnnnnnnnnnnnnnnnnnnnnnnnnnnnnnnnnnnnnnnnnnnnnnnnnnnnnnnnnnnnnnnnnnnnnnnnnnnnnnnnnnnnnnnnnnnnnnnnnnnnnnnnnnnnnnnnnnnnnnnnnnnnnnnnnnnnnnnnnnnnnnnnnnnnnnnnnnnnnnnnnnnnnnnnnnnnnnnnnnnnnnnnnnnnnnnnnnnnnnnnnnnnnnnnnnnnnnnnnnnnnnnnnnnnnnnnnnnnnnnnnnnnnnnnnnnnnnnnnnnnnnnnnnnnnnnnnnnnnnnnnnnnnnnnnnnnnnnnnnnnnnnnnnnnnnnnnnnnnnnnnnnnnnnnnnnnnnnnnnnnnnnnnnnnnnnnnnnnnnnnnnnnnnnnnnnnnnnnnnnnnnnnnnnnnnnnnnnnnnnnnnnnnnnnnnnnnnnnnnnnnnnnnnnnnnnnnnnnnnnnnnnnnnnnnnnnnnnnnnnnnnnnnnnnnnnnnnnnnnnnnnnnnnnnnnnnnnnnnnnnnnnnnnnnnnnnnnnnnnnnnnnnnnnnnnnnnnnnnnnnnnnnnnnnnnnnnnnnnnnnnnnnnnnnnnnnnnnnnnnnnnnnnnnnnnnnnnnnnnnnnnnnnnnnnnnnnnnnnnnnnnnnnnnnnnnnnnnnnnnnnnnnnnnnnnnnnnnnnnnnnnnnnnnnnnnnnnnnnnnnnnnnnnnnnnnnnnnnnnnnnnnnnnnnnnnnnnnnnnnnnnnnnnnnnnnnnnnnnnnnnnnnnnnnnnnnnnnnnnnnnnnnnnnnnnnnnnnnnnnnnnnnnnnnnnnnnnnnnnnnnnnnnnnnnnnnnnnnnnnnnnnnnnnnnnnnnnnnnnnnnnnnnnnnnnnnnnnnnnnnnnnnnnnnnnnnnnnnnnnnnnnnnnnnnnnnnnnnnnnnnnnnnnnnnnnnnnnnnnnnnnnnnnnnnnnnnnnnnnnnnnnnnnnnnnnnnnnnnnnnnnnnnnnnnnnnnnnnnnnnnnnnnnnnnnnnnnnnnnnnnnnnnnnnnnnnnnnnnnnnnnnnnnnnnnnnnnnnnnnnnnnnnnnnnnnnnnnnnnnnnnnnnnnnnnnnnnnnnnnnnnnnnnnnnnnnnnnnnnnnnnnnnnnnnnnnnnnnnnnnnnnnnnnnnnnnnnnnnnnnnnnnnnnnnnnnnnnnnnnnnnnnnnnnnnnnnnnnnnnnnnnnnnnnnnnnnnnnnnngttttgcagccctgtgacttgttttatcaaactactcaggcaggtacagatccacaagtggtcaatatgtcagtaaaatccctgnnnnnnnnnnnnnnnnnnnnnnnnnnnnnnnnnnnnnnnnnnnnnnnnnnnnnnnnnnnnnnnnnnnnnnnnnnnnnnnnnnnnnnnnnnnnnnnnnnnnnnnnnnnnnnnnnnnnnnnnnnnnnnnnnnnnnnnnnnnnnnnnnnnnnnnnnnnnnnnnnnnnnnnnnnnnnnnnnnnnnnnnnnnnnnnnnnnnnnnnnnnnnnnnnnnnnnnnnnnnnnnnnnnnnnnnnnnnnnnnnnnnnnnnnnnnnnnnnnnnnnnnnnnnnnnnnnnnnnnnnnnnnnnnnnnnnnnnnnnnnnnnnnnnnnnnnnnnnnnnnnnnnnnnnnnnnnnnnnnnnnnnnnnnnnnnnnnnnnnnnnnnntgcattattataatgaaatgtttggtgtatgggagcctttgcttgaacccttagaaattgatcagactgaggattttagaccatggaatcttggtatcaannnnnnnnnnnnnnnnnnnnnnnnnnnnnnnnnnnnnnnnnnnnnnnnnnnnnnnnnnnnnnnnnnnnnnnnnnnnnnnnnnnnnnnnnnnnnnnnnnnnnnnnnnnnnnnnnnnnnnnnnnnnnnnnnnnnnnnnnnnnnnnnnnnnnnnnnnnnnnnnnnnnnnnnnnnnnnnnnnnnnnnnnnnnnnnnnnnnnnnnnnnnnnnnnnnnnnnnnnnnnnnnnnnnnnnnnnnnnnnnnnnnnnnnnnnnnnnnnnnnnnnnnnnnnnnnnnnnnnnnnnnnnnnnnnnnnnnnnnnnnnnnnnnnnnnnnnnnnnnnnnnnnnnnnnnnnnnnnnnnnnnnnnnnnnnnnnnnnnnnnnnnnnnnnnnnnnnnnnnnnnnnnnnnnnnnnnnnnnnnnnnnnnnnnnnnnnnnnnnnnnnnnnnnnnnnnnnnnnnnnnnnnnnnnnnnnnnnnnnnnnnnnnnnnnnnnnnnnnnnnnnnnnnnnnnnnnnnnnnnnnnnnnnnnnnnnnnnnnnnnnnnnnnnnnnnnnnnnnnnnnnnnnnnnnnnnnnnnnnnnnnnnnnnnnnnnnnnnnnnnnnnnnnnnnnnnnnnnnnnnnnnnnnnnnnnnnnnnnnnnnnnnnnnnnnnnnnnnnnnnnnnnnnnnnnnnnnnnnnnnnnnnnnnnnnnnnnnnnnnnnnnnnnnnnnnnnnnnnnnnnnnnnnnnnnnnnnnnnnnnnnnnnnnnnnnnnnnnnnnnnnnnnnnnnnnnnnnnnnnnnnnnnnnnnnnnnnnnnnnnnnnnnnnnnnnnnnnnnnnnnnnnnnnnnnnnnnnnnnnnnnnnnnnnnnnnnnnnnnnnnnnnnnnnnnnnnnnnnnnnnnnnnnnnnnnnnnnnnnnnnnnnnnnnnnnnnnnnnnnnnnnnnnnnnnnnnnnnnnnnnnnnnnnnnnnnnnnnnnnnnnnnnnnnnnnnnnnnnnnnnnnnnnnnnnnnnnnnnnnnnnnnnnnnnnnnnnnnnnnnnnnnnnnnnnnnnnnnnnnnnnnnnnnnnnnnnnnnnnnnnnnnnnnnnnnnnnnnnnnnnnnnnnnnnnnnnnnnnnnnnnnnnnnnnnnnnnnnnnnnnnnnnnnnnnnnnnnnnnnnnnnnnnnnnnnnnnnnnnnnnnnnnnnnnnnnnnnnnnnnnnnnnnnnnnnnnnnnnnnnnnnnnnnnnnnnnnnnnnnnnnnnnnnnnnnnnnnnnnnnnnnnnnnnnnnnnnnnnnnnnnnnnnnnnnnnnnnnnnnnnnnnnnnnnnnnnnnnnnnnnnnnnnnnnnnnnnnnnnnnnnnnnnnnnnnnnnnnnnnnnnnnnnnnnnnnnnnnnnnnnnnnnnnnnnnnnnnnnnnnnnnnnnnnnnnnnnnnnnnnnnnnnnnnnnnnnnnnnnnnnnnnnnnnnnnnnnnnnnnnnnnnnnnnnnnnnnnnnnnnnnnnnnnnnnnnnnnnnnnnnnnnnnnnnnnnnnnnnnnnnnnnnnnnnnnnnnnnnnnnnnnnnnnnnnnnnnnnnnnnnnnnnnnnnnnnnnnnnnnnnnnnnnnnnnnnnnnnnnnnnnnnnnnnnnnnnnnnnnnnnnnnnnnnnnnnnnnnnnnnnnnnnnnnnnnnnnnnnnnnnnnnnnnnnnnnnnnnnnnnnnnnnnnnnnnnnnnnnnnnnnnnnnnnnnnnnnnnnnnnnnnnnnnnnnnnnnnnnnnnnnnnnnnnnnnnnnnnnnnnnnnnnnnnnnnnnnnnnnnnnnnnnnnnnnnnnnnnnnnnnnnnnnnnnnnnnnnnnnnnnnnnnnnnnnnnnnnnnnnnnnnnnnnnnnnnnnnnnnnnnnnnnnnnnnnnnnnnnnnnnnnnnnnnnnnnnnnnnnnnnnnnnnnnnnnnnnnnnnnnnnnnnnnnnnnnnnnnnnnnnnnnnnnnnnnnnnnnnnnnnnnnnnnnnnnnnnnnnnnnnnnnnnnnnnnnnnnnnnnnnnnnnnnnnnnnnnnnnnnnnnnnnnnnnnnnnnnnnnnnnnnnnnnnnnnnnnnnnnnnnnnnnnnnnnnnnnnnnnnnnnnnnnnnnnnnnnnnnnnnnnnnnnnnnnnnnnnnnnnnnnnnnnnnnnnnnnnnnnnnnnnnnnnnnnnnnnnnnnnnnnnnnnnnnnnnnnnnnnnnnnnnnnnnnnnnnnnnnnnnnnnnnnnnnnnnnnnnnnnnnnnnnnnnnnnnnnnnnnnnnnnnnnnnnnnnnnnnnnnnnnnnnnnnnnnnnnnnnnnnnnnnnnnnnnnnnnnnnnnnnnnnnnnnnnnnnnnnnnnnnnnnnnnnnnnnnnnnnnnnnnnnnnnnnnnnnnnnnnnnnnnnnnnnnnnnnnnnnnnnnnnnnnnnnnnnnnnnnnnnnnnnnnnnnnnnnnnnnnnnnnnnnnnnnngttcgcttaacacctactggtcataacatgaaaattctgcagccacgtgtaatagctctacgaagaaattatcttccagcattaaaagtggaatataacacatctgcacatcaatcatcatttagaattcaaatctacagaatacagnnnnnnnnnnnnnnnnnnnnnnnnnnnnnnnnnnnnnnnnnnnnnnnnnnnnnnnnnnnnnnnnnnnnnnnnnnnnnnnnnnnnnnnnnnnnnnnnnnnnnnnnnnnnnnnnnnnnnnnnnnnnnnnnnnnnnnnnnnnnnnnnnnnnnnnnnnnnnnnnnnnnnnnnnnnnnnnnnnnnnnnnnnnnnnnnnnnnnnnnnnnnnnnnnnnnnnnnnnnnnnnnnnnnnnnnnnnnnnnnnnnnnnnnnnnnnnnnaggttgagctttttcataaagatatagaagctttcaaagaagaatataaaacagcctcattagtagatcaatcacaagtcagcctctatgaatattttcatatatctcctctcaa

SEQ ID NO: 35253 - DNA, 2847 bp, Macaca Mulatta
  misc_feature (1)...(2847): n = A,T,C or G
cggtcatctgctgtcctctctgccaggacgtcctcagcaacaaaatgcatctccaactgcatctgacacatttgcacagtgtgtctccagattgtgttgagaagctgcttatgacannnnnnnnnnnnnnnnnnnnnnnnnnnnnnnnnnnnnnnnnnnnnnnnnnnnnnnnnnnnnnnnnnnnnnnnnnnnnnnnnnnnnnnnnnnnnnnnnnnnnnnnnnnnnnnnnnnnnnnnnnnnnnnnnnnnnnnnnnnnnnnnnnnnnnnnnnnnnnnnnnnnnnnnnnnnnnnnnnnnnnnnnnnnnnnnnnnnnnnnnnnnnnnnnnnnnnnnnnnnnnnnnnnnnnnnnnnnnnnnnnnnnnnnnnnnnnnnnnnnnnnnnnnnnnnnnnnnnnnnnnnnnnnnnnnnnnnnnnnnnnnnnnnnnnnnnnnnnnnnnnnnnnnnnnnnnnnnnnnnnnnnnnnnnnnnnnnnnnnnnnnnnnnnnnnnnnnnnnnnnnnnnnnnnnnnnnnnnnnnnnnnnnnnnnnnnnctcttggtccactataattcagtttctcacttgcataagctgaaaaaagttttgcaggaagcctccagtcctgttccacaagaaaccaacagcaacacagataacaaaccctacaagtgcagcatctgcaatgttgcatacagccaaagctcaacactggaaatccacatgaggtctgtgctccatcagacaaaggctagggctgcaaagctggagcccggtggtcatgtggctggtgggcacagcattgcagcaaatgttaacagccctggccaagggatgttagattccatgagtttagcagctgtaaacagcaaagatacccatttagatgccaaagaattaaataaaaagcaaactcctgaattaatctctgctcaacctacacatcacccaccacagtcaccagcacaaattcagatgcaactacagcatgaattacaacagcaagccgcattctttcagcctcnnnnnnnnnnnnnnnnnnnnnnnnnnnnnnnnnnnnnnnnnnnnnnnnnnnnnnnnnnnnnnnnnnnnnnnnnnnnnnnnnnnnnnnnnnnnnnnnnnnnnnnnnnnnnnnnnnnnnnnnnnnnnnnnnnnnnnnnnnnnnnnnnnnnnnnnnnnnnnnnnnnnnnnnnnnnnnnnnnnnnnnnnnnnnnnnnnnnnnnnnnnnnnnnnnnnnnnnnnnnnnnnnnnnnnnnnnnnnnnnnnnnnnnnnnnnnnnnnnnnnnnnnnnnnnnnnnnnnnnnnnnnnnnnnnnnnnnnnnnnnnnnnnnnnnnnnnnnnnnnnnnnnnnnnnnnnnnnnnnnnnnnnnnnnnnnnnnnnnnnnnnnnnnnnnnnnnnnnnnnnnnnnnnnnnnnnnnnnnnnnnnnnnnnnnnnnnnnnnnnnnnnnnnnnnnnnnnnnnnnnnnnnnnnnnnnnnnnnnnnnnnnnnnnnnnnnnnnnnnnnnnnnnnnnnnnnnnnnnnnnnnnnnnnnnnnnnnnnnnnnnnnnnnnnnnnnnnnnnnnnnnnnnnnnnnnnnnnnnnnnnnnnnnnnnnnnnnnnnnnnnnnnnnnnnnnnnnnnnnnnnnnnnnnnnnnnnnnnnnnnnnnnnnnnnnnnnnnnnnnnnnnnnnnnnnnnnnnnnnnnnnnnnnnnnnnnnnnnnnnnnnnnnnnnnnnnnnnnnnnnnnnnnnnnnnnnnnnnnnnnnnnnnnnnnnnnnnnnnnnnnnnnnnnnnnnnnnnnnnnnnnnnnnnnnnnnnnnnnnnnnnnnnnnnnnnnnnnnnnnnnnnnnnnnnnnnnnnnnnnnnnnnnnnnnnnnnnnnnnnnnnnnnnnnnnnnnnnnnnnnnnnnnnnnnnnnnnnnnnnnnnnnnnnnnnnnnnnnnnnnnnnnnnnnnnnnnnnnnnnnnnnnnnnnnnnnnnnnnnnnnnnnnnnnnnnnnnnnnnnnnnnnnnnnnnnnnnnnnnnnnnnnnnnnnnnnnnnnnnnnnnnnnnnnnnnnnnnnnnnnnnnnnnnnnnnnnnnnnnnnnnnnnnnnnnnnnnnnnnnnnnnnnnnnnnnnnnnnnnnnnnnnnnnnnnnnnnnnnnnnnnnnnnnnnnnnnnnnnnnnnnnnnnnnnnnnnnnnnnnnnnnnnnnnnnnnnnnnnnnnnnnnnnnnnnnnnnnnnnnnnnnnnnnnnnnnnnnnnnnnnnnnnnnnnnnnnnnnnnnnnnnnnnnnnnnnnnnnnnnnnnnnnnnnnnnnnnnnnnnnnnnnnnnnnnnnnnnnnnnnnnnnnnnnnnnnnnnnnnnnnnnnnnnnnnnnnnnnnnnnnnnnnnnnnnnnnnnnnnnnnnnnnnnnnnnnnnnnnnnnnnnnnnnnnnnnnnnnnnnnnnnnnnnnnnnnnnnnnnnnnnnnnnnnnnnnnnnnnnnnnnnnnnnnnnnnnnnnnnnnnnnnnnnnnnnnnnnnnnnnnnnnnnnnnnnnnnnnnnnnntccctttaaatccaaaagtaatgatcggccgggtcacaagcgttttcgaacgcaaatgagcaatcttcagctcaaggttctcaaggcttgctttagcgactaccgaactccaaccatgcaagaatgtgaaatgctagggaatgaaattggtctgcccaaacgcgtggtccaggtgtggttccaaaatgcaagggcaaaggaaaagaaatttaaaattaacatagggaagcctttcatgatcaatcaaagtggaacggaaggcaccaaaccagagtgtaccctctgcggggtgaagtactctgcccgcttgtccatcagagatcacattttctccaaacagcacatttcaaaagtgagggagaccgt

SEQ ID NO: 35254 - DNA, 804 bp, Macaca Mulatta
cccacagcctggggctggtcctgggcctcctggccctcgtcttagcccccagcctgtgacctccccccagggaaggcccctcatgcctttccttccctttctctggggattccacactcctcttccccagccgcaatgggtgtgccaggagccccaggctgagggcttccccgaaagtctgggaccaggtccaggtgggcatggagtgctgatgacttggagtaggtcccacaaccccacagaggatgtagcccctctacagaggatgcagcccccagccgcatggagggtggggacagaaaccctgtggatccccggatttcacactccttctgttttgttgccgtttatttttctactcaaatctctgcatggagataaatgatttaaaccagtgtggtttgtctgtgctattctgggacggaggaggtcaggggtgggcatcaggccacacaggtcccctaagcctccagcacatgtcccctgggccagtcgtggagcgatgcctgaaatggcaccatctgtccccaccctgggagggcaggctgctcagatgcctccccactgccccagaggcggagggcgctcctggggtgaggcctgagtaggagcccagggcagagggctcacaggcccttcccgcacacagcacctagggtagaaggggctcctcaccctttcaccctggggtcgtgtccctgagaccgggggttcaggagcctccagagaggccggcttgggacatcccaggcccgacccgagcttcggagccaagtaggcactgactacctacagccatcgccc

SEQ ID NO: 35255 - DNA, 808 bp, Macaca Mulatta
ggcatttcattagagcagcttaaaatgctcaggtgtctgccttctctggtgtttctttgggatctctgtttacccacttaggctggctccttctagacatttcttgccatttccccaaccagaccactcctagtgattactgactttagtgtccacctttttgggcagttctagttggcttattaaaggagcatatgatgagaattctgtttgggggtctagttgtcttagagcaagtgtgtacttaactagccgagagatgctgcctctaggcagagaggaggagaggaggaaaggtgttgccggctggagggtcaaccagtgaacagcagctgtgagtgccttgggagaggaggaacaggcccttgggcagatgcaggcattaccagcagggagcagacttacctccgaagatggagacggttgactgggagctgcaggcctcccctgctcttccagacacatagcatttgcacccttccaaagccgtctttgtaaaggaaaatgtatttgtaattgaatccagaatttagttacacatagacataactcttcaaccttaactttggcaatacatttgtgctttaactgttacatagcagtatcaccacttaccaggatccaaatcgaaagaataaaagctgtctcccgtaagtttaaatttgaatattgcggcctggcccccggtggcctcaagccttgttattcccagcaacttttgggaaggcccaaaaccggacgggattcacgagggttcgggagaatccgagaaccattccctggccttaacccggggtgaaaaccccca

SEQ ID NO: 35256 - DNA, 1236 bp, Macaca Mulatta
  misc_feature (1)...(1236): n = A,T,C or G
gccagcccgagctgtggatctagtggaggaggaatcaggagcccctggggaggagcagcggcgctgggaagaggcgcggcttggggcagcatccctgaagtttggggcccgagatgctgcctcccaggagcccaagtatcaactggtgctggaggaggaggagaccattgagtttgtccgggccactcagctccagggtgatgaggnaggagccttcagctccacccacctcaactcaggcccagcagaaagagtccatccaggctgtccgccgcagcctcccggtgttcccatttcgagaggagctcctggctgctattgcaaatcaccaagtcctcatcattgaaggcgagacaggctcagggaagaccacccagatccctcagtatctctttgaggaggnnnnnnnnnnnnnnnnnngaagattgcctgcacccaaccccggagagtggccgccatgagtgtagccgcccgagtggcccgggagatgggtgtgaagcttgggaatgaggtnaggttggctacagcatccgctttgaggactgcacgtcagagcgaactgtcctccgctacatgacagatgggatgcttctccgggagttcctctctgagcctgaccttgcgagttacagngtggtgatggtggatgaggctcacgaacggaccctacacacagacattctctttggattgatcaaggatgttgctcgcttccgacctgagctcaaggtcctggtggcttcagccacactggacactgcccgtttctccaccttctttgatgacgcccctgtgtttcgaatccccggacgcaggtttcctgtggacatcttctacaccaaggnnnnnnnnnnnnnnnnnnnnnnnnnnnnnnnnnnnnnnnnnnnnnnnnnnnnnnnnnnnnnnnnnnnnnnnnnnnnnnnnnnnnnnnnnnnnnnnnnnnnnnnnnnnnnnnnnnnnnnnnnnnnnnnnnnnnnnnnnnnnnnnnnnnnnnnnnnnnnnnnnnnnnnnnnnnnnnnnnnnnnnnnnnnnnnnnnnnnnnnnnnnnnnnnnnnnnnnnnnnnnnnnnnnnnnnnnnnnnnnnnnnnnnnnnaggtggttgtggcaacgaacattgctgagacatcactcaccatcgagggcatcatttatgtgctggatccggggttctgtaagcagaagagctacaacccccgcacaggcatggaatcgctcactgtcacaccctgcagcaag

SEQ ID NO: 35257 - DNA, 2170 bp, Macaca Mulatta
  misc_feature (1)...(2170): n = A,T,C or G
cttccggacgggactcccctgtgtccgcgcctcacgtctccgcttcctctcgcctagtcccgtgccgttttccgtccgcgactcttccggcccagagctttcggagtgcggttgctcaggggaagccgtcgccgcccccgcctcggggccgagtgagagtgtccgtcgcgcggcgtcgccccccgggccgcctccttgcccccagtggcgggctccgttctccctcgaagcactccccccagctccatgaatggaaatcggctccgcaggnnnnnnnnnnnnnnnnnnnnnnnnnnnnnnnnnnnnnnnnnnnnnnnnnnnnnnnnnnnnnnnnnnnnnnnnnnnnnnnnnnnnnnnnnnnnnnnnnnnnnnnnnnnnnnnnnnnnnnnnnnnnnnnnnnnnnnnnnnnnnnnnnnnnnnnnnnnnnnnnnnnnnnnnnnnnnnnnnnnnnnnnnnnnnnnnnnnnnnnnnnnnnnnnnnnnnnnnnnnnnnnnnnnnnnnnnnnnnnnnnnnnnnnnnnnnnnnnnnnnnnnnnnnnnnnnnnnnnnnnnnnnnnnnnnnnnnnnnnnnnnnnnnnnnnnnnnnnnnnnnnnnnnnnnnnnnnnnnnnnnnnnnnnnnnnnnnnnnnnnnnnnnnnnnnnnnnnnnnnnnnnnnnnnnnnnnnnnnnnnnnnnnnnnnnnnnnnnnnnnnnnnnnnnnnnnnnnnnnnnnnnnnnnnnnnnnnnnnnnnnnnnnnnnnnnnnnnnnnnnnnnnnnnnnnnnnnnnnnnnnnnnnnnnnnnnnnnnnnnnnnnnnnnnnnnnnnnnnnnnnnnnnnnnnnnnnnnnnnnnnnnnnnnnnnnnnnnnnnnnnnnnnnnnnnnnnnnnnnnnnnnnnnnnnnnnnnnnnnnnnnnnnnnnnnnnnnnnnnnnnnnnnnnnnnnnnnnnnnnnnnnnnnnnnnnnnnnnnnnnnnnnnnnnnnnnnnnnnnnnnnnnnnnnnnnnnnnnnnnnnnnnnnnnnnnnnnnnnnnnnnnnnnnnnnnnnnnnnnnnnnnnnnnnnnnnnnnnnnnnnnnnnnnnnnnnnnnnnnnnnnnnnnnnnnnnnnnnnnnnnnnnnnnnnnnnnnnnnnnnnnnnnnnnnnnnnnnnnnnnnnnnnnnnnnnnnnnnnnnnnnnnnnnnnnnnnnnnnnnnnnnnnnnnnnnnnnnnnnnnnnnnnnnnnnnnnnnnnnnnnnnnnnnnnnnnnnnnnnnnnnnnnnnnnnnnnnnnnnnnnnnnnnnnnnnnnnnnnnnnnnnnnnnnnnnnnnnnnnnnnnnnnnnnnnnnnnnnnnnnnnnnnnnnnnnnnnnnnnnnnnnnnnnnnnnnnnnnnnnnnnnnnnnnnnnnnnnnnnnnnnnnnnnnnnnnnnnnnnnnnnnnnnnnnnnnnnnnnnnnnnnnnnnnnnnnnnnnnnnnnnnnnnnnnnnnnnnnnnnnnnnnnnnnnnnnnnnnnnnnnnnnnnnnnnnnnnnnnnnnnnnnnnnnnnnnnnnnnnnnnnnnnnnnnnnnnnnnnnnnnnnnnnnnnnnnnnnnnnnnnnnnnnnnnnnnnnnnnnnnnnnnnnnnnnnnnnnnnnnnnnnnnnnnnnnnnnnnnnnnnnnnnnnnnnnnnnnnnnnnnnnnnnnnnnnnnnnnnnnnnnnnnnnnnnnnnnnnnnnnnnnnnnnnnnnnnnnnnnnnnnnnnnnnnnnnnnnnnnnnnnnnnnnnnnnnnnnnnnnnnnnnnnnnnnnnnnnnnnnnnnnnnnnnnnnnnnnnnnnnnnnnnnnnnnnnnnnnnnnnnnnnnnnnnnnnnnnnnnnnnnnnnnnnnnnnnnnnnnnnnnnnnnnnnnnnnnnnnnnnnnnnnnnnnnnnnnnnnnntgtgccacagtaagagttcagagaccccgacaggagatcatccaggacttggcctccatggtccgggaacttcttattcaattttataagtcaactcggttcaagcctactcgtatcatcttttatcgggatggtgtttcagaagggcagtttaggcaggtnaggtattatattatgaactactagcaattcgagaagcctgcatcagtttggagaaagactatcaacctggaataacctacattgtagttcagaagagacaccacactcgattattttgtgctgataggacagaaagggt

SEQ ID NO: 35258 - DNA, 1676 bp, Macaca Mulatta
  misc_feature (1)...(1676): n = A,T,C or G
caaaaccaaagaagttatcttcagtgtggnnnnnnnnnnnnnnnnnnnnnnnnnnnnnnnnnnnnnnnnnnnnnnnnnnnnnnnnnnnnnnnnnnnnnnnnnnnnnnnnnnnnnnnnnnnnnnnnnnnnnnnnnnnnnnnnnnnnnnnnnnnnnnnnnnnnnnnnnnnnnnnnnnnnnnnnnnnnnnnnnnnnnnnnnnnnnnnnnnnnnnnnnnnnnnnnnnnnnnnnnnnnnnnnnnnnnnnnnnnnnnnnnnnnnnnnnnnnnnnnnnnnnnnnnnnnnnnnnnnnnnnnnnnnnnnnnnnnnnnnttggccatccacccggatatggtcaccatcgccacgggacctttggagggcaccactaaggaagggaagnagccgctgccaccccacgtgcgcatctgggactcagtttccctctccaccttacacgtgctgggcttgggggtgtttgacagagccgtgtgctgtgtaggcttctccaaaatctaatgggggcaacctgctgtgcgcagtagatgaatccaatgatcacatgctctcggtgtgggactgggccaaggagaccaaggtggtggatgttaagtgctccaacgaggctgtattggtggccaccttccaccccacagaccccactgtgcttatcacctgcaggaaaactcacatctacttctggaccttggaggggggcagcttgagcaagcggcaaggcctctttgagaaacatgagaaatcgaagtatgtgctgtgtgtgacctttttggaaggtggcgacgtggtcacgggggactctgggggtaacctctatgtttgggacaaaggtgggaaccgtatcacacaggcggtgcgctgggcgcccatgacggtggcgtgtttgggctctgcgccctgcgggatgggacgctggtgtccggagggggccgtgatcggcaggtggtcctctgaggttctgacgacagcaagctgcaggaagtggaggtccccgaggactttggccctgtgcgcactgtggcagagggccacggagacacactgtacgtggggaccacccgcaattccatcctgcagggctccgtgcacacgggcttcttgctgctggtccagggccatgtggaagagctgtggggcctggccacacaccccagtcaggcccagtnnnnnnnnnnnnnnnnnnnnnnnnnnnnnnnnnnnnnnnnnnnnnnnnnnnnnnnnnnnnnnnnnnnnnnnnnnnnnnnnnnnnnnnnnnnnnnnnnnnnnnnnnnnnnnnnnnnnnnnnnnnnnnnnnnnnnnnnnnnnnnnnnnnnnnnnnnnnnnnnnnnnnnnnnnnnnnnnnnnnnnnnnnnnnnnnnnnnnnnnnnnnnnnnnnnnnnnnnnnnnnnnnnnnnnnnnnnnnnnnnnnnnnnnnnnnnnnnnnnnnnnnnnnnnnnnnnnnnnnnnnnnnnnnnnnggaccagggcggccgcaaggtcagccgcctgggcaagtgttcggnnnnnnnnnnnnnnnnnnnnnnnnnnnnnnnnnnnnnnnnnnnnnnnnnnnnnnnnnnnnnnnnnnnnnnnnnnnnnnnnnnnnnnngggacccggctacctgtaagcagatcaccagtgcagatgctgtgaggaacatggaatgggccacagcgactaagtcctggggtttggggtgtttg

SEQ ID NO: 35259 - DNA, 1573 bp, Macaca Mulatta
  misc_feature (1)...(1573): n = A,T,C or G
ctatttctggaattttgtcaattttatctgaaaggagaaatgcaacatatctggtgagngagaggaagcctgggagcaaacactgccagcagcatagctggggcaacaggaattaccatcctgatcatcaacctgaagaagagctcggcttatatccacatccacagttgccagaaatattttgggaccnnnnnnnnnnnnnnnnnnnnnnnnnnnnnnnnnnnnnnnnnnnnnnnnnnnnnnnnnnnnnnnnnnnnnnnnnnnnnnnnnnnnnnnnnnnnnnnnnnnnnnnnnnnnnnnnnnnnnnnnnnnnnnnnnnnnnnnnnnnnnnnnnnnnnnnnnnnnnnnnnnnnnnnnnnnnnnnnnnnnnnnnnnnnnnnnnnnnnnnnnnnnnnnnnnnnnnnnnnnnnnnnnnnnnnnnnnnnnnnnnnnnnnnnnnnnnnnnnnnnnnnnnnnnnnnnnnnnnnnnnnnnnnnnnnnnnnnnnnnnnnnnnnnnnnnnnnnnnnnnnnnnnnnnnnnnnnnnnnnnnnnnnnnnnnnnnnnnnnnnnnnnnnnnnnnnnnnnnnnnnnnnnnnnnnnnnnnnnnnnnnnnnnnnnnnnnnnnnnnnnnnnnnnnnnnnnnnnnnnnnnnnnnnnnnnnnnnnnnnnnnnntgctggaaagtcaacatgtaataagcaagatttaactgtttgattataactgtgcaaatacagaacacaagaaggctggctgaaagttgagttaaactttgacagtttcataatatttggttcttannnnnnnnnnnnnnnnnnagcattcctaatagttacagttgggcatggtttgtaccacccacccataccnnnnnnnnnnnnnnnnnnnnnnnnnnnnnnnnacttacactatatataactttctatgcaaatattttaccaccagtcaataatacattcttgcaatgtattgcatgaagttttataaaaatctgtataattgcctaaatcaccagcacattcactggcatggtattattagataatgtttgcagattgataagtaggaagtggggaattttattaagttacccattgtctggggaggtagataggtaaaaacagggaaattgtaagtgnnnnnnnnnnnnnnnnnnnnnnntttagtgagacatttgtgaaaaaaagaagaataaattaagagctgagctgaaataaagtgagtggaaatggaaataatggttatatctaaaacgtgtagaaaaagaggaactggtagactttgttaacaaattaaagaataaagttagacaagcaactggttgactaatacattaagtgtttgagtctaagatgaaaggagaacactggttatgttgaaaaaaatgataaaaaggactaggcacggaggctcacgcctgtaattccagcacttcgggaggccaaggcaggcagatcacgaggtcaggagtttgagaccagcctggccgacatagtgaaaccccatctctactaaaaatacnnnnnnnnnnnnnnnnnnnnnnnnnnnnnnnnnnctgtagtcccaggcacttgggaggctgaggcaggagaat

SEQ ID NO: 35260 - DNA, 155 bp, Macaca Mulatta
aggtgcctatcctcgactgtcactgagctttcggttgaagaggaacattggatacttcattcttcagacgtacatgccctctatactgataacaattctgtcgtgggtgtccttctggatcaattatgatgcatctgccgctagagtcgccctcg

SEQ ID NO: 35261 - DNA, 717 bp, Macaca Mulatta
cccaccattcgttttgatctacctcaaagccaggctgtgaagaaaaggaagccacttcagaagacctcagcagtgtggttctgtgtctacttccatgacctgtacctgagtatctcagccaaccagccctaggcacaccaccaacgttactttgagatctgtatatatagctagctacagatgggagctgtgtgtttctttattattttgccactcctcattgttcctgtgattcctgaacacgctttttggaaatatgggtccctgtgacttttgagcatactactatcactttggatagtcactccatgtatatttttagaaacctccattagggaatcattaaggctgtttaacatctgctctggatattacacattggctttttgttgcccagtgctacaaacgttcctgtaggactcagtgtcttcaggcaatgattgtgtatcctgttacagatggttgtgatacaggaagaaccactcttctttgaaaataaaatgttggaagcttttgccagctatttggggggtagaaggaatattagtgactgtattgattgtctacagatacagaattgcctgttgtgagggaaccgagtgtttgttttgttgggaaaagaaatttaccaggagaaagagttttgtgctgtatcgtgagacatgtcgtctgtcagttacatcagccctgggttaaagtcagtgtgaaaggcagctg

SEQ ID NO: 35262 - DNA, 622 bp, Macaca Mulatta
ggctggggggagttggatgagcgtgctgtgcgggtgagggtgggcaggcaggatgcctaagggggcactgggcctaccctgcttgctttgagcctgcctgcgttcctctcttgcaggttcatctatgagttcgagcacttcaatggtgtggctgagctgctggagatcctaggaagcatcatcaatggctttgcgctgcccctgaagacggagcacaagcagttcctggttcgcgtcctgatccccctgcactctgtcaagtcgctgtctgtctttcacgcccagctggcatactgtgtggtgcagttcctggagaaggatgccactctgacggagcacgtgagtacctctgggggctaaggcagcctctcacctctgcaggcgtgactcctgtctgtcttacctcccacaggtgatccgggggctgctcaaatactggccaaaaacctgcacccagaaggaggtgatgtttctgggggagatggaagagattcttgatgtcatcgagccctcccagtttgtgaagatccaggagcccctttttaagcaggtggctcgctgtgtttccagcccccatttccaggttgcagagcgggctctgtatttctggaacaatgagtat

SEQ ID NO: 35263 - DNA, 341 bp, Macaca Mulatta
aggctactccattgccactgacatcagtggtccaatgacagtgaatggcccggagcggggctcgttgatggtgcagtgtgtttacaactcaggctgggagacctacttgaagtggtggtgtcgaggagctacttggtatggctgcaagatccttgttaaaaccactggatcggagcaggaggtgaagagggaccgggtgtccatcaaggacaatcagaaaaaccacacattcactgtgaccatggaggatctcatgcaaactgatgctgacacttactggtgtggaattgagagaactggaactgaccttggggtcacagttcaagtgatcattgacccag

SEQ ID NO: 35264 - DNA, 464 bp, Macaca Mulatta
  misc_feature (1)...(464): n = A,T,C or G
aggaacagtttatacttacagattacatgaacaagcagattgaaatcaccagtgacatgagggccattcttgtggactggttggtggaggtgcaggnnnnnnnnnnnnnnnnnnnnnnnnnnnnnnnnnnnnnnnnnnnnnnnnnnnnnnnnnnnnnnnnnnnnnnnnnnnnnnnnnnnnnnnnnnnnnnnnnnnnnnnnnnnnnnnnnnnnnnnnnnnnnnnnnnnnnnnnnnnnnnnnnnnnnnnnnnnnnnnnnnnnnnnnnnnnnnnnnnnnnnnnnnnnnnnnnnnnnnnnnnnnnnnnnnnnnnnnnnnnnnnnnnnnnnnnnnnnnnnnnnnnnnnnnnnnnnnnnnnnnnnnnnnnnnnnnnnnnnnnnnnnnnnnnnntgtatccacaccaacatgaagacactgaccttgtcccgctacatctgtgagatgaccctgcaagaatacaactatgt

SEQ ID NO: 35265 - DNA, 646 bp, Macaca Mulatta
ttgaactgctgatagcgtgacaggcgctcctcctgggccatgccccggtggatggcgatggccgggaagttctgctccacgaggagctgggccagggccatgcagcgctgcactgacttgacgaagattatcacctggttaaactccagcacgtccaggagatcaaagagcttgcggttcttctcactgtctttgagtttgacgtagtactgctgcaggccgtgcagcgtgagcttggtctcgtcgtccacaaacacctccatgggatcctgcatgaacttcctgcacacaggccggatgtccttgctcagggtggcgctgaacatcatgcactgcttctcgtgtggtgtcaggcggaagatctcctgcacatcccgccgcatgtccagctgctccagcatcttgtcacactcgtccagcacaaagtgcttcacattctttaggctgaagctcctgttccgcacgagcgccaggatgcggcccggggtccccaccacgacatggggacagttcttcttcaacacttcttcatccttcttgatggagagacccccgaagaacacagacaccttgacgctgggcatgtacttggagaagcgctcatactccttgctgatctgaaggccagctccctcgtgtggcacat

SEQ ID NO: 35266 - DNA, 1359 bp, Macaca Mulatta
  misc_feature (1)...(1359): n = A,T,C or G
ggaatcagctttgggagagccaaggggacgtcgggctctgaggcagatgatgaaacgcagctgacgttctacacggagcagtaccgcagtcgccgccgcagcaaaggnnnaggtttgctgaaaagcccagtgaacaagacagccctgacactgattgctgtgagctcctgcatcctggccatggtgtgtggcagccagatgtcttgtccactcactgtgaaggtgactctgcatgtgcccgagcacttcatagcagatgnnnnnnnnnnnnnnnnnnnnnnnnnnnnnnnnnnnnnnnnnnnnnnnnnnnnnnnnnnnnnnnnnnnnnnnnnnnnnnnnnnnnnnnnnnnnnnnnnnnnnnnnnnnnnnnnnnnnnnnnnnnnnnnnnnnnnnnnnnnnnnnnnnnnnnnnnnnnnnnnnnnnnnggagagtgcagctgctatgaaggctatgcccctgaccctgttcacagacacctgtgtgtgcgcagtgactggggacagagtgaagnnnnnnnnnnnnnnnnnnnnnnnnnnnnnnnnnnnnnnnnnnnnnnnnnnnnnnnnnnnnnnnnnnnnnnnnnnnnnnnnnnnnnnnnnnnnnnnnnnnnnnnnnnnnnnnnnnnnnnnnnnnnnnnnnnnnnnnnnnnnnnnnnnnnnnnnnnnnnnnnnnnnnnnnnnnnnnnnnnnnnnnnnnnnnnnnnnnnnnnnnnnnnnnnnnnnnnnnnnnnnnnnnnnnnnnnnnnnnnnnnnnnnnnnnnnnnnnnnnnnnnnnnnnnnnnnnnnnnnnnnnnnnnnnnnnnnnnnnnnnnnnnnnnnnnnnnnnnnnnnnnnnnnnnnnnnnnnnnnnnnnnnnnnnnnnnnnnnnnnnnnnnnnnnnnnnnnnnnnnnnnnnnnnnnnnnnnnnnnnnnnnnnnnnnnnnnnnnnnnnnnnnnnnnnnnnnnnnnnnnnnnnnnnnnnnnnnnnnnnnnnnnnnnnnnnnnnnnnnnnnnnnnnnnnnnnnnnnnnnnnnnnnnnnnnnnnnnnnnnnnnnnnnnnnngttgcgtggaggagtacaaactggctcctgatggaaaatcctgcttaatgctctcagatgtctgcgagggccccaagtgcctcaaacctgactccaaattcaatgataccctctttggagaaatgctacatggttacaacaaccggacccagcatgtgaaccaaggccaagtcttccagatgacctttagnngggagaacaacttcatcaaggactttccccagctggccgacgggctgttggtgatcccgctgccggtggaggagcagtgccggggggtcctctccgagcccctcccggacctccaactgctcactgg

SEQ ID NO: 35267 - DNA, 328 bp, Macaca Mulatta
tgtttgaccaattatccaaactgagctatacacatttattttcttttactctcattaacaaatttctacaatatacttcttctttcatgtgaaatgagattagatgtggccattaaaatcagctcttagcagacattggaagaaaaagtatagctttctgcccaggtcctgttttggatccaagtttatattgcccagttcgtttcagtgccacataccaactggtgtatttccttgaccggtaagtattgtagttattagattccaatcgttcaaaaaagaaacactcatctgtaacacatttctgaaaaataaaggaagaattact

SEQ ID NO: 35268 - DNA, 3695 bp, Macaca Mulatta
  misc_feature (1)...(3695): n = A,T,C or G
tgcgcacccgcccggaacccagaaccaccccgagccgcctgccccgtcgcccggccgccggcttagggcgcagcgcggctggtcctcgtgccctcccgcccgctggcctacccggccatggtgacgtcccgggaccgcaggctggccgcgctgtggtgccttgggctcctggggggcctggcgcgcgtcgcgggcacgcactaccgctacctctggaggggctgctacccnnnnnnnnnnnnnnnnnnnnnnnnnnnnnnnnnnnnnnnnnnnnnnnnnnnnnnnnnnnnnnnnnnnnnnnnnnnnnnnnnnnnnnnnnnnnnnnnnnnnnnnnnnnnnnnnnnnnnnnnnnnnnnnnnnnnnnnnnnnnnnnnnnnnnnnnnnnnnnnnnnnnnnnnnnnnnnnnnnnnnnnnnnnnnnnnnnnnnnnnnnnnnnnnnnnnnnnnnnnnnnnnnnnnnnnnnnnnnnnnnnnnnnnnnnnnnnnnnnnnnnnnnnnnnnnnnnnnnnnnnnnnnnnnnnnnnnnnnnnnnnnnnnnnnnnnnnnnnnnnnnnnnnnnnnnnnnnnnnnnnnnnnnnnnnnnnnnnnnnnnnnnnnnnnnnnnnnnnnnnnnnnnnnnnnnnnnnnnnnnnnnnnnnnnnnnnnnnnnnnnnnnnnnnnnnnnnnnnnnnnnnnnnnnnnnnnnnnnnnnnnnnnnnnnnnnnnnnnnnnnnnnnnnnnnnnnnnnnnnnnnnnnnnnnnnnnnnnnnnnnnnnnnnnnnnnnnnnnnnnnnnnnnnnnnnnnnnnnnnnnnnnnnnnnnnnnnnnnnnnnnnnnnnnnnnnnnnnnnnnnnnnnnnnnnnnnnnnnnnnnnnnnnnnnnnnnnnnnnnnnnnnnnnnnnnnnnnnnnnnnnnnnnnnnnnnnnnnnnnnnnnnnnnnnnnnnnnnnnnnnnnnnnnnnnnnnnnnnnnnnnnnnnnnnnnnnnnnnnnnnnnnnnnnnnnnnnnnnnnnnnnnnnnnnnnnnnnnnnnnnnnnnnnnnnnnnnnnnnnnnnnnnnnnnnnnnnnnnnnnnnnnnnnnnnnnnnnnnnnnnnnnnnnnnnnnnnnnnnnnnnnnnnnnnnnnnnnnnnnnnnnnnnnnnnnnnnnnnnnnnnnnnnnnnnnnnnnnnnnnnnnnnnnnnnnnnnnnnnnnnnnnnnnnnnnnnnnnnnnnnnnnnnnnnnnnnnnnnnnnnnnnnnnnnnnnnnnnnnnnnnnnnnnnnnnnnnnnnnnnnnnnnnnnnnnnnnnnnnnnnnnnnnnnnnnnnnnnnnnnnnnnnnnnnnnnnnnnnnnnnnnnnnnnnnnnnnnnnnnnnnnnnnnnnnnnnnnnnnnnnnnnnnnnnnnnnnnnnnnnnnnnnnnnnnnnnnnnnnnnnnnnnnnnnnnnnnnnnnnnnnnnnnnnnnnnnnnnnnnnnnnnnnnnnnnnnnnnnnnnnnnnnnnnnnnnnnnnnnnnnnnnnnnnnnnnnnnnnnnnnnnnnnnnnnnnnnnnnnnnnnnnnnnnnnnnnnnnnnnnnnnnnnnnnnnnnnnnnnnnnnnnnnnnnnnnnnnnnnnnnnnnnnnnnnnnnnnnnnnnnnnnnnnnnnnnnnnnnnnnnnnnnnnnnnnnnnnnnnnnnnnnnnnnnnnnnnnnnnnnnnnnnnnnnnnnnnnnnnnnnnnnnnnnnnnnnnnnnnnnnnnnnnnnnnnnnnnnnnnnnnnnnnnnnnnnnnnnnnnnnnnnnnnnnnnnnnnnnnnnnnnnnnnnnnnnnnnnnnnnnnnnnnnnnnnnnnnnnnnnnnnnnnnnnnnnnnnnnnnnnnnnnnnnnnnnnnnnnnnnnnnnnnnnnnnnnnnnnnnnnnnnnnnnnnnnnnnnnnnnnnnnnnnnnnnnnnnnnnnnnnnnnnnnnnnnnnnnnnnnnnnnnnnnnnnnnnnnnnnnnnnnnnnnnnnnnnnnnnnnnnnnnnnnnnnnnnnnnnnnnnnnnnnnnnnnnnnnnnnnnnnnnnnnnnnnnnnnnnnnnnnnnnnnnnnnnnnnnnnnnnnnnnnnnnnnnnnnnnnnnnnnnnnnnnnnnnnnnnnnnnnnnnnnnnnnnnnnnnnnnnnnnnnnnnnnnnnnnnnnnnnnnnnnnnnnnnnnnnnnnnnnnnnnnnnnnnnnnnnnnnnnnnnnnnnnnnnnnnnnnnnnnnnnnnnnnnnnnnnnnnnnnnnnnnnnnnnnnnnnnnnnnnnnnnnnnnnnnnnnnnnnnnnnnnnnnnnnnnnnnnnnnnnnnnnnnnnnnnnnnnnnnnnnnnnnnnnnnnnnnnnnnnnnnnnnnnnnnnnnnnnnnnnnnnnnnnnnnnnnnnnnnnnnnnnnnnnnnnnnnnnnnnnnnnnnnnnnnnnnnnnnnnnnnnnnnnnnnnnnnnnnnnnnnnnnnnnnnnnnnnnnnnnnnnnnnnnnnnnnnnnnnnnnnnnnnnnnnnnnnnnnnnnnnnnnnnnnnnnnnnnnnnnnnnnnnnnnnnnnnnnnnnnnnnnnnnnnnnnnnnnnnnnnnnnnnnnnnnnnnnnnnnnnnnnnnnnnnnnnnnnnnnnnnnnnnnnnnnnnnnnnnnnnnnnnnnnnnnnnnnnnnnnnnnnnnnnnnnnnnnnnnnnnnnnnnnnnnnnnnnnnnnnnnnnnnnnnnnnnnnnnnnnnnnnnnnnnnnnnnnnnnnnnnnnnnnnnnnnnnnnnnnnnnnnnnnnnnnnnnnnnnnnnnnnnnnnnnnnnnnnnnnnnnnnnnnnnnnnnnnnnnnnnnnnnnnnnnnnnnnnnnnnnnnnnnnnnnnnnnnnnnnnnnnnnnnnnnnnnnnnnnnnnnnnnnnnnnnnnnnnnnnnnnnnnnnnnnnnnnnnnnnnnnnnnnnnnnnnnnnnnnnnnnnnnnnnnnnnnnnnnnnnnnnnnnnnnnnnnnnnnnnnnnnnnnnnnnnnnnnnnnnnnnnnnnnnnnnnnnnnnnnnnnnnnnnnnnnnnnnnnnnnnnnnnnnnnnnnnnnnnnnnnnnnnnnnnnnnnnnnnnnnnnnnnnnnnnnnnnnnnnnnnnnnnnnnnnnnnnnnnnnnnnnnnnnnnnnnnnnnnnnnnnnnnnnnnnnnnnnnnnnnnnnnnnnnnnnnnnnnnnnnnnnnnnnnnnnnnnnnnnnnnnnnnnnnnnnnnnnnnctgtccgcagggccgcttcggccccaactgcacccgtgtgtgtgggtgtgggcatggggcggcctgcgacnnnnnnnnnnnnnnnnnnnnnnnnnnnnnnnnnnnnnnnnnnnnnnnnnnnnnnnnnnnnnnnnnnnnnnnnnnnnnnnnnnnnnnnnnnnnnnnnnnnnnnnnnnnnnnnnnnnnnnnnnnnnnnnnnnnnnnnnnnnnnnnnnnnnnnnnnnnnnnnnnnnnnnnnnnnnnnnnnnnnnnnnnnnnnnnnnnnnnnnnnnnnnnnnnnnnnnnnnnnnnnnnnnnnnnnnnnnnnnnnnnnnnnnnnnnnnnnnnnnnnnnnnnnnnnnnnnnnnnnnnnnnnnnnnnnnnnnnnnnnnnnnnnnnnnnnnnnnnnnnnnnnnnnnnnnnnnnnnnnnnnnnnnnnngaaggggccagttcgggcccagctgcaccctgcactgtgactgcgggggtggcgctgactgcagccctgtcagtgggcagtgtcactgtgtggatggctacatggggcccacatgccgggaa

SEQ ID NO: 35269 - DNA, 1662 bp, Macaca Mulatta
ggccgcgggaattcgatttttctaagcttgcattgcaccaggatgtctgtgaaatggacttcagtaattctgctaatacaactgagcttttactttagctctgggagttgtggaaaggtgctggtgtgggcagcagaatatagccattggatgaatatgaagacaatcctggaagagcttgtccagaggggtcatgaggtgactgtactggcatcttcagcttccattctttttgatcccaacaactcatccgctcttaaaattgaagtttttcctacatctttaactaaaactgagtttgagaatatcttcatgcaagaggttaagagatggttagaacttccaaaagatacattttggttatatttttcacaaatgcaagaaatcatgtggaggtttggtgacataattataaatttctgtaaagatgtagtttcaaataagaaattaatgaagaaattacaagagtcaagatttgatgtcgtttttgcagatcctatttttccctgtagtgagctgctggctgagctatttaacataccccttgtgtacagtctccgcttcactcctggctacgtttttgaaaagcattgtggaggttttcttttccctccctcctacgtacctgttgttatgtcagaattaagtgatcaaatgactttcatggagagggtaaaaaatatgatctatgtgctttattttgacttttgttttcaattgtatgacatgaagaagtgggatcagttttatagtgaagttctaggaagacacactacattatctgagataatggggaaagctgacatatggcttattcgaaactcctggaattttcagtttccacatccactcttaccaaatgttgattttgttggaggactcctctgcaaacctgccaaacccctacctaaggaaatggaagagtttgtacagagctctggagaaaatggtgttgtggtgttttctctggggtcaatggtcactaacatggaagaagaaagggccaacgtaattgcatcagcccttgcccagattccacaaaaggttctgtggagatttgatgggaataaaccggataccttaggtgtcaatactcggctctataagtggataccccagaatgaccttctaggtcatccaaaaaccagagcttttataactcacggtggagccaatggcatctacgaggcgatctaccatggggtccctatggtgggcattccattgtttgccgatcagcctgataacattgctcacatgaagaccagaggagcagctgttagattggactttgacacaatgtcgagtacagacttggcgaatgcactgaagacagtaattaatgatcctttatataaagagaatgttatgaaattatcaagaattcaacgtgatcagccagtgaagcccctggatcgagcagtcttctggattgaatttgtcatgcgccacaaaggagctaaacaccttcggcctgcagcccatgacctcacctggttccagtatcactctttggatgtgattgggttcctgctggcctgtgtggcaactgtgatatttgttatcatgaaatgttgtctgttttgtttctggaagtttgctagaaaaggaaagaagggaaaaagtgattagttatatctgctcgagatgagaatcactagt

SEQ ID NO: 35270 - DNA, 99 bp, Macaca Mulatta
  misc_feature (1)...(99): n = A,T,C or G
acaaaatcgagcaccacacagctgggtgtcagagacacactcaccatgacagtgttccacctgggagagcagagggctggtcagggactgctncnccat

SEQ ID NO: 35271 - DNA, 421 bp, Macaca Mulatta
agcttacatttgctctgaaataaatgacttcatgaatgtgaaatgtttggataaattaaaggaaaatatccataacttgaatggaattcatttatttgtatggttgtcatagttgttttttgcagatgttttcaaatatttcttggaatcctctccatgccttttcaggaattacgtggtttaatttgctgtaaatagaaaagtggcctggttaaactcaattttgaaatgctgactttattctgtttagtgtaagatgagtttttctgagaagtttccactgttaggaagctaagttttcccttgctgtatacaaaggactatttcaaaagggtggtaaaactgaatattaaggttcttaagattcatatttcctgttatattactggatgacttgcttttgggatttaggaacagtgaa

SEQ ID NO: 35272 - DNA, 909 bp, Macaca Mulatta
  misc_feature (1)...(909): n = A,T,C or G
gggggcagttcggcggtcccgcgggtctgtctcttgcttcaacagtgtttggacggaacagatccggggactctttcttccagcctccgagcgccctccgatttcctctccacttgcaacctccgggaccatcttctcggccatctcctgcttctgggacctgccagcaccgtttttgtggttagctccgtcttgccgaccaaccatgagctcccagattcgtcagaattattccaccgacgtggaggcagccgtcaacagcctggtcaatatgtacctgcaggcctcctacacctacctctctctgggcttctatttcgaccgcgatgatgtggctctggaaggcgtgagccacttcttccgcgaattggccgaggagaagcgcgagggctacgagcgtctcctgaagatgcaaaaccagcgtggcggccgcgctctttttcaggacgtcaagaagccagctgaagatgagtggggtaaaaccccggatgccatgaaagccgccatggccctggagaaaaaactgaatcaggcccttttggatcttcatgccctgggttctgcccacacggatccccatctctgtgacttcctggagactcactttcctaaatgaaggaagtgaaggctcatcaaaaaagatggggtgaccaccctgaaccaaacctcaacagggctgggccgggccccagaaggcttggggctggggcgcaattatctcctttccaaaagggctacctcttcaagcacgaactaagaagcttctaccacactctaggcgtgcataagctcgctacttctggcagagttaactagctgaaaaatttcnnnnnnnnanangnanaaannnnnnnnnnnnnnnnnnnnnnnnnnnnnnnnnnnnnnnnnnnnnnnnnnnnnnnnannnca

SEQ ID NO: 35273 - DNA, 707 bp, Macaca Mulatta
acagtgtctcatatctatcctcctattctatgatctttcttagccatttgcttcctcttagttttagcagtatcacagctgactttttatgacaatatactactttaattctaaaaatacaaaggatctggacactagatgattggctagaaatggatgaagcagcaggaaagggcaagacttcaggtcctgtataccttgatcattataaatagtgtttattgatggaagaagaaaacagattaaaaccctaaacaaggatacttaacactttcataagaatgtggaaagattctaacatatattccaaaaatgttatatttgtgctatgcattagccagtttatttctccacgtgttttatgtagtttaccttgaaggctcccaagttaactgtggagatagctaatctgaaagagttcatgcagctgttaagctgcaggtcagaaaggattaatgtccaatccattcaaattctttgacattttcccagttggcaaacgttttttaaatttgcttctctattggtaaatatagtagagtcattaaattccttttgtatcttaaatgattttattaaatggatccttttttccccccaattaggtgctagaattggtatgaagggttaactcaagtcaaattgtacttgatcctgctgaaatacatctgcagctgacaatgagagaagaaacagaaaatgtcatg

SEQ ID NO: 35274 - DNA, 572 bp, Macaca Mulatta
  misc_feature (1)...(572): n = A,T,C or G
tgtgtccatgtgctttgctccttctccttacctggtatggctggatttcctctgacccagttcatgcctactggttccgggcaggggcccgtacagaccgggatgctccagtggccacaaacaacccagctcgggcagtgcgggaggacactcgggaccgattccacctccttggggacccacagaccacgaattgcaccctgagcatcagagatgccagaagcagtgatgcagggaagtacttctttcgtgtggagacaggaaagacaaaatggagttataagtatgccccgctctctgtgcatgtcacagncagccctgacacacaggcccaacatcctcatcccaggaaccctagagtccggctgcccccggaatctgacctgctctgtgccctgggcctgtgagcaggggacagcccctatgatctcctggatggggacctccgtgtctcccctggacccctccaccacccgctcctcggtgctcaccctcatcccacagccccaggaccacggcaccagcctcacctgtcaggtgaccttccctggggccagtgtgaccacgaacaa

SEQ ID NO: 35275 - DNA, 540 bp, Macaca Mulatta
  misc_feature (1)...(540): n = A,T,C or G
ggaagcattgggagatgtcgtttactgtagtctacctgaagttgggacaaaattgaacaaacaaggtgagtnnnnnnnnnnnnnnnnnnnnnnnnnnnnnnnnnnnnnnnnnnnnnnnnnnnnnnnnnnnnnnnnnnnnnnnnnnnnnnnnnnnnnnnnnnnnnnnnnnnnnnnnnnnnnnnnnnnnnnnnnnnnnggttggctgatcaagatgacactgagtaacccttcagaactagatgaacttatgagtgaagaagcatatgagaaatacatcaaatctattgaggagtgaaaatggaacccctaaataaactagtatgaaataccacaacccagcagattgtcttaaattagtggtggatagaagacttagaatagcaacttatagcattaccaatggggaagaaaaaaactactgttaacgctgctaatgaaggaaaatgtcctttaactttgtaatgattatagannnnnnnnnnnnnnnnnnnnnnnnnnnnnnnnnnnnnttttagactaggctctagtgttcagaattca

SEQ ID NO: 35276 - DNA, 157 bp, Macaca Mulatta
gaaaccactttgcgtgggttcaagacgagtggaactccaggaaaaactggtggccaaactttcatttcagctacttttgggcaaaaagtgattggaaggaagatacagctttggcctgtgagaaagcttttgtggctggattactgttaggaaaagg

SEQ ID NO: 35277 - DNA, 480 bp, Macaca Mulatta
tagcttccagaaaagcgtcccacatttcagcaactcctgtcttccattgaaccacttcgggaaaaagacaagccttgaagaagaaactaggagtgctgataagaatgaatatagatgttggccagcattttcattcattttaaggaaagtagcaaggcataatgtaatttagctagtttttaatagtgttctctgtattgtatattatttagaaatgaacaaggcaggaaacaaaagatttccttgaaatttagatcaaatcagtaattttgtttatgctgctcctgatataacactttccagcctatagcagaagcacattttcagattgcaatatagagactgcgttcatgtgtaaagactgggcagaattgaaaaattacttattggatagtcattattttctttatattgtcactgtcacaacaattaaatatactaccaagtacagaaatgtggacatttgtcttaagatttcaa

SEQ ID NO: 35278 - DNA, 612 bp, Macaca Mulatta
  misc_feature (1)...(612): n = A,T,C or G
agttccttcaggaattagtgacaatttcaggtgtctcctctccttaacttccagctcatgctggaagtttacagcaattcttgccaatatctttgcatcacaaattacccctcctgggacttacaatttgctcaagctctgtttgttgatgagtctagtacagacaactgaccgtaacaaggaactagaagattgcctggatattttaattataacaagtgatactctactcatagacagnnnnnnnnnnnnnnnnnnnnnnnnnnnnnnnnnnnnnnnnnnnnnnnnnnnnnnnnnnnnnnnnnnnnnnnnnnnnnnnnnnnnnnnnnnnnnnnnnnnnnnnnnnnnnnnnnnnnnnnnnnnnnnnnnnnnnnnnnnnnnnnnnnnnnnnnnnnnnnnnnnnnnnnnnnnnnnnnnnnnnnnnnnnnnnnnnnnnnnnnnnnagttctggagagcagaaacatcacagtgtacatcccaggaaagaagtttggggaggatactgatcaacagatgacttttccagttcagtgcagtttttggtcttttgttgatatggattcatcttcaaggagaaatgcacagaaaatcaacactctaattggtcagatg

SEQ ID NO: 35279 - DNA, 101 bp, Macaca Mulatta
gtgaatggcagcgagcagacagtggttgccttcttcatcatgccggcgcggaccaacaatttcaaggtggaaaccctcaaaggccaagccgtgcgcaaaca

SEQ ID NO: 35280 - DNA, 1258 bp, Macaca Mulatta
cctctcgtatgtttggaattgtgagttccttggtgtgactgcagcctccagtaggactaggaagtaagccagtaggttggagaggtgggcaggggtcaagtgaagtggagaattgtgggctaagcaaaggagtgtgttttctctgcagcaggcagtggggaccttagacatttgtaagcgagagagaggcacgttcagattcgtggtgtgaggaagagcaatgccctaagatgcagactcacagcttcagattcctgctgctggtacattggaactggcaagctgggtttgagacagggctgttgtctccctggaggaccccctcaaggcctgactgtggtcaactttcgatctgggctcagcatctggaagctctatgtacacgctggtatctgttgggggtctcttggacctctgagaagggcgagtgatttttccctgtgtgaaaacgcagtgatccaactgtgcgtatgtcacctcctgagggtcttgttcatcagagtcctccggattcactgttctttccactccaggctcttggtccattacagcagcatccagttttggaacttggttcagtgggtgaaggccaaccattcgaagagttccctgtgacagaaacgggcagtgggtcactcgggtctgaccactcgaagggtggggcacggaaagaaccgaagcatctgtaggtccctccatgggtcccagagggaagtcggcctggaacgttccatggacactgggcactgcagggagcctaagttcatgggcctccccctccctggatagatggtacatgtcaaaggagcgccaggagctgcaggacaaggtcacgttctctcctgcctgaaccgtggggcccggctgggctgagagagaaggtttctcatatttacctgtgatcacgatctccaggggatcactgggagctgacaacacatagggggagtgagtgacagaaccgtagcattggtaggtccctgccagggcaggtgtcactggactgatggagacattggccttggagcccccatcatggagctctccgatgagatgcaagggctcctcaaacttccccactcggtgcagaaggaagtgctcaaacttgatatctgaccagcactgcaggatgaccgtctcttctgatttcaccaggggacccgtgagtggacaggagagaaggttttctgtggactcccgtgtgtggacaggccctaacgaccaagaagaacccaacacacgccacgctaacgaccat

SEQ ID NO: 35281 - DNA, 1233 bp, Macaca Mulatta
  misc_feature (1)...(1233): n = A,T,C or G
tgaggacgatgacatgaatgaggacacagtagagaggattgttcgctgcatcatccaaaatgaagnagccaatgctgaggccttgaaggagatgctgggggacagtgaaggagaagggacagtgcagctgtccagnnnnnnnnnnnnnnnnnnnnnnnnnnnnnnnnnnnnnnnnnnnnnnnnnnnnnnnnnnnnnnnnnnnnnnnnnnnnnnnnnnnnnnnnnnnnnnnnnnnnnnnnnnnnnnnnnnnnnnnnnnnnnnnnnnnnnnnnnnnnnnnnnnnnnnnnnnnnnnnnnnnnnnnnnnnnnnnnnnnnnnnnnnnnnnnnnnnnnnnnnnnnnnnnnnnnnnnnnnnnnnnnnnnnnnnnnnnnnnnnnnnnnnnnnnnnnnnnnnnnnnnnnnnnnnnnnnnnnnnnnnnnnnnnnnnnnnnnnnnnnnnnnnnnnnnnnnnnnnnnnnnnnnnnnnnnnnnnnnnnnnnnnnnnnnnnnnnnnnnnnnnnnnnnnnnnnnnnnnnnnnnnnnnnnnnnnnnnnnnnnnnnnnnnnnnnnnnnnnnnnnnnnnnnnnnnnnnnnnnnnnnnnnnnnnnnnnnnnnnnnnnnnnnnnnnnnnnnnnnnnnnnnnnnnnnnnnnnnnnnnnnnnnnnnnnnnnnnnnnnnnnnnnnnnnnnnnnnnnnnnnnnnnnnnnnnnnnnnnnctttgctataaatcccttggtttggtggtagaggtagggaaggtcctgcagccccaggggaaaagctggatacagcctgaacaggaagcaatactgttactcttcctcttctccaagtctccttcttcattgtgctgatggactaccagctggcagggccagggtgtgggtgggcgtgaaggccctcccctccactggacagcactgccccccagctgagggaccagctcaacttctacctggagttacacggtctcaggctgggggcctcaggagaggtcatggcccctcagtctcttctccttcccctgcctgcaacaggctgcctgacccgccttccccaacacctcgctccatataatagagcgtggcagatgggagcaggcccctgcccctggtgggcccctaaagcaatagcaccataggccccctgccctcttagcacaagaggcccaggccctggcctggccttcgtgccctttattcattgtcaataaatccgctcagaccattacagctgcttcgcatcctggctccag

SEQ ID NO: 35282 - DNA, 682 bp, Macaca Mulatta
  misc_feature (1)...(682): n = A,T,C or G
tccataaagtatctgtacagtatagattcacaattgccatatatactagttatatttttctacttgttaaatggagggcattttgtattgtttttcatggttgttaacattgtgtaatatgtctctatatgaaggaactaaactatttcannnnnnnnnnnnnnnnnnnttttctggagacgctatctttttttgaatataattaacttgcccccaactcaaaatagctgtctgtgttgcactcattgcaaaatctaaattcttttgttacttaaaaaaaaccacgttttttatggcnnnnnnnnnnnnnnnnnnnnnnnnnnnnnnnnnnnnnnnnnnnnnnnnnnnnnnnnnnnnnnnnnnnnnnnnnnnnnnnnnnnnnnnnnnnnnnnnnnnnnnnnnnnnnnnnnnnnnnnnnnnnnnnnnnnnnnnnnnnnnnnnnnnnnnnnnnnnnnnnnnnnnnnnnnnnnnnnnnnnnnnnnnnnnnnnnnnnnnnnnnnnnnnnnnnnnnnnnnnnnnnnnnnnnnnnnnnnnnnnnnnnnnnnnnnnnnnnnnnnnnnnnnnnnnnnnnnnnnnnnnnnnnnnnnnnnnnnnnnnnnnnnnnnnnnnnnnnnnnnnnnnnnnnnnnnnnnnnnnnnnnnnnnnnnnnnnnnnnnnnnnnnnnnnnnnnnnnnnnnnnnnn

SEQ ID NO: 35283 - DNA, 1038 bp, Macaca Mulatta
  misc_feature (1)...(1038): n = A,T,C or G
gagccacactcgaggggtcatttgtccagacctgaagctcaaagtctctccccttatacaaccagcgccaaccgggccaagctactggctaagaacaggcaaactttcctgcttcagaccacgaaactgacccgtcttgccagacgcatgtgcagggacctattacagccgaggagggctgcccgacggccgtatgctcctatcaatgccaatgccatcaaagcagagtgnnnnnnnnnnnnnnnnnnnnnnnnnnnnnnnnnnnnnnnnnnnnnnnnnnnnnnnnnnnnnnnnnnnnnnnnnnnnnnnnnnnnnnnnnnnnnnnnnnnnnnnnnnnnnnnnnnnnnnnnnnnnnnnnnnnnnnnnnnnnnnnnnnnnnnnnnnnnnnnnnnnnnnnnnnnnnnnnnnnnnnnnnnnnnnnnnnnnnnnnnnnnnnnnnnnnnnnnnnnnnnnnnnnnnnnnnnnnnnnnnnnnnnnnnnnnnnnnnnnnnnnnnnnnnnnnnnnnnnnnnnnnnnnnnnnnnnnnnnnnnnnnnnnnnnnnnnnnnnnnnnnnnnnnnnnnnnnnnnnnnnnnnnnnnnnnnccagggccctgcggaaggctctgacccatctggaaatgcggcgagctgctcgccgacccaacttgcccctgaaggtgaagccaacgctgatggcagtgcggccccctgtccctctacctgcaccctcacatcctgccagcactaatgagcctattgtcctggaggattgagcacctgtgggggagggaggtgggctgagaggtagagggtggatgcccagggcacccaaacctcccttccctttcgtgtcaaagggagtgaggagtaaggaagagagcaagtgagtgtgcgtccctggaggggttgggcgccctctggtgttacaacctcgagacttgtctcatgcctccatgcttgctgatggaggacagactgcaggaacttggcccatgtgggaacctagcctgttttggggggtaggacccacagatgtcttggacagttttggggggagg

SEQ ID NO: 35284 - DNA, 1086 bp, Macaca Mulatta
  misc_feature (1)...(1086): n = A,T,C or G
taaccgcttccaggcagtaactcgccccatcaagactgctcaggccaatacccgcaagcgtggcatctctttgtctctggtcatctgggtggccattgtgggtgctgcatcctacttcttcatcctggactccaccaacacagtgcccaacagtgctggctcaggaaacatcacccgctgctttgagcattacgagaagggcagcgtgccagtcctcatcatccacatcttcattgtgttcagtttcttcctggtcttcctcatcatcctcttctgcaacctggtcatcatccgtaccttgctcatgcagccggtgcagcagcagcgcaacgctgaagtcaagcgccgggcgctgtggatggtgtgcacggtcttggcggtgttcatcatctgctttgtgccacaccacatggtgcagctgccctggacccttgctgagctgggcttccagaacagcaaattccaccaggctattaacgatgcacatcaggtcaccctctgcctccttagcaccaactgtgtcttagaccctgttatctactgtttcctcaccaagaagttccgcaagcacctcactgaaaagttctacagcatgcgcagtagccggaaatgctcccgggccaccacggatacggtcactgaagtggttgtgccattcaaccagatccctgtcaattccctcaaaaattagtccctgcttgttggtgccaggcctgaagtcttctcctccgtggacatcatggactgagctgggggaagaagggatatctgctgtggtctgggcaccacctccgtgggcactggtgggccattagatttggaggctacctcacctgggcagggatgatggcagagccagactgttgggaaatccagaactcaaatgagtcccttcatctgcctgtgggtgcatgctacagcaactgtgactggtgacctcatcctgagtcccttaatcttatagggctggaaggaatgtcagggccaggtgcagaccttgngggaagactttaaaccacctagttctccccgatggggtgttggtctaaagctttggggggccaggcgcagtggctcacacctgta

SEQ ID NO: 35285 - DNA, 165 bp, Macaca Mulatta
aagaagccttatgaaaattatactgagaatctgatcttgtttactccacattaatcacattcctaccaacctaaatttctgccaagtcagttctctttggaggaagccctttaccctgtaactgactggatgatccagtgtcattttgacctgctttccagaatg

SEQ ID NO: 35286 - DNA, 776 bp, Macaca Mulatta
  misc_feature (1)...(776): n = A,T,C or G
gggcttctcttgggggctctctggtctcggctgcagaagcgagatgacgaagggaacgtcatcgtttggaaagcgtcgcaataagacgcacacattgtgccgccgctgtggctctaaggcctaccaccttcagaagtcgacctgtggcaaatgtggctaccctgccaagcgcaagagaaagtataactggagtgccaaggctaaaagacgaaataccaccggaactggtcgaatgaggcacctaaaaattgtataccgcagattcaggcatggattccgtgaaggaacaacacctaaacccaagagggcagctgttgcagcatctagttcatcttaagaatgtcaacgattagtcatgcaataaatgttctggttttaaaaaattccnnagancagnaagagnaagggaaaaccttgtcnnnncccttgtcnnnnnnnnnnccttgtcgggccgcctcgggccctcgaaaagctttctaaaacatttcgtttgggcccgccgggcccccattaggggaaaagtggaacaaggggccaaagccttgttttcccaaaagaaaaatcccgggggccagaaaaaaagggggggttgggaatttcnnnnnnnnnnnnnnnnnnnnnnnnnnnnnnnnnnnnnnnnnnnnnnnnnnnnnagtgnnnnnnnnnnnnnnnnnnnnnnnnnnnaagaggggggggttttttttcggggaggggggtccctcnnnnnnnnnnnnnnnnnnctctctcccatctcaggggggggggggtgtcccccg

SEQ ID NO: 35287 - DNA, 1358 bp, Macaca Mulatta
gcctccccactgcccctctgtatcccatagggcccagccctggccacaccctggccagagccagctatttgcagacctgagccgagaggagctaacagctgtgatgcgctttctgacccagcggctggggcccgggctagtggatgcagcccaggctcagccctccgacaactgcatcttctcagtggagctgcagctgccccccaaggctgcagccctggcccacctggacagggggagccccccacctgcccgggaggcactggccatcgtcctttttggtggacaaccccagcccaatgtgagtgagctggtggtggggccgctgcctcacccctcctacatgcgggacgtgactgtggagcgtcacggcgggcccctgccctatcaccgtcgcccggtgctgagagctgagtttacgcagatgtggaggcatctgaaagaggtggagctacccaaggcacccatcttcctggcttccaccttcaactacaatggctctaccttggcagctgtgcatgccacccctcggggcttgcactcgggggaccgagctacctggatggccctccaccataacatctcaggtgttggtcttttccttcaccccgtggggctggagctactactggaccacagagccctggaccctgcccactggactgtccagcgggtcttctaccttgggcactactatgcagacttgggccagttggaacgggagtttaagtctggccggttggaagtggttagagttcctctacctccaccaaatggagcttcatccctgaggtctcggaactctccaggtcctcttccgcctcttcagttctcaccccagggttcccagtacagtgtgcagggaaacctggtggtatcctccctctggtcatttacctttggccatggggtattcagcggcctgaggatttttgatgttcggttccagggtgagcgagtagcctatgaagtcagtgtccaggagtgtatgtctatctatggtgccgattcacccaagacgatgctgactcgctatttggatagcagctttggacttggccgtaacagccgagacttggtgcggggagtggactgcccctatcaagccacgatggtggacatccatatattagtgggcaaaggggcagtccagctgcttccgggggctgtgtgtatatttgaggaagcccagggactgcccctccgaaggcaccacaattaccttgaaaatcatttctatggtggtttggccagctcagcccttgtggtcaggtctgtgtcatctgtgggcaggtatgactacatttgggactttgtgttgtacccaaacggggcacttgaagggcgggtccatgcca

SEQ ID NO: 35288 - DNA, 1344 bp, Macaca Mulatta
  misc_feature (1)...(1344): n = A,T,C or G
gttctaaggcccagcagctactacaaggattgcaagccagtgatgaaagtcaacagcttcaggcagttattgagatgtgtcagttgctggtcatgggaaatgaggagacactgggagggtttcctgtcaagagtgttgttccagctttnnnnnnnnnnnnnnnnnnnnnnnnnnnnnnnnnnnnnnnnnnnnnnnnnnnnnnnnnnnnnnnnnnnnnnnnnnnnnnnnnnnnnnnnnnnnnnnnnnnnnnnnnnnnnnnnnnnnnnnnnnnnnnnnnnnnnnnnnnnnnnnnnnnnnnnnnnnnnnnnnnnnnnnnnnnnnnnnnnnnnnnnnnnnnnnnnnnnnnnnnnnnnnnnnnnnnnnnnnnnnnnnnnnnnnnnnnnnnnnnnnnnnnnnnnnnnnnnnnnnnnnnnnnnnnnnnnnnnnnnnnnnnnnnnnnnnnnnnnnnnnnnnnnnnnnnnnnnnnnnnnnnnnnnnnnnnnnnnnnnnnnnnnnnnnnnnnnnnnnnnnnnnnnnnnnnnnnnnnnnnnnnnnnnnnnnnnnnnnnnnnnnnnnnnnnnnnnnnnnnnnnnnnnnnnnnnnnnnnnnnnnnnnnnnnnnnnnnnnnnnnnnnnnnnnnnnnnnnnnnnnnnnnnnnnnnnnnnnnnnnnnnnnnnnnnnnnnnnnnnnnnnnnnnnnnnnnnnnnnnnnnnnnnnnnnnnnnnnnnnnnnnnnnnnnnnnnnnnnnnnnnnnnnnnnnnnnnnnnnnnnnnnnnnnnnnnnnnnnnnnnnnnnnnnnnnnnnnnnnnnnnnnnnnnnnnnnnnnnnnnnnnnnnnnnnnnnnnnnnnnnnnnnnnnnnnnnnnnnnnnnnnnnnnnnnnnnnnnnnnnnnnnnnnnnnnnnnnnnngtgaacttatgccatgtttaccaaaagaaggcatttttgcagttgataccatgttgaagaagggaaatgcacagaacacagatggtgcaatatggcagtggcgtgacgatcggggcctctggcatccatataacaggattgacagccggatcattgannnnnnnnnnnnnnnnnnnnnnnnnnnnnnnnnnnnnnnnnnnnnnnnnnnnnnnnnnnnnnnnnnnnnnnnngtggatattcagagtcaaagaaggatgatgctcgagcacagcttatgaaagaggatccagaactggctaagtcttttattaagacattatttggtgttctttatgaagtgtatagttcctcagcaggacctgcggtcagacataagtgccttagagcaattcttaggataatttattttgcggatgctgaacttctgaaggatgttctgaaaaatcatgctgtttca

SEQ ID NO: 35289 - DNA, 750 bp, Macaca Mulatta
aggaaagattgtcaagagatttaaatcatttgagccttgaactaggctaaccttttagtttagatggtgtctacctatagtcagttcattcaggactagccctggattgtaagtcctgatagaatcattatcatccctctgcagcctctactcttcatggatcttttggatgaaagaacactcgtggcagtggaacggcctctggatgacatcattgctcagctcccaccacccattaaaaagaagaaatttggaacctaaaacagggcactgtctgtgtccttccttgaactgtctaccctgtcgcttttcacaaatcatggtaataaaacaagttattcttgaggactaggcattataaatgtttttttccaagataatggacagtcatttctcttcattgaatgaaagtgaatggaaactccaaatgagttatttgtatttgggataatgtgctgagtagctgcaaactcatctaatgttgatagggtcctgcttattctgtaggccgcaatctcagaagaaaagatacttgccttctgttccctattacacgcctaaggcttcagagggctgatggccttcacttcctgccagcccccagcctaagcaacagcatggaatctgcccatcctcgccctggagggcagaggaccgtaattacttactcaggatagcctgaccactaataaccataatcagccttaagagttcaaggaagaatttcaacttcagcattataagggagtg

SEQ ID NO: 35290 - DNA, 3167 bp, Macaca Mulatta
  misc_feature (1)...(3167): n = A,T,C or G
gccatcatgcaagatggtaacacgatgcgcaacaattacgggtgtgacctggatgcgctgggcacaggtgcacgcattggcatgatgcgaactgccaagggcgatctgcactacttcatcaacggccaggaccaaggcgctgcctgctcgggcctgcctccgggtaaaggtgactatgntatgcagtagtcgatctctatggccagtgtgtccaagtgtccatcaccaatgccaccggccccatggacaacagcctggcaaccagcaacactgccaccgagaagtccttcccactgcactccccaggtgcggnnnnnnnnnnnnnnnnnnnnnnnnnnnnnnnnnnnnnnnnnnnnnnnnnnnnnnnnnnnnnnnnnnnnnnnnnnnnnnnnnnnnnnnnnnnnnnnnnnnnnnnnnnnnnnnnnnnnnnnnnnnnnnnnnnnnnnnnnnnnnnnnnnnnnnnnnnnnnnnnnnnnnnnnnnnnnnnnnnnnnnnnnnnnnnnnnnnnnnnnnnnnnnnnnnnnnnnnnnnnnnnnnnnnnnnnnnnnnnnnnnnnnnnnnnnnnnnnnnnnnnnnnnnnnnnnnnnnnnnnnnnnnnnnnnnnnnnnnnnnnnnnnnnnnnnnnnnnnnnnnnnnnnnnnnnnnnnnnnnnnnnnnnnnnnnnnnnnnnnnnnnnnnnnnnnnnnnnnnnnnnnnnnnnnnnnnnnnnnnnnnnnnnnnnnnnnnnnnnnnnnnnnnnnnnnnnnnnnnnnnnnnnnnnnnnnnnnnnnnnnnnnnnnnnnnnnnnnnnnnnnnnnnnnnnnnnnnnnnnnnnnnnnnnnnnnnnnnnnnnnnnnnnnnnnnnnnnnnnnnnnnnnnnnnnnnnnnnnnnnnnnnnnnnnnnnnnnnnnnnnnnnnnnnnnnnnnnnnnnnnnnnnnnnnnnnnnnnnnnnnnnnnnnnnnnnnnnnnnnnnnnnnnnnnnnnnnnnnnnnnnnnnnnnnnnnnnnnnnnnnnnnnnnnnnnnnnnnnnnnnnnnnnnnnnnnnnnnnnnnnnnnnnnnnnnnnnnnnnnnnnnnnnnnnnnnnnnnnnnnnnnnnnnnnnnnnnnnnnnnnnnnnnnnnnnnnnnnnnnnnnnnnnnnnnnnnnnnnnnnnnnnnnnnnnnnnnnnnnnnnnnnnnnnnnnnnnnnnnnnnnnnnnnnnnnnnnnnnnnnnnnnnnnnnnnnnnnnnnnnnnnnnnnnnnnnnnnnnnnnnnnnnnnnntggggtggaccagggggtagctgtaccagatgtgccccagccctgccacgcgcttgtggacctctatgggcagtgtgagcaggtngcaggtgacaatcgtgaaccctgagccaggggctgccagtgggaaaagtgctggaacccaaggggacatggagaaagcagacatggtggacggtnggtatcaaagagagtgtgtgctggggcccaccacccgccgctagtcctctaaagagctgcgagtaccatgccctttgctctcgcttccgagaactcctgctgcttccngaagattatttcatgcctccgccaaagcgaagcctgtgctactgtgagtcttgccggaagctgcgaggagacgaggcccacaggcgcagaggggagcctccccgggaatacgcactgccctttggctggtgcaggttcaacctcagnagagtgaatccccgcctggaggctgggacactaaccaataagtggcacatggcctatcatgggagcaatgttgcagctgtacggagagtgctggaccgaggggagctgggagcaggtactgncaggtactgcttccatcctgagctgccgtcctttgaagggagagcctggggtagggttcgaggagcctggcgagaactgtgcacctcctcgggaggagcagccccctcctgtgctgctttccccctcnnnnnnnnnnnnnnnnnnnnnnnnnnnnnnnnnnnnnnnnnnttccgggaccccaaatcccagcggacgcaccaggctcaggtggcgttccagnnnnnnnnnnnnnnnnnnnnnnnnnnnnnnnnnnnnnnnnnnnnnnnnnnnnnnnnnnnnnnnnnnnnnnnnnnnnnnnnnnnnnnnnnnnnnnnnnnnnnnnnnnnnnnnnnnnnnnnnnnnnnnnnnnnnnnnnnnnnnnnnnnnnnnnnnnnnnnnnnnnnnnnnnnnnnnnnnnnnnnnnnnnnnnnnnnnnnnnnnnnnnnnnnnnnnnnnnnnnnnnnnnnnnnnnnnnnnnnnnnnnnnnnnnnnnnnnnnnnnnnnnnnnnnnnnnnnnnnnnnnnnnnnnnnnnnnnnnnnnnnnnnnnnnnnnnnnnnnnnnnnnnnnnnnnnnnnnnnnnnnnnnnnnnnnnnnnnnnnnnnnnnnnnnnnnnnnnnnnnnnnnnnnnnnnnnnnnnnnnnnnnnnnnnnnnnnnnnnnnnnnnnnnnnnnnnnnnnnnnnnnnnnnnnnnnnnnnnnnnnnnnnnnnnnnnnnnnnnnnnnnnnnnnnnnnnnnnnnnnnnnnnnnnnnnnnnnnnnnnnnnnnnnnnnnnnnnnnnnnnnnnnnnnnnnnnnnnnnnnnnnnnnnnnnnnnnnnnnnnnnnnnnnnnnnnnnnnnnnnnnnnnnnnnnnnnnnnnnnnnnnnnnnnnnnnnnnnnnnnnnnnnnnnnnnnnnnnnnnnnnnnnnnnnnnnnnnnnnnnnnnnnnnnnnnnnnnnnnnnnnnnnnnnnnnnnnnnnnnnnnnnnnnnnnnnnnnnnnnnnnnnnnnnnnnnnnnnnnnnnnnnnnnnnnnnnnnnnnnnnnnnnnnnnnnnnnnnnnnnnnnnnnnnnnnnnnnnnnnnnnnnnnnnnnnnnnnnnnnnnnnnnnnnnnnnnnnnnnnnnnnnnnnnnnnnnnnnnnnnnnnnnnnnnnnnnnnnnnnnnnnnnnnnnnnnnnnnnnnnnnnnnnnnnnnnnnnnnnnnnnnnnnnnnnnnnnnnnnnnnnnnnnnnnnnnnnnnnnnnnnnnnnnnnnnnnngacccggcactatgtgggctcagcagctgcttttgcggggacaccagagcatggacaattccaaggcagtcctggtggtgcctatgggactgctcagcccccacctcactatgggcccacacagccagcttatagtcctagtcagcagctcaga

SEQ ID NO: 35291 - DNA, 75 bp, Macaca Mulatta
agataactgcctacaataggcgcacctttgagactgcaaggcataatttgataattaatataatgtctgcagaag

SEQ ID NO: 35292 - DNA, 1566 bp, Macaca Mulatta
  misc_feature (1)...(1566): n = A,T,C or G
gctgcagaagctgccgccacctccaatgcacaaggtgtttcatctgaaaagaaacctgagccccagggaggaggcgctgagcgaccctggcgcgaacggggcgagaggtcgctgggcagcgctcgaggacaagagggagctcggccacagaagaccccagcgatctgatcctgggatcccggctccaagctctcctcgcattttacagatttcaaccccgcgactatctccccaaaacggagtctttatatcaagagaaggtgccggagctggggcaaccaggactttcccgggcacccaagatgcgctccattaggaagaggtggacgatctgcacaataagtctgctcctgatcttttataagacaaaagaaatagcaagaactgaggagcaccaggagacgcaactcatcggngagatggtgaattgtctttgagtcggtcacttgtcaatagctctgataaaatcattcgaaaggctggctcttcaatcttccagcacaatgtagaaggttggaaaatcaatttctctttggtcctagagataaggnnnnnnnnnnnnnnnnnnnnnnnnnnnnnnnnnnnnnnnnnnnnnnnnnnnnnnnnnnnnnnnnnnnnnnnnnnnnnnnnnnnnnnnnnnnnnnnnnnnnnnnnnnnnnnnnnnnnnnnnnnnnnnnnnnnnnnnnnnnnnnnnnnnnnnnnnnnnnnnnnnnnnnnnnnnnnnnnnnnnnnnnnnnnnnnnnnnnnnnnnnnnnnnnnnnnnnnnnnnnnnnnnnnnnnnnnnnnnnnnnnnnnnnnnnnnnnnnnnnnnnnnnnnnnnnnnnnnnnnnnnnnnnnnnnnnnnnnnnnnnnnnnnnnnnnnnnnnnnnnnnnnnnnnnnnnnnnnnnnnnnnnnnnnnnnnnnnnnnnnnnnnnnnnnnnnnnnnnnnnnnnnnnnnnnnnnnnnnnnnnnnnnnnnnnnnnnnnnnnnnnnnnnnnnnnnnnnnnnnnnnnnnnnnnnnnnnnnnnnnnnnnnnnnnnnnnnnnnnnnnnnnnnnnnnnnnnnnnnnnnnnnnnnnnnnnnnnnnnnnnnnnnnnnnnnnnnnnnnnnnnnnnnnnnngttactggctgactaacaaagttcctatcaaaagacccagcacaggtctcctcatgtatacacttgccacaagattctgtgatgaaattcacctgtatggattctggccattccctaaggatttaaatggaaaagcggtcaaatatcattattatgatgacttaaaatataggtacttttccaatgcaagccctcacagaatgccattggaattcaaaacattaaatgtgctacataatagaggagctctaaaactgacaacaggaaagtgtgtaaagcaataaagcacattttgaaacgaacaatatgcacttcttttctgaagatgcttccggagatttgaaaataggatccaaaacacggctgggtttcagcatccaccaattaactgaaaggtgaataaaggacgttcatgagaaatcgactaccagctgacgaaatacctgcaaagtgctctaaaaattaa

SEQ ID NO: 35293 - DNA, 110 bp, Macaca Mulatta
agctctaatgtcttgctggaccaaaatctcacccccaagcttgctcacccaatggctcacctgtgtcctgtcaacaaaaggtcaaagtacaccgtgatgaagactcacct

SEQ ID NO: 35294 - DNA, 373 bp, Macaca Mulatta
gtgccagctgtacctcatcggctcctgccagcacccctccttgactgtgccacttgtccagtgagggacctgctccgctatcccctgcacacgctcagaaaggtggaagtggaggtgttggccacacttcaggggcagagccagagaagagctggaggctgtctgcctcctgagattctagttcagggtgggccctaggacttcactgggggttccatgctgtgtttggggtcaggaaatgctgacggctgtggtgttattcctacagaggaggcatctgggccaaatccttctgtgatgaatcctgggcaggcttcccagtggaggatttcttcggtaatgggggatgagtcagatctcatcgcagagggag

SEQ ID NO: 35295 - DNA, 3290 bp, Macaca Mulatta
  misc_feature (1)...(3290): n = A,T,C or G
ttctttcacagaggataagaacattgaaaaaccacaagtacgatttgatgcaatagaaaataaaaaagnnnnnnnnnnnnnnnnnnnnnnnnnnnnnnnnnnnnnnnnnnnnnnnnnnnnnnnnnnnnnnnnnnnnnnnnnnnnnnnnnnnnnnnnnnnnnnnnnnnnnnnnnnnnnnnnnnnnnnnnnnnnnnnnnnnnnnnnnnnnnnnnnnnnnnnnnnnnnnnnnnnnnnnnnnnnnnnnnnnnnnnnnnnnnnnnnnnnnnnnnnnnnnnnnnnnnnnnnnnnnnnnnnnnnnnnnnnnnnnnnnnnnnnnnnnnnnnnnnnnnnnnnnnnnnnnnnnnnnnnnnnnnnnnnnnnnnnnnnnnnnnnnnnnnnnnnnnnnnnnnnnnnnnnnnnnnnnnnnnnnnnnnnnnnnnnnnnnnnnnnnnnnnnnnnnnnnnnnnnnnnnnnnnnnnnnnnnnnnnnnnnnnnnnnnnnnnnnnnnnnnnnnnnnnnnnnnnnnnnnnnnnnnnnnnnnnnnnnnnnnnnnnnnnnnnnnnnnnnnnnnnnnnnnnnnnnnnnnnnnnnnnnnnnnnnnnnnnnnnnnnnnnnnnnnnnnnnnnnnnnnnnnnnnnnnnnnnnnnnnnnnnnnnnnnnnnnnnnnnnnnnnnnnnnnnnnnnnnnnnnnnnnnnnnnnnnnnnnnnnnnnnnnnnnnnnnnnnnnnnnnnnnnnnnnnnnnnnnnnnnnnnnnnnnnnnnnnnnnnnnnnnnnnnnnnnnnnnnnnnnnnnnnnnnnnnnnnnnnnnnnnnnnnnnnnnnnnnnnnnnnnnnnnnnnnnnnnnnnnnnnnnnnnnnnnnnnnnnnnnnnnnnnnnnnnnnnnnnnnnnnnnnnnnnnnnnnnnnnnnnnnnnnnnnnnnnnnnnnnnnnnnnnnnnnnnnnnnnnnnnnnnnnnnnnnnnnnnnnnnnnnnnnnnnnnnnnnnnnnnnnnnnnnnnnnnnnnnnnnnnnnnnnnnnnnnnnnnnnnnnnnnnnnnnnnnnnnnnnnnnnnnnnnnnnnnnnnnnnnnnnnnnnnnnnnnnnnnnnnnnnnnnnnnnnnnnnnnnnnnnnnnnnnnnnnnnnnnnnnnnnnnnnnnnnnnnnnnnnnnnnnnnnnnnnnnnnnnnnnnnnnnnnnnnnnnnnnnnnnnnnnnnnnnnnnnnnnnnnnnnnnnnnnnnnnnnnnnnnnnnnnnnnnnnnnnnnnnnnnnnnnnnnnnnnnnnnnnnnnnnnnnnnnnnnnnnnnnnnnnnnnnnnnnnnnnnnnnnnnnnnnnnnnnnnnnnnnnnnnnnnnnnnnnnnnnnnnnnnnnnnnnnnnnnnnnnnnnnnnnnnnnnnnnnnnnnnnnnnnnnnnnnnnnnnnnnnnnnnnnnnnnnnnnnnnnnnnnnnnnnnnnnnnnnnatatcatgtcagaggtccaattactcaggtttgttctgaaatccttctcagcaggatgtgtgtaaataaaaggactatgtaggcgccctgcaggagagctgaatctggagctggagacaagctactcacccggacaatgttctaggagccaagagctgcnnnnnnnnnnnnnnnnnnnnnnnnnnnnnnnnnnnnnnnnnnnnnnnnnnnnnnnnnnnnnagtacacacacagttaaatcatgataacacttcttcttacagctttatgaattcaagatgtgaccttgaacacgagtccatttcacagtgaaagatatacctagaaaaacgttacttgaagcagagttattaaccagaaccactgtgggccaggtatggcattgtgataataaagagaaatacagacacttgaattatgtgaaaaaagataatggtctttcgtcttgtcttaccatctctataggtacatcaatattgaaaaggagaaaagccaattacattccactggcaagtagaggttgtgcttgcattcttcaccaggagaaaatgtggtgtttatgatggcttagactttgtgaatctaatgcttatgananacagttcttcctatactttttaaattgtattactganaggaaaaaacaggaatgttccacaagggaatttgaagagattctatgagagagatatnnnnnnnnnnnnnnnnnnnnnnnnnnnnnnnnnnnnnnnnnnnnnnnnnnnnnnnnnnnnnnnnnnnnnnnnnnnnnnnnnnnnnnnnnnnnnnnnnnnnnnnnnnnnnnnnnnnnnnnnnnnnnnnnnnnnnnnnnnnnnnnnnnnnnnnnnnnnnnnnnnnnnnnnnnnnnnnnnnnnnnnnnnnnnnnnnnnnnnnnnnnnnnnnnnnnnnnnnnnnnnnnnnnnnnnnnnnnnnnnnnnnnnnnnnnnnnnnnnnnnnnnnnnnnnnnnnnnnnnnnnnnnnnnnnnnnnnnnnnnnnnnnnnnnnnnnnnnnnnnnnnnnnnnnnnnnnnnnnnnnnnnnnnnnnnnnnnnnnnnnnnnnnnnnnnnnnnnnnnnnnnnnnnnnnnnnnnnnnnnnnnnnnnnnnnnnnnnnnnnnnnnnnnnnnnnnnnnnnnnnnnnnnnnnnnnnnnnnnnnnnnnnnnnnnnnnnnnnnnnnnnnnnnnnnnnnnnnnnnnnnnnnnnnnnnnnnnnnnnnnnnnnnnnnnnnnnnnnnnnnnnnnnnnnnnnnnnnnnnnnnnnnnnnnnnnngtcttttttgggtggggcggtaagctgagagggttaattcaatacatgggctgaaattaccatatatataaatacctcaatttcactaccatacaagaaaaaaacacctattctgattgatcagttcttttgtatgaatatccacttcctttaaatactcnnnnnnnnnnnnnnnnnnnnnnnaagataaacacgaatttatatttaactgtcttaaattatatttacataaatgcaaatatcgtttcatataaacaatacaaatctgcatctgacagatgataatttttttagaagaatgatacggtattaactttaaaaataagacttttctaatatacgcttaaatgcaaacatcatttttagattttcagtgattttttttaatgacataaaacgttgcctgtgtgtgtagactctccatcatgttttaacatattgtgtactctgtagcagttttacagtcagtatttcttataattttattttgacctatccgtaatcatctgactgaggttactctggtatttgcctcttcactgctgaaataataatggattttagaaacaattgtaataatattgctaataaatgtcttacaagtaata

SEQ ID NO: 35296 - DNA, 2058 bp, Macaca Mulatta
  misc_feature (1)...(2058): n = A,T,C or G
cctcaacaatgcatctatctctctgccaccagcccaccccactcccaccctcacctatccttctgctcattggtctcaatcccaggctggaagcagggagtaaggctggcctccaatggcccattcccctcatcccagcccaagacctgggaggctgcttcccagtaagaatccaggagcaagctttggagaatccagtgggctgagtggctctatggatgtggttgtttggatgtggtagggagtgcttagcagaatgtgtgtatatctctgaggctgtcagggggtgggtgtgtgtgtgtctctgttggacctctctcctcagtctattcctgtcatagatgtgggtgtccctggtgggcaagtgcctgtgtggtctgtttacagtgcagaaggcggctcagcagtgcaatgggctgacagccttagaccaggagtcagaagcctgggttttggttgtagctctggcccctccctgtgatcttcaacaagccacttgctttctctggtcttcagtttcctcaactagaaaatgaacagcagctgaaattatgttnnnnnnnnnnnnnnnnnnnnnnnnnnnnnnnnnnnnnnnnnnnnnnnnnnnnnnnnnnnnnnnnnnnnnnnnnnnnnnnnnnnnnnnnnnnnnnnnnnnnnnnnnnnnnnnnnnnnnnnnnnnnnnnnnnnnnnnnnnnnnnnnnnnnnnnnnnnnnnnnnnnnnnnnnnnnnnnnnnnnnnnnnnnnnnnnnnnnnnnnnnnnnnnnnnnnnnnnnnnnnnnnnnnnnnnnnnnnnnnnnnnnnnnnnnnnnnnnnnnnnnnnnnnnnnnnnnnnnnnnnnnnnnnnnnnnnnnnnnnnnnnnnnnnnnnnnnnnnnnnnnnnnnnnnnnnnnnnnnnnnnnnnnnnnnnnnnnnnnnnnnnnnnnnnnnnnnnnnnnnnnnnnnnnnnnnnnnnnnnnnnnnnnnnnnnnnnnnnnnnnnnnnnnnnnnnnnnnnnnnnnnnnnnnnnnnnnnnnnnnnnnnnnnnnnnnnnnnnnnnnnnnnnnnnnnnnnnnnnnnnnnnnnnnnnnnnnnnnnnnnnnnnnnnnnnnnnnnnnnnnnnnnnnnnnnnnnnnnnnnnnnnnnnnnnnnnnnnnnnnnnnnnnnnnnnnnnnnnnnnnnnnnnnnnnnnnnnnnnnnnnnnnnnnnnnnnnnnnnnnnnnnnnnnnnnnnnnnnnnnnnnnnnnnnnnnnnnnnnnnnnnnnnnnnnnnnnnnnnnnnnnnnnnnnnnnnnnnnnnnnnnnnnnnnnnnnnnnnnnnnnnnnnnnnnnnnnnnnnnnnnnnnnnnnnnnnnnnnnnnnnnnnnnnnnnnnnnnnnnnnnnnnnnnnnnnnnnnnnnnnnnnnnnnnnnnnnnnnnnnnnnnnnnnnnnnnnnnnnnnnnnnnnnnnnnnnnnnnnnnnnnnnnnnnnnnnnnnnnnnnnnnnnnnnnnnnnnnnnnnnnnnnnnnnnnnnnnnnnnnnnnnnnnnnnnnnnnnnnnnnnnnnnnnnnnnnnnnnnnnnnnnnnnnnnnnnnnnnnnnnnnnnnnnnnnnnnnnnnnnnnnnnnnnnnnnnnnnnnnnnnnnnnnnnnnnnnnnnnnnnnnnnnnnnnnnnnnnnnnnnnnnnnnnnnnnnnnnnnnnnnnnnnnnnnnnnnnnnnnnnnnnggcaggcaagggcttccaactgaggcagtatatgtgtggcagagaggcaggaagctggcagtggcagcttccgtgtctagggaggggcatggctccctccttccctgtctgggaggttagagggaagaatctaggccttagcttgccctcctgccgcccttccccttgtagatactgccttaacactccctcctctctcagccgtggctgccacccagccaggtttctccgtgctcactaatttatttccaggaaggtgtgtggaagacatgagccgtgtataatattttttttaacattttcattgcagtattgaccatcatccttggttgtgtatcgtgtaacataaataatgatattaaaagcatcaaacaagcc

SEQ ID NO: 35297 - DNA, 267 bp, Macaca Mulatta
  misc_feature (1)...(267): n = A,T,C or G
tgaatgtcagaagtgtgaagagtgcctgttctgaatcccggagcctcctccctccctgcggctggcaggtgaggaagnnnnnnnnnnnnnnnnnnnnnnnnnnnnnnnnnnnnnnnnnnnnnnnnnnnnnnnnnnnnnnnnnnnnnnnnnnnnnnnnnnnnnnnnnnnnnnnnnnnnnnnnnnnnnnnnnnnnnngccgggctgggagctctgcggcgggagccggaggactatgagctgccgcgcggtgtccacagtccagcccag

SEQ ID NO: 35298 - DNA, 654 bp, Macaca Mulatta
  misc_feature (1)...(654): n = A,T,C or G
gggcatgtaaccaaataccacnctgttttcccaaaacctatgaaaataaataatttaaaaatattatttaaattttttgtgggtacatagtaggtgtatatatttatgagatacataaggtattttgttacaagcatgaatgaaaaataagcacatcagggagaatgtgcttattgaagaatgctttcaagcatttttcctttgagttacaaagaatctaattatattctttaagttatttaaaaatatataattcagttattatcgattatagtaaccctattgtattatcaatagtagttcttattcatcctttctaatttttttgtacccattaaccatccccacttcccttccaaatccccactacccttcccagcctcttgtaaccatccctctagtctctatgtccatgagttcaattcatttgatttttagatcccccaaataattgataccatgtgacatttgtctttctgtgcctggattatttcacttaatataatgatctccagttccattcatgttgttgcaaaggactggatttcattttggcgggggctagagttattgatttaggaatgcagncacacaagagtataccaatatacattttataatcccctaagctgtagatttagttgtgcacacaga

SEQ ID NO: 35299 - DNA, 476 bp, Macaca Mulatta
aatcaccagctgccatagacacggggaagcttgcagagctcagatgaacaagctcagcaatcggacatctctgggggaaaggaaggtggcacagaccacattccctggttcctccctgccccttgccaggcttccttattccttcctatggatcaagaggtcatactccttccctgccccttgctgtctttagcaagcaggtttcactgcttcattagaacaggacaggtcaaaagtgaatcatttttcactaaagaataaacccaagagcttttcagagactggctgctgcagccctgggaatgtctggaattactctgtggaaatggaactttctattacgctctagacattacagttatttgagtgttactcgttactattgaggtcaatgcttcgtggcaaatggctgtactggatataccaactctgctgcccttgttttgctgcatgttaaataaaaccattttcactgt

SEQ ID NO: 35300 - DNA, 597 bp, Macaca Mulatta
  misc_feature (1)...(597): n = A,T,C or G
ggtgcattttgaagacaagtattgctgtactcaggcaggaaatatgcacaatgaaaaatgacaacctggaaaaagaaagtaaatatcgtaaggacattaaaattgttaaagacataaacgctgcccttgaaaaaagtataaaactcaatgaggaaatgataataaaaacagcattccagtatcaacaagagcttagtgacctcaagactgagaatacaaggctcaattccaaaccgttgaaggaaaaagaaagcaaggaaagactgcaagctgaaatagaatcttatcagtctagactgtctgctgctataagtaaacacggtgaaagtatgaaaacagaaagaaacctaagactccctttagagagaacacaagacgtttctctacaagtaaaaatgagttctgatacttccaaagtagaagataagaatgagtttcttactcaacaacgttctaaaaggcaaattaaattcaataccttaaaagacaagtttcataagacaagagatactctcagaaaaaattcactgtcttcagaaactgtacaaaactacctaagccnnnnnnnnannnnnnnaannnnaaannnaacatgtc

SEQ ID NO: 35301 - DNA, 874 bp, Macaca Mulatta
  misc_feature (1)...(874): n = A,T,C or G
nttaaggacccaaactgtgtggggacggtgctggccagcagaccgcacacgctagacggccgaaannnnnnnnnnnnnnnnnnnnnnnnnnnnnnnnnnnnnnnnnnnnnnnnnnnnnnnnnnnnnnnnngcagaaaggacccaggagcgataacagtaaatcaaataagatatttgtcggtggaattcctcacaattgtggtgagacagagctcagggaatacttcaagaagtttggagtggnnnnnnnnnnnnnnnnnnnnnnnnnnnnnnnnnnnnnnnnnnnnnnnnnnnnnnnnnnnnnnnnnnnnnnnnnnnnnnnnnnnnnnnnnnnnnnnnnnnnnnnnnnnnnnnnnnnnnnnnnnnnnnnnnntggaagttaaacgagctgagcctcgcgacagcaagagccaagcgccgggacagccaggtgccagccagtgggggagcagggtcgtgcccaacgctgccaatggctgggcaggccagcccccgcccacgtggcagcaaggatacggcccgcaaggnnnnnnnnnnnnnnnnnnnnnnnnnnnnnnnnnnnnnnnnnnnnnnnnnnnnnnnnnnnnnnnnnnnnnnnnnnnnnnnnnnnnnnnnnnnnnnnnnnnnnnnnnnnnnnnnnnnnnnnnnnnnnnnnnnnnnnnnnnnnnnnnnnnnnnnnnnnnnnnnnnnnnnnnnnnnnnnnnnnnnnnnnnnnnnnnnnnnnnnnnnnnnnnnnnnnnnnnnnnnnnnnnnnnnnntccaccggccacccccggggcagcacctctggctttcccaccgcctccatctcaggccgccccggacatgagcaagcccccgacagctcagccagacttcccctatggtcagtatg

SEQ ID NO: 35302 - DNA, 912 bp, Macaca Mulatta
taagagttggcataaaatgtgtgatttgtttaattttccttttaaaagggaattcttagatccaaatctttctgcaactatgtgttttcattgattttttttcttataacttccatattcctcatgataagtatagaaatagtcatttcaactaaaagcaacagactgctagttgctgtgttctttccctaggaaaacttccactgaatattctatagaggaagttttctttacttggtgagatatttttcaaggttcaaacacataattgaaatgggtgggttgattccaggtgttaatgcttaagaacacatctttcagtccctcaccctagtcatggaacataaatgggagaagggcgatgagcttaacggtgtgcctgattttgagtgataaaacaagcatatcattttaaaactgtaagaaaatgtgtattttatttcttaataaaacaaaactttttttcctttcccaggttcatctgatgtttcctgatcacgtaccaaagccttgttgtgctccaaccaaattaaatgccatctctgttctgtactttgatgacagctccaatgtcattttgaaaaaatatagaaatatggtagtacgctcatgtggctgccactaatattaaatattgataataacaaaagatctgtattaagatttatggctgcaataaaaagcatactttcagacaaacggggaatttcctaaaattagtctggctcattttgactattttcctaagtacaatatcatgtatatagtcatttttatttatttaaaggtatatattctcttttgtggatgctttatcagtaaaatttataggccactacattatacaatagatcatctagtctaattttcaatgggttatgctgagtccattcaattccatttcaacatttt

SEQ ID NO: 35303 - DNA, 420 bp, Macaca Mulatta
tgggagctagggcagggaccaaatgaacagaaagtctcagcccaggatggggcttcttcacagggcccctgccctcctgaagcctcagtccttcaccttgccaggtgccatttctattccgtgaaggccactgcccaggcccccggtgcgccccctagtggccatagcctggttaaagttccccagtgcctccttgtgtatagaccttcctctcccacccccttctgcccccgggtccccggccattcagcggggctgccagagaaccccagaccctcccttacagtagtgtagagccccctccctctttcggctggtgtagaatagccagtagtgtagtacggtgtgcttctacgtgatggcgggtgggcagcgggcggcgggctccgcgcagccgtctgtccttgatctgcccgcgga

SEQ ID NO: 35304 - DNA, 588 bp, Macaca Mulatta
tcccgtgatttggaggggtctgtgggactgaggagcacagagcagagggcagactgtgtgtggtgactcccaagctccccggctggggtgcttctgtggatgttggagcccaggccaggcagggaccagatgcagagactctgcctcatcaaattctggtgagggacattgtagttcgccgggatctccggaaacctgccaccagaagcttctgtgccagtgattcgttgcctcagaaactgggtgacggtgacgcgcgggattcagactttcgctgtgatgtcagtaggaaaccggggaatgactgtgtgtttgctctccagatgactgaatcagggaacagttaggcaaccccgagagatgcaggccttcagctgtgccccgccctgacagcagtgttttgcacgctgtgaagcgttctgcgcaatgcgttcttggggtgtttcctcagcctcgaaaattgggctctggaatgccgttagaaataggtgtgtttaatttgttttgaagtgaataaaattctcaaaaaagatgacgtactctcttttgactttcattccgtgtttgtgtgtaactgattttccaagg

SEQ ID NO: 35305 - DNA, 899 bp, Macaca Mulatta
  misc_feature (1)...(899): n = A,T,C or G
gggaaaaagtttctcaaccagaggtgggagctgccattaagatcattcggcagttaatggagaagtttaacttggatctgtcaacagttacacaggccttcctaaaaaatagtggtgagctggaggctacttccgccttcttagcatctggtcagagagctgatggataccccatttggtcccgacaagatgacatagatttgcaaaaagatgatgaggataccagggaggcattggtcaaaaaatttggtgctcagaatgtagctcggaggattgaatttcgaaagaaataattggcaagataatgagaaaaaaaaagtcatggtagatgaggtggttaaaaaaaattgtgaccaatgaactttggagagttcttgcattggaactggcacttactttttgaccattgctgctgttgctctgtgagtcctagattttgtagccaagcagagttgtagagggggataaaaagaaaagaaattggatgtatttacaactctccttgaacaagtatcaatgtgtttatgaaaggaagatctaaaccagacagcagttggtctacatagtagtaatcctttgttggaatggaacccttgctatattagtgacaaagtgaaaggaaatttaggaggcataggccatttcaggcagcataagtaatctcctgtcctttgggcagaagctccctttagattgggatagattcaaaataaagaatcttgaaatatggggagatttaattatgaggccttgaacacagatatccccaaacccttgtcatttcccccagtgagctctgatttctagactgctttgaaaatgctgtattcatttttgctaacctaantggtttgggggacccttgctcttttgggctggttccttttttttgggaaacc

SEQ ID NO: 35306 - DNA, 537 bp, Macaca Mulatta
  misc_feature (1)...(537): n = A,T,C or G
gggcgagcggcgcggcggctgcgatgagtgcctctgcggccactggggtcttcgtgctgtccctctcggccatcccggtcacctaagtcttcaaccacctggctgcccagcnnnttcctggactattgtaggggttgctgccctcatcctgttcctggtagcactgctggctcgtgtcctcgtcaaaagaaaaccaccccgggacccgctgttctatnnnnnnnnnnnnnnnnnnnnnnnnnnnnnnnnnnnnnnnnnnnnnnnnnnnnnnnnnnnnnnnnnnnnnnnnnnnnnnnnnnnnnnnnnnnnnnnngggtgaaccgtatctgaacactgcatatgggcacatgatctgctactgggatggctctgctcattatcttatgtacctggtgatggtggcagccatagcatgggaatgctggcatatatgttctattctgtccctactttgtgactgcactgtatggcttagtggttcctggatgttcctggatgcctgacatcacattgatacatgctggaggtctggctcag

SEQ ID NO: 35307 - DNA, 453 bp, Macaca Mulatta
  misc_feature (1)...(453): n = A,T,C or G
gacattgctgagaaaaggaaaggtaaaaagaggagattgctcatagatcctgtcaaggagctcagtagcaaagttatacataaacagcttacttcctttgcggacaccctcatggttttggaacttgcacctcctacccaaagattgatgatgtggaagaagaggggaggagtggatacacttctatcaactgctgcccaggatttgattcatgctgaactgaaaatgnnnnnnnnnnnnnnnnnnnnnnnnnnnnnnnnnnnnnnnnnnnnnnnnnnnnnnnnnnnnnnnnnnnnnnnnnnnnnnnnnnnnnnnnnnnnnnnnntagagacattcatgatgcaagagccaaattcccagcaagagttaagtaatcctcaatcctggaaggatgtgattggtggatctcagcatagctcttatgaggataccaataaacatattaacactgag

SEQ ID NO: 35308 - DNA, 2019 bp, Macaca Mulatta
  misc_feature (1)...(2019): n = A,T,C or G
gttccagttattcttcagatgccctggattttgagaccgagcacaaattggaccccgtatttgattctccacggatgtcccgccgtagtttgcgcctggccacgacagcatgtaccctgggggatggtgaggctgtgggtgccgacggcggtgccagcagtgctgtctccctcaagaaccgagcggccagnagaacagcgaaacagcgcagaagcacaaacaaatcagcttttagtatcaaccacgtgtcaaggcaggtcacgtcctttggcgtcagccacagcggcactgacagcctgcaggatgctgtgactcgacagcctcctgtactggatgagtcttggattcgtgaacagaccacagtggaccacttctggggtnnnnnnnnnnnnnnnnnnnnnnnnnnnnnnnnnnnnnnnnnnnnnnnnnnnnnnnnnnnnnnnnnnnnnnnnnnnnnnnnnnnnnnnnnnnnnnnnnnnnnnnnnnnnnnnnnnnnnnnnnnnnnnnnnnnnnnnnnnnnnnnnnnnnnnnnnnnnnnnnnnnnnnnnnnnnnnnnnnnnnnnnnnnnnnnnnnnnnnnnnnnnnnnnnnnnnnnnnnnnnnnnnnnnnnnnnnnnnnnnnnnnnnnnnnnnnnnnnnnnnnnnnnnnnnnnnnnnnnnnnnnnnnnnnnnnnnnnnnnnnnnnnnnnnnnnnnnnnnnnnnnnnnnnnnnnnnnnnnnnnnnnnnnnnnnnnnnnnnnnnnnnnnnnnnnnnnnnnnnnnnnnnnnnnnnnnnnnnnnnngctcatgccagttactgtgggagaatgaatgtgagagaggttctcagagaggatggccacctcagtgtaaatggggaagtgctgtgtaagtatggcttcgttttcctgtgagcgtcggtcgtggagttggccccacatgccgtcacgttgggcactagcagagaatgagcggcccgtgtgacatggtggtcctcactgatgacgacgggctggtggagctgctgcttaagcccccatcacagaagctcatagccaccagattgcatttgctttgattgttaactgtcttgtgtgtaattgagtttcctagtttttcagactgccgttgccgtgcacagctgagatggacagagtttgcttgtgaatccgccacattcactgcttgtcacccacaggcgacgactgtaagggcaagaggcacctcgacgcgtacacagctgtccacttgcagtcgccacggccgcccaggcgggcagggaccctccggcacatctgggcgtgtgcaggttgtctctcgccccgtctccatctcatcctgccccgtcaccacgctatttgcgccttgtgtggtttgtgcttggaattcaagtgctttaaagtcttgctgtaaaaactgacaagaatagtattaactttggtttaaaacagggtgaatctctctcgaaaagattccttgtgaattgattttttggannnnnnnnnnnnnnnnnnnnnnnnnnnnnnnnnnnnnnnnnnnnnnnnnnnnnnnnnnnnnnnnnnnnnnnnnnnnnnnnnnnnnnnnnnnnnnnnnnnnnnnnnnnnnnnnnnnnnnnnnnnnnnnnnnnnnnnnnnnnnnnnnnnnnnnnnnnnnnnnnnnnnnnnnnnnnnnnnnnnnnnnnnnnnnnnnnnnnnnnnnnnnnnnnnnnnnnnnnnnnnnnnnnnnnnnnnnnnnnnnnnnnnnnnnnnnnnnnnnnnnnnnnnnnnnnnnnnnnnnnnnnnnnnnnnnnnnnnnnnnnnnnnnnnnnnnnnnnnnnnnnnnnnnnnnnnnnnnnnnnnnnnnnnnnnnnnnnnnnnnnnnnnnnnnnnnnnnnnnnnnnnnnnnnnnnnnnnnnnnnnnnnnnnnnnnnnnnnnnnnnnnnnnnnnnnnnnnnnnnnnnnnnnnnnnnnnnnnnnnnnnnnnnnnnnnnnnnggcgggtggatcacttgaggccgggagttcaagacccagccctggccaacatagcaaaaccctgtctct

SEQ ID NO: 35309 - DNA, 512 bp, Macaca Mulatta
  misc_feature (1)...(512): n = A,T,C or G
aagttggcaatttatttaaggacacattactaagtaatcatctgatttaacagaaggggtcacctggtcaactggtccattgaagaggactaactgcagtttctattctagcctcgggttcacactaggtttctatttcccacctggactcattgagtgcagaaccattcctggcatggcttctcatgaggggccagagactgaggtaagggggagtcattcccaacctaccaagcaccaattctaagatggcactttgcgtccttccttcacagaccctggcagtctgaatactgtgaaggctttgggataatattcatgttgacctacgctgacactgctgtagatctggaagctggagccatattagtaaaaatgcagttggtgacttttgcaagcaaaaatcattatgtagaaagagtgacatttaaggggcccagaagtgctattgaaaaagaggtctatgcganatattagatatttttgctttccccttccatatatgacttttg

SEQ ID NO: 35310 - DNA, 2795 bp, Macaca Mulatta
  misc_feature (1)...(2795): n = A,T,C or G
agtacatccaagatttgaagaactgaaataaatcagcattaaacctgctttttaaaannnnnnnnnnnnnnnnnnnnnnnnnnnnnnnnnnnnnnnnnnnnnnnnnnnnnnnnnnnnnnnnnnnnnnnnnnnnnnnnnnnnnnnnnnnnnnnnnnnnnnnnnnnnnnnnnnnnnnnnnnnnnnnnnnnnnnnnnnnnnnnnnnnnnnnnnnnnnnnnnnnnnnnnnnnnnnnnnnnnnnnnnnnnnnnnnnnnnnnnnnnnnnnnnnnnnnnnnnnnnnnnnnnnnnnnnnnnnnnnnnnnnnnnnnnnnnnnnnnnnnnnnnnnnnnnnnnnnnnnnnnnnnnnnnnnnnnnnnnnnnnnnnnnnatggacacctacctgggaacggagatgtgtatcaagaaaggntggcacgttttagaaatgataaagaatccctcgttcttcannnnnnnnnnnnnnnnnnnnnnnnnnnnnnnnnnnnnnnnnnnnnnnnnnnnnnnnnnnnnnnnnnnnnnnnnnnnnnnnnnnnnnnnnnnnnnnnnnnnnnnnnnnnnnnnnnnnnnnnnnnnnnnnnnnnnnnnnnnnnnnnnnnnnnnnnnnnnnnnnnnnnnnnnnnnnnnnnnnnnnnnnnnnnnnnnnnnnnnnnnnnnnnnnnnnnnnnnnnnnnnnnnnnnnnnnnnnnnnnnnnnnnnnnnnnnnnnnnnnnnnnnnnnnnnnnnnnnnnnnnnnnnnnnnnnnnnnnnnnnnnnnnnnnnnnnnnnnnnnnnnnnnnnnnnnnnnnnnnnnnnnnnnnnnnnnnnnnnnnnnnnnnnnnnnnnnnnnnnnnnnnnnnnnnnnnnnnnnnnnnnnnnnnnnnnnnnnnnnnnnnnnnnnnnnnnnnnnnnnnnnnnnnnnnnnnnnnnnnnnnnnnnnnnnnnnnnnnnnnnnnnnnnnnnnnnnnnnnnnnnnnnnnnnnnnnnnnnnnnnnnnnnnnnnnnnnnnnnnnnnnnnnnnngagacatcgaagtacaaaaaatgaagaaagctgtggagtctttgatggcagcaaatgaagaaaagnnnnnnnnnnnnnnnnnnnnnnnnnnnnnnnnnnnnnnnnnnnnnnnnnnnnnnnnnnnnnnnnnnnnnnnnnnnnnnnnnnnnnnnnnnnnnnnnnnnnnnnnnnnnnnnnnnnnnnnnnnnnnnnnnnnnnnnnnnnnnnnnnnnnnnnnnnnnnnnnnnnnnnnnnnnnnnnnnnnnnnnnnnnnnnnnnnnnnnnnnnnnnnnnnnnnnnnnnnnnnnnnnnnnnnnnnnnnnnnnnnnnnnnnnnnnnnnnnnnnnnnnnnnnnnnnnnnnnnnnnnnnnnnnnnnnnnnnnnnnnnnnnnnnnnnnnnnnnnnnnnnnnnnnnnnnnnnnnnnnnnnnnnnnnnnnnnnnnnnnnnnnnnnnnnnnnnnnnnnnnnnnnnnnnnnnnnnnnnnnnnnnnnnnnnnnnnnnnnnnnnnnnnnnnnnnnnnnnnnnnnnnnnnnnnnnnnnnnnnnnnnnnnnnnnnnnnnnnnnnnnnnnnnnnnnnnnnnnnnnnnnnnnnnnnnnnnnnnnnnnnnnnnnnnnnnnnnnnnnnnnnnnnnngggcaggacacctccatggacgacaaccccttcggcactcgaaaagtcagatcttcctttggccggggcttttttaaaatcaaaagtaacaagagaacagcaagtgcaccaaactnnnnnnnnnnnnnnnnnnnnnnnnnnnnnnnnnnnnnnnnnnnnnnnnnnnnnnnnnnnnnnnnnnnnnnnnnnnnnnnnnnnnnnnnnnnnnnnnnnnnnnnnnnnnnnnnnnnnnnnnnnnnnnnnnnnnnnnnnnnnnnnnnnnnnnnnnnnnnnnnnnnnnnnnnnnnnnnnnnnnnnnnnnnnnnnnnnnnnnnnnnnnnnnnnnnnnnnnnnnnnnnnnnnnnnnnnnnnnnnnnnnnnnnnnnnnnnnnnnnnnnnnnnnnnnnnnnnnnnnnnnnnnnnnnnnnnnnnnnnnnnnnnnnnnnnnnnnnnnnnnnnnnnnnnnnnnnnnnnnnnnnnnnnnnnnnnnnnnnnnnnnnnnnnnnnnnnnnnnnnnnnnnnnnnnnnnnnnnnnnnnnnnnnnnnnnnnnnnnnnnnnnnnnnnnnnnnnnnnnnnnnnnnnnnnnnnnnnnnnnnnnnnnnnnnnnnnnnnnnnnnnnnnnnnnnnnnnnnnnnnnnnnnnnnnnnnnnnnnnnnnnnnnnnnnnnnnnnnnnnnnnnnnnnnnnnnnnnnnnnnnnnnnnnnnnnnnnnnnnnnnnnnnnnnnnnnnnnnnnnnnnnnnnnnnnnnnnnnnnnnnnnnnnnnnnnnngatgatttactgtctttgaaggttgtgagtgtgctacaccacctcagtatcaaaagggccatccaggtcctgaggatcaataactttgaaccaaactgtctacggaggcggccatctgatgannnnnnnnnnnnnnnnnnnnnnnnnnnnnnnnnnnnnnnnnnnnnnnnnnnnnnnnnnnnnnnnnnnnnnnnnnnnnnnnnnnnnnnnnnnnnnnnnnnnnnnnnnnnnnnnnnnnnnnnnnnnngttctagagcctcgttttaatgtagaaacaatggctcagttattgaacatcccacccaataagactttgctgcgaagacatttggccactcatttcaaccttctgattggggctgaggcacagcaccagaagcgagatgccatggagctgccggattatgtacttctaacagctactgccaaagtgaag

SEQ ID NO: 35311 - DNA, 231 bp, Macaca Mulatta
gactgaggaaatagtgaaaatagcctatacacagcatcttgtggaaagtactggcagctgtgggtgcagcaaataatagggcgaaaaaaataataatagggtggttggttccctttcatctccctcttctgaaaggaagaaattgaattggaaccctcaagtgcctgtttgtgtccagtcataaaactggaccaattgttaaccgtacagaatgagttatgtggccagacc

SEQ ID NO: 35312 - DNA, 110 bp, Macaca Mulatta
ttggggtggcctgccaccttgtcgtccttacagacctgccttgcgttggggtggccaagaaacttctgcaggtggatgggctggagaacaacgccctgcacaaggagaag

SEQ ID NO: 35313 - DNA, 158 bp, Macaca Mulatta
ggtgcaggacgatttccttagaaactggagctcagaatattcagatgtgcatcaccatgctccagttatctttcactactgagcacttggtccagatgttgagtttcccactggcctatggactcttccagctgatagatggatttcttattgttgca

SEQ ID NO: 35314 - DNA, 349 bp, Macaca Mulatta
gaacaggtgtatttacattttctgtcagttgttacagaagatggcccagagcccaaggacaaaggatcattgccaccaccacccattactgaagcggaatcacaggtgttctcagaaaatcttgctactgacacctctacatttgaagctacctctgagggtgccttacaactgcagcagagaaatcccaaagcggagacactgaggtggtcccctgcccaggggaaaagtttcaggcagatggttgtcacccataaggaaattcccacagggaagaaagaccatgaatgtagtgaatgtggtaaaaccttcatttataactcacatcttgttgtccaccagagggttc

SEQ ID NO: 35315 - DNA, 1280 bp, Macaca Mulatta
  misc_feature (1)...(1280): n = A,T,C or G
tgctgtgtgccgtatacatgcccaagtgtgagaatgaccgggtggagctgcccagccgtaccctctgccaggccaccagagggcccctgtgccatcgtggagagggagcggggctggcctgacttcctgcgctgcactcctgaccgcttccctgaaggctgcacnnnnnnnnnnnnnnnnnnnnnnnnnnnnnnnnnnnnnnnnnnnnnnnnnnnnnnnnnnnnnnnnnnnnnnnnnnnnnnnnnnnnnnnnnnnnnnnnnnnnnnnnnnnnnnnnnnnnnnnnnnnnnnnnnnnnnnnnnnnnnnnnnnnnnnnnnnnnnnnnnnnnnnnnnnnnnnnnnnnnnnnnnnnnnnnnnnnnnnnnnnnnnnnnnnnnnnnnnnnnnnnnnnnnnnnnnnnnnnnnnnnnnnnnnnnnnnnnnnnnnnnnnnnnnnnnnnnnnnnnnnnnnnnnnnnnnnnnnnnnnnnnnnnnnnnnnnnnnnnnnnnnnnnnnnnnnnnnnnnnnnnnnnnnnnnnnnnnnnnnnnnnnnnnnnnnnnnnnnnnnnnnnnnnnnnnnnnnnnnnnnnnnnnnnnnnnnnnnnnnnnnnnnnnnnnnnnnnnnnnnnnnnnnnnnnnnnnnnnnnnnnnnnnnnnnnnnnnnnnnnnnnnnnnnnnnnnnnnnnnnnnnnnnnnnnnnnnnnnnnnnnnnnnnnnnnnnnnnnnnnnnnnnnnnnnnnnnnnnnnnnnnnnnnnnnnnnnnnnnnnnnnnnnnnnnnnnnnnnnnnnnnnnnnnnnnnnnnnnnnnnnnnnnnnnnnnnnnnnnnnnnnnnnnnnnnnnnnnnnnnnnnnnnnnnnnnnnnnnnnnnnnnnnnnnnnnnnnnnnnnnnnnnnnnnnnnnnnnnnnnnnnnnnnnnnnnnnnnnnnnnnnnnnnnnnnnnnnnnnnnnnnnnnnnnnnnnnnnnnnnnnnnnnnnnnnnnnnnnnnnnnnnnnnnnnnnnnnnnnnnnnnnnnnnnnnnnnnnnnnnnnnnnnnnnnnnnnnnnnnnnnnnnnnnnnnnnnnnnnnnnnnnnnnnnnnnnnnnnnnnnnnnnnnnnnnnnnnnnnnnnnnnnnnnntgtcaggccaatgtgaccatcggactgcccaccaagaagcccgtccctgactgtgagatcaagaatcgcccgaacattctggtggagaagatcaacctgtttgccatgtttggaactggcatcgccatgagcacctgggtctggaccaaggccacgctgctcatctggaggcgcacctggtgcagg

SEQ ID NO: 35316 - DNA, 593 bp, Macaca Mulatta
ggatggaaagtgcaatttaaagcttccacaggaaagtatttgggtatgtgaggagttatttctgaccagagccccagttctgcaataaccaaaaccaaggagtataaataacaatcaggctctgggggaatagaaagcaggctttagacaatctgtccatttctgcagtaaaattggagtgagtgtgtatatctacttaaaacctaatagaagtgacttctactttttgggctatgccagaagtatttttaaattattatttaaaattttgaagccccatttcaaatcttgccgaccttagttcaaaaccccctgagacatcgcttttataattgaggatttgttaaaacggcaagtcatttcatttgtgttaaaaagaagatacccaaaaggaaggagggagccctgttgccttgagataaacggccttggcattttctggcattaatgtagaaataatgttcctatgatgacatattttcaaagaaacactttcttatttactgcgtggtgtaaaatgttgctaaatgtgttgttacattatgtcactgctgaaagttatttgcactataataaaggaattttctacaaaa

SEQ ID NO: 35317 - DNA, 327 bp, Macaca Mulatta
ttcatgctcacatttgatttctgaagacctcctacatacacttcaataaaagttaaatggacatactccctcttttttgatttactggtacatttttaaaataataaatctgccataaaatgcattatatctggagacttgcacttgtatggatgaatttattacattcaacatatttaattttatgccttctaattctaagatgcagaaaaaaataaatgaacatgattttattctatgccaacatttgggcctctgaatgtatctgttatttgaatttaagtatttgaaaaggaatggtcaatttgaaagtcattctaaactgat

SEQ ID NO: 35318 - DNA, 140 bp, Macaca Mulatta
gggtccaaccgccgctaccaggtgagcgccttgcacaccagcaaggcctgcaatgtcattagcaaatacacagccttcgtgcctgtggacgtgagcaagagccggtacctgcccaccatggtggagtaccccaactctgg

SEQ ID NO: 35319 - DNA, 218 bp, Macaca Mulatta
tggagcccaatgccacgttcgacatgcagctcacggccacacctgagtgactgctccgactcatctttgccggggtctgtggccttgtcctgctggtggggctgtaggctaatgggctcatgctgctggtggtgggccgggacccgggcgccccccacccgctccacgccctgacccgaaacctcatgatgaatatcacgctatctcacctgctcttc

SEQ ID NO: 35320 - DNA, 678 bp, Macaca Mulatta
ctgatatacatgtaagcattatcgtaatgttttaagtctgtaaatatgagttttaaagtgacataatgatggcttgataacagatgactgtcaagtgaatgagctgttcatatcctgtcagttcagtcaaaatatgttgtattttaaaaatgtatttagactgaatatctacatgtagttttactgaattcctgtccttttacagtattaaatgattttcactgatatattttttactgctatcatctaaatcagtggaccatggaagaaacctcaatatatcattcagttcaatccccttgcttcagaatcagatcatagcatatctattcgaagtagaggaatgcttttttccttttcttgaaagtttctctttcaaataggttttaggcctccagagtctttcaaccctcacattcaggaataattttatatacattttcatgctttgtaatgttcttacttttttattcaattttgtctatatgtggatgattaagatgtattttatttatttttatccatagctttttccatataagtatatatcttagggttcagaactgctaaaagagacaaactcagccacgaagcacttggaaagcatattttggtatctgcattgctttgcacatctaaattttcccataaagtaataagtaaaatggttgcagagtg

SEQ ID NO: 35321 - DNA, 914 bp, Macaca Mulatta
  misc_feature (1)...(914): n = A,T,C or G
ggagtggggaccagtgtagggttgctcagagtaagttatgctgccacagtgaccttgaggagtgcagggattccctgaaggaagccctggaaccagacacttaggctgcccatttgtgttctgatcatttgagtgaaaaaaaaagctacctgtcaagcaagttcctggacaccacgagaagaaattactttaaaagctgtactcttaaattgttagtatctttaaaatcagttgtgaacaatgaaggatttgaaagagcattgactttgccacttaaaagtatttctaaaatactttgtgcttccccctggcattctgaatttatactcttttcctcctgctgttctcagacccagtgaaaagaaaatctcaagggcgaaggctgagtttattctaatctcagggctctgttgggactacctcatctgaggtggcttgttcttcatatgcaattaattttctcctcaagtctgtacttaaatataattactgcttccttggtcctctagcagatttctcaccgttttgtttttgttttgagacagagtcttgatcttttatctaggctggagtgcaacggtatgatctcggttcactgcaacttctgcctcccgggttcaagcaattctcatgcctctgcctctcgggcagctggaattacaggcacgcgccatgacgcccggctnnnnnnnnnnnnnnngtagagacagggtttcaccatgttgccctggttgctctcaaactcttggcctcaggtgatccacccacctcagcctcccaaagtgctggtattacaggcgtgagccacccggcacagcctgaaatgaggcatctctatagtccagcagccctacaggaggcaggaggggagcaagaataagaaaaggaatttgtagaaggcacttaggagtgag

SEQ ID NO: 35322 - DNA, 356 bp, Macaca Mulatta
  misc_feature (1)...(356): n = A,T,C or G
ggtattcggtagtaatatggtcttcatgtttatcagtgactgactacaagtaaagcagaaaacagttgccctgtaatcacagaaccagccaccattcagcgtctatgtgcattgtcttagctatgaggttaattcatcatttttaaattttattgtaaagaagtgtaatgactatctctctgtggatctatgccaaaatcatgggccgtctgttctaagtgtacttgtgattaatgcaaggagaaatttttatactgaaaacaaacatactagcagctactaaaatagagaagaaattgagggcaaagtaatatgtctccnnnnnnnnnnnnnnnnnnnnnnnnnnnnnnnnnnnn

SEQ ID NO: 35323 - DNA, 1033 bp, Macaca Mulatta
ggggtcatagttctccctgagtgagacttgtctgctcctctggaccctggtcctgtcctgttctccagcatggtgtgtctgaagctccctggaggctcctgcatggcagctctcacagtgacactgatggtgctgagctccccactggctttggctggggacacccgaccacgtttcttggagcaggctaagtctgagtgtcatttcttcaacgggacggagcgggtgcggtacctgcagagatacttctataaccaggaggagttcgtgcgcttccacagcgacctgggggagttccgggcggtgtcggaactggagcggcctgtcgccgagtactggaacagccagaaggacttcctggagcagaagcgggcccaggtggacacctactgcagacacaactacggggttggtgagagcttcacagtgcagcggcgagtccaacctaaggtgactgtgtatcctgcaaagacccagcccctgcagcaccacaccctcctggtctgctctgtgagtggtttctatccaggcagcattgaagtcaggtggttccggaacggccaggaagagaaggctggggtggtgtccacaggcctgatccagaatggagactggaccttccagaccctggtgatgctggaaacagttcctcagagtggagaggtttacacctgccaagtggagcacccaagcgtgaccagccctctcacagtggaatggagagcacggtctgaatctgcacagagcaagatgctgagtggagttgggggctttgtgctgggcctgctcttccttggggccgggctgttcatctacttcaggaatcagaaaggacactctggacttcagccaacaggactcctgagctgaagtgcaggtgaccacattcaaggaaaaaccttctgccccagctttgcaggatgaaaagctttcgcgcctgaccgttattcttccacaagagagggctttctcaggacctggctgctaccggttcagcaactgcagaaaatgtcctcccttgtggcttcctcag

SEQ ID NO: 35324 - DNA, 733 bp, Macaca Mulatta
gttcctctacgacttctaccactacttctacatggtgaccaacgcactcttttacgtcagctccaccatcaaccccatcctgtacaacctcgtctccgccaacttccgccacatcttcctggccacactggcctgcctctgccctgtgtggcggcgtaggaggaagaggccagccttctcgaggaaggccaacagcgtgtccagcaaccacaccctgtccagcaatgccacccgcgagacgctgtactaggctctgcgccccaggccgtgtccaggaggagcctggccatgggtccttgcccccgacaaacagagcagcccccacccaggagccttgatgggggtcgggcagaggccagcctgtgctggagtctgaggcctgggaccctcaatccaccccccaacccctgtttctcatccgcgtctcccgggcctgtccccaactcctccccacccctcccccatctcctctttgaaagccagaacaagagagtgctcctctcccagataggaaaagggcctctcacaaggagaaattagtgtgcagccaaaggccattttctttgttcccggactaatggatggttccagagaaggaaatgaaaggtgctgtgtggggctgggcctctgatgtctgggctgctgttcccatgtccacatctctgaggcctgcaccccctctgtctagctcggggagtccagccccagtcccacaggctccgtgcctttgggc

SEQ ID NO: 35325 - DNA, 747 bp, Macaca Mulatta
agaaatgcagcaacctgtggctcttcctggagaccgggcagctccccaaagacatgagcacaggtgagagagcctgggggttagcgagaagtgaacaccacagcttcagcgcccagtgttttgggcagccaagcctgggtgccccacgtgataggctagacagggtccctccctctggtccggtctcctcagcatgtgactcccagatgggttggagctgggggtgggcccagtagacagatcttggagatctccctttgcaggagaaagaatcaagaggggctggagtgcccctgagatggagaggaagggcgtggagtgaggggtgtggcaaggccaccgcagccacgtgggcacccaagaggagtgaggctggattgagaagccctgcattggacccaggcctggcccccactgcctgttgtccttgttacagaacccagtttctgccatgataaaatgggcacagtgacgccacgccacgacggatatggttcaagcttgtctctctctgcctcttacagatcggcgaagccaggagcgttccggccggagcacagaggattgggggcagtaggagtctggaacacagccttcatgccccccgaccccaggctgaccctccccacaccctagggtaccccggtcatatcctctatccgcatgcatggccaggcctgataaacctctgcagacggccgctgccccagcctgggacctgcccagaaagttggagcagaaggggct

SEQ ID NO: 35326 - DNA, 755 bp, Macaca Mulatta
gggggggatattacccccaaatcttctttggctcccttccccttcttcccttccctatccttagagactcaaggttccctggggactataacgtggatctgtctctgaagctgaaaaaacaaaagggcggaggagatagttggctctaagtgaccaatctcagccatctttgtcagaaatcctaaatcacaggagaagggtgggaagaaaggatatgattatttcctgttctattttccataagaggtgagaatgacaaggacctcttttctaactcctcttcagggcgtgaggagggttagcaggaggagaagggctgggagccctgaggtctcctgtaagacctcatatctcacagtcaaggactaagatttaggattaaatattttagtaggatagctctaaaccaggattagcaagcaaagctagggtgtaaattcctggaatctgactgggaccctggcagtgaaagctgggactgttgaaaacccaataagtgtttgctactcatgtagcgtgcagggccaagataactagatcccaggacaggcagtttggcagtgagaacaaaaggaagagactgggaccaagctgactagatcccttgagagagaagggtgggtattgggaggaaaaatgaggactgggggaacccaggaggctgggttggaatagcagcaagtcataattccaggatctctgttcaccctcctcttcctctttcctctatcaggcagaagagagggaaggaagcc

SEQ ID NO: 35327 - DNA, 250 bp, Macaca Mulatta
ccacctggttccttggtgccaggagggagcctgccaggccgagcggagaatgccgtggtggagtcactgtgtgcagccatgtggggtcaggggtggggaagatgggatggcagcttcttcctgagggagatggtgtgtgggtggtgagcagcttccctgaggggcacatttcagggttttccaggttggaccatcgtctccagggctgggcatagggtcttggcagagctttcctttcagtatcttttct

SEQ ID NO: 35328 - DNA, 634 bp, Macaca Mulatta
  misc_feature (1)...(634): n = A,T,C or G
gcacataactgtggtctgaagggatggggagtagcaacataaaaagaagtggctcaagtcttcttggagtttgttcatgaatgttaatcccagggtgaggagaagattgggacatggaaaggaagctgcaccagaaccatgaacagagaaagattgtctgccttctagaatcagatctgtttgggactagtggttggagaataaaagcaggagaagtctatgagattccagagatagtacctgcatccagcttccctggcaaactcacaaggaggcatcaacttctagacagggaacaactgcaggatacttccaggggacagaaccaccagcaggaacacaaatattcccatgcctagagcacggcatggaggaagctgagaactgtgcagtctgatgaagccattntgagtctggccactagacatctcatcagccacttgtgtgaacagatgccccatgaccccagatgcttctcccacccttacctccatctcacacacacttgagctttccactctgtataattctaacaccctggagagaaatggcagtttgaccgaacatgttcacaagggtagaggctgatttctaatgaaacttgtcaaatgaagccaagaaagagtgatgaatt

SEQ ID NO: 35329 - DNA, 674 bp, Macaca Mulatta
  misc_feature (1)...(674): n = A,T,C or G
tgataagctacaacataaacacatctaggttcttgttcttagaatacagcatgaagcatttgctttcttctttcttcctaacattttcatgcgagatccagaaaggacacattgtctctggccattcgaagaaacaaagaaagnnnnnnnnnnnnnnnnnnnnnnnnnagagaaagagaaaagctaaaatgggtttgctgggttctaaaaatccccaaaccaaacaagcccaaattcttcttttgggacttgactcagctgggaagtctactctcctttataaattaaagcttgctaaggatattatcaccatccctacaataggtttcaatgtggagatgatagagttggaaaggagtctttcgctcacagtctgggatgttggaggacaggaaaaaatgagaactgtttggggctgttactgtgagaacactgatgggttggtgtatgttgtggacagcacagacaaacagcgactggaagagtctcggagacagtttgagcacattttgaagaatgaacacattaaaaatgtgcctgttgttctattagccaacaaacaagacatgcctggagctctgactgctgaggacatcaccagactgtttcaagtgaagaagctttgcagtgaccggaactggtatgtgccacccctgctgtgccctcccagggga

SEQ ID NO: 35330 - DNA, 2077 bp, Macaca Mulatta
  misc_feature (1)...(2077): n = A,T,C or G
cagcatttcagagaaaagctgccttcatatggaatgcaaaaggnnnnnnnnnnnnnnnnnnnnnnnnnnnnnnnnnnnnnnnnnnnnnnnnnnnnnnnnnnnnnnnnnnnnnnnnnnnnnnnnnnnnnnnnnnnnnnnnnnnnnnnnnnnnnnnnnnnnnnnnnnnnnnnnnnnnnnnnnnnnnnnnnnnnnnnnnnnnnnnnnnnnnnnnnnnnnnnnnnnnnnnnnnnnnnnnnnnnnnnnnnnnnnnnnnnnnnnnnnnnnnnnnnnnnnnnnnnnnnnnnnnnnnnnntttgtccagcgttagtcatatcgtacttgatgaaatccatgaaagaaacctgcagtcagatgttttaatgactgttgttaaagatcttctcaattttcgatctgacttgaaagtaatactgatgagtgcaacattgaatgcagaaaagttttcagaattttttggtnnnnnnnnnnnnnnnnnnnnnnnnnnnnnnnnnnnnnnnnnnnnnnnnnnnnnnnnnnnnnnnnnnnnnnnnnnnnnnnnnnnnnnnnnnnnnnnnnnnnnnnnnnnnnnnnnnnnnnnnnnnnnnnnnnnnnnnnnnnnnnnnnnnnnnnnnnnnnnnnnnnnnnnnnnnnnnnnnnnnnnnnnnnnnnnnnnnnnnnnnnnnnnnnnnnnnnnnnnnnnnnnnnnnnnnnnnnnnnnnnnnnnnnnnnnnnnnnnnnnnnnnnnnnnnnnnnnnnnnnnnnnnnnnnnnnnnnnnnnnnnnnnnnnnnnnnnnnnnnnnnaggatggtgcgatactggtctttctaccaggctgggacaatatcagcactttacatgatctcttgatgtcacaagtaatgtttaaatcagnnnnnnnnnnnnnnnnnnnnnnnnnnnnnnnnnnnnnnnnnnnnnnnnnnnnnnnnnnnnnnnnnnnnnnnnnnnnnnnnnnnnnnnnnnnnnnnnnnnnnnnnnnnnnnnnnnnnnnnnnnnnnnnnnnnnnnnnnnnnnnnnnnnnnnnnnnnnnnnnnnnnnnnnnnnnnnnnnnnnnnnnnnnnnnnnnnnnnnnnnnnnnnnnnnnnnnnnnnnnnnnnnnnnnnnnnnnnnnnnnnnnnnnnnnnnnnnnnnnnnnnnnnnnnnnnnnnnnnnnnnnnnnnnnnnnnnnnnnnnnnnnnnnnnnnnnnnnnnnnnnnnnnnnnnnnnnnnnnnnnnnnnnnnnnnnnnnnnnnnnnnnnnnnnnnnnnnnnnnnnnnnnnnnnnnnnnnnnnnnnnnnnnnnnnnnnnnnnnnnnnnnnnnnnnnnnnnnnnnnnnnnnnnnnnnnnnnnnnnnnnnnnnnnnnnnnnnnnnnnnnnnnnnnnnnnnnnnnnnnnnnnnnnnnnnnnnnnnnnnnnnnnnnnnnnnnnnnnnnnnnnnnnnnnnnnnnnnnnnnnnnnnnnnnnnnnnnnnnnnnnnnnnnnnnnnnnnnnnnnnnnnnnnnnnnnnnnnnnnnnnnnnnnnnnnnnnnnnnnnnnnnnnnnnnnnnnnnnnnnnnnnnnnnnnnnnnnnnnnnnnnnnnnnnnnnnnnnnnnnnnnnnnnnnnnnnnnnnnnnnnnnnnnnnnnnnnnnnnnnnnnnnnnnnnnnnnnnnnnnnnnnnnnnnnnnnnnnnnnnnnnnnnnnnnnnnnnnnnnnnnnnnnnnnnnnnnnnnnnnnnnnnnnnnnnnnnnnnnnnnnnnnnnnnnnnnnnnnnnnnnnnnnnnnnnnnnnnnnnnnnnnnnnnnnnnnnnnnnnnnnnnnnnnnnnnnnnnnnnnnnnnnnnnnnnnnnnnnnnnnnnnnnnnnnnnnnnnnnnnnnnnnnnnnnnnnnnnnnnnnctgttaatgtggagcaaacagactttcactacaactggcttatctatcacctgaagatgagaacaagcagtnatatatttgtatgactgcacagaggtttccccatactgtctcttgttttttggaggtgatatttccatccagaaggataacgatcaggaaactattgctgtagatgagtggattgtatttcagtctccagcaagaattgcccatcttgttaagg

SEQ ID NO: 35331 - DNA, 3747 bp, Macaca Mulatta
  misc_feature (1)...(3747): n = A,T,C or G
ccacctccagagcagtgtctctccgatgacctaatcacgatgatggttcctgtggagtccaaattttcccaatcaactggagatgtagataaagtgacagataccaaaccaagagtggctgagtggcgttatgggcctgcccaactgtggtatgatatgctgggtgtctctgaagatggcagtgggtttgactatggcttcaaactgagaaaaacagagcatgaacctgtgacaaaatctagaatgatagagaaatttaggaaacttgaggaaagcaatggcactgatcttctggctgatgaaaacttcctgatggtgacacagctgcattgggaggataatatcatctgggatggggaggatgtcaaacacaaagggacaaaacctcagcgtgcaggcctggcaggctggctgccttctagcatgactaggaatgcgatggcttacaatgttcagcaaggttttgcagccactctggatgatgacaaaccttggtactctatttttcccattgacaatgaggatctggtgtatggacgctgggaggacaatatcatttgggatgctcaggccatgccccggcttttggaacctcctgttttgacacttgatcccaatgatgagaacctcattttggaaattcctgatgagaaggaggaggccacctctaactccccctccaaggagagtaagagggaatcatctctgaagaagannnnnnnnnnnnnnnnnnnnnnnnnnnnnnnnnnnnnnnnnnnnnnnnnnnnnnnnnnnnnnnnnnnnnnnnnnnnnnnnnnnnnnnnnnnnnnnnnnnnnnnnnnnnnnnnnnnnnnnnnnnnnnnnnnnnnnnnnnnnnnnnnnnnnnnnnnnnnnnnnnnnnnnnnnnnnnnnnnnnnnnnnnnnnnnnnnnnnnnnnnnnnnnnnnnnnnnnnnnnnnnnnnnnnnnnnnnnnnnnnnnnnnnnnnnnnnnnnnnnnnnnnnnnnnnnnnnnnnnnnnnnnnnnnnnnnnnnnnnnnnnnnnnnnnnnnnnnnnnnnnnnnnnnnnnnnnnnnnnnnnnnnnnnnnnnnnnnnnnnnnnnnnnnnnnnnnnnnnnnnnnnnnnnnnnnnnnnnnnnnnnnnnnnnnnnnnnnnnnnnnnnnnnnnnnnnnnnnnnnnnnnnnnnnnnnnnnnnnnnnnnnnnnnnnnnnnnnnnnnnnnnnnnnnnnnnnnnnnnnnnnnnnnnnnnnnnnnnnnnnnnnnnnnnnnnnnnnnnnnnnnnnnnnnnnnnnnnnnnnnnnnnnnnnnnnnnnnnnnnnnnnnnnnnnnnnnnnnnnnnnnnnnnnnnnnnnnnnnnnnnnnnnnnnnnnnnnnnnnnnnnnnnnnnnnnnnnnnnnnnnnnnnnnnnnnnnnnnnnnnnnnnnnnnnnnnnnnnnnnnnnnnnnnnnnnnnnnnnnnnnnnnnntgtggttggccagcagtgtcccttgtttgaagttcctgggcctaactccaaaagggccaatacgcatattcgagactttctacaggtttttatttaccgcctnttctggaagagtaaagatcggccacggaggatacgaatggaagatataaaaaaagcctttccttcccattcagaaagcagcatccggaagaggctaaagctctgcgctgacttcaaacgcacagggatggattcaaactggtgggtgcttaagtctgattttcgtttaccaacggaagaagagatcagagctatggtgtcaccagagcagtgctgtgcttattatagtatgatagctgcagagcaacgactgaaggatgctggctatggtgagaaatccttttttgctccagaagaagaaaatgaggaagatttccagatgaagattgatgatgaagttcacactgctccttggaacaccacaagggccttcattgctgccatgaagggcaagtgtctcctagaggtgactggggtggcagatcccacagggtgtggtgaaggattctcctatgtgaagattccaaataaaccaacacagcagaaggatgataaagagccgcaggcagtgaagaagacagtgacaggaacagatgcagaccttcgtcgcctttccctgaaaaatgccaaacaacttctacgtaaatttggtgtgccagaggaagagaagaaaaagttgtcccgctgggaagtgattgatgtggtnnnnnnnnnnnnnnnnnnnnnnnnnnnnnnnnnnnnnnnnnnnnnnnnnnnnnnnnnnnnnnnnnnnnnnnnnnnnnnnnnnnnnnnnnnnnnnnnnnnnnnnnnnnnnnnnnnnnnnnnnnnnnnnnnnnnnnnnnnnnnnnnnnnnnnnnnnnnnnnnnnnnnnnnnnnnnnnnnnnnnnnnnnnnnnnnnnnnnnnnnnnnnnnnnnnnnnnnnnnnnnnnnnnnnnnnnnnnnnnnnnnnnnnnnnnnnnnnnnnnnnnnnnnnnnnnnnnnnnnnnnnnnnnnnnnnnnnnnnnnnnnnnnnnnnnnnnnnnnnnnnnnnnnnnnnnnnnnnnnnnnnnnnnnnnnnnnnnnnnnnnnnnnnnnnnnnnnnnnnnnnnnnnnnnnnnnnnnnnnnnnnnnnnnnnnnnnnnnnnnnnnnnnnnnnnnnnnnnnnnnnnnnnnnnnnnnnnnnnnnnnnnnnnnnnnnnnnnnnnnnnnnnnnnnnnnnnnnnnnnnnnnnnnnnnnnnnnnnnnnnnnnnnnnnnnnnnnnnnnnnnnnnnnnnnnnnnnnnnnnnnnnnnnnnnnnnnnnnnnnnnnnnnnnnnnnnnnnnnnnnnnnnnnnnnnnnnnnnnnnnnnnnnnnnnnnnnnnnnnnnnnnnnnnnnnnnnnnnnnnnnnnnnnnnnnnnnnnnnnnnnnnnnnnnnnnnnnnnnnnnnnnnnnnnnnnnnnnnnnnnnnnnnnnnnnnnnnnnnnnnnnnnnnnnnnnnnnnnnnnnnnnnnnnnnnnnnnnnnnnnnnnnnnnnnnnnnnnnnnnnnnnnnnnnnnnnnnnnnnnnnnnnnnnnnnnnnnnnnnnnnnnnnnnnnnnnnnnnnnnnnnnnnnnnnnnnnnnnnnnnnnnnnnnnnnnnnnnnnnnnnnnnnnnnnnnnnnnnnnnnnnnnnnnnnnnnnnnnnnnnnnnnnnnnnnnnnnnnnnnnnnnnnnnnnnnnnnnnnnnnnnnnnnnnnnnnnnnnnnnnnnnnnnnnnnnnnnnnnnnnntcataagtccatccaccgacgccgcacagaccctatggtgacgctgtcatccatcttggagtctatcatcaatgacatgagagatcttccaaatacataccctttccacactccagtcaatgcaaaggttgtaaaggactactacaaaatcatcactcggccaatggacctacaaacactccgtgaaaatgtgcgtaaatgcctctacccatctcgggaagagttcagagagcatctggagctaattgtgaaaaacagtgcaacctacaatggtccaaaacactcattgactcagatctctcaatccatgctggatctctgtgatgaaaaactcagagagaaaggagacaaattagctcgcttagagaaagctatcaaccccttgctggatgatgatgaccaagtggcattttctttcattctggacaacattgtcacccagaaaatgatggcagttccagattcttggccatttcatcacccagttaataagaagtttgttcctagattattacaaagtgattgtcaatccggtg

SEQ ID NO: 35332 - DNA, 607 bp, Macaca Mulatta
  misc_feature (1)...(607): n = A,T,C or G
ggagaggacattcgattggatggaaaccctattaatctcagcaaaactcctcaagcatacatgtgtctgcctcgtctgcctgttgggagccttgtctaatttcagataatggttggcattaagatgcctactataaataaaccattcttactgctctcttccaaaacaaaactcagcatgatactttgagattgtgttctgagagatgatatgagtacataaaatacaatttaaaatgctataatataatgaaaatgtagtaatttaagaaaacaccagaggagttaggaataaacctataagatttacaaaaagagcaaaactaagtgatagaaaatattttacacatgttcttatagattgtgtatcacttgcaagttttaggagttcatatcctatataatttcaaattaagcacataataaagtaaaattttgaaatgaacaccttaggtatttttgccaacatgtaggtgtttttaattaaacttttctcttccttttttttccactaaggcatgtttattcccctaatccactaaagagcatgaagaataaaagtattagaaaacnnnnnnnnnnnnnnnnnnnnnnnnnnnnnnnnnnnc

SEQ ID NO: 35333 - DNA, 2198 bp, Macaca Mulatta
  misc_feature (1)...(2198): n = A,T,C or G
agctggacagacttgaggaaaaacagaaagaaacctaccggcgcatgctagagcagctgttgctggccgaaaagtgtcacaggcgcaccgtgtacgagttagagaacgagaagcataaacacactgactacatgaacaagagcgacgacttcaccaacctgctggagcaggagcgggagaggnnnnnnnnnnnnnnnnnnnnnnnnnnnnnnnnnnnnnnnnnnnnnnnnnnnnnnnnnnnnnnnnnnnnnnnnnnnnnnnnnnnnnnnnnnnnnnnnnnnnnnnnnnnnnnnnnnnnnnnnnnnnnnnnnnnnnnnnnnnnnnnnnnnnnnnnnnnnnnnnnnnnnnnnnnnnnnnnnnnnnnnnnnnnnnnnnnnnnnnnnnnnnnnnnnnnnnnnnnnnnnnnnnnnnnnnnnnnnnnnnnnnnnnnnnnnnnnnnnnnnnnnnnnnnnnnnnnnnnnnnnnnnnnnnnnnnnnnnnnnnnnnnnnnnnnnnnnnnnnnnnnnnnnnnnnnnnnnnnnnnnnnnnnnnnnnnnnnnnnnnnnnnnnnnnnnnnnnnnnnnnnnnnnnnnnnnnnnnnnnnnnnnnnnnnnnnnnnnnnnnnnnnnnnnnnnnnnnnnnnnnnnnnnnnnnnnnnnnnnnnnnnnnnnnnnnnnnnnnnnnnnnnnnnnnnnnnnnnnnnnnnnnnnnnnnnnnnnnnnnnnnnnnnnnnnnnnnnnnnnnnnnnnnnnnnnnnnnnnnnnnnnnnnnnnnnnnnnnnnnnnnnnnnnnnnnnnnnnnnnnnnnnnnnnnnnnnnnnnnnnnnnnnnnnnnnnnnnnnnnnnnnnnnnnnnnnnnnnnnnnnnnnnnnnnnnnnnnnnnnnnnnnnnnnnnnnnnnnnnnnnnnnnnnnnnnnnnnnnnnnnnnnnnnnnnnnnnnnnnnnnnnnnnnnnnnnnnnnnnnnnnnnnnnnnnnnnnnnnnnnnnnnnnnnnnnnnnnnnnnnnnnnnnnnnnnnnnnnnnnnnnnnnnnnnnnnnnnnnnnnnnnnnnnnnnnnnnnnnnnnnnnnnnnnnnnnnnnnnnnnnnnnnnnnnnnnnnnnnnnnnnnnnnnnnnnnnnnnnnnnnnnnnnnnnnnnnnnnnnnnnnnnnnnnnnnnnnnnnnnnnnnnnnnnnnnnnnnnnnnnnnnnnnnnnnnnnnnnnnnnnnnnnnnnnnnnnnnnnnnnnnnnnnnnnnnnnnnnnnnnnnnnnnnnnnnnnnnnnnnnnnnnnnnnnnnnnnnnnnnnnnnnnnnnnnnnnnnnnnnnnnnnnnnnnnnnnnnnnnnnnnnnnnnnnnnnnnnnnnnnnnnnnnnnnnnnnnnnnnnnnnnnnnnnnnnnnnnnnnnnnnnnnnnnnnnnnnnnnnnnnnnnnnnnnnnnnnnnnnnnnnnnnnnnnnnnnnnnnnnnnnnnnnnnnnnnnnnnnnnnnnnnnnnnnnnnnnnnnnnnnnnnnnnnnnnnnnnnnnnnnnnnnnnnnnnnnnnnnnnnnnnnnnnnnnnnnnnnnnnnnnnnnnnnnnnnnnnnnnnnnnnnnnnnnnnnnnnnnnnnnnnnnnnnnnnnnnnnnnnnnnnnnnnnnnnnnnnnntcaagcaccaaattgccaagaataaagcaatcgaccatggtgaggttgtgagccaggaagctgaactgagacacagatttcggttggaagaagctaaaagtcgagacttaaaagctgaagtacaagctcttaaagagaagattcacgaattaatgaacaaagaagatcagctttctcagctccaggtagattattctgtacttcaacaaagatttatggaagaagaaaataagaacaaaaacatggggcaggaggtcctcaatctgactaaagagttggagctttccaagcgctacagcagagctcttaggcccagtgtgaatggaagaagaatggtggatgttcctgtgacatcaactggagtccagactgatgcagtcagcagtgaagcaacagaggaagaaacaccagctgtattcatacggaaatccttccaggaagaaaatcatattatgagtaatcttcggcaggtgggattgaagaaacccatggaaagatcctctgttctagacaggtatcctccagcagcaaatgagctcactatgagaaagtcttggattccatggatgagaaagagggaaaatggtccctcaatcac

SEQ ID NO: 35334 - DNA, 689 bp, Macaca Mulatta
gaaaagctcatagatcataaagaggagtgccagatatgaaaaatgagttttaattttgtgtagttttataaaagactagaaagtgaggactaaagttgctgaatattaaatgtatgtttatatagcccctttctttgctggagcccagattactttttcatataaatatgcagaattgtgtgggctacacagaaggattaggctctttatagaaacaaccttaaagctagctgaatgttgacttttgtgcttgttctagtaaaattgttttgttattaatagctcattcataaaatacaaatggcgtggagggggagattagagaattacatttctcacctcagatattcctaaaaaacaaatgtgctttgttttcttagctcatgcacgcctgatgtttcgtgatactgtgactctggaggatgctattacggtggtgtcagtcatggagtcctcaatgcaggtaaggatattttgtgtacctaatttttatcctaattacaaactttcttttttttaaaaaaaggacactttattaacatatcaaaagttattaaaatgatcatattctagacctagtgattcctggaactagatccaaaggtaaccatttaaacgaagaggaaacagtgtcctggagacgtctgctgcatgggtggtgttgctttggcccattgatgtaaagtagt

SEQ ID NO: 35335 - DNA, 328 bp, Macaca Mulatta
  misc_feature (1)...(328): n = A,T,C or G
ccacgcagtgccgcaagatgtacaaccggccgctccgcgcgcccatcaccaagcagaatgagcaggaggccgtatgcaccgactcgcacnccgacatgaaaaaaatctcgggcggcctcatcgccttcagcacgctggacgggcggccctcggcgcacgacttcgacaactcgcccgtgctgcaggactgggtcacggccaccgacattcgcgtggccttcagccgcctgcacacgttcggcgatgagaacgaggacgactcggagctggcgcgcgactcgtacttctacgcggtgtccgacctgcaggtgggcggccggtgcaagtg

SEQ ID NO: 35336 - DNA, 441 bp, Macaca Mulatta
ttcgagtctgtggccttccctggctggttcattgctgtcagctctgaaggaggctgtcctctcatccttacccaagaactggggaaagccaacactactgactttgggttaactatgctgttttaaggtcagttgggtttggaggttggtctccatgcagagaaaatcttagtataatcttagcctggaatgggcagagagaatttgttattggacttgccacctaagaatatcttgctgcctcccaatatattcatgcagtgacctaagtgctggacttggtccctctccctggggccatgtggaaaatagtccagggaaattgagggccttaccatgagtaggtggctgaaatatggcaccattacaaaaataataaagaaagctctacttaacatacttgctaataatgctccaagtaaaaatgagggtggtaactct

SEQ ID NO: 35337 - DNA, 449 bp, Macaca Mulatta
acaagagaaaacaggatcgattaaaataaattaggatcttggggtggagggacagtgacgtttagagcacatgaactcaaggtcagtgattctgcaggacttcacagagagagctgtgaccatcatcattcagtccaagtgctttctctgcccagacagcacagaactccagccctgccacttacatgggtcatcgagtttccacctaaaatatgattctatttattttgagtcactgttaccaaattagaattaaaacaaagttacataaaaagttattgtgattacacttaattttagtcacatattctgtatatataggccaacctataccacatccaaaattatgtatctactacagcccctagaagctttatgaatacagtgtgtctttttttattcacaaaatttttgaaatcttggtaatatggtttgaagtctgtatctta

SEQ ID NO: 35338 - DNA, 92 bp, Macaca Mulatta
gctcagagcccgggcgctgtggaagagattctagaccgggagaacaagcgaatggccgacagcctggcctccaaagtcaccaggctcaaatc

SEQ ID NO: 35339 - DNA, 504 bp, Macaca Mulatta
gacggctgctgttgctacaggagacccgggacagaggactgctgtctgccctctctcttcactctgcctaacttgaggatctgtcactccagccatgaggaccttcgccctcctcaccgccatgcttctcctggtggccctgcacgctcaggcagaggcacgtcaggcaagagctgatgaagctgccgcccagcagcagcctggagcagatgatcagggaatggctcattcctttacatggcctgaaaacgccgctcttccgctttcagagtcagcgagaggcttgaggtgcatttgcagacgaggattttgccgtctgttataatggcagtttggggtcctgcgcttttcgtggttgactctaccggatctgctgccgctgagcttccagaatcaagaaaaatatgctcagaagttactttgagagttaaaagaaattcttgttactcctgtaccttgtcctcaatttccttttctcatcccaaataaataccttctcgcaag

SEQ ID NO: 35340 - DNA, 1817 bp, Macaca Mulatta
  misc_feature (1)...(1817): n = A,T,C or G
agcagagccggagttggagccagcgccagcggctggagcagcaagggagtcagggccagggccagagagccggagagaggagcccccgaccgannnncagtgacatgtcggaccctgagatgggatgggtgcctgagcccccaaccatgacgctgggggcctctcgggtggagctgcgggtgtcctgccatggcctcctggaccgagacacactcaccaaaccccatccctgcgtgctgctcaagctctactctgatgagcagtgggtggaggnnnnnnnnnnnnnnnnnnnnnnnnnnnnnnnnnnnnnnnnnnnnnnnnnnnnnnnnnnnnnnnnnnnnnnnnnnnnnnnnnnnnnnnnnnnnnnnnnnnnnnnnnnnnnnnnnnnnnnnnnnnnnnnnnnnnnnnnnnnnnnnnnnnnnnnnnnnnnnnnnnnnnnnnnnnnnnnnnnnnnnnnnnnnnnnnnnnnnnnnnnnnnnnnnnnnnnnnnnnnnnnnnnnnnnnnnnnnnnnnnnnnnnnnnnnnnnnnnnnnnnnnnnnnnnnnnnnnnnnnnnnnnnnnnnnnnnnnnnnnnnnnnnnnnnnnnnnnnnnnnnnnnnnnnnnnnnnnnnnnnnnnnnnnnnnnnnnnnnnnnnnnnnnnnnnnnnnnnnnnnnnnnnnnnnnnnnnnnnnnnnnnnnnnnnnnnnnnnnnnnnnnnnnnnnnnnnnnnnnnnnnnnnnnnnnnnnnnnnnnnnnnnnnnnnnnnnnnnnnnnnnnnnnnnnnnnnnnnnnngttcctggtatatgactatgactccagtgggaagcatgacttcatcggcgagttcaccagcactttccaggagatgcaggaagggacggcaaaccctgggcaggagnnnnnnnnnnnnnnnnnnnnnnnnnnnnnnnnnnnnnnnnnnnnnnnnnnnnnnnnnnnnnnnnnnnnnnnnnnnnnnnnnnnnnnnnnnnnnnnnnnnnnnnnnnnnnnnnnnnnnnnnnnnnnnnnnnnnnnnnnnnnnnnnnnnnnnnnnnnnnnnnnnnnnnnnnnnnnnnnnnnnnnnnnnnnnnnnnnnnnnnnnnnnnnnnnnnnnnnnnnnnnnnnnnnnnnnnnnnnnnnnnnnnnnnnnnnnnnnnnnnnnnnnnnnnnnnnnnnnnnnnnnnnnnnnnnnnnnnnnnnnnnnnnnnnnnnnnnnnnnnnnnnnnnnnnnnnnnnnnnnnnnnnnnnnnnnnnnnnnnnnnnnnnnnnnnnnnnnnnnnnnnnnnnnnnnnnnnnnnnnnnnnnnnnnnnnnnnnnnnnnnnnnnnnnnnnnnnnnnnnnnnnnnnnnnnnnnnnnnnnnnnnnnnnnnnnnnnnnnnnnnnnnnnnnnnnnnnnnnnnnnnnnnnnnnnnnnnnnnnnnnnnnnnctcggtgctgctggtgctcactgacggtgtggtgagcgacatggctgagactcgcactgctattgtgcgtgcctcccgcctgcccatgtccatcatcattgtgggcgtgggcaatgctgacttctctgacatgcggctgctggatggcgacgacggtcccttgcgctgcccccgaggggtgcctgcagcccgagacattgtccagtttgtgcccttccgagacttcaaggatgngctgccccctctgcactcgccaagtgtgtcctggctgaggtgccacggcaggtggtggagtactacgccagccagggcatcagccctggggctcccaggccctgcacactggccacgactcccagccctagcccatgactgctaccctccggaccgacactccctcagcctctcagtg

SEQ ID NO: 35341 - DNA, 270 bp, Macaca Mulatta
ggctgtcagatccctttccctggaccgcacactttgggatgtatgttcaagggaatgccaagtttgtctccccggtgagaagaattgtggtccacgagtactataacagtcagactttcgattatgatattgctttgctacagctcagtattgcttggcctgagaccctgaaacagctcattcagccaatatgcattcctcccgctggccagagagttcgcagtggggagaagtgctgggtaactggctgggggcgaagacacgaagcag

SEQ ID NO: 35342 - DNA, 114 bp, Macaca Mulatta
cagtatgtgcaacgtatagagaaacagtttcttttgtatgcctactggataggcttaggaattttgtcttctgttgggcttggaacagggctgcacacctttctgctttacctg

SEQ ID NO: 35343 - DNA, 1062 bp, Macaca Mulatta
  misc_feature (1)...(1062): n = A,T,C or G
aggctagacaaatggccgccgttctcctaagacgcctcttgtcctctgcatttgatgaagtctatccagcacttccctctgatgttcagactgccatcaagagtgagctgctcatgattattcagatggaaacacaatctagtatgaggaaaaaagtttgtgatattgcggcagaactggccagaaatttaatannnnnnnnnnnnnnnnnnnnnnnnnnnnnnnnnnnnnnnnnnnnnnnnnnnnnnnnnnnnnnnnnnnnnnnnnnnnnnnnnnnnnnnnnnnnnnnnnnnnnnnnnnnnnnnnnnnnnnnnnnnnnnnnnnnnnnnnnnnnnnnnnnnnnnnnnnnnnnnnnnnnnnnnnnnnnnnnnnnnnnnnnnnnnnnnnnnnnnnnnnnnnnnnnnnnnnnnnnnnnnnnnnnnnnnnnnnnnnnnnnnnnnnnnnnnnnnnnnnnnnnnnnnnnnnnnnnnnnnnnnnnnnnnnnnnnnnnnnnnnnnnnnnnnnnnnnnnnnnnnnnnnnnnnnnnnnnnnnnnnnnnnnnnnnnnnnnnnnnnnnnnnnnnnnnnnnnnnnnnnnnnnnnnnnnnnnnnnnnnnnnnnnnnnnnnnnnnnnnnnnnnnnnnnnnnnnnnnnnnnnnnnnnnnnnnnnnnnnnnnnnnnnnnnnnnnnnnnnnnnnnnnnnnnnnnnnnnnnnnnnnnnnnnnnnnnnnnnnnnnnnnnnnnnnnnnnnnnnnnnnnnnnnnnnnnnnnnnnnnnnnnnnnnnnnnnnnnnnnnnnnnnnnnnnnnnnnnnnnnnnnnnnnnnnnnnnnnnnnnnnnnnnnnnnnnnnnnnnnnnnnnnnnnnnnnnnnnnnnnnnnnnnnnnnnnnnnnnnnnnnnnnnnnnnnnnnnnnnnnnnnnnnnnnnnnnnnnnnnnnnnnnnnnnnnnnnnnnnnnnnnnctgactggaaatatcggcatgcaggattgatggccttatctgccattggtgaagggtgccaccagcaaatggaaggaattctaaatgagatagtaaattttgttttggtttttcttcaggatcc

SEQ ID NO: 35344 - DNA, 638 bp, Macaca Mulatta
gctccgtgggctgccaggtggcaaagcagcacgtgcgggacggccgcaaggagagcctggatggcttcatgaagaccttcaagaaagagttttccagagacgcttatcccggaatctacgccttggactgtgagatgtgctacaccacgcacggcctggagctgacccgtgtcaccgtggtggacgccgacatgcgggtggtgtacgacaccttcgtcaagcccgacaacgagatcgtggactacaacaccaggttttccggcgtgaccgaggccgacgtcgcccatatcagcatcacgttgccgaaagtccaagccatcctgctgagctttttcagcgcccaaaccatcctcatcgggcacagcctggagagcgacctgctggccctgaagctgatccacagcaccgtggtggacacggcggtgctcttcccgcactaccggggtttcccctacaagcgctccctaaggaatctcacggccgactacctcggacagatcatccaggacagccaggacgggcacgactcctgccaggacgcaaacgcctgcctgcagctggtgatgtggaaagtccgagagcgcgccgggatccagcgaggccacccgtccgcctctcccgccgccctggcctgtcct

SEQ ID NO: 35345 - DNA, 1088 bp, Macaca Mulatta
  misc_feature (1)...(1088): n = A,T,C or G
ttaatgacgtcacattctttcgcgggaaaaattcgaaagtggattttctgtaattttgacaggtgnnnnnnnnnnnnnnnnnnnnnnnnnnnnnnnnnnnnnnnnnnnnnnnnnnnnnnnnnnnnnnnnnnnnnnnnnnnnnnnnnnnnnnnnnnnnnnnnnnnnnnnnnnnnnnnnnnnnnnnnnnnnnnnnnnnnnnnnnnnnnnnnnnnnnnnnnnnnnnnnnnnnnnnnnnnnnnnnnnnnnnnnnnnnnnnnnnnnnnnnnnnnnnnnnnnnnnnnnnnnnnnnnnnnnnnnnnnnnnnnnnnnnnnnnnnnnnnnnnnnnnnnnnnnnnnnnnnnnnnnnnnnnnnnnnnnnnnnnnnnnnnnnnnnnnnnnnnnnnnnnnnnnnnnnnnnnnnnnnnnnnnnnnnnnnnnnnnnnnnnnnnnnnnnnnnnnnnnnnnnnnnnnnnnnnnnnnnnnnnnnnnnnnnnnnnnnnnntttcaaggaccacgtcaggttccgaagaaaatggttattacagaaagtggtgaatcagctgcatcacatgatgctaagaaacctggctccactattttttctccattctacagcatgcctcctttgtttcctactgttggcaataaagatgtaaataatatactggcagaccctgagaacattgtgacttacaagaacagagagagaaatgccatggatttttcttcagttttttctccatccttccagattaacccagaagtgctgtgtgaagaaaagtatttttgctctcctatcaattctggaaataagctttcagactctttactgaccaatgagcctgtgaaaagagatagtttagcatcttactgttcaggagtttcacaaaacatcagaagcaaagcacagatattagctcttctgaagtctgaatcatctagtacatgtgaggaactaaattctgagatgacagagcattttcctcaaaaacaaccacagggaagtttaaaaattgctactaaaccgaagcacctaattcaacaggaagagtgtgctgagatgaagagcacagaaaatttatactaccagtatcaatcagaaaatacca

SEQ ID NO: 35346 - DNA, 238 bp, Macaca Mulatta
cctacgacctcagccttagcccctggctgatgcctttctgtgtaaaggaacagcaccccattaccccactgagggcatgagattcaaggagagtgcattcctccttccagcagggcatgggaatgggatgaggagttgatacctggttgccctgactcttgccttcccaggatggggagagtgatttgcccagagcaggagttagaccgcttattccgacatagaatgacacaggctt

SEQ ID NO: 35347 - DNA, 445 bp, Macaca Mulatta
atgtgtgtatcagacactgccaggccatctggggctaggctttgttgcaatggctcccttataatgcaataatgagtcccatactgtttttcttcactgtaggtcagtgcaactgaatggccagcccttagtgatggtggacgtcgggaccctcccagaattgaagccacacccccttcgggccggccggacattggtcatccctccagtcaccatgggcttttatgtggtcaagaatgtcaatgctttggcctgccgctaccgataagctatcctaacactcacggctaccagtgggcccgctgggccgcttccactcctccactccagtagtatcctctgttttcagacatcttagcaaccagcccctgctgccccatcctgctggaagaaacacagacttgctcttcaaagagactaaatgtcatagtgtgatcttagccta

SEQ ID NO: 35348 - DNA, 186 bp, Macaca Mulatta
tggctgatgactttggcttcttctcgtcgtcggagagcggggccccggaggcggcggaggaggacccggcggccgccttcctggcccagcaggagagcgagattgcaggcatagagaacgacgagggcttcggggcatctgccggcagccatgcggcccccgcgcagctgggccccacgagtgggg

SEQ ID NO: 35349 - DNA, 162 bp, Macaca Mulatta
aggtctttctgtggaatttggaacaattctagtttacacatgtgagaagagttgctggcccccaaatcatcagatccccatggaagaattttgtattatacaagaagacccagatgaattattgtttaagagcacttccttttattaatataaattaaaaca

SEQ ID NO: 35350 - DNA, 2131 bp, Macaca Mulatta
  misc_feature (1)...(2131): n = A,T,C or G
taagaagctgctgtaccaagaggccaagcggctgtggcagcaggtggagctcaaggacgcagtcttggacgatagcactgccaaactgtctgcagtcgagaaggagagccgtgcgctggacaaggagctggcccgctgcagggacgcggccggcaagctgaaggagctggagaaggacaaccgggacctcaccaagcaagtcaccgtgcatgcgaggacgctgacgactctgagggaggnnnnnnnnnnnnnnnnnnnnnnnnnnnnnnnnnnnnnnnnnnnnnnnnnnnnnnnnnnnnnnnnnnnnnnnnnnnnnnnnnnnnnnnnnnnnnnnnnnnnnnnnnnnnnnnnnnnnnnnnnnnnnnnaaaatacaagattttggagggcagcaacgaatcagcattaaaaacaacactagccatgaaagaagaaaagattgtgcttttggaagcacagatggaagagaaagcgagcctaaatcgccagttagagagcgagctgcagatnnnnnnnnnnnnnnnnnnnnnnnnnnnnnnnnnnnnnnnnnnnnnnnnnnnnnnnnnnnnnnnnnnnnnnnnnnnnnnnnnnnnnnnnnnnnnnnnnnnnnnnnnnnnnnnnnnnnnnnnnnnnnnnnnnnnnnnnnnnnnnnnnnnnnnnnnnnnnnnnnnnnnnnnnnnnnnnnnnnnnnnnnnnnnnnnnnnnnnnnnnnnnnnnnnnnnnnnnnnnnnnnnnnnnnnnnnnnnnnnnnnnnnnnnnnnnnnnnnnnnnnnnnnnnnnnnnnnnnnnnnnnnnnnnnnnnnnnnnnnnnnnnnnnnnnnnnnnnnnnnnnnnnnnnnnnnnnnnnnnnnnnnnngcaggtggagaactccacactgagctcccagagtgccgcgctcaccgcgcagtacgcgctgcttcagaaccaccacacggccaaggagacggagaacgagagcctgcagaggcagcaggagcagcttacagcggcctacgaggccatgctgcaggaccacgagcacctgggcacgctgcacgagcggcaatcggnnnnnnnnnnnnnnnnnnnnnnnnnnnnnnnnnnnnnnnnnnnnnnnnnnnnnnnnnnnnnnnnnnnnnnnnnnnnnnnnnnnnnnnnnnnnnnnnnnnnnnnnnnnnnnnnnnnnnnnnnnnnnnnnnnnnnnnnnnnnnnnnnnnnnnnnnnnnnnnnnnnnnnnnnnnnnnnnnnnnnnnnnnnnnnnnnnnnnnnnnnnnnnnnnnnnnnnnnnnnnnnnnnnnnnnnnnnnnnnnnnnnnnnnnnnnnnnnnnnnnnnnnnnnnnnnnnnnnnnnnnnnnnnnnnnnnnnnnnnnnnnnnnnnnnnnnnnnnnnnnnnnnnnnnnnnnnnnnnnnnnnnnnnnnnnnnnnnnnnnnnnnnnnnnnnnnnnnnnnnnnnnnnnnnnnnnnnnnnnnnnnnnnnnnnnnnnnnnnnnnnnnnnnnnnnnnnnnnnnnnnnnnnnnnnnnnnnnnnnnnnnnnnnnnnnnnnnnnnnnnnnnnnnnnnnnnnnnnnnnnnnnnnnnnnnnnnnnnnnnnnnnnnnnnnnnnnnnnnnnnnnnnnnnnnnnnnnnnnnnnnnnnnnnnnnnnnnnnnnnnnnnnnnnnnnnnnnnnnnnnnnnnnnnnnnnnnnnnnnnnnnnnnnnnnnnnnnnnnnnnnnnnnnnnnnnnnnnnnnnnnnnnnnnnnnnnnnnnnnnnnnnnnnnnnnnnnnnnnnnnnnnnnnnnnnnnnnnnnnnnnnnnnnnnnnnnnnnnnnnnnnnnnnnnnnnnnnnnnnnnnnnnnnnnnnnnnnnnnnnnnnnnnnnnnnnnnnnnnnnnnnnnnnnnnnnnnnnnnnnnnnnnnnnnnnnnnnnnnnnnnnnnnnnnnnnnnnnnnnnnnnnnnnnnnnnnnnnnnnnnnnnnnnnnnnggccctggggatccaaaaccaaagcgaggctccccgcacagaggcagccttgactgcacagatgcctccaccgatccggccatgaggtcctggccctcggagctgggctcccggacctgctcaacttcagccaccactacagccccctccagctctacccccatcgcccggcacccgggccgcaccaaaggn

SEQ ID NO: 35351 - DNA, 362 bp, Macaca Mulatta
tttcgtttatacagtagaaaataaagtattacaccgaatacttgccgtgtagtttgttgaccttatatattagaaaattttataatgccagttacatctgttcattttaaatgtcagagaagttgtaccatgtttcaaaagtatactaagtgatactacttgtaatagaaaaatcaccttggaattgttaccttttgaagtaaatactggcaagtgtacaagccacataaacctgaataaaacttttgacctagggctgaacatttggcttcctcccatattctgtctttgaataagaccaaggccagcattttcttttctaagtgagtttctactgtgacaattaaaagcaatataatcac

SEQ ID NO: 35352 - DNA, 747 bp, Macaca Mulatta
ttcccacctcaccgtggtgtgtatgtattacaccgctgtcttctacgcctacataagcccggtctccggctacagcgcggggaagagcaagttggctggcctactgtacactgtgctgagtcctaccctcaaccccctcatctatactctgagaaacaaggaggtcaaagcagccctcaggaagcttttccctttcttcagaaattaacttacgtcttctgaagttctggtccttggggactgagttttagtggagtctgatgagcaagtttctggactgggaggtaaatagacttgtttcttctaccccagcagaacatgtgcatggataagctgggagtgctggtgccccgagactgggtgatggggggattgcagtaggtgtgacccaccagcctctgagacacgggatctcttggtctgactccaaggtggtgacagtgctgagttggcagagaaacacaggtccctaggaggagaaaagtgttccttgtgttttcaactcatagccatatcaaatgttttccttttgtatgtacaacactcagggtgtaaattctaaaatcacacctagaattcaggtgtgtgggtctaaaaagttaggcaagactgtggaccccacagcccctgaagggttgtcagagtgaagcattgttttaaggtgaccagtggtctctaggaaaccttctacccccattatcttacctcagctcttttctctggagccacttggacttcaaaaatagt

SEQ ID NO: 35353 - DNA, 621 bp, Macaca Mulatta
tggccatagctgagtgatctgatgaaatcaagccaacctggacacctccgttctttgttcttcttagaggctgtctgcgtgtagcggaaagggcacctaggtcaagtgcgaccagagcaggagcatcctatgcctttgacaaagattgcagtgatccctcgagggcagaggtcatcccaggtgttgctgattttattgagcacacttggcccgcttgcttatggcttgtttgcttagggaagagtaggaaaataaaatatatgtaaatccagaggaaaacctgtttgcttactatgccactttaccattactgtgtaatgtgttatcagccctgagttcacctggtccttctgtacctttgttaggatgctgggtaagttcccatccaagctccactgacaccctccggctcccccagatgtgatacatctgccctgccaggtcagctcgctgcagtcaggggacctgagtctcaccttcagcctccccacagcctttcaaagacagagcccaaggaagtctctcccctggagggcaggcagccagcgcctgtcagcagccaggcccggtaagcagggcctatgcccaaacgctgtcacagaacacaaagagccctggaaa

SEQ ID NO: 35354 - DNA, 3242 bp, Macaca Mulatta
  misc_feature (1)...(3242): n = A,T,C or G
ggaacccaagccagaccgtctccttgtgttgaaagtactatggaatgatttcctgatgtgctactcttctcgccctcttctctgctggtctgtgtggtgggccctgtaatacctgtggctattttcaagttnnnnnnnnnnnnnnnnnnnnnnnnnnnnnnnnnnnnnnnnnnnnnnnnnnnnnnnnnnnnnnnnnnnnnnnnnnnnnnnnnnnnnnnnnnnnnnnnnnnnnnnnnnnnnnnnnnnnnnnnnnnnnnnnnnnnnnnnnnnnnnnnnnnnnnnnnnnnnnnnnnnnnnnnnnnnnnnnnnnnnnnnnnnnnnnnnnnnnnnnnnnnnnnnnnnnnnnnnnnnnnnnnnnnnnnnnnnnnnnnnnnnnnnnnnnnnnnnnnnnnnnnnnnnnnnnnnnnnnnnnnnnnnnnnnnnnnnnnnnnnnnnnnnnnnnnnnnnnnnnnnnnnnnnnnnnnnnnnnnnnnnnnnnnnnnnnnnnnnnnnnnnnnnnnnnnnnnnnnnnnnnnnnnnnnnnnnnnnnnnnnnnnnnnnnnnnnnnnnnnnnnnnnnnnnnnnnnnnnnnnnnnnnnnnnnnnnnnnnnnnnnnnnnnnnnnnnnnnnnnnnnnnnnnnnnnnnnnnnnnnnnnnnnnnnnnnnnnnnnnnnnnnnnnnnnnnnnnnnnnnnnnnnnnnnnnnnnnnnnnnnnnnnnnnnnnnnnnnnnnnnnnnnnnnnnnnnnnnnnnnnnnnnnnnnnnnnnnnnnnnnnnnnnnnnnnnnnnnnnnnnnnnnnnnnnnnnnnnnnnnnnnnnnnnnnnnnnnnnnnnnnnnnnnnnnnnnnnnnnnnnnnnnnnnnnnnnnnnnnnnnnnnnnnnnnnnnnnnnnnnnnnnnnnnnnnnnnnnnnnnnnnnnnnnnnnnnnnnnnnnnnnnnnnnnnnnnnnnnnnnnnnnnnnnnnnnnnnnnnnnnnnnnnnnnnnnnnnnnnnnnnnnnnnnnnnnnnnnnnnnnnnnnnnnnnnnnnnnnnnnnnnnnnnnnnnnnnnnnnnnnnnnnnnnnnnnnnnnnnnnnnnnnnnnnnnnnnnnnnnnnnnnnnnnnnnnnnnnnnnnnnnnnnnnnnnnnnnnnnnnnnnnnnnnnnnnnnnnnnnnnnnnnnnnnnnnnnnnnnnnnnnnnnnnnnnnnnnnnnnnnnnnnnnnnnnnnnnnnnnnnnnnnnnnnnnnnnnnnnnnnnnnnnnnnnnnnnnnnnnnnnnnnnnnnnnnnnnnnnnnnnnnnnnnnnnnnnnnnnnnnnnnnnnnnnnnnnnnattcatcgtatgaatcctcttggttcccatcgtgacaattatgtatttgtgtaaaatctgtttagaagtacatttttgcattattcatatgcttcccagagaagctcatttacttagaaaataaggcaagttttgaagcctgcctaaatgaagagatttaagaaagcttaaggtaggtttgcttgtcttgaaatcttcaatatgaaggactattaattccaagattaaaagttcatatatgggctacagatataactagcccatttgtatttgcattcccttttatttccaaaataaaatgagaaatcttttttgaataatttcatccctatatatagtttttatattaatttgtttttcttatccaaataaagatgtcaataggaattgcattagtccaaggcctttttcataaactgagcctcttttaaattatttcaatttcaatgggacaggaactaggatagatgtgattcctgcattttttttaccttaaatctgtctttgtttctaaaggtagatcatcttgaatatttgcttaaaattgctagtgatttcattaccaagttacttgaaaaaaatgttctgtatgcatttaattctgaaattagtctacgaaggggctgctagtatatgtcagacatgaaaactgttttaaagctgactttgttgccttatcttgaaaagaatctagataggtgcttttaactgggatattaactttttttagaatgacacagctgaacggtgttaataatagtgtgtcaagattgcaaaattgacgtacttatttggtttaagcaggaatcctagaagcagatggatgaggataagaataggtcattttctattcactgtcctttacaattaagggaaaggaaaagaacactagctnnnnnnnnnnnnnnnnnnnnnnnnnnnnnnnnnnnnnnnnnnnnnnnnnnnnnnnnnnnnnnnnnnnnnnnnnnnnnnnnnnnnnnnnnnnnnnnnnnnnnnnnnnnnnnnnnnnnnnnnnnnnnnnnnnnnnnnnnnnnnnnnnnnnnnnnnnnnnnnnnnnnnnnnnnnnnnnnnnnnnnnnnnnnnnnnnnnnnnnnnnnnnnnnnnnnnnnnnnnnnnnnnnnnnnnnnnnnnnnnnnnnnnnnnnnnnnnnnnnnnnnnnnnnnnnnnnnnnnnnnnnnnnnnntggccatgtttgtagaatgctgaacccagtgtgcaagttgtactgtatgcagttttgcaaataactgaaaataatttgttgtactttttattcaattctgtatagattatannnnnnnnnnnnnnnnnnnnnnnnnnnnnnnnnnnnnnnnnnnnnnnnnnnnnnnnnnnnnnnntttatcttctatttcagtaggagctttagattatatctttaaatattttaataatgtatcctaggacaaatttcatattaagtcttcccctcgtctaacttgcctagttaaccttttgttatcttgttaattattccattcctttgtgatttttacctttgactcttccgccttatttcagatgttttcccccttttcttttggcaccacattgcactgttnnnnnnnnnnnnnnnnnnttcatgttggcaccgctcttacctctttttaaagcattcttcctnnnnnnnnnnnnngacactctctttgatgttaactgaattcttaaaataaaggaaatgaaagcaagagcagaaagtaccaccttgttctgaaactttatagcctctttgttccacctcagattattctaatacccagggaggaatcttcttgccatgagttgagaatcatttgtccattatatcccagaaaccaaatcagtattttcttacagtatccaaatgagtaccattttttaatataccatttcaaaacctactaaaggcattgatttcactgcttatcaccaaagtcctggaaaattttcatgcaaa

SEQ ID NO: 35355 - DNA, 2174 bp, Macaca Mulatta
  misc_feature (1)...(2174): n = A,T,C or G
tgttctccaataaggagcgacagcacggagccgtcctgctgcacatccttggtgnnnnnnnnnnnnnnnnnnnnnnnnnnnnnnnnnnnnnnnnnnnnnnnnnnnnnnnnnnnnnnnnnnnnnnnnagagacttcatctgagtgaagatgtggctggagccaccttcatggctgcaggaagctcaacgccagagctgtttgcctctgttattgnnnnnnnnnnnnnnnnnnnnnnnnnnnnnnnnnnnnnnnnnnnnnnnnnnnnnnnnnnnnnnnnnnnnnnnnnnnnnnnnnnnnnnnnnnnnnnnnnnnnnnnnggtgggaaggcctggtgctcatcatcttgtatgtgttttatattctgatcatgaagtnnnnnnnnnnnnnnnnnnnnnnnnnnnnnnnnnnnnnnnnnnnnnnnnnnnnnnnnnnnnnnnnnnnnnnnnnnnnnnnnnnnnnnnnnnnnnnnnnnnnnnnnnnnnnnnnnnnnnnnnnnnnnnnnnnnnnnnnnnnnnnnnnnnnnnnnnnnnnnnnnnnnnnnnnnnnnnnnnnnnnnnnnnnnnnnnnnnnnnnnnnnnnnnnnnnnnnnnnnnnnnnnnnnnnnnnnnnnnnnnnnnnnnnnnnnnnnnnnnnnnnnnnnnnnnnnnnnnnnnnnnnnnnnnnnnnnnnnnnnnnnnnnnnnnnnnnnnnnnnnnnnnnnnnnnnnnnnnnnnnnnnnnnnnnnnnnnnnnnnnnnnnnnnnnnnnnnnnnnnnnnnnnnnnnnnnnnnnnnnnnnnnnnnnnnnnnnnnnnnnnnnnnnnnnnnnnnnnnnnnnnnnnnnnnnnnnnnnnnnnnnnnnnnnnnnnnnnnnnnnnnnnnnnnnnnnnnnnnnnnnnnnnnnnnnnnnnnnnnnnnnnnnnnnnnnnnnnnnnnnnnnnnnnnnnnnnnnnnnnnnnnnnnnnnnnnnnnnnnnnnnnnnnnnnnnnnnnnnnnnnnnnnnnnnnnnnnnnnnnnnnnnnnnnnnnnnnnnnnnnnnnnnnnnnnnnnnnnnnnnnnnnnnnnnnnnnnnnnnnnnnnnnnnnnnnnnnnnnnnnnnnnnnnnnnnnnnnnnnnnnnnnnnnnnnnnnnnnnnnnnnnnnnnnnnnnnnnnnnnnnnnnnnnnnnnnnnnnnnnnnnnnnnnnnnnnnnnnnnnnnnnnnnnnnnnnnnnnnnnnnnnnnnnnnnnnnnnnnnnnnnnnnnnnnnnnnnnnnnnnnnnnnnnnnnnnnnnnnnnnnnnnnnnnnnnnnnnnnnnnnnnnnnnnnnnnnnnnnnnnnnnnnnnnnnnnnnnnnnnnnnnnnnnnnnnnnnnnnnnnnnnnnnnnnnnnnnnnnnnnnnnnnnnnnnnnnnnnnnnnnnnnnnnnnnnnnnnnnnnnnnnnnnnnnnnnnnnnnnnnnnnnnnnnnnnnnnnnnnnnnnnnnnnnnnnnnnnnnnnnnnnnnnnnnnnnnnnnnnnnnnnnnnnnnnnnnnnnnaatcacaccttcccccatccctcccagagcattactgggattctgaacagtgtatgggagccattttgcctgtgctttcctgaaatcctacctttggccgcctccctcatctcagatgcttcctcaggctgatctgagacctgccccagcctctgtgagtgtccttacacctactcgtgcggcagccctcctgtccctgtggcagagcctccccaagacaccagctggtggaaggcactgcccccagcctgctccctttctccctttctcctggtacccgcttagagttctgtatcccaaaagaaagcccacgatggactctgattgtgttttagtcaatgaaacaagtcatgtaactcaggaggggcagaacaactccaagccttcaggaccccagcatctgccccagccccagacacacacacttggaacaccttggccttggctcagctgaatgcgggacatgggaacacttgaatattcaagtcccccaggacctcattcatgtccctcctgaccactccctttcatacactactcccagcccagaacagtttggttagaccgtgtcagaagcatccagtagttagccacttattgaaaccaacagccaattaggggtgattacctggtaacagtcagatgatcataagcatcacgaaataatacacagtttggccact

SEQ ID NO: 35356 - DNA, 2861 bp, Macaca Mulatta
  misc_feature (1)...(2861): n = A,T,C or G
gtattcgccaactacagctcatcctgttcaaggtggccctgatgctgggagttgaaatccatgtgaatgtggagttcgtgaaggttctagagcctcctgaagatcaagaaaatcaannnnnnnnnnnnnnnnnnnnnnnnnnnnnnnnnnnnnnnnnnnnnnnnnnnnnnnnnnnnnnnnnnnnnnnnnnnnnnnnnnnnnnnnnnnnnnnnnnnnnnnnnnnnnnnnnnnnnnnnnnnnnnnnnnnnnnnnnnnnnnnnnnnnnnnnnnnnnnnnnnnnnnnnnnnnnnnnnnnnnnnnnnnnnnnnnnnnnnnnnnnnnnnnnnnnnnnnnnnnnnnnnnnnnnnnnnnnnnnnnnnnnnnnnnnnnnncaggcatagatcttgagaacattgtttactacaaggactgcacccactattttgtcatgacagccaagaagcagagcctgctggacaaaggtgtcatcattaacnnnnnnnnnnnnnnnnnnnnnnnnnnnnnnnnnnnnnnnnnnnnnnnnnnnnnnnnnnnnnnnnnnnnnnnnnnnnnnnnnnnnnnnnnnnnnnnnnnnnnnnnnnnnnnnnnnnnnnnnnnnnnnnnnnnnnnnnnnnnnnnnnnnnnnnnnnnnnnnnnnnnnnnnnnnnnnnnnnnnnnnnnnnnnnnnnnnnnnnnnnnnnnnnnnnnnnnnnnnnnnnnnnnnnnnnnnnnnnnnnnnnnnnnnnnnnnnnnnnnnnnnnnnnnnnnnnnnnnnnnnnnnnnnnnnnnnnnnnnnnnnnnnnnnnnnnnnnnnnnnnnnnnnnnnnnnnnnnnnnnnnnnnnnnnnnnnnnnnnnnnnnnnnnnnnnnnnnnnnnnnnnnnnnnnnnnnnnnnnnnnnnnnnnnnnnnnnnnnnnnnnnnnnnnnnnnnnnnnnnnnnnnnnnnnnnnnnnnnnnnnnnnnnnnnnnnnnnnnnnnnnnnnnnnnnnnnnnnnnnnnnnnnnnnnnnnnnnnnnnnnnnnnnnnnnnnnnnnnnnnnnnnnnnnnnnnnnnnnnnnnnnnnnnnnnnnnnnnnnnnnnnnnnnnnnnnnnnnnnnnnnnnnnnnnnnnnnnnnnnnnnnnnnnnnnnnnnnnnnnnnnnnnnnnnnnnnnnnnnnnnnnnnnnnnnnnnnnnnnnnnnnnnnnnnnnnnnnnnnnnnnnnnnnnnnnnnnnnnnnnnnnnnnnnnnnnnnnnnnnnnnnnnnnnnnnnnnnnnnnnnnnnnnnnnnnnnnnnnnnnnnnnnnnnnnnnnnnnnnnnnnnnnnnnnnnnnnnnnnnnnnnnnnnnnnnnnnnnnnnnnnnnnnnnnnnnnnnnnnnnnnnnnnnnnnnnnnnnnnnnnnnnnnnnnnnnnnnnnnnnnnnnnnnnnnnnnnnnnnnnnnnnnnnnnnnnnnnnnnnnnnnnnnnnnnnnnnnnnnnnnnnnnnnnnnnnnnnnnnnnnnnnnnnnnnnnnnnnnnnnnnnnnnnnnnnnnnnnnnnnnnnnnnnnnnnnnnnnnnnnnnnnnnnnnnnnnnnnnnnnnnnnnnnnnnnnnnnnnnnnnnnnnnnnnnnnnnnnnnnnnnnnnnnnnnnnnnnnnnnnnnnnnnnnnnnnnnnnnnnnnnnnnnnnnnnnnnnnnnnnnnnnnnnnnnnnnnnnnnnnnnnnnnnnnnnnnnnnnnnnnnnnnnnnnnnnnnnnnnnnnnnnnnnnnnnnnnnnnnnnnnnnnnnnnnnnnnnnnnnnnnnnnnnnnnnnnnnnnnnnnnnnnnnnnnnnnnnnnnnnnnnnnnnnnnnnnnnnnnnnnnnnnnnnnnnnnnnnnnnnnnnnnnnnnnnnnnnnnnnnnnnnnnnnnnnnnnnnnnnnnnnnnnnnnnnnnnnnnnnnnnnnnnnnnnnnnnnnnnnnnnnnnnnnnnnnnnnnnnnnnnnnnnnnnnnnnnnnnnnnnnnnnnnnnnnnnnnnnnnnnnnnnnnnnnnnnnnnnnnnnnnnnnnnnnnnnnnnnnnnnnnnnnnnnnnnnnnnnnnnnnnnnnnnnnnnnnnnnnnnnnnnnnnnnnnnnnnnnnnnnnnnnnnnnnnnnnnnnnnnnnnnnnnnnnnnnnnnnnnnnnnnnnnnnnnnnnnnnnnnnnnnnnnnnnnnnnnnnnnnnnnnnnnnnnnnnnnnnnnnnnnnnnnnnnnnnnnnnnnnnnnnnnnnnnnnnnnnnnnnnnnnnnnnnnnnnnnnnnnnnnnnnnnnnnnnnnnnnnnnnnnnnnnnnnnnnnnnnnnnnnnnnnnnnnnnnnnnnnnnnnnnnnnnnnnnnnnnnnnnnnnnnnnnnnnnnaaaggaaaagaagtcaccttcagggttccattttcatcccagccatttgagaacagtgcgtcctcannnnnnnnnnnnnnnnnnnnnnnnnnnnnnnnnnnnnnnnnnnnnnnnnnnnnnnnnnnnnnnnnnnnnnnnnnnnnnnnnnnnnnnnnnnnnnnnnnnnnnnnnnnnnnnnnnnnnnnnnnnnnnnnnnnnnnnnnnnnnnnnnnnnnnnnnnnnnnnnnnnnnnnnnnnnnnnnnnnnnnnnnnnnnnnnnnnnnnnnnnnnnnnnnnnnnnnnnnnnnnnnnnnnnnnnnnnnnnnnnnnnnnnnnnnnnnnnnnnnnnnnnnnnnnnnnnnnnnnnnnnnnnnnnnnnnnnnnnnnnnnnnnnnnnnnnnnnnnnnnnnnnnnnnnnnnnnnnnnnnnnnnnnnnnnnnnnnnnnnnnnnnnnnnnnnnnnnnnnnnnaggaggaggcgacatggcaagagcaggaagcccctctgcgagacactcccactgaaagttcttgcgcagtggccgccattggcaccctggaaggcagcgcccca

SEQ ID NO: 35357 - DNA, 176 bp, Macaca Mulatta
cagaggcatgccaggtggaagtgaggctgctgctggcctacaactccagcgctcgcattccaaaatgcccctggatggagggtggtgaggtgtcaccacaggtggaaaccagcatcgagggcaccattcccttcagcaagcctgtaaaagtttatataatgcccaaacctgcacgg

SEQ ID NO: 35358 - DNA, 246 bp, Macaca Mulatta
  misc_feature (1)...(246): n = A,T,C or G
atgggcgggaaacagaagtgcttttggaggagcctttgcctctggaaacagcacgagagtcaccgagcttcaagctggagccaatggagactgagcgaagccctggccccaggctgcaggagctgctaggccccagcccccaaagggacccccaggctgtaaaggagagggngcattatctgctccctggctttctctttttcctcctgaagggaacatggaagacaaggagatgactggtcccca

SEQ ID NO: 35359 - DNA, 1497 bp, Macaca Mulatta
  misc_feature (1)...(1497): n = A,T,C or G
ttacggggacttcaggcaaggaccaagaccgttgacccgtaaaaaatacgaagcggatcgtcaagctcttcaatggctccgagtcgagctccacggacaacgccaaatttaaattctgggtcaaatcgaagggcttccagctgggccagccggacgaggtccgcgggggaggcggcggcgccaagcaagtgctctacgtgcctgtcaagaccacggnggatggcgtaggggtagatgagaagctgtctttacgacgggtagctgtggttgaagatttctttgacattatttattcgatgcatgtggaaacggggccaaatggagaacaaattcggaaacatgctggacaaaagagaacttacaaagcannnnnnnnnnnnnnnnnnnnnnnnnnnnnnnnnnnnnnnnnnnnnnnnnnnnnnnnnnnnnnnnnnnnnnnnnnnnnnnnnnnnnnnnnnnnnnnnnnnnnnnnnnnnnnnnnnnnnnnnnnnnnnnnnnnnnnnnnnnnnnnnnnnnnnnnnnnnnnnnnnnnnnnnnnnnnnnnnnnnnnnnnnnnnnnnnnnnnnnnnnnnnnnnnnnnnnnnnnnnnnnnnnnnnnnnnnnnnnnnnnnnnnnnnnnnnnnnnnnnnnnnnnnnnnnnnnnnnnnnnnnnnnnnnnnnnnnnnnnnnnnnnnnnnnnnnnnnnnnnnnnnnnnnnnnnnnnnnnnnnnnnnnnnnnnnnnnnnnnnnnnnnnnnnnnnnnnnnnnnnnnnnnnnnnnnnnnnnnnnnnnnnnnnnnnnnnnnnnnnnnnnnnnnnnnnnnnnnnnnnnnnnnnnnnnnnnnnnnnnnnnnnnnnnnnnnnnnnnnnnnnnnnnnnnnnnnnnnnnnnnnnnnnnnnnnnnnnnnnnnnnnnnnnnnnnnnnnnnnnnnnnnnnnnnnnnnnnnnnnnnnnnnnnnnnnnnnnnnnnnnnnnnnnnnnnnnnnnnnnnnnnnnnnnnnnnnnnnnnnnnnnnnnnnnnnnnnnnnnnnnnnnnnnnnnnnnnnnnnnnnnnnnnnnnnnnnnnnnnnnnnnnnnnnnnnnnnnnnnnnnnnnnnnnnnnnnnnnnnnnnnnnnnnnnnnnnnnnnnnnnnnnnnnnnnnnnnnnnnnnnnnnnnnnnnnnnnnnnnnnnnnnnnnnnnnnnnnnnnnnnnnnnnnnnnnnnnnnnnnnnnnnnnnnnnnnnnnnnnnnnnnnnnnnnnnnnnnnnnnnnnnnnnnnnnnnnnnnnnnnnnnnnnnnnnnnnnnnnnnnnnnnnnnnnnnnnnnnnnnnnnnnnnnnnnnnnnnnnnnnnnnnnnnnnnnnnnnnnnnnnnnnnnnnnnnnnnnnnnnnnnnnnnnnnnnnnnnnnnnnnnnnnnnnnnnngtctcgacctattccttcccaccttacttcagcagtggcagagagtatcttggcttcagcttgtgagagtgagagtagaaatgccgccaagaggatgcgtctggagagacagcagg

SEQ ID NO: 35360 - DNA, 345 bp, Macaca Mulatta
  misc_feature (1)...(345): n = A,T,C or G
gcccgaacggcgagtgcgggcgcggcgagccgcagtgcagcccctttgggcccgagggcccggcgcgggggcccaaggtgtcgttctcgtgccgcnnnnnnnnnnnnnnnnnnnnnnnnnnnnnnnnnnnnnnnnnnnnnnnnnnnnnnnnnnnnnnnngcccggcgggggagccgcgcggcagccaggccagcttcatgcagcgccagttcggcgcgctcctgcagccgggcgtcaacaagttctcgctgcggatgttcggcagccagaaggccgtggaacgcgagcaggagcgcgtcaagtcggcgggggcctggatcatccacccgtacagcgacttcaggt

SEQ ID NO: 35361 - DNA, 858 bp, Macaca Mulatta
ggagaaatagctaatttatttccccaggtgtgtgctttaggtgtgggctgaccaggcttcttcctacatcttcttcccagtaaatttcccctctggcttgacagcatgaggtgctgtgcatttattcagctcccccaggctgttctccggacgtcacagtctggtgcttgggaaagtcaggcagggttaaagacaggaccaggctgccacccctgtccagattattgactgctttgcctctaccggttggcagacagcagtttgttctacatggctttgataattgtttgaggggaggagatggaaagaatgtagagtctccctatgatgggttttggggaaatgtggagaagagtgccctgctttgcaaacatcaacctggcaaaaatgcaacaaagcaattttccacgcagttctttccatgggcataggtaagctgtgccttcagctgttgcagatgaaatgttctgttcaccctgcgttacatgtgtttcttcatccagcagtgttgctcagctcctgcctctgtgccggggcagcgttttcatatccacgatcaattccctctctcagcacagcctggggaagggggtcattgttctcatccatcggggatctcagaggctcagagactgcaagctgcttgcccaagtcacacagctagtgaagaccagggcaagtttcacctggtttgtgactccaagctccatattctctccactaaccccaatacaacctttggggccaccaaaaagccctcccccaaaaggaaaggaaattggggactttttctttttaaggcttgcacattctgggaatttaagggtcaaacgaaattctcaaatttccccccgaaaa

SEQ ID NO: 35362 - DNA, 844 bp, Macaca Mulatta
tgggccacttcgaccttctcaactacttcgccattgcagagaatgagagcaaagcgcgagtccgcttcaatttgatggagaagatgcttcagccttgtggaccgccagccgacaagcccgaggagaactgagactctgccttaccaccactgtgcggggcacctctcccagtgttcctcaggttggccaatcccttcgactatttctgcctccaaaggaccggctctccatggctcctgcgtctggtacttccgcgtacagaagtgcttgcccggggaatcccgcctgacctgccttcatgtgaaccctttggaatagcactgggagaccagcagaacccctgagaactgtgctggtgaagagggcctagagccggcaagcgtttgagaagagggcgtggcgctggaatgagatgggatttggcgtctcatttttggctaattgattgtcattggctttttccataaagtttagaaatcattaagtctcttggtgtgaacttcctgtgttagggtggagggctcctgaaagacccgagcgggaaatgggtcgggggagggagtgcatgccagtgtccatgatcaggtacttaaatccaccctgtctaccattataattaattccccgactgccacttctcccaagagcgttattttcaggcccacaatgccttcagtattgaagtttgtagttattgtatcccattttctttttctcccgttttaaaagtctttgcagtctttgctgtcattgtcctccttagcctctttaaaatgcatcctttctttttcttggggaatttgtggccatgtctcccagaatgacaagctggcaagtgagttca

SEQ ID NO: 35363 - DNA, 277 bp, Macaca Mulatta
  misc_feature (1)...(277): n = A,T,C or G
gcattttagacttgcantttgcaagattctgtcttctaaagacattttcctagcatttcactgcagagaactgttaatcacaatcccctcaaaagggaactaaggattaatgtacacattttttttagtcactaatatgcttctgttttaaatacagttcaactcctgttgcaatgttgaattaaatgttcgttttaaagtgaaccaatgtgtttatcaatgtcttgacatcttttaattaacatctcagtagtggaaattgggtaggctttttcta

SEQ ID NO: 35364 - DNA, 1372 bp, Macaca Mulatta
  misc_feature (1)...(1372): n = A,T,C or G
gttcaaatgaggctgctgcggacggcctgaggatagaccccaagccctggacctgctgagcgtggcactgaggcagcggctgacgccactgtgagggaaagcaggttgtgagcagccccgcaggacccctggccagtcctggccccagcctctgccggagccctctgtggaggcagagccagtggagcccagtgaggcagggctgcttggcagccactggcctgcaactcaggaccccctccagaggccatggacaggctgccccgctgacggccagggtgaagcatgtgaggagccgccccggagccaagcaggagggaagaggnnnnnnnnnnnnnnnnnnnnnnnnnnnnnnnnnnnnnnnnnnnnnnnnnnnnnnnnnnnnnnnnnnnnnnnnnnnnnnnnnnnnnnnnnnnnnnnnnnnnnnnnnnnnnnnnnnnnnnnnnnnnnnnnnnnnnnnnnnnnnnnnnnnnnnnnnnnnnnnnnnnnnnnnnnnnnnnnnnnnnnnnnnnnnnnnnnnnnnnnnnnnnnnnnnnnnnnnnnnnnnnnnnnnnnnnnnnnnnnnnnnnnnnnnnnnnnnnnnnnnnnnnnnnnnnnnnnnnnnnnnnnnnnnnnnnnnnnnnnnnnnnnnnnnnnnnnnnnnnnnnnnnnnnnnnnnnnnnnnnnnnnnnnnnnnnnnnnnnnnnnnnnnnnnnnnnnnnnnnnnnnnnnnnnnnnnnnnnnnnnnnnnnnnnnnnnnnnnnnnnnnnnnnnnnnnnnnnnnnnnnnnnnnnnnnnnnnnnnnnnnnnnnnnnnnnnnnnnnnnnnnnnnnnnnnnnnnnnnnnnnnnnnnnnnnnnnnnnnnnnnnnnnnnnnnnnnnnnnnnnnnnnnnnnnnnnnnnnnnnnnnnnnnnnnnnnnnnnnnnnnnnnnnnnnnnnnnnnnnnnnnnnnnnnnnnnnnnnnnnnnnnnnnnnnnnnnnnnnnnnnnnnnnnnnnnnnnnnnnnnnnnnnnnnnnnnnnnnnnnnnnnnnnnnnnnnnnnnnnnnnnnnnnnnnnnnnnnnnnnnnnnnnnnnnnnnnnnnnnnnnnnnnnnnnnnnnnnnnnnnnnnnnnnnnnnnnnnnnnnnnnnnnnnnnnnnnnnnnnnnnnnnnnnnnnnnnnnnnnnnnnnnnnnnnnnnnnnnnnnnnnnnnnnnnnnnnnnnnnnnnnnggcccatggagagactgcctgcacgccctggaggatggccacgacaccagttccatctacctggtgaagccggagaaacaccaccgcctcatgcaggtgtggtgcgaccagagacacgaccccgggggctggactgtcatccagagacgcctggatggctctgttaacttcttcaggaactgg

SEQ ID NO: 35365 - DNA, 259 bp, Macaca Mulatta
gccagaggggctaggatgagagatggagggtgtgatggtgggtgctgggagttgcagccgaccttggggctggtggctgggggagtggggagcctgggaaaggccaggatgtggatgggctggtatggcattgagcctgaaatggtccaacttggggtccccagtgcctaggaaagttgtccccttgaatattagtgtgaaggtgaaggaggaagcagatgcctgttcatatggaaacaaagacctggctgtgaagagg

SEQ ID NO: 35366 - DNA, 647 bp, Macaca Mulatta
cgtgacccagtggctgatggtgctgaaaatctccttgcccgtgattctcatggacgagacgctcaagtttgtggcccgcaactacctggaacctggtaaagagtgtgtgcagcctgccaccaaatcctgctcgttctcggcatgcaccgatgggatttcctggccgtttgtgctgctcataatgcccctggtgatctgggtctatagcacagacactaactttagtgatatgttctggtcttgactgacagttttccataaagaagatgtttaacttaatcaattaattttttttattgtttaaagcaactgtctatttctgctgaattttcacatgaacatactggctggtgatggaggtttcatactctagattttgttttgctttttctgactccagtggggcaagattttccttttttatacacataattaaagtgtccattgacatgtacagagaactaacactattttatgcaaatattttttttgtagatgaaaaagcatgtacagtgttctgtttaatactcatccttgtataaaaaaaaaatagttgagccagcagacattgtcagcaaattaattggcagcagattttaggaaatgaatgtgtgtggtttttttcctaaaactaaatagcatgtatt

SEQ ID NO: 35367 - DNA, 783 bp, Macaca Mulatta
ggataaaaaggaagaagatttagaagacaaaaacaattttggtgctgaacctccacatcagaatggtgaatgttaccctaatgagaaaaattctgttaatatggacttggactagataacattaaattggcttattccttcaattaataaaatatttttgccatagtatgtgactctacataacatactgaaactatttatattttcttttttaaggatgtttagaaattttgtgtattatatggaaaaagacaaaaagcttaagtctgtagtctttatgatcctaaaagggaaaattgccttggtaactttcagattcctgtggaattgtgaattcatactaagctttctgtgcagtctcaccatttgcatcactgaggatgaaactgacttttgtcttttggagaaaaaaactgtactgctcgttcaagagggctgtgattaaaatctttaagcatttgttcctgccaaggtagttttcttgcattttgctctccattcagcatgtgtgtggggtgtggatggttaataacaagacgaagtctgacttccataggggctttctaaaaccagtttctggcccagtagaaaaggagtttttgccttgtgggatgaaaggaatcggtggagtaaaagcaaagggctatgtcagagtggtggtaagcgagcattgcagaagacaaaaaaccctgtgaagagtttggtcgtgcgtccggcgatgaccggggaaaaatgtgggttaatgggggaaaaaacgggtgagagactgggggaaaacgaccg

SEQ ID NO: 35368 - DNA, 651 bp, Macaca Mulatta
  misc_feature (1)...(651): n = A,T,C or G
gtctgggttggactggcggccgtggagtttgtgacttttatgtgacacccctcgagtcacttcccttccactccagctggagcgcctgcctggctttgggttcgttctgcagccttcgtcccgctcctagcctcagggccggactnnnnnnnnnnnnnnnnnnnnnnnnnnnnnnnnnnnnnnnnnnnnnnnnnnnnnnnnnnnnnnnnnnnnnaaacccggccagagctccccagcagcccgagtcatgaacaccgaaatgtatcagacccccatggaggtggcggtctatcagctgcacaatttctccatctccttcttctcttccctgcttggaggggatgtggtttccgttaagctggacaacagnnnnnnnnnnnnnnnnnnnnnnnnnnnnnnnnnnnnnnnnnnnnnnnnnnngatctggtgaagaatcatctgatgtatgctgtgagagaggaggtggagatcctgaaggagcagatccgagagctggtggagaagaactcccagctagagcgtgagaacaccctgttgaagaccctggcaagcccagagcagctggagaagttccagtcctgtctgagccctgaagagccagctcccgaatccccacaagtgcccgaggctcctggtggttctgcggtgtaa

SEQ ID NO: 35369 - DNA, 701 bp, Macaca Mulatta
  misc_feature (1)...(701): n = A,T,C or G
tatatgccacaggaaatgctacacctacaggtggagttggagcagtagctctgctaattgggcctaatgctcctttaatttttgaacgaggnnnnnnnnnnnnnnnnnnnnnnnnnnnnnnnnnnnnnnnnnnnnnnnnnnnnnnnnnnnnnnnnnnnnnnnnnnnnnnnnnnnnnnnnnnnnnnnnnnnnnnnnnnnnnnnnnnnnnnnnnnnnnnnnnnnnnnnnnnnnnnnnnnnnnnnnnnnnnnnnnnnnnnnnnnnnnnnnnnnnnnnnnnnnnnnnnnnnnnnnnnnnnnnnnnnnnnnnnnnnnnnnnnnnnnnnnnnnnnnnnnnnnnnnnnnnnnnnnnnnnnnnnnnnnnnnnnnnnnnnnnnnnnnnnnnnnnnnnnnnnnnnnnnnnnnnnnnnnnnnnnnnnnnnnnnnnnnnnnnnnnnnnnnnnnnnnnnnnnnnnnnnnnnnnnnnnnnnnnnnnnnnnnnnnnnnnnnnnnnnnnnnnngtcagaaaacaaaggcatctttacttgtctcaaatcaaaatggaaatatgtacacatcttcagtatatggttcccttgcatctgttctagcacagtangtactcacctcagcaattagcagggaagagaattggagtgttttcttatggttctggtttggctgccactctgtactctcttaaagtcacgcaagatgctacaccn

SEQ ID NO: 35370 - DNA, 118 bp, Macaca Mulatta
gttctgttgcttctaggatggagctggttgttattcaccaactaagggaacagttagagcagagatgaagaaattatgaactgttatccttattctgagccttctactcctaaccctt

SEQ ID NO: 35371 - DNA, 1170 bp, Macaca Mulatta
  misc_feature (1)...(1170): n = A,T,C or G
agcatgactatatgaaggaagaggagggttttcctgaagatgaggcgactgaatcggaaaaaaactttaagtttggtaaaagagttggatgcctttccaaaggttcctgagagctatgtagagacttcagccagtggaggtacannnnnnnnnnnnnnnnnnnnnnnnnnnnnnnnnnnnnnnnnnnnnnnnnnnnnnnnnnnnnnnnnnnnnnnnnnnnnnnnnnnnnnnnnnnnnnnnnnnnnnnnnnnnnnnnnnnnnnnnnnnnnnnnnnnnnnnnnnnnnnnnnnnnnnnnnnnnnnnnnnnnnnnnnnnnnnnnnnnnnnnnnnnnnnnnnnnnnnnnnnnnnnnnnnnnnnnnnnnnnnnnnnnnnnnnnnnnnnnnnnnnnnnnnnnnnnnnnnnnnnnnnnnnnnnnnnnnnnnnnnnnnnnnnnnnnnnnnnnnnnnnnnnnnnnnnnnnnnnnnnnnnnnnnnnnnnnnnnnnnnnnnnnnnnnnnnnnnnnnnnnnnnnnnnnnnnnnnnnnnnnnnnnnnnnnnnnnnnnnnnnnnnnnnnnnnnnnnnnnnnnnnnnnnnnnnnnnnnnnnnnnnnnnnnnnnnnnnnnnnnnnnnnnnnnnnnnnnnnnnnnnnnnnnnnnnnnnnnnnnnnnnnnnnnnnnnnnnnnnnncttacaacttttctcatagaatagatcatttgtcttttggagagcttgttccagcaattattaatcctttagatggaactgaaaaaattgctatagatnnnnnnnnnnnnnnnnnnnnnnnnnnnnnnnnnnnnnnnnnnnnnnnnnnnnnnnnnnnnnnnnnnnnnnnnnnnnnnnnnnnnnnnnnnnnnnnnnnnnnnnnnnnnnnnnnnnnnnnnnnnnnnnnnnnnnnnnnnnnnnnnnnnnnnnnnnnnnnnnnnnnnnnnnnnnnnnnnnnnnnnnnnnnnnnnnnnnnnnnnnnnnnnnnnnnnnnnnnnnnnnnnnnnnnnnnnnnnnnnnnnnnnnnnnnnnnnnnacaggcatgttacatggaaaagggaaatttatagttgaaataatttgctgtcgtttcagatatggatcctataaacctgtcaattctgngttccttttgaggatggccacacagacaaccacttactcttttagaaaataatacacatt

SEQ ID NO: 35372 - DNA, 773 bp, Macaca Mulatta
cttctgaagagaggaaagcaaattagccacagaagctgtgggggtccctggccttggttgctgctcctgctgttttttgaccacaagctgacatggacagctcccctcctgacacgtcactgcaggagaggagtttgtatggatgctcagtggtctgtgcatcttgtcgtcgctaaaaaaggggcttccttcattagcgaattggaccacagatgtatcctatggcctcttgatttccttctttgctttcttgtcacagacctgacaagtttcttcagtgtgtgaaaaatcctgaggattcttcttgcctatctgggatctgagccagttgccatggtggttttagctccttgactccttgtggtttatgtcaacaatacatgacttggcctacttgctggtgcagagctgaagattttggagggtcctccacaataaggtcaatgccagagatggaagcctttttccccaaagtcttaaaataacttgtatcatcagcatagcttttattgtgatctatcaatcgtcaagacaaattattgtataagattagaatgaaaattgtgtattaagttacttcatttgattctcatgtgatccttttatgttgtttatatgttggtaacatcctttctactgaaaaatgaccacaccaaacctctcttactagaacagtcaagtgaagaataacgaatgctcaagtttttcagaaagcattacatttccaaatgaatgaccttgttgcatgatgtatttttgtacccttcctacag

SEQ ID NO: 35373 - DNA, 356 bp, Macaca Mulatta
  misc_feature (1)...(356): n = A,T,C or G
ngaaatgcagtgnaggagggactaccaagtcgaccgagaaattgtcaacattatacaggctngactcaaggcctgtcagcagagggaaggacncaactacaagcaganctgcagcaaggaagtggagcagttcacccaggtggccaaggcctaccaggaccgctatcaggacctgggggcccactattctgccaggaagtgcctggccaaacaaaaggagaggatgctggaagagagaaaagctgcaagagaggccgccgctgccacctcctgaggcatctgtgggtgcgcctgctgtgtggctctgtatgactgttgctgaaataaagtcctgcaacctgcctgtgaaaaaaaaa

SEQ ID NO: 35374 - DNA, 781 bp, Macaca Mulatta
gacggatccagagatgaatggactgtggttccgcctcactcagctcctttctgctcaattcaattcctcagaaattacatttataccaacaaatgcccagagttggcaggcaaagaatgtttgtggcttggctgtcctggctgagccctggctgtgctctctcagggagggtcaggcagaagagaagaagacaaggtccctccctgcctgccaacgcccccaacactctcctcttgcctccctgcagaaccctgacctcagccgaccccttctaccgggacgcatctcacagcagccgcttcatggcacacagctgagccctgagcccttggtaaggggctggggactcccacactcagctgctcccggtctgtgggcagccattgtgggccagccctgcctccccagccctgggttaagccagtcctgcctggggacccccgcttccgagtggggggtgcgagatcagggggcctctcagaacctcttctgtgccaggcaagcacacagaaacaccccagagccccttgctcaggcttcgcctctgcttctcctccacaggtttgtcaaccctggggcacaggagccaggctattgtctgtacccccactcgatcccccagggtgacacccccgcccggctactttcctaatgaaataaacagcattgaagcagagaagtgtgacatcactatcagggtggctggaaaaaaggaggggtcagctggggcagtgggtgcaggggtggaggaaatgggccagattggagtcggaagggctcg

SEQ ID NO: 35375 - DNA, 445 bp, Macaca Mulatta
  misc_feature (1)...(445): n = A,T,C or G
gcagccccagaggtccggggcgcgcagccgggtcccctcgaggnnnnnnnnnnnnnnnnnnnnnnnnnnnnnnnnnnnnnnnnnnnnnngcgcagtgggctgcaaactttcgcggcgcgagtccgccgaggcagcgcgctgactcgggctcggtttggctctgcgctgctccggacggccgtgaccgctgtccgggggctcgggccgccggtacccacggaccacgcgcccgnnnnnnnnnnngctaagcccctcgccccgcgcggaacccggtatccagcgccctgctgccagggctctccccgcgcgccctactgccgcgaggtcagtccgcaacctccagtgcgcccgcgctcgccttcctcctcctggactttggccctttggtgccctcaccacgccatggctcgtgtccccactcggaccagccagggccccggacccc

SEQ ID NO: 35376 - DNA, 245 bp, Macaca Mulatta
  misc_feature (1)...(245): n = A,T,C or G
gatgtgcagcccccagagggccggagccgagatggcctgctaactgtgaacctacgggaaggcggccgcctgcacctctgtgcggagaccagggatgatgccctnnnnnnnnnnnnnnnnnnnnnnnnnnnnnnnnnnnnnnnggtgcgtgtctacagcccgtaccaagactactacgaggtggtgccccccaacgcacacgaagccacgtatgtccgcagctactacggaccgccctacgcagg

SEQ ID NO: 35377 - DNA, 222 bp, Macaca Mulatta
gccgcatggtaactcgggcgctgggcgcactgtcctatctgctggttttccacgctggttttagctcccggcgtccgcaaaatgaaaattgaggaggtgaagagcaccacgaaaacgcagcgcatcgcttcccacagccacgtgaaagggctggggctggacgagagcggcttggccaagcaggcggcctcagggctcgtgggccaggagaacgcgcgagag

SEQ ID NO: 35378 - DNA, 439 bp, Macaca Mulatta
  misc_feature (1)...(439): n = A,T,C or G
gccctgcctccctggaggtagctgactcactatccttccagcccaaatctagagcattgagcactttatcttcacgactcagtgaagtttctccagtccttagtcctttcttttcacccaccttcctcagtttgctcactcaccccaggcccagcccttcagacctatagacaggcagcctcctcggccgtggagtccagcagtcactctgtgctctcctggcgctcctcccctaagttattgctgttccctggctgtgtgtgctcatcctcaccttcattgactcagacctggggccaggggtggtggagggtgggaagagtcatgtttttttttctcctctttgattttgtttttctgtctcccttccaacctgtccccttccccccaccnnnnnnnnnnnnnacaaacacaaataaaatatctgagcggaactgtg

SEQ ID NO: 35379 - DNA, 3494 bp, Macaca Mulatta
  misc_feature (1)...(3494): n = A,T,C or G
tcttttctcctgcctgaagatcaacagacctttctctcgctacaaaaagaaacagcctctggacctcagagaaactgaaagacagtggttactcagaaggcggagatctattctgtttcctaatggagtaaaaatctgcccagatgaaagtgttacagaggctgtggcaaatcatgtgaagtattttaaagtccgagnnnnnnnnnnnnnnnnnnnnnnnnnnnnnnnnnnnnnnnnnnnnnnnnnnnnnnnnnnnnnnnnnnnnnnnnnnnnnnnnnnnnnnnnnnnnnnnnnnnnnnnnnnnnnnnnnnnnnnnnnnnnnnnnnnnnnnnnnnnnnnnnnnnnnnnnnnnnnnnnnnnnngaaactgacttatgcaaaggaaactgtaagcagnnnnnnnnnnnnnnnnnnnnnnnnnnnnnnnnnnnnnnnnnnnnnnnnnnnnnnnnnnnnnnnnnnnnnnnnnnnnnnnnnnnnnnnnnnnnnnnnnnnnnnnnnnnnnnnnnnnnnnnnnnnnnnnnnnnnnnnnnnnnnnnnnnnnnnnnnnnnnnnnnnnnnnnnnnnnnnnnnnnnnnnnnnnnnnnnnnnnnnnnnnnnnnnnnnnnnnnnnnnnnnnnnnnnnnnnnnnnnnnnnnnnnnnnnnnnnnnnnnnnnnnnnnnnnnnnnnnnnnnnnnnnnnnnnnnnnnnnnnnnnnnnnnnnnnnnnnnnnnnnnnnnnnnnnnnnnnnnnnnnnnnnnnnnnnnnnnnnnnnnnnnnnnnnnnnnnnnnnnnnnnnnnnnnnnnnnnnnnnnnnnnnnnnnnnnnnnnnnnnnnnnnnnnnnnnnnnnnnnnnnnnnnnnnnnnnnnnnnnnnnnnnnnnnnnnnnnnnnnnnnnnnnnnnnnnnnnnnnnnnnnnnnnnnnnnnnnnnnnnnnnnnnnnnnnnnnnnnnnnnnnnnnnnnnnnnnnnnnnnnnnnnnnnnnnnnnnnnnnnnnnnnnnnnnnnnnnnnnnnnnnnnnnnnnnnnnnnnnnnnnnnnnnnnnnnnnnnnnnnnnnnnnnnnnnnnnnnnnnnnnnnnnnnnnnnnnnnnnnnnnnnnnnnnnnnnnnnnnnnnnnnnnnnnnnnnnnnnnnnnnnnnnnnnnnnnnnnnnnnnnnnnnnnnnnnnnnnnnnnnnnnnnnnnnnnnnnnnnnnnnnnnnnnnnnnnnnnnnnnnnnnnnnnnnnnnnnnnnnnnnnnnnnnnnnnnnnnnnnnnnnnnnnnnnnnnnnnnnnnnnnnnnnnnnnnnnnnnnnnnnnnnnnnnnnnnnnnnnnnnnnnnnnnnnnnnnnnnnnnnnnnnnnnnnnnnnnnnnnnnnnnnnnnnnnnnnnnnnnnnnnnnnnnnnnnnnnnnnnnnnnnnnnnnnnnnnnnnnnnnnnnnnnnnnnnnnnnnnnnnnnnnnnnnnnnnnnnnnnnnnnnnnnnnnnnnnnnnnnnnnnnnnnnnnnnnnnnnnnnnnnnnnnnnnnnnnnnnnnnnnnnnnnnnnnnnnnnnnnnnnnnnnnnnnnnnnnnnnnnnnnnnnnnnnnnnnnnnnnnnnnnnnnnnnnnnnnnnnnnnnnnnnnnnnnnnnnnnnnnnnnnnnnnnnnnnnnnnnnnnnnnnnnnnnnnnnnnnnnnnnnnnnnnnnnnnnnnnnnnnnnnnnnnnnnnnnnnnnnnnnnnnnnnnnnnnnnnnnnnnnnnnnnnnnnnnnnnnnnnnnnnnnnnnnnnnnnnnnnnnnnnnnnnnnnnnnnnnnnnnnnnnnnnnnnnnnnnnnnnnnnnnnnnnnnnnnnnnnnnnnnnnnnnnnnnnnnnnnnnnnnnnnnnnnnnnnnnnnnnnnnnnnnnnnnnnnnnnnnnnnnnnnnnnnnnnnnnnnnnnnnnnnnnnnnnnnnnnnnnnnnnnnnnnnnnnnnnnnnnnnnnnnnnnnnnnnnnnnnnnnnnnnnnnnnnnnnnnnnnnnnnnnnnnnnnnnnnnnnnnnnnnnnnnnnnnnnnnnnnnnnnnnnnnnnnnnnnnnnnnnnnnnnnnnnnnnnnnnnnnnnnnnnnnnnnnnnnnnnnnnnnnnnnnnnnnnnnnnnnnnnnnnnnnnnnnnnnnnnnnnnnnnnnnnnnnnnnnnnnnnnnnnnnnnnnnnnnnnnnnnnnnnnnnnnnnnnnnnnnnnnnnnnnnnnnnnnnnnnnnnnnnnnnnnnnnnnnnnnnnnnnnnnnnnnnnnnnnnnnnnnnnnnnnnnnnnnnnnnnnnnnnnnnnnnnnnnnnnnnnnnnnnnnnnnnnnnnnnnnnnnnnnnnnnnnnnnnnnnnnnnnnnnnnnnnnnnnnnnnnnnnnnnnnnnnnnnnnnnnnnnnnnnnnnnnnnnnnnnnnnnnnnnnnnnnnnnnnnnnnnnnnnnnnnnnnnnnnnnnnnnnnnnnnnnnnnnnnnnnnnnnnnnnnnnnnnnnnnnnnnnnnnnnnnnnnnnnnnnnnnnnnnnnnnnnnnnnnnnnnnnnnnnnnnnnnnnnnnnnnnnnnnnnnnnnnnnnnnnnnnnnnnnnnnnnnnnnnnnnnnnnnnnnnnnnnnnnnnnnnnnnnnnnnnnnnnnnnnnnnnnnnnnnnnnnnnnnnnnnnnnnnnnnnnnnnnnnnnnnnnnnnnnnnnnnnnnnnnnnnnnnnnnnnnnnnnnnnnnnnnnnnnnnnnnnnnnnnnnnnnnnnnnnnnnnnnnnnnnnnnnnnnnnnnnnnnnnnnnnnnnnnnnnnnnnnnnnnnnnnnnnnnnnnnnnnnnnnnnnnnnnnnnnnnnnnnnnnnnnnnnnnnnnnnnnnnnnnnnnnnnnnnnnnnnnnnnnnnnnnnnnnnnnnnnnnnnnnnnnnnnnnnnnnnnnnnnnnnnnnnnnnnnnnnnnnnnnnnnnnnnnnnnnaggtgatgaagccaacccttgcaagtttcaggcctgtaatgaattttctgagtgtctggtcaacccctggagtggagaagcaaagtgcagatgcttccctggatacctgagtgtggaagaacggccctgtcagagtctctgtgacctacagcctgacttctgcctgaacgatggaaagtgtgacattatgcctgggcacggggccatttgtaggnnnnnnnnnnnnnnnnnnnnnnnnnnnnnnnnnnnnnnnnnnnnnnnnnnnnnnnnnnnnnnnnnnnnnnnnnnnnnnnnnnnnnnnnnnnnnnnnnnnnnnnnnnnnnnnnnnnnnnnnnnnnnnnnnnnnnnnnnnnnnnnnnnnnnnnnnnnnnnnnnnnnnnnnnnnnnnnnnnnnnnnnnagtggcttcagcaggcagcctgacagcctctcatccattgagaatgctgtgaagtacaaccctgtgtataaaagtcacaggactggatgtgagaagtatgagggaccctatcctcagcatcccttctacagctctgctagtggagacatgattggtgggctgagcagagaagaaatcaggcagatgtatgagagcagtgagctttccagagag

SEQ ID NO: 35380 - DNA, 1750 bp, Macaca Mulatta
  misc_feature (1)...(1750): n = A,T,C or G
acatcagagaatgcacacaggtgagaaaccctttgcatgtcctgaatgtgggaaattctttagccataagtcaaccctctctcacatttatagaacacacacaggggagaaaccctatgaatgtcatgaatgtggaaaaatattttacaataagtcatacctaactaaacataatagaacacatacaggggagaaaccctatgaatgtaatgaatgtggaaaaaccttctaccagaagtcacaactcactcagcatcagataattcacacaggagagaaaccctataaatgtaatgaatgtggaaaagctttttaccgtaaatcagaacttgctaaacatcagagatcacatacaggggagaaaccttttgaatgcaatgaatgtgggaaagcctttagccataaatcagctctcacattacaccagagaacacatacaggggagaaaccctatcagtgtaacgcgtgtgagaaaacattttaccagaaatctgatctcactaaacatcagagaacacacacagggctgaaaccctatgaatgttatgaatgtggaaaatccttctgtagaattcgcacctnnnnnnnnnnnnnnnnnnnnnnnnnnnntacatcagagaatgcacacaggtgagaaaccctttgcatgtcctgaatgtgggaaattctttagccataagtcaaccctctctcacatttatagaacacacacaggggagaaaccctatgaatgtcatgaatgtggaaaaatattttacaataagtcatacctaactaaacataatagaacacatacaggggagaaaccctatgaatgtaatgaatgtggaaaaaccttctaccagaagtcacaactcactcagcatcagataattcacataggggagaaaccctataaatgtaatgagtgtggaaaagctttttgccataagtcagctctaattgtacatcagagaacccatacacaagaaaagccctataaatgtaacgaatgtggcaaatctttctgtgtgaagtcaggacttatttttcatgagagaaagcacacaggggagaaaccctatgaatgcagtgaatgtgggaaatccttcagtcacaaatcatcactcacagtacatcacagggctcacacaggagagaaacgctttcaatgtaatgaatgtggaaaaatgttctgggagaagtcaaatctcactaaacatcagagatcacacacaggggagaaaccttttgaatgcaatgaatgtgggaaagcctttagccataaatcagctctcacattacaccagagaacacatacaggggagaaaccctatcagtgtaacgcgtgtgagaaaacattttaccagaaatctgatctcactaaacatcagagaacacacacagggctgaaaccctatgaatgttatgaatgtggaaaatccttctgnnnnnnnnnnnnnnnnnnnnnnnnnnnnnnnnnnnnnnnnnnnnnnnnnnnnnnnnnnnnnnnnnnnnnnnnnnnnnnnnnnnnnnnnnnnnnnnnnnnnnnnnnnnnnnnnnnnnnnnnnnnnnncacacaggggagaaaccttttgaatgcaatgaatgtgggaaagcctttagccataaatcagctctcacattacaccagagaacacatacaggggagaaaccctatcagtgtaacgcgtgtgagaaaacattttaccagaaatctgatctcactaaacatcagagaacacacacagggctgaaaccctatgaatgt

SEQ ID NO: 35381 - DNA, 216 bp, Macaca Mulatta
  misc_feature (1)...(216): n = A,T,C or G
tctttatcaacaagactgagatcgaggactttccccgctttcctcaccggggcttgctgttggatacatctcgccattacctaccactctctagcatcctggacacactggnggatgtcatggcgtacaataaattgaacgtgttccactggcatctggtagatgatccttccttcccatatgagagcttcacttttccagagctcatgagaaagg

SEQ ID NO: 35382 - DNA, 1740 bp, Macaca Mulatta
  misc_feature (1)...(1740): n = A,T,C or G
agtcggcctggagattctacgccaccaacctctcgcgcacagacctgcactccacgtggcagtactacgagcgcacggtcaccgtgcccatgtacagnnnnnnnnnnnnnnnnnnnnnnnnnnnnnnnnnnnnnnnnnnnnnnnnnnnnnnnnnnnnnnnnnnnnnnnnnnnnnnnnnnnnnnnnnnnnnnnnnnnnnnnnnnnnnnnnnnnnnnnnnnnnnnnnnnnnnnnnnnnnnnnnnnnnnnnnnnnnnnnnnnnnnnnnnnnnnnnnnnnnnnnnnnnnnnnnnnnnnnnnnnnnnnnnnnnnnnnnnnnnnnnnnnnnnnnnnnnnnnnnnnnnnnnnnnnnnnnnnnnnnnnnnnnnnnnnnnnnnnnnnnnnnnnnnnnnnnnnnnnnnnnnnnnnnnnnnnnnnnnnnnnnnnnnnnnnnnnnnnnnnnnnnnnnnnnnnnnnnnnnnnnnnnnnnnnnnnnnnnnnnnnnnnnnnnnnnnnnnnnnnnnnnnnnnnnnnnnnnnnnnnnnnnnnnnnnnnnnnnnnnnnnnnnnnnnnnnnnnnnnnnnnnnnnnnnnnnnnnnnnnnnnnnnnnnnnnnnnnnnnnnnnnnnnnnnnnnnnnnnnnnnnnnnnnnnnnnnnnnnnnnnnnnnnnnnnnnnnnnnnnnnnnnnnnnnnnnnnnnnnnnnnnnnnnnnnnnnnnnnnnnnnnnnnnnnnnnnnnnnnnnnnnnnnnnnnnnnnnnnnnnnnnnnnnnnnnnnnnnnnnnnnnnnnnnnnnnnnnnnnnnnnnnnnnnnnnnnnnnnnnnnnnnnnnnnnnnnnnnnnnnnnnnnnnnnnnnnnnnnnnnnnnnnnnnnnnnnnnnngcaggtcttgtccatggagaagaagctggacttcctggtgaacatctacatgcagcggatgggcatccccccgacagagactgaggcctactttggggccaaagagccggagccggcacctccgtaccatagcccggaagacagccgggagcacgtcgacaggcacggctgcatcgtcaagattgtgcgctccagcagctccacgggccagaagaacttctcggcgcccccggctgcgccccctgtccagtgtccgccctccacctcctggcagccacagagccacccgcgccagggccacggcacctcccccgtgggggaccctggctccctggtgcgcatcccgccgccacctgcccacgagcggtcactgtccgcctacggcgggggcaaccgcgccagcacagagttcctgaggcaggaggacgccccgggctgcaggccccccgaggggactctgcgggacagcgacacgtccatctccatcccgtccgtggaccacgaggagctggagcgttccttcagcggcttcagcatctcccagtccaaggagaacctggatgctctcaacagctgctacgcggccgtggcgccttgtgccaaagtcaggccctacatcgcggagggagagtcagacaccgactccgacctctgtaccccctgcgggcccccgccacgctcggccaccggcgagggccccttcggtgacgtgggctgggccgggcccaggaagtgaggcagcgctgggccagtggacccgtccgcggccctcctcagcacagtgcctccgaggttttgaggcaggaaccctctggggcgcttttgttacagtaactgagtgtggcgggaagggtgggccctggaggggccccatgtgggctgaa

SEQ ID NO: 35383 - DNA, 701 bp, Macaca Mulatta
gggagctgcagcgccaccgtgtcatggaggccgtgcacttccgcgtgcgccacaccaccttcatccccaaccgcggcggccccggcgccggccccgacgagtgggcggacttcggcttcgacctgcccgactgcaaggcccgcaagcagcccatcaaggaggagttcacggaggccgagatccactgaggggccaggccccgccagagcctgtgccaccgcccagagacccaggccgcctccgctctccttcctgtgtccaaaactgcctcccgaggcagggcctccaggctgtgcccggggaaaggcaaggtccggcccatccccaggcacctcaccggccccaggagaggcccagccaccaaagccgcctgcggacagcctgagtcacctgcagaaccttctggagctgccctaacgctgggcttgcggggcaggggccggcccagtctcagccctgccactgccgggcgtgctccatggcaggcgtgagtggggaccgcagtgtccgctccgacctccaggcctcatcctagagactgtcatctgccgatcaagcaaaaagtccttccagaggaaagaatcctcttcgctggtggactgccaaaaagtattttgcgacatcttttggttctggagagtggtgaggagccaagggactgtgtctgaaacaccgtgtattttcagggaatgtccctaacg

SEQ ID NO: 35384 - DNA, 166 bp, Macaca Mulatta
atttataaagctgaatcctgctaaaagtctgacataaagagctgccgttgaactccatcccattctctcccctccagaagaagcagttgtcccccgaatactctgcttcctcactgctgaatcctcgtagggagaagcctgccaacagtgaccttccaaaacagcc

SEQ ID NO: 35385 - DNA, 467 bp, Macaca Mulatta
gatcaagtataagttacttttgtaagcagaaaagtactttcaaacaagaataaaagaagctgttcgctagaccccataatgggcaggttttaaacattccaggcttctaggtcctttgaggctcagctctgatgccagcacccctgggtctccccaccccagcccttaccgggcccttccagagtgccccttagtcactgccctccctgacccaagtctcgcttcctccatgaagcctcccagactgacagctcccaggcactaagggagctcagccttgctgagaatggtagctcccggattctgctgagggagaggtaggcctgcagctcatgggtgggttcagggaggaacctgacaaaagcacatgcggcctgcctgtcatgttctttccagggggtctgtgggctgagggaaccggagttcctgccctggccccctgggtgccacccctgctggaggggagg

SEQ ID NO: 35386 - DNA, 399 bp, Macaca Mulatta
cacatgggtggagcactggcccgaggaggacgaatgccaagatgaagagaaccagaaacaatgccaggacctcggcaccttcactgagaacatggttgtctttgggtgccccaactgaccacaccctcattcccccactcccaataaagcttcagttatatttcacgttgtctggagttctttgccagggagcaagaggctgaaatccccagccgcctcacctgcagctcagctgcatcctgcctgaaacctcacctgttcccactgcgttttctccgggcgttcacctgccagtgtgctgacttctttatccaagcaccacggacctgcctcacctgcacatagcatgcacctgcacctcacctccatttcagctgcacattcaccggcagctcacaa

SEQ ID NO: 35387 - DNA, 212 bp, Macaca Mulatta
cggccgcgcaggactcggcatgctgcccgactgcctgtcggccgagggcgagctgcgctgccgccggctgctggcgggggccacggcccgactccgcgcacggcccgcgtcggccgcggtgctcgtgccgctctgctcagtgcgcggggtcccggctctgctgtatacgctgcggtccagccgcctgaccgggaggcacaagggcgacgtca

SEQ ID NO: 35388 - DNA, 890 bp, Macaca Mulatta
  misc_feature (1)...(890): n = A,T,C or G
nnnnnnnnnnnnnnnnnnnnnnnnnnnnnnnnnnnnnnnnnnnnnnnnnnnnnnnnnnnnnnnnnnnnnnnnnnnnnnnnnnnnnnnnnnnnnnnnnnnnnnnnnnnnnnnnnnnnnnnnnnnnnnnnnnnnnnnnnnnnnnnnnnnnnnnnnnnnnnnnnnnnnnnnnnnnnnnnnnnnnnnnnnnnnnnnnnnnnnnnnnnnnnnnnnnnnnnnnnnnnnnnnnnnnnnnnnnnnnnnnnnnnnnnnnnnnnnnnnnnnnnnnnnnnnnnnnnnnnnnnnnnnnnnnnnnnnnnnnnnnnnnnnnnnnnnnnnnnnnnnnnnnnnnnnnnnnnnnnnnnnnnnnnnnnnnnnnnnnnnnnnnnnnnnnnnnnnnnnnnnnnnnnnnnnnnnnnnnnnnnnnnnnnnnnnnnnnnnnnnnnnnnnnnnnnnnnnnnnnnnnnnnnnnnnnnnnnnnnnnnnnnnnnnnnnnnnnnnnnnnnnnnnnnnnnnnnnnnnnnnnnnnnnnnnnnnnnnnnnnnnnnnnnnnnnnnnnnnnnnnnnnnnnnnnnnnnnnnnnnnnnnnnnnnnnnnnnnnnnnnnnnnnnnnnnnnnnnnnnnnnnnnnnnnnnnnnnnnnnnnnnnnnnnnnnnnnnnnnnnnnnnngcgtagaagaaggttgaactatgtacattgaaaaaaggaaagacatttttttcataccaacctttccctagttcgcagtttctgaatagtagaaacaaaacacatttttaaatctttttatcaatttaatttaggacgaagtaacacaacttttataattaaccactgaagttgtctttaaggataaaacttaaagaaattttaaaatgggtggtaccatattttattagtggactgactccacc

SEQ ID NO: 35389 - DNA, 4427 bp, Macaca Mulatta
  misc_feature (1)...(4427): n = A,T,C or G
ctttgagtcccgtggcccaagcgccgttactacttctctgaacctcctgtcggctgcttgccgagacaccctgccgccaagatgcctcgaattatgatcaaggggggcgtgtggaggaacaccgaggnnnnnnnnnnnnnnnnnnnnnnnnnnnnnnnnnnnnnnnnnnnnnnnnnnnnnnnnnnnnnnnnnnnnnnnnnnnnnnnnnnnnnnnnnnnnnnnnnnnnnnnnnnnnnnnnnnnnnnnnnnnnnnnnnnnnnnnnnnnnnnnnnnnnnnnnnnnnnnnnnnnnnnnnnnnnnnnnnnnnnnnnnnnnnnnnnnnnnnnnnnnnnnnnnnnnnnnnnnnnnnnnnnnnnnnnnnnnnnnnnnnnnnnnnnnnnnnnnnnnnnnnnnnnnnnnnnnnnnnnnnnnnnnnnnnnnnnnnnnnnnnnnnnnnnnnnnnnnnnnnnnnnnnnnnnnnnnnnnnnnnnnnnnnnnnnnnnnnnnnnnnnnnnnnnnnnnnnnnnnnnnnnnnnnnnnnnnnnnnnnnnnnnnnnnnnnnnnnnnnnnnnnnnnnnnnnnnnnnnnnnnnnnnnnnnnnnnnnnnnnnnnnnnnnnnnnnnnnnnnnnnnnnnnnnnnnnnnnnnnnnnnnnnnnnnnnnnnnnnnnnnnnnnnnnnnnnnnnnnnnnnnnnnnnnnnnnnnnnnnnnnnnnnnnnnnnnnnnnnnnnnnnnnnnnnnnnnnnnnnnnnnnnnnnnnnnnnnnnnnnnnnnnnnnnnnnnnnnnnnnnnnnnnnnnnnnnnnnnnnnnnnnnnnnnnnnnnnnnnnnnnnnnnnnnnnnnnnnnnnnnnnnnnnnnnnnnnnnnnnnnnnnnnnnnnnnnnnnnnnnnnnnnnnnnnnnnnnnnnnnnnnnnnnnnctgatttaccatcagctattcttcaaactagtggtgtttctgaatttactaaaaagagaagcaaactagtacttcctgcccctcagnnnnnnnnnnnnnnnnnnnnnnnnnnnnnnnnnnnnnnnnnnnnnnnnnnnnnnnnnnnnnnnnnnnnnnnnnnnnnnnnnnnnnnnnnnnnnnnnnnnnnnnnnnnnnnnnnnnnnnnnnnnnnnnnnnnnnnnnnnnnnnnnnnnnnnnnnnnnnnnnnnnnnnnnnnnnnnnnnnnnnnnnnnnnnnnnnnnnnnnnnnnnnnnnnnnnnnnnnnnnnnnnnnnnnnnnnnnnnnnnnnnnnnnnnnnnnnnnnnnnnnnnnnnnnnnnnnnnnnnnnnnnnnnnnnnnnnnnnnnnnnnnnnnnnnnnnnnnnnnnnnnnnnnnnnnnnnnnnnnnnnnnnnnnnnnnnnnnnnnnnnnnnnnnnnnnnnnnnnnnnnnnnnnnnnnnnnnnnnnnnnnnnnnnnnnnnnnnnnnnnnnnnnnnnnnnnnnnnnnnnnnnnnnnnnnnnnnnnnnnnnnnnnnnnnnnnnnnnnnnnnnnnnnnnnnnnnnnnnnnnnnnnnnnnnnnnnnnnnnnnnnnnnnnnnnnnnnnnnnnnnnnnnnnnnnnnnnnnnnnnnnnnnnnnnnnnnnnnnnnnnnnnnnnnnnnnnnnnnnnnnnnnnnnnnnnnnnnnnnnnnnnnnnnnnnnnnnnnnnnnnnnnnnnnnnnnnnnnnnnnnnnnnnnnnnnnnnnnnnnnnnnnnnnnnnnnnnnnnnnnnnnnnnnnnnnnnnnnnnnnnnnnnnnnnnnnnnnnnnnnnnnnnnnnnnnnnnnnnnnnnnnnnnnnnnnnnnnnnnnnnnnnnnnnnnnnnnnnnnnnnnnnnnnnnnnnnnnnnnnnnnnnnnnnnnnnnnnnnnnnnnnnnnnnnnnnnnnnnnnnnnnnnnnnnnnnnnnnnnnnnnnnnnnnnnnnnnnnnnnnnnnnnnnnnnnnnnnnnnnnnnnnnnnnnnnnnnnnnnnnnnnnnnnnnnnnnnnnnnnnnnnnnnnnnnnnnnnnnnnnnnnnnnnaggcccaggatgttttggtgcaggagatggaagtggttaaacaaggaatgagccatggagaactctcaagtgaagcctataaccaggtgtgggaagaatgctacagtcaagttttatatcttcctgggcagagccgctacacacgggccaatctggctagtaaaaaggacagaattgaatcacttgaaaagaggctcgannnnnnnnnnnnnnnnnnnnnnnnnnnnnnnnnnnnnnnnnnnnnnnnnnnnnnnnnnnnnnnnnnnnnnnnnnnnnnnnnnnnnnnnnnnnnnnnnnnnnnnnnnnnnnnnnnnnnnnnnnnnnnnnnnnnnnnnnnnnnnnnnnnnnnnnnnnnnnnnnnnnnnnnnnnnnnnnnnnnnnnnnnnnnnnnnnnnnnnnnnnnnnnnnnnnnnnnnnnnnnnnnnnnnnnnnnnnnnnnnnnnnnnnnnnnnnnnnnnnnnnnnnnnnnnnnnnnnnnnnnnnnnnnnnnnnnnnnnnnnnnnnnnnnnnnnnnnnnnnnnnnnnnnnnnnnnnnnnnnnnnnnnnnnnnnnnnnnnnnnnnnnnnnnnnnnnnnnnnnnnnnnnnnnnnnnnnnnnnnnnnnnnnnnnnnnnnnnnnnnnnnnnnnnnnnnnnnnnnnnnnnnnnnnnnnnnnnnnnnnnnnnnnnnnnnnnnnnnnnnnnnnnnnnnnnnnnnnnnnnnnnnnnnnnnnnnnnnnnnnnnnnnnnnnnnnnnnnnnnnnnnnnnnnnnnnnnnnnnnnnnnnnnnnnnnnnnnnnnnnnnnnnnnnnnnnnnnnnnnnnnnnnnnnnnnnnnnnnnnnnnnnnnnnnnnnnnnnnnnnnnnnnnnnnnnnnnnnnnnnnnnnnnnnnnnnnnnnnnnnnnnnnnnnnnnnnnnnnnnnnnnnnnnnnnnnnnnnnnnnnnnnnnnnnnnnnnnnnnnnnnnnnnnnnnnnnnnnnnnnnnnnnnnnnnnnnnnnnnnnnnnnnnnnnnnnnnnnnnnnnnnnnnnnnnnnnnnnnnnnnnnnnnnnnnnnnnnnnnnnnnnnnnnnnnnnnnnnnnnnnnnnnnnnnnnnnnnnnnnnnnnnnnnnnnnnnnnnnnnnnnnnnnnnnnnnnnnnnnnnnnnnnnnnnnnnnnnnnnnnnnnnnnnnnnnnnnnnnnnnnnnnnnnnnnnnnnnnnnnnnnnnnnnnnnnnnnnnnnnnnnnnnnnnnnnnnnnnnnnnnnnnnnnnnnnnnnnnnnnnnnnnnnnnnnnnnnnnnnnnnnnnnnnnnnnnnnnnnnnnnnnnnnnnnnnnnnnnnnnnnnnnnnnnnnnnnnnnnnnnnnnnnnnnnnnnnnnnnnnnnnnnnnnnnnnnnnnnnnnnnnnnnnnnnnnnnnnnnnnnnnnnnnnnnnnnnnnnnnnnnnnnnnnnnnnnnnnnnnnnnnnnnnnnnnnnnnnnnnnnnnnnnnnnnnnnnnnnnnnnnnnnnnnnnnnnnnnnnnnnnnnnnnnnnnnnngagttttagagagagaacaacgaacaaaataggcctagttcttgtttagtagagcttatagtcttttgagaataacagacaattaaaatccaaatgtttatttggtgaatcttatgtgtcagacacttacttaagtgttggagataagcagttattaagacagagttcttgctgtcatggaggtgacattagtggggaggagatactaaatatgtacagggaaagtatcagaccatgagttttagattctgtggaggaaattaaagtagggtgattatgagatagtgaatgactggctattttagactggacgatcaaagagacctcttggaaggcagctgtgctcaccactataccactgcactgtaccacaccataccactataagctgcatggccaaggagacctcttaaagaagtaacatttaagataacatgtgattgacattttagaatgggccatctttgtgagattcaaggaaagagcatcccaggtggagtgaatagcaaacataaagcctcttttgtatgtttgaggaacaaaaaggactatgtggctggagtgtcaagaatggcatttctgtatgtaaggcctggttgtatagagccacataaataaggctataataaggaatttggatcttactttaaatatgataagaatctatgagaagatctaagcaaaggaatgacataatcagatttggttttagaaacatcactttatctccttaactgtgtaagatctcaccaggctgggaatagggaaaccagtccatttaggagcctgatgcagtaatccagacaaaaaaataatagtgattctaactagggtccaggtaatagtagtggagatatgtggagaggcatgataggtgtattcttaatagtcttatcagaccataaattcatattttcctggtatgtagtcacttaattcaaatacttttttcagtaagttctg

SEQ ID NO: 35390 - DNA, 2303 bp, Macaca Mulatta
  misc_feature (1)...(2303): n = A,T,C or G
aggattgtgataagacaatgccgaggagtacaccaggaannnnnnnnnnnnnnnnnnnnnnnnnnnnnnnnnnnnnnnnnnnnnnnnnnnnnnnnnnnnnnnnnnnnnnnnnnnnnnnnnnnnnnnnnnnnnnnnnnnnnnnnnnnnnnnnnnnnnnnnnnnnnnnnnnnnnnnnnnnnnnnnnnnnnnnnnnnnnnnnnnnnnnnnnnnnnnnnnnnnnnnnnnnnnnnnnnnnnnnnnnnnnnnnnnnnnnnnnnnnnnnnnnnnnnnnnnnnnnnnnnnnnnnnnnnnnnnnnnnnnnnnnnnnnnnnnnnnnnnnnnnnnnnnnnnnnnnnnnnnnnnnnnnnnnnnnnnnnnnnnnnnnnnnnnnnnnnnnnnnnnnnnnnnnnnnnnnnnnnnnnnnnnnnnnnnnnaaaccctccaaaagggttcgaaaagtggcgtgggaggcagaaatctcctgcaccgagggccagcccaacccggagaggaacggtaggcaaaaaccaacccaaaaagggctgagaagacagctgctgaagagcctcgtggaggcctgaagatagaaagtgaaactcctgtagacttggctagcagcatgccctccagcagacacaaagcagccaccaaaggctcaaggaaacccaatataaagaaggagtctaagtcttcccctcgacctacagcagagaaaaagaaatataaatcaacaagtaaatcttcccagaaatcaagggaaatcatagaaacagatacctcatcctcagattcagatgaaagcgagagccttcctccttcctcacaaactcctaagtaccccgagagcaataggactcctgttaagccctcctcagtggaggaagaagatagcttttttcggcaacgaatgttctctcctatggaagagaaggaacttctttcacccctcagtgagcctgatgacaggtatccacttattgtgaagattgacctgaatcttttgactagaataccaggaaagccttacaaagaaacagagccgcccaagggggaaaagaaaaatgtgccagaaaagcacacgagagaggctcagaaacaagcctcagaaaaagtttccaacaaaggcaagaggaagcataannnnnnnnnnnnnnnnnnnnnnnnnnnnnnnnnnnnnnnnnnnnnnnnnnnnnnnnnnnnnnnnnnnnnnnnnnnnnnnnnnnnnnnnnnnnnnnnnnnnnnnnnnnnnnnnnnnnnnnnnnnnnnnnnnnnnnnnnnnnnnnnnnnnnnnnnnnnnnnnnnnnnnnnnnnnnnnnnnnnnnnnnnnnnnnnnnnnnnnnnnnnnnnnnnnnnnnnnnnnnnnnnnnnnnnnnnnnnnnnnnnnnnnnnnnnnnnnnnnnnnnnnnnnnnnnnnnnnnnnnnnnnnnnnnnnnnnnnnnnnnnnnnnnnnnnnnnnnnnnnnnnnnnnnnnnnnnnnnnnnnnnnnnnnnnnnnnnnnnnnnnnnnnnnnnnnnnnnnnnnnnnnnnnnnnnnnnnnnnnnnnnnnnnnnnnnnnnnnnnnnnnnnnnnnnnnnnnnnnnnnnnnnnnnnnnnnnnnnnnnnnnnnnnnnnnnnnnnnnnnnnnnnnnnnnnnnnnnnnnnnnnnnnnnnnnnnnnnnnnnnnnnnnnnnnnnnnnnnnnnnnnnnnnnnnnnnnnnnnnnnnnnnnnnnnnnnnnnnnnnnnnnnnnnnnnnnnnnnnnnnnnnnnnnnnnnnnnnnnnnnnnnnnnnnnnnnnnnnnnnnnnnnnnnnnnnnnnnnnnnnnnnnnnnnnnnnnnnnnnnnnnnnnnnnnnnnnnnnnnnnnnnnnnnnnnnnnnnnnnnnnnnnnnnnnnnnnnnnnnnnnnnnnnnnnnnnnnnnnnnnnnnnnnnnnnnnnnnnnnnnnnnnnnnnnnnnnnnnnnnnnnnnnnnnnnnnnnnnnnnnnnnnnnnnnnnnnnnnnnnnnnnnnnnnnnnnnnnnnnnnnnnnnnnnnnnnnnnnnnnnnnnnnnnnnnnnnnnnnnnnnnnnnnnnnnnnnnnnnnnnnnnnnnnnnnnnnnnnnnnnnnnnnnnnnnnnnnnnnnnnnnnnnnnnnnnnnnnnnnnnnnnnnnnnnnnnnnnnnnnnnnnnnnnnnnnnnnnnnnnnnnnnnnnnnnnnnnnnnnnnnnnnnnnnnnnnnagaattctttgctgaactggataaagtaatgggccctctcatctttaatgcaagcatcatgacagatctagttcgttatacccggcagggactgcactggcttcgccaggatgccaagttggtatcttg

SEQ ID NO: 35391 - DNA, 374 bp, Macaca Mulatta
caacttgaacggaatgtactatccacaaaggcagaacacaaataagttcaacggcattaagtggtactactggaaaggctcaggctactcgctcaagggcacaaccatgatgatccgaccggcagatttctaaacacccgagtccacctgaggaagactgtctcgaactattttcaaagacttaaacccaatgcactgaaagtcacggctgcgcactgtgtcctcttccaccacagagggcgtgtgctcagtgctgacgggacccatgtgctccagattacagcctgtagaccttgtcacttaaacttgcatcacttaacagaccaaagcaagaccctaaacatctgtaatggtgattagacagaacacctatg

SEQ ID NO: 35392 - DNA, 188 bp, Macaca Mulatta
atcgttagacacccactgagaatagtaagggcactgacggaggcctaaggaagcctcccccacctctgaggcagcccatcctgggttgggtctgaccagcgactgatgcagaactttcttcatcccaggggatgcctaaaggaagggcacacatggagagcagacaccaaggcacgaagtcaaggggc

SEQ ID NO: 35393 - DNA, 753 bp, Macaca Mulatta
ggatttcagaaaggcgagtctcctgtggattacgacggtgggcggacaagatccgacatagtgtcccgggcccttgatttgttttctgataacgccccacctcctgagctgcttgagattatcaacgaggacattgccaagaggacgtgtgaggagcaccagctctgtgttgtggctgtgctaccgcatatccttgatactggagctgcaggccgaaattcttatctggaagttcttctgaagatggcagacaaatacaaaaagaaaatgtgggggtggctgtggacagaagccggagcccagtctgaacttgagaccgcgctggggattggcgggtttgggtaccccgccatggccgccatcaatgcacgcaagatgaaatttgctctgctgaaaggctccttcagtgagcaaggcattaacgagtttctcagggagctctcttttgggcgtggctccacggcacctgtaggaggcggggctttccctaccatcgttgagagagagccttgggacggcagggatggcgagcttcccgtggaggatgacattgacctcagtgatgtggaacttgatgacttggggaaagatgagttgtgagagccacaacagaggcttcagaccattttcttttcttgggagccagcgggattttttcagcagtgaaaggacattgtctacgatcagatgactctcccagtgggccttttaaccaagaagtaagtacttgaatgggtcattttgacaaccctt

SEQ ID NO: 35394 - DNA, 98 bp, Macaca Mulatta
gttgtgctgtgttacaggtcagcccagtgactgaaacacgtccttaccctgatgtgaaagagatttgccaatgcgacattgatgaatttgttatttta

SEQ ID NO: 35395 - DNA, 628 bp, Macaca Mulatta
  misc_feature (1)...(628): n = A,T,C or G
gtgaaagaacttgtcctggacaacagtcggtcgaatgaaggcaaactcgaaggcctcacagatgagtttgaagaactggaattcttaagtacaatcaacgtaggcctcacctcaatcgcaaacttaccaaagttaaacaaacttaagaannnnnnnnnnnnnnnnnnnnnnnnnnnnnnnnnnnnnnnnnnnnnnnnnnnnnnnnnnnnnnnnnnnnnnnnnnnnnnnnnnnnnnnnnnnnnnnnnnnnnnnnnnnnnnnnnnnnnnnnnngaaaaagttagaaaacctcaagagcggagaccttttcaattgcgaggtaacnnnnnnnnnnnnnnnnnnnnnnnnnnnnnnnnnnnnnnnnnnnnnnnnnnnnnnnnnnnnnnnnnnnnnnnnnnnnnnnnnnnnnnnnnnnnnnnnnnnnnnnnnnnnnnnnnnnnnnnnnnnnnnnnnnnnnnnnnnnnnnnnnnnaggagcatgatgaagatgctcaggtagtggaannnnnnnnnnnnnnnnnnnnnnnnnnnnnnnnnnnnnnnnnnnnnnnnnnnnnnnnnnnnnnaggaggatgaagaaggttataatgatggagaggtagatgacgaggaagatgaagaagagcttggt

SEQ ID NO: 35396 - DNA, 321 bp, Macaca Mulatta
gtacacagagtacccaggtgaagagaacgtcatgagtgtaagtgcaaggcagtggaaggagcggcaaactgggacatgcaaaattgaatttgctcaaaaaagatgaaaggaaatgcaaactgtaaatgtgtaaatgtatattgtattgtatgtacattttatattcataataaaagcaagcaaactctaaacctctaaatctgtctataagtgtggtggaaatgtcctatgtgaaaaacaagctctataggaggggttttctcccattgttttccaagttttgtggattagaaatgtcccatacaacagcactcccagtat

SEQ ID NO: 35397 - DNA, 422 bp, Macaca Mulatta
  misc_feature (1)...(422): n = A,T,C or G
ggtatgaacatgctaatgatgataagagcagcttgaaatcagatcctgaaggggaaaaaatccacgctggactcctgaaaaagttaaatgaactggaatctgacctaacatttaaaataggnnnnnnnnnnnnnnnnnnnnnnnnnnnnnnnnnnnnnnnnnnnnnnnnnnnnnnnnnnnnnnnnnnnnnnnnnnnnnnnnnnnnnnnnnnnnnnnnnnnnnnnnnnnnnnnnnnnnnnnnnnnnnnnnnnnnnnnnnnnnnnnnnnnnnnnnnnnnnnnnnnnnnnnnnnnnnnnnnnnnnnnnnnnnnnnnnnnnnnnnnnnnnnnnnnnnagggggtgttgcggcagatccctgtagtgggctccgtgctgaattggttttctccggtccaggcaagcagaagggaagaacttttaact

SEQ ID NO: 35398 - DNA, 370 bp, Macaca Mulatta
aagcagggatcaatcccgtggccattttttgtggtactttggcctcaattctttaccaggaatcactgtgtttacatgaaatgacaatttgatactgtatttgatagaaaactattttttgttaccggggtttacatagaagcacgctgtttataccattaaatgactttgggggactctcccgtgggaacggatgccactccctgaagctccctggtcacaggtgggtgaaaacgtgtccctgggtgaaatcaggtggtgtctgcaccaccaaaagcggttagaagccaaggagattcctttacctacctagggttcattttcaaaagaaaatttaaactataatttaaacaattaaccttcttttcta

SEQ ID NO: 35399 - DNA, 1339 bp, Macaca Mulatta
  misc_feature (1)...(1339): n = A,T,C or G
caggggcaaactatacacggtcgtccatcaaaatcctggggaagagaataactcatttaatattctgacatgtcacatgttcttgatacaccatagactctgaagagaatctgctgcagaagaaccaggttaaaaannnnnnnnnnnnnnnnnnnnnnnnnnnnnnnnnnnnnnnnnnnnnnnnnnnnnnnnnnnnnnnnnnnnnnnnnnnnnnnnnnnnnnnnnnnnnnnnnnnnnnnnnnnnnnnnnnnnnnnnnnnnnnnnnnnnnnnnnnnnnnnnnnnnnnnnnnnnnnnnnnnnnnnnnnnnnnnnnnnnnnnnnnnnnnnnnnnnnnnnnnnnnnnnnnnnnnnnnnnnnnnnnnnnnnnnnnnnnnnnnnnnnnnnnnnnnnnnnnnnnnnnnnnnnnnnnnnnnnnnnnnnnnnnnnnnnnnnnnnnnnnnnnnnnnnnnnnnnnnnnnnnnnnnnnnnnnnnnnnnnnnnnnnnnnnnnnnnnnnnnnnnnnnnnnnnnnnnnnnnnnnnnnnnnnnnnnnnnnnnnnnnnnnnnnnnnnnnnnnnnnnnnnnnnnnnnnnnnnnnnnnnnnnnnnnnnnnnnnnnnnnnnnnnnnnnnnnnnnnnnnnnnnnnnnnnnnnnnnnnnnnnnnnnnnnnnnnnnnnnnnnnnnnnnnnnnnnnnnnnnnnnnnnnnnnnnnnnnnnnnnnnnnnnnnnnnnnnnnnnnnnnnnnnnnnnnnnnnnnnnnnnnnnnnnnnnnnnnnnnnnnnnnnnnnnnnnnnnnnnnnnnnnnnnnnnnnnnnnnnnnnnnnnnnnnnnnnnnnnnnnnnnnnnnnnnnnnnnnntactaaaaaggtatcattattttaattttatagtacagagaagttgggttgatnnnnnnnnnnnngatgctacagaaaaataaataaagatgactcccaagttttaggtttgtgcagctaggtgaactgtagtgcgaaagactgtgatgagaaaggccaagaaatcaatggtattttttcaggatggaaaatcaaaagctatatacattttgcacatattgagtttaaggtatcgcagagacatccaagtagagatatcaagtcagcaaccagatataagagactaaagttgagaatatctagagagaaaaattggggagtttccaggttatagaattctatggactcacttggagaggaagtgtatgtaaggaagaaagaaggtctaagacaattcctgaagcacttcaacatttaggggtcaggtggaagagaggctgtagagacgcaagaccagtagagtatccaaactattgctaatcaaatgaaattcattcacagctt

SEQ ID NO: 35400 - DNA, 476 bp, Macaca Mulatta
  misc_feature (1)...(476): n = A,T,C or G
gggttagtcgtcagtatctttcccagttgttccgcccccnnnnnnnnnnnnnnnnnnnnnncccctctccggctgccctctccgcgtggggcaaggctccgagggcagtattcagtaaccatttagctttggaaggagaggtgattcccgtggcccggctcctcctgccaccatgctagccactttggccgcggaggtncaggtgctgacctgaacctgattcatccctttctgaccaaaactgttcactcatggtggaagggaccaagcattcaaatggagacgccagcagtcagtacaactggagaaaaggacacctctcagccgcaacaacagtgggaaaagaaccttcgggagaactttgattcaattactcagattaggcagcagccccgagaccctcctaccgaaacacttgagctgggagtaagcccagatccagccagccaaattctagagaatactcaaggaactga

SEQ ID NO: 35401 - DNA, 618 bp, Macaca Mulatta
  misc_feature (1)...(618): n = A,T,C or G
gctggagcaccctgtcttctctggtctttgacttgattaaagtatctccgctttcttgggagggaataggggatgttttatcagtgaatgtgccatacaccttatggtccacttcatgtgcctttcagacttcaaagcgcgcgcgcgcgtgtgtgtgtttctttttctctcctaaaaatcaataagtagctccacctgaagaggtgcggaacctctgggtcgggaagcagctggaatccgcactcacctcattcccattgtttggatcatgcctctttccaacacgtgtcacaatctccaaagggactgtatttcttctctgtgcttaatgtgatttgaaatatgttgaatcaaagtgaaatatttattttttgaataaaggagataatagccttnnnnnnnnnnnnnnnnnnnnnnnnnnnnnnnnnnnnnnnnnnnnnnnnnnnnnnnnnnnnnnnnnnnnnnnnnnnnnnnnnnnnnnnnnnnnnnnnnnnnnnnnnnnnnnnnnnnnnnnnnnnnnnnnnnnnnnnnnnnnnnnnnnnnnnnnnnnnnnnnnnnnnnnnnnnnnnnnnnnnnnnnnnnnnnnnnnnnnnnnnnnnnnnnnnnnnnnnnnnnnnn

SEQ ID NO: 35402 - DNA, 1001 bp, Macaca Mulatta
  misc_feature (1)...(1001): n = A,T,C or G
agtggtttggtgacctcgtgacgcctgtgtggtgggaagacgtgtggctgaaggaagggtttgctcactactttgaatttgttggtacagactacctctatcctggctggaacatggnnnnnnnnnnnnnnnnnnnnnnnnnnnnnnnnnnnnnnnnnnnnnnnnnnnnnnnnnnnnnnnnnnnnnnnnnnnnnnnnnnnnnnnnnnnnnnnnnnnnnnnnnnnnnnnnnnnnnnnnnnnnnnnnnnnnnnnnnnnnnnnnnnnnnnnnnnnnnnnnnnnnnnnnnnnnnnnnnnnnnnnnnnnnnnnnnnnnnnnnnnnnnnnnnnnnnnnnnnnnnnnnnnnnnnnnnnnnnnnnnnnnnnnnnnnnnnnnnnnnnnnnnnnnnnnnnnnnnnnnnnnnnnnnnnnnnnnnnnnnnnnnnnnnnnnnnnnnnnnnnnnnnnnnnnnnnnnnnnnnnnnnnnnnnnnnnnnnnnnnnnnnnnnnnnnnnnnnnnnnnnnnnnnnnnnnnnnnnnnnnnnnnnnnnnnnnnnnnnnnnnnnnnnnnnnnnnnnnnnnnnnnnnnnnnnnnnnnnnnnnnnnnnnnnnnnnnnnnnnnnnnnnnnnnnnnnnnnnnnnnnnnnnnnnnnnnnnnnnnnnnnnnnnnnnnnnnnnnnnnnnnnnnnnnnnnnnnnnnnnnnnnnnnnnnnnnnnnnnnnnnnnnnnnnnnnnnnnnnnnnnnnnnnnnnnnnnnnnnnnnnnnnnnnnnnnnnnnnnnnnnnnnnnnnnnnnnnnnnnnnnnnnnnnnnnnnnnnnnnnnnnnnnnnnnnnnnnnnnnnnnnnnnnnnnnnnnnnnnnnnnnnnnnnnnnnnngggccggctatttgcctcagaatattcctctggagattatcagatacctgtctgaggagaaggattttcttccatggcatgctgccagccgagctctttatccactagataaattactggaccgcatggaaaactacaacgttttcaatg

SEQ ID NO: 35403 - DNA, 131 bp, Macaca Mulatta
agagctgtgaggagaagtcagtgaagaacaccagcatccgagtggctgactttggcagtgccacctttgaccatgagcatcacacaaccattgtggccacccgtcactatcgcccacctgaggtgatcctt

SEQ ID NO: 35404 - DNA, 181 bp, Macaca Mulatta
cagattgaatgctaaagctctaagtctgttgacgcttctgaatgtctatcagaagaaacatctggttgaaattttgtcataccacaattgtgattcacaaactcgaaatgctccagaattggattgccttatcagacttcaggctcagaacatacagcaacgacacatagtctttttaaca

SEQ ID NO: 35405 - DNA, 526 bp, Macaca Mulatta
atgtccgattcacatgctacacacctgcatgaacacattcgaacttcgaaggccacgcattgctgcttcataggccccacggtaagtgagttcacacctagaacactgtcctgaccgcaggacgcgtggcttggacttggtattctacatgtgactggctttcttgccctcatctctcaaatgtttagagtgttaagatcatatcctgccccaaatttcaaattgatgaggcgaagatatttcaaacagatctttgaaacctcagattctgtggtgcaactttaatgttttcttgtttctcagttttctgctataaaactattttcagttcattctttaacgtcttctgtctatagtgcattttgtgctttttaaaaaaagcactgaaaggttaaatagcctcaattcagagacgatcacagagtgccctgctttccccgtcgtcagactttgagcagattccctaagggatggcacttatgcaggtgggcagacctgtactaggtctggtgtgctttacaaaaat

SEQ ID NO: 35406 - DNA, 330 bp, Macaca Mulatta
tgaggcagagaggcctggcaagcacagccactgtgacggggagtccaggcgcaggagggacccggggccacaagggcgctgcgggcccaggtgtgctaggcccctcttggggggcactggcctctctgcagggccttctgcccagcgccggccttaatgctaaagccaaatgcagcttctgctgtgcaacacactcccggccatcttgctgtgtcaccccctgtccagcctccacttgccatgggggatggatggatttagggtgggagggcctgccagggccctggacagtcacaccctagcagcagtgagtgggcaggtttggaggag

SEQ ID NO: 35407 - DNA, 125 bp, Macaca Mulatta
  misc_feature (1)...(125): n = A,T,C or G
ngttaaacccctaaagggagaccatctatccagggcaataggaagaatcgctggcaaaggaggaaaaaccaaattcaccatagagaatgtgacacggacgcggatagttttggctgatgtgtaag

SEQ ID NO: 35408 - DNA, 350 bp, Macaca Mulatta
  misc_feature (1)...(350): n = A,T,C or G
agagttaacgtccatttcaacaatggggagcacggctttgacaacaaagacatggacatgaagaccatcttccgcgctgtgggccccagcttcaaggcgggcctggaggtggagccctttgagagcgtccacgtgtacgagctcatgtgccggctgctgggcatcgtgcccgaggccaacgatggggacccggctaccctgctgcctatgctgcacacnnnnnnnnnnnnnnnnnnnnnnnnnnnnnnnnnnnnnnnnnnnnnnnnnnnnnnnnnnnnnnnnnnnnnnnnnnnnnnnnnnnnnnnnnnnnnnctgctggggaccatgattcttctgtctgaggtcgcata

SEQ ID NO: 35409 - DNA, 1534 bp, Macaca Mulatta
  misc_feature (1)...(1534): n = A,T,C or G
ggaggtcagatcatcaaacccagtctgatctcttggttggaacaagaagagtcaaggacagttcggggaggagttctccaaggnnnnnnnnnnnnnnnnnnnnnnnnnnnnnnnnnnnnnnnnnnnnnnnnnnnnnnnnnnnnnnnnnnnnnnnnnnnnnnnnngaaggaaaacacaatggaggggaactctgtgactgtgagcaatgtggagaagtcttcagtgaacactcttgccttaagatgcacatgagaactcaaagcacagggagcactcatgactgtaatcagtatggaaaagatttccttactctgcatgagaaaacctctactggtgagaagtttaatcagagtgaaaaaatcttcagcctgacaccaaatattgtataccagagaactagcacacaagaaaagtcatttggatgtagtcactgtggaaaatccttcattaacgattcataccttcaggcacatatgagaactcacaatggagaaaaactctatgaatggagggattatgggccaggttttattgactccacaagcctttctgtgcttatagaaaccctcaatgcaaaaaagccctacaaatgtaaggaatgtggnaaaggctatagatacccagcctacctcagtattcacatgcgaacccacactggnnnnnnnnnnnnnnnnnnnnnnnnnnnnnnnnnnnnnnnnnnnnnnnnnnnnnnnnnnnnnnnnnnnnnagaactcacactggagagaaaccttttgtatgtgttgaatgtgggaaagccttnnnnnnnnnnnnnnnnnnnnnnngcatgtacgatctcacagtgggagacaagccctacgaatgtaaggaatgtgggaaatccttccttacatcctcacgccttattcaacatataagaactcacactggagagaaaccttttgtatgtgttgaatgtgggaaagcctttgcagtttcctcaaatcttagtggacatttgagaactcacactgaagagaaggcctgtgagtgtaagatatgcgggaaggtatttggatatccctcatgtcttaataatcacatgcgaacgcacagtgcccagaaaccatacacctgtaaggaatgtgggaaggcttttaactattccacccaccttaaaattcacatgagaatccacactggagaaaaaccctacgagtgtaaacagtgtggaaaggccttcagccattccagttcatttcaaatacatggaaggactcacactggagagaagccctatgaatgtaaggagtgtgggaaagccttcacgtgttccagttcttttagaattcatgaaaaaactcacacagaagagaaaccctataaatgtcagcagtgcgggaaagcttatagtcatccccgttcacttcgaagacatgaacaaattcactagtgagaaactctgtccatgtaatacatgtgggaaagctctcatttgtttcagttcacttcaaagacatgaatgaactcactctggagagaagaaagtctacgaaaattatttaattcctgtaat

SEQ ID NO: 35410 - DNA, 1169 bp, Macaca Mulatta
tatcgaggtgagactcggggctgccaagctcaggtgagggctcgatgtgcaggcccaaccctccttccctctccccaggctgcccttcggatccgagagggcatggccgccctgcagtctgacccccggcagcatgagctctaccgcaacttcaaaatcatctccaaggccttggtggagcggggtggtgtggtcaccagcaacccacttggcttctgaatactcctggccagggcctggcccggttatgtgcctttcctcaagccaaagcccctctccttagggccctggtttgtcccggagggggcctagtattcccaggactgtgcctgctctcaagagcacttactgcctcgaaaataataaaaatttctaaccagtcatgctttgctcctgtgtgtccgttctttccctctgctgcctgcctccctcccaaagaaaggagccagaggcgtggggagtttgcctctattgctttatttggtgttttatacaagtgactaaaataaatagagtaacaaaggcagctacatggcccaaatctcccagcttcctcaggctgctgtctagggtgcctaaccccagggtaccactgaccacccccaaacctgcacagggcaaggctatgggtaactggaggaggaggtcacattctggggttagaaggggcccaacggacgggatttttcatatagaagagaaaatgcctatttaaaaagtcccaaaaatgtaagaaactctattttaacccccaaaaagacttattaaaaaaacaaagctaaaaataatcaaaggtcccttgtctacccgagggaagggggaggaaccaggcactgctggtgagagtcacagtggccacaatctcctgtatggcagcagctgctaggctgagccaggcactgtagagcaagcacatgatggccaggacagccagtcacacactcagagcgccaggcccaaccctggcccccacagtgggctacataacatccacaaagaaactcgctggaatgcccatggcaatgtggaaactttggcggctggctgtcagtttctggggcccaaaacccaggtcctctaactgaaggggcccccggaaagctgccctcctggagggactggaagttggggtggggggcatcatgaccaccatcatggggttgtaggga

SEQ ID NO: 35411 - DNA, 974 bp, Macaca Mulatta
ttttgttgatgtttttgttgtttttgtctcgtgaggtgtttgtgtttgagcgggagggagagggacaggagggggaggaatatacagagcgcctgttttcgtcttaaggagtatttttcatcctagtacgcttttgatatcggctgtatctccccctcaattccgaagtggctctattaaccaattgctcatttaggaaattcaccgttagtgtacatgtaaagaatatttgttcaacacaggctacaccacatgtcgcaaactgaactgatgacatatgggtaaaaatcagaatctttgagattaaaatgaaaccctgaacctattttgtttgatcctttggcttactggacttgcagtagatacttaatatcaagacaagtttcctaacaatacccttttccctattttggttttacccaaaacccattccaaagactattctaattcttccacctagaattcataatcaaactgctatataattggctttatgtaaagataaaaatttccaggctaattttcttcctcttgatgccaacaggtagaatttattcaagagctgccaaagactatcagtgggaagacaaaaagaaatgaactgagaaagaaagaatggaagacaatttaaatttgtttcattaattaccatatctataaaacaaacatagtatctgtcaatctctagaaaccacaggatgatggagacgtgataaaaactgtggtagtatgcttagaaactgttgattttttaaaatatcttgtggttatgatatcagaggctaaattttgaaataaaatatttggcaaattcctccacattagtgtcaatgttcctatcatttcttaatataaaaatgtcatcaattgctgatttttaaatgtatagtatagaagcagtttctgaactaaatctctgctacatagattttcaaactttagttgactaataatttgatatgttgatatacaaa

SEQ ID NO: 35412 - DNA, 624 bp, Macaca Mulatta
tgacttcaccctcctggggcttctggtgaagggtgaggctacggggatcatattcggtgatcttggctgttttcgcagcggctgtaactgcaaatttggtcatgatattcttggttcgggtggactgtcgcctccacacccccatgtgctttctgctcggccagctgcccctcatggacacccttttcatcagcaccactgccccagagctcctggtggacgtggttcctagagaaccatttcctttgtggcctgtggcatccagatcttccgctacgtgaccatgattggtctgagttcttcctaccgggcctcatggcctatgaccgctgcgtggctgtctgtaaccctctgagatacccagtcctgatggacctcaagatgcgtctcttgctggctgctggtgcctggtttggtggctccctcactggctttctgctcactcccatcaccatgactgtccctgactgtggctcctgcagaatcgaccattttttctgtgagatcccggcggttctcaaactggcctgtgtggacacgtccttgtatgaaactcggatgtgcagctgctgtgtcctcatgttgctcatccccatctcgatcgtctccacctcctactccctc

SEQ ID NO: 35413 - DNA, 394 bp, Macaca Mulatta
  misc_feature (1)...(394): n = A,T,C or G
ctaaggatccttctacagattgaataactntgggtaggtttacaactcacagcaagcctgatggtttgtcttatttcattcacactgaaaattctttgcatattttttttctgcttagacttacttattctttgaggaaaaaaagtaacgtaggagatcattgttctctagagctgagctcttctgctaaagttcaaagttcacatcggtgtagccagagtgaagcatctttgttagcagttatgtggtcagaaaacaactagaatgggagcatacctggtgcccagattttggtttccaataaaaggaaccagggctccttggaaaatcaactgattctacaactggggtgtgaactatacaagatgagcctagagtatcttgtgccacagaa

SEQ ID NO: 35414 - DNA, 846 bp, Macaca Mulatta
  misc_feature (1)...(846): n = A,T,C or G
gggaagccaccatggcggccgagcggaagacaaagttgtccaagaatctgctgcgcatgaagtttatgcaaaggggactggactcggaaaccaagaaacaactnnnnnnnnnnnnnnnnnnnnncattagtgaagaacactggtacttggatttgccagagcttnnnnnnnnnnnnnnnnnntgcttcagatgaatgctaagcacaaagcagaagaagtcgaagatgaaacagtggagcttgatgtgtcagatgaagagatggctagaagatatgagaccttggtggggacaattgggaaaaagtttgccagaaagagagaccatgccaattacgaagaagatgaaaatggagacatacaaccgattatagcaaagaagatgttcttaaagccccaggattaagatggatgccttaagcaatggaccatgggcgcttgatggaagtcatcagcgcatctggagctcattccgatagcgtctttcactagttatcaataccggaacgtttcacttttgtaaaagagacgatttattttcgtaaacccatggctgcttaaaaaaaaccagatttcgtggaagaatgctgtcatcccttcgcctcatgggttatttccacccaaaaattcctcagccccctgattctccaacgccctttgctttttaaaacgggcttgcatcccaaagcatttttgttgacgcttttgggttttttctattgtctgaatctcttctgaaccccgaggcgtcttaagcgtgcttgacaacgagatgtatagggtaagcgggtacaatagcgcgcctttcacgtgatctttccaatataccctatgcatatgtgcccaatg

SEQ ID NO: 35415 - DNA, 150 bp, Macaca Mulatta
  misc_feature (1)...(150): n = A,T,C or G
aggtctcccaccacccccctatctcggcctgccatgcggagtctgagaacttcgccttctggcaagnagatatgaagtggaagaacaagttttggggcaaatccctggagattgtgcctgtgggaacagtcaatgtcagcctgcccaggt

SEQ ID NO: 35416 - DNA, 385 bp, Macaca Mulatta
  misc_feature (1)...(385): n = A,T,C or G
gggagtggagaggcacggggccaggaaagcagagaaagacaaagcgttaggagaagaagacaggcagggaggacaagccgggcacgatggccaccttcccaccagcaaccagcgccccccagcagccccgaggcccagaggacgaggaccccagcctggatgaatctgacctctacagcctggcccattcctacctnggaggtggaggccggaaaggtcgcaccaagagagaagctgctgccaacaccaaccgccccagccctggcgggcacgagaggaaactggtgaccaagctgcagaattcagagaggaagaagcgaggggcacgacgctgagacagagctggagnagatgaggccggaccatggacactacacccagcaat

SEQ ID NO: 35417 - DNA, 431 bp, Macaca Mulatta
ctgctgtcgaaaagcccaaagaatccaaagttgaagccaagaaggaagaggctgaagataagaaatcagccgccaccccagagaaggaggctcctgctaaggtgggggtgaaggaagacgctaaacccaaagagaagacagaggtggccaagaaggaaccagatgatgccaaggccaaggaacccagcaaaccagcagagaaggaggaggcggcagcagcaccggagaaaaaagacaccaaggaggagaaggccaagaagcctgaggagaaacccaagacagaggccaaagccaaggaggatgacaagaccctctcaaaggagcctaccaagcctaaggcggaaaaggctgaaaaatcctccagcacagaccaaaaagatagcaggcctccagagaaggccacagaagacaaggccaccaaggggaagtaa

SEQ ID NO: 35418 - DNA, 387 bp, Macaca Mulatta
catattgtccacttcggcaggataacaaatgttacatcacacggacactgatgtttctctttctgaatactgcaaacaggccgcaacaagaaagaagacagcccatgaaaaccgacagtgctgaaagtgaagcctgagattcaggtaaggtatgtggcagtacatgtcgtgttgaaatctgcccaggtttggttctctagagagtgcaatatcttctttaaaaaatcaccagtgcaaactcaagggctaggatgcttgctgtttccttgtctcttgatgtcaacagtaaccccagaatgtgagccacgtgtccgtctgtagaagtagtgcatggcagacgaggtatgaaaatatcaattcatctttattttctaggaaggaaacaaa

SEQ ID NO: 35419 - DNA, 2026 bp, Macaca Mulatta
catctgtgctttaaatttctcatttactgggttagaaaacaaacaggattccctgcacattttcttttgtgcttttaaatgtttctcaagttggaacaggtttcctcaggcctgttttgactgattgcttgagtgcatttgacagttaaaaatcactaattggttttatctccctttacactctgcctttcccccgcccccattactgaaaaataacattttagtgtcaggttagaaattgaaatgcggagtcttgtgtatcctttaaattaaaaaccacaagtgtttattgcagtggtttaactgtagcatctcagcatctgggtggaagctgcctatatttcccggtaaaactggggaccatctgtgaaattaattttccagccagacagctgctgtgagcaaatgaacataaatgctcactggaaactaaccagtttttatattgacctgcagtgtaaaaagcacatttaattataaacaatatattcaaaatgggcagattttcttttgaaatgcagtgtagagctagaataaaaacaactctttgccagctactctgcccttttggcaaagttaccttgaacaaagaatcttcagggtttattaagaactcttattttcttcataccctgttctctgcagtgctttctaacagcttctgggtgcagattttcttcggcatccttttgcactcagcttattacaggtaggtagtgcttaagaaaagtcatggaggactaaagcctaagtccttttcacttttcctccatctgaaggtaggtgagttcatcctcttcatagtaatgctgttttaccaagactttttatatagcagatgaacccagaaagaattttctgctattgtgttcactacaacagggtagagacatcagacagccccagaaacccctttcagatctgatatgggactattaatttttatgctgttaatttgtattcattcacaatgcagtttaaggcggaaggctccactgcattctttggctaaggcttgaatgcttgctgatttgtaagatctatgttcgaggtttttgttttccttttaaaattctttagggagagagggatgctttctgaggggttctgaaagtatgattcaatgtgcaacatacaggtaggtcttcagcataagctgaaatgtatgcatgtaaaaactttgacatcttttttttaattttccactttcttctttcttaactttacttctctttttgtcccccccatcttatagaagttgaggccaagggaggatggtaggcacagacgaaacgtggcaaactgctctgtgctttcaaaccaaagtgttcccccctaccccaaatttgtctaagcactggccagtctgttgtgggcattgttttctacaaccaaattctgggtttttttcttctttctttaaacatagaggttccaccacaagggatgccctactctctcgcagctcttgaaagcatctgtttgagggaaaggtctctgcaagcaagtggttatttggattgcttgcttcccttttaaacacctgggacattgtaatcacaaaataacagtaaaaccttaaaagctattatggcctgagcacagctgaaatctagcagagtttaactcttctgcctccatgtctgtcactcataattcaggttctgctgttggcttcagaacatgagcagaagaatcattttatgctagttattgcattcatggttgaaactcaacttagggaaagggtttcattgtattaagcaatgggctgcttctcccacaatccctccctaacaattcgttgtgtgggacttctcatctaaaaaggttagtgggcttttgccttgggatcagtgcctctctaattccatgttccttgctgggtctccaaaaaatttcctgttgcattaagacttgaaagatttgtagatgtgtgatgttcaggcacaggatgctgaaagctatgttactattcttagtttgtaaattgtccttttgataccatcttgttttctttttgtag

SEQ ID NO: 35420 - DNA, 172 bp, Macaca Mulatta
aaccatcgtggcggcggcggcgggggtgccggtggtggcgggagcgcaccgcaaggctgcaagtgcgcatcgctctcctcagccaagtgctccgaggatgacgacgaattgcccatgtctccgtcctcctcagggaaggacgaccgggatcttacggtcactccctaggcgc

SEQ ID NO: 35421 - DNA, 5094 bp, Macaca Mulatta
  misc_feature (1)...(5094): n = A,T,C or G
cgcctgaggctccaccagccctggggacgcttcacgtggtacagcgcggggaacactcgctgaggctgcgctgggagccggtgcccggagtgcagggcttccttctgcgctggcaaccagagggtnnnnnnnnnnnnnnnnnnnnnnnnnnnnnnnnnnnnnnnnnnnnnnnnnnnnnnnnnnnnnnnnnnnnnnnnnnnnnnnnnnnnnnnnnnnnnnnnnnnnnnnnnnnnnnnnnnnnnnnnnnnnnnnnnnnnnnnnnnnnnnnnnnnnnnnnnnnnnnnnnnnnnnnnnnnnnnnnnnnnnnnnnnnnnnnnnnnnnnnnnnnnnnnnnnnnnnnnnnnnnnnnnnnnnnnnnnnnnnnnnnnnnnnnnnnnnnnnnnnnnnnnnnnnnnnnnnnnnnnnnnnnnnnnnnnnnnnnnnnnnnnnnnnnnnnnnnnnnnnnnnnnnnnnnnnnnnnnnnnnnnnnnnnnnnnnnnnnnnnnnnnnnnnnnnnnnnnnnnnnnnnnnnnnnnnnnnnnnnnnnnnnnnnnnnnnnnnnnnnnnnnnnnnnnnnnnnnnnnnnnnnnnnnnnnnnnnnnnnnnnnnnnnnnnnnnnnnnnnnnnnnnnnnnnnnnnnnnnnnnnnnnnnnnnnnnnnnnnnnnnnnnnnnnnnnnnnnnnnnnnnnnnnnnnnnnnnnnnnnnnnnnnnnnnnnnnnnnnnnnnnnnnnnnnnnnnnnnnnnnnnnnnnnnnnnnnnnnnnnnnnnnnnnnnnnnnnnnnnnnnnnnnnnnnnnnnnnnnnnnnnnnnnnnnnnnnnnnnnnnnnnnnnnnnnnnnnnnnnnnnnnnnnnnnnnnnnnnnnnnnnnnnnnnnnnnnnnnnnnnnnnnnnnnnnnnnnnnnnnnnnnnnnnnnnnnnnnnnnnnnnnnnnnnnnnnnnnnnnnnnnnnnnnnnnnnnnnnnnnnnnnnnnnnnnnnnnnnnnnnnnnnnnnnnnnnnnnnnnnnnnnnnnnnnnnnnnnnnnnnnnnnnnnnnnnnnnnnnnnnnnnnnnnnnnnnnnnnnnnnnnnnnnnnnnnnnnnnnnnnnnnnnnnnnnnnnnnnnnnnnnnnnnnnnnnnnnnnnnnnnnnnnnnnnnnnnnnnnnnnnnnnnnnnnnnnnnnnnnnnnnnnnnnnnnnnnnnnnnnnnnnnnnnnnnnnnnnnnnnnnnnnnnnnnnnnnnnnnnnnnnnnnnnnnnnnnnnnnnnnnnnnnnnnnnnnnnnnnnnnnnnnnnnnnnnnnnnnnnnnnnnnnnnnnnnnnnnnnnnnnnnnnnnnnnnnnnnnnnnnnnnnnnnnnnnnnnnnnnnnnnnnnnnnnnnnnnnnnnnnnnnnnnnnnnnnnnnnnnnnnnnnnnnnnnnnnnnnnnnnnnnnnnnnnnnnnnnnnnnnnnnnnnnnnnnnnnnnnnnnnnnnnnnnnnnnnnnnnnnnnnnnnnnnnnnnnnnnnnnnnnnnnnnnnnnnnnnnnnnnnnnnnnnnnnnnnnnnnnnnnnnnnnnnnnnnnnnnnnnnnnnnnnnnnnnnnnnnnnnnnnnnnnnnnnnnnnnnnnnnnnnnnnnnnnnnnnnnnnnnnnnnnnnnnnnnnnnnnnnnnnnnnnnnnnnnnnnnnnnnnnnnnnnnnnnnnnnnnnnnnnnnnnnnnnnnnnnnnnnnnnnnnnnnnnnnnnnnnnnnnnnnnnnnnnnnnnnnnnnnnnnnnnnnnnnnnnnnnnnnnnnnnnnnnnnnnnnnnnnnnnnnnnnnnnnnnnnnnnnnnnnnnnnnnnnnnnnnnnnnnnnnnnnnnnnnnnnnnnnnnnnnnnnnnnnnnnnnnnnnnnnnnnnnnnnnnnnnnnnnnnnnnnnnnnnnnnnnnnnnnnnnnnnnnnnnnnnnnnnnnnnnnnnnnnnnnnnnnnnnnnnnnnnnnnnnnnnnnnnnnnnnnnnnnnnnnnnnnnnnnnnnnnnnnnnnnnnnnnnnnnnnnnnnnnnnnnnnnnnnnnnnnnnnnnnnnnnnnnnnnnnnnnnnnnnnnnnnnnnnnnnnnnnnnnnnnnnnnnnnnnnnnnnnnnnnnnnnnnnnnnnnnnnnnnnnnnnnnnnnnnnnnnnnnnnnnnnnnnnnnnnnnnnnnnnnnnnnnnnnnnnnnnnnnnnnnnnnnnnnnnnnnnnnnnnnnnnnnnnnnnnnnnnnnnnnnnnnnnnnnnnnnnnnnnnnnnnnnnnnnnnnnnnnnnnnnnnnnnnnnnnnnnnnnnnnnnnnnnnnnnnnnnnnnnnnnnnnnnnnnnnnnnnnnnnnnnnnnnnnnnnnnnnnnnnnnnnnnnnnnnnnnnnnnnnnnnnnnnnnnnnnnnnnnnnnnnnnnnnnnnnnnnnnnnnnnnnnnnnnnnnnnnnnnnnnnnnnnnnnnnnnnnnnnnnnnnnnnnnnnnnnnnnnnnnnnnnnnnnnnnnnnnnnnnnnnnnnnnnnnnnnnnnnnnnnnnnnnnnnnnnnnnnnnnnnnnnnnnnnnnnnnnnnnnnnnnnnnnnnnnnnnnnnnnnnnnnnnnnnnnnnnnnnnnnnnnnnnnnnnnnnnnnnnnnnnnnnnnnnnnnnnnnnnnnnnnnnnnnnnnnnnnnnnnnnnnnnnnnnnnnnnnnnnnnnnnnnnnnnnnnnnnnnnnnnnnnnnnnnnnnnnnnnnnnnnnnnnnnnnnnnnnnnnnnnnnnnnnnnnnnnnnnnnnnnnnnnnnnnnnnnnnnnnnnnnnnnnnnnnnnnnnnnnnnnnnnnnnnnnnnnnnnnnnnnnnnnnnnnnnnnnnnnnnnnnnnnnnnnnnnnnnnnnnnnnnnnnnnnnnnnnnnnnnnnnnnnnnnnnnnnnnnnnnnnnnnnnnnnnnnnnnnnnnnnnnnnnnnnnnnnnnnnnnnnnnnnnnnnnnnnnnnnnnnnnnnnnnnnnnnnnnnnnnnnnnnnnnnnnnnnnnnnnnnnnnnnnnnnnnnnnnnnnnnnnnnnnnnnnnnnnnnnnnnnnnnnnnnnnnnnnnnnnnnnnnnnnnnnnnnnnnnnnnnnnnnnnnnnnnnnnnnnnnnnnnnnnnnnnnnnnnnnnnnnnnnnnnnnnnnnnnnnnnnnnnnnnnnnnnnnnnnnnnnnnnnnnnnnnnnnnnnnnnnnnnnnnnnnnnnnnnnnnnnnnnnnnnnnnnnnnnnnnnnnnnnnnnnnnnnnnnnnnnnnnnnnnnnnnnnnnnnnnnnnnnnnnnnnnnnnnnnnnnnnnnnnnnnnnnnnnnnnnnnnnnnnnnnnnnnnnnnnnnnnnnnnnnnnnnnnnnnnnnnnnnnnnnnnnnnnnnnnnnnnnnnnnnnnnnnnnnnnnnnnnnnnnnnnnnnnnnnnnnnnnnnnnnnnnnnnnnnnnnnnnnnnnnnnnnnnnnnnnnnnnnnnnnnnnnnnnnnnnnnnnnnnnnnnnnnnnnnnnnnnnnnnnnnnnnnnnnnnnnnnnnnnnnnnnnnnnnnnnnnnnnnnnnnnnnnnnnnnnnnnnnnnnnnnnnnnnnnnnnnnnnnnnnnnnnnnnnnnnnnnnnnnnnnnnnnnnnnnnnnnnnnnnnnnnnnnnnnnnnnnnnnnnnnnnnnnnnnnnnnnnnnnnnnnnnnnnnnnnnnnnnnnnnnnnnnnnnnnnnnnnnnnnnnnnnnnnnnnnnnnnnnnnnnnnnnnnnnnnnnnnnnnnnnnnnnnnnnnnnnnnnnnnnnnnnnnnnnnnnnnnnnnnnnnnnnnnnnnnnnnnnnnnnnnnnnnnnnnnnnnnnnnnnnnnnnnnnnnnnnnnnnnnnnnnnnnnnnnnnnnnnnnnnnnnnnnnnnnnnnnnnnnnnnnnnnnnnnnnnnnnnnnnnnnnnnnnnnnnnnnnnnnnnnnnnnnnnnnnnnnnnnnnnnnnnnnnnnnnnnggtcttgctggccctgcaggaccccannnnnnnnnnnnnnnnnnnnnnnnnnnnnnnnnnnnnnnnnnnnnnnnnnnnnnnnnnnnnnnnnnnnnnnnnnnnnnnnnnnnnnnnnnnnnnnnnnnnnnnnnnnnnnnnnnnnnnnnnnnnnnnnnnnnnnnnnnnnnnnnnnnnnngggggagacagggaagccgggagccccaggtcgagatggtgccggtggaaaagatggagacagagggagccctggtgtgccagnnnnnnnnnnnnnnnnnnnnnnnnnnnnnnnnnnnnnnnnnnnnnnnnnnnnnnnnnnnnnnnnnnnnnnnnnnnnnnnnnnnnnnnnnnnnnnnnnnnnnnnnnnnnnnnnnnnnnnnnnnnnnnnnnnnnnnnnnnnnnnnnnnnnnnnnnnnnnnnnnnnnnnnnnnnnnnnnnnnnnnnnnnnnnnnnnnnnnnnnnnnnnnnnnnnnnnnnnnnnnnnnnnnnnnnnnnnnnnnnnnnnnnnnnnnnnnnnnnnnnnnnnnnnnnnnnnnnnnnnnnnnnnnnnnnnnnnnnnnnnnnnnnnnnnnnnnnnnnnnnnnnnnnnnnagggagatctgggcctccctggcccccctggtgctcctggtgttgttgggttcccgggtcagacaggccctcgaggagagatgggtcagccaggccctagcggagagcggnnnnnnnnnnnnnnnnnnnnnnnnnnnnnnnnnnnnnnnnnnnnnnnnnnnnnnnnnnnnnnnnnnnnnnnnnnnnnnnnnnnnnnnnnnnnnnnnnnnnnnnnnnnnnnnnnnnnnnnnnnnnnnnnnnnnnnnnnnnnnnnnnnnnnnnnnnnnnnnnnnnnnnnnnnnnnnnnnnnnnnnnnnnnnnnnnnnnnnnnnnnnnnnnnnnnnnnnnnnnnnnnnnnnnnnnnnnnnnnnnnnnnnnnnnnnnnnnnnnnnnnnnnnnnnnnnnnnnnnnnnnnnnnnnnnnnnnnnnnnnnnnnnnnnnnnnnnnnnnnnnnnnnnnnnnnnnnnnnnnnnnnnnnnnnnnnnnnnnnnnnnnnnnnnnnnnnnnnnnnnnnnnnnnnnnnnnnnnnnnnnnnnnnnnnnnagggcagcaagggagagcctggtgacaagggctcagctgggtcgccaggactgcgtggactcccaggaccccaggcaagccctgccccaggcccaggcccaggtcca

SEQ ID NO: 35422 - DNA, 192 bp, Macaca Mulatta
cccacagttagttctggccctgtgcctaagcgccagaatggcagctccagctcaggacctgagcgatcaatcaatgggtccaagaagccaaccaatgactcaaatccctctaggcggacagtcagtggtacatgtggccctggacaacctgcaagcagctcaagtggccctaggcaacccatcagtggttca

SEQ ID NO: 35423 - DNA, 970 bp, Macaca Mulatta
  misc_feature (1)...(970): n = A,T,C or G
agctcagttttctgtgcttggaccctctgggcccatcctggccatggtgggtgaagacgctgatctgccctgtcacctgttcccaaccatgagtgcagagaccatggagctgagatgggtgagttccagcctaaggcaggtggtgaatgtgtatgcagatggaaaggaagtggaagacaggcagagtgcaccatatcgagggagaacttcgattctacgggatgacatcgctgcagggaaggctgctctccgaatacacaacgtcacagcctctgacagtggaaagtacttgtgttatttccaagatggtgacttctatgaaaaagccctggtggagctgaaggttgcagnnncagcactgggttctaatcttcatgttgaagtgaagggttatgaggatggagggatccatctggagtgcaggtccactggctggtatccccaacccaaaatacagtggagcaatgccaagggacagaacatcccagctgtggaagcacctgtggttgcagatggagtgggcctatatgcagtagcagcatctgtgatcatgagaggcggctctggggagagtgtgtcctgcatcatcagaaattctgttcttggcctggaaaagacagccagcatttctatcgcannnnnnnnnnnnnnnnnnnnnnnnnnnnnnnnnnnnnnnnnnnnnnnnnnnnnnnnnnnnnnnnnnnnnnnnnnnnnnnnnnnnnnnnnnnnnnnnnnnnnnnnnnnnnnnnnnnnnnnnnnnnnnnnnnnnnnnnnnnnnnnnnnnnnnnnnnnnnnnnnnnnnnnnnnnnnnnnnnnnnnnnnnnnnnnnnnnnnnnnnnnnnnnnnnnnnnnnnnnnnnnnnnnnnnnnnnnnnnnnnnnnnnnnnnnnnnnnnnnnnnnnnnnnnnnnnnnnnnnnnnnnnnnnnnnnnnnnnnnnnnaaaatggccctcttcaagcctggtgagtaaa

SEQ ID NO: 35424 - DNA, 864 bp, Macaca Mulatta
caagcggcggctggccttcctggaatggcatgaggcacccaccatcgttgtggccctgctggccgccctgggcttcctcagcaccctggccatcctggtgatattctggaggcacttccagacgcccatggttcgctcagctgggggccccatgtgcttcctgatgctgacgctgctgctggtggcatacatggtggtcccggtgtacgtggggccgcccaaggtctccacctgcttctgccgccaggccctctttcccctctgcttcaccatctgcatctcttgtatcgccgtgcgctctttccagatcgtctgtgtcttcaagatggccagccgcttcccgcgcgcctacagctactgggtccgctaccaggggccctacgtctccatggcgtttatcacggtactcaaaatggtcactgtggtgattggcatgctggtcacaggcctcaatcccaccacccgtattgaccccgatgaccccaagatcatgatcgtctcctgcaaccccaactaccgcaacagcctgttcttcaacaccggcctggacctgctgctctcagtggtgggtttcagtttcgcctacatgggcaaggaactgcccaccaattacaacgaggccaagttcatcaccctcagcatgaccttctatttcacctcatctgtctccctctgcaccttcatgtctgcctacaacggggtgctggtcaccatcatggacctcttggtcactgtgctcaacctcctggccatcagcctgggctactttggccccaagtgctacatgatcctcttctacccggagcgcaacacgcccgcctacttcaacagcatgatccagggctacaccatgaggagggacta

SEQ ID NO: 35425 - DNA, 3909 bp, Macaca Mulatta
  misc_feature (1)...(3909): n = A,T,C or G
aggtttcctatgttattcgagatgaagtagagaagtacaaccgaaatggagtcaatgccctgcagctggatccagcactaaatagacttttcacagccggtcgagactctatcataagaatatggagnnnnnnnnnnnnnnnnnnnnnnnnnnnnnnnnnnnnnnnnnnnnnnnnnnnnnnnnnnnnnnnnnnnnnnnnnnnnnnnnnnnnnnnnnnnnnnnnnnnnnnnnnnnnnnnnnnnnnnnnnnnnnnnnnnnnnnnnnnnnnnnnnnnnnnnnnnnnnnnnnnnnnnnnnnnnnnnnnnnnnnnnnnnnnnnnnnnnnnnnnnnnnnnnnnnnnnnnnnnnnnnnnnnnnnnnnnnnnnnnnnnnnnnnnnnnnnnnnnnnnnnnnnnnnnnnnnnnnnnnnnnnnnnnnnnnnnnnnnnnnnnnnnnnnnnnnnnnnnnnnnnnnnnnnnnnnnnnnnnnnnnnnnnnnnnnnnnnnnnnnnnnnnnnnnnnnnnnnnnnnnnnnnnnnnnnnnnnnnnnnnnnnnnnnnnnnnnnnnnnnnnnnnnnnnnnnnnnnnnnnnnnnnnnnnnnnnnnnnnnnnnnnnnnnnnnnnnnnnnnnnnnnnnnnnnnnnnnnnnnnnnnnnnnnnnnnnnnnnnnnnnnnnnnnnnnnnnnnnnnnnnnnnnnnnnnnnnnnnnnnnnnnnnnnnnnnnnnnnnnnnnnnnnnnnnnnnnnnnnnnnnnnnnnnnnnnnnnnnnnnnnnnnnnnnnnnnnnnnnnnnnnnnnnnnnnnnnnnnnnnnnnnnnnnnnnnnnnnnnnnnnnnnnnnnnnnnnnnnnnnnnnnnnnnnnnnnnnnnnnnnnnnnnnnnnnnnnnnnnnnnnnnnnnnnnnnnnnnnnnnnnnnnnnnnnnnnnnnnnnnnnnnnnnnnnnnnnnnnnnnnnnnnnnnnnnnnnnnnnnnnnnnnnnnnnnnnnnnnnnnnnnnnnnnnnnnnnnnnnnnnnnnnnnnnnnnnnnnnnnnnnnnnnnnnnnnnnnnnnnnnnnnnnnnnnnnnnnnnnnnnnnnnnnnnnnnnnnnnnnnnnnnnnnnnnnnnnnnnnnnnnnnnnnnnnnnnnnnnnnnnnnnnnnnnnnnnnnnnnnnnnnnnnnnnnnnnnnnnnnnnnnnnnnnnnnnnnnnnnnnnnnnnnnnnnnnnnnnnnnnnnnnnnnnnnnnnnnnnnnnnnnnnnnnnnnnnnnnnnnnnnnnnnnnnnnnnnnnnnnnnnnnnnnnnnnnnnnnnnnnnnnnnnnnnnnnnnnnnnnnnnnnnnnnnnnnnnnnnnnnnnnnnnnnnnnnnnnnnnnnnnnnnnnnnnnnnnnnnnnnnnnnnnnnnnnnnnnnnnnnnnnnnnnnnnnnnnnnnnnnnnnnnnnnnnnnnnnnnnnnnnnnnnnnnnnnnnnnnnnnnnnnnnnnnnnnnnnnnnnnnnnnnnnnnnnnnnnnnnnnnnnnnnnnnnnnnnnnnnnnnnnnnnnnnnnnnnnnnnnnnnnnnnnnnnnnnnnnnnnnnnnnnnnnnnnnnnnnnnnnnnnnnnnnnnnnnnnnnnnnnnnnnnnnnnnnnnnnnnnnnnnnnnnnnnnnnnnnnnnnnnnnnnnnnnnnnnnnnnnnnnnnnnnnnnnnnnnnnnnnnnnnnnnnnnnnnnnnnnnnnnnnnnnnnnnnnnnnnnnnnnnnnnnnnnnnnnnnnnnnnnnnnnnnnnnnnnnnnnnnnnnnnnnnnnnnnnnnnnnnnnnnnnnnnnnnnnnnnnnnnnnnnnnnnnnnnnnnnnnnnnnnnnnnnnnnnnnnnnnnnnnnnnnnnnnnnnnnnnnnnnnnnnnnnnnnnnnnnnnnnnnnnnnnnnnnnnnnnnnnnnnnnnnnnnnnnnnnnnnnnaggttttggatccaaatatggaccttcgaacagtgaaacacttcatatggaagagcggtggagacctaaccctccattaccgtcagaagtccacgtgaagggtgggctaatgcttctgggtattcatttacgaccttcctctatggccccaagagtagtcctaggaagcccactgagccccaacgggagcaagacttctaatggccgatttggtatggaccgagattatctttcaattgaagtgactaatcgagatgtaatatagaaaccagtctccatgtgtagattaagctgtccccnnnnnnnnnnnnnnnnnnnnnnnnnnnnnnnnnnnnnnnnnnnnnnnnnnnnnnnnnnnnnnnnnnnnnnnnnnnnnnnnnnnnnnnnnnnnnnnnnnnnnnnnnnnnnnnnnnnnnnnnnnnnnnnnnnnnnnnnnnnnnnnnnnnnnnnnnnnnnnnnnnnnnnnnnnnnnnnnnnnnnnnnnnnnnnnnnnnnnnnnnnnnnnnnnnnnnnnnnnnnnnnnnnnnnnnnnnnnnnnnnnnnnnnnnnnnnnnnnnnnnnnnnnnnnnnnnnnnnnnnnnnnnnnnnnnnnnnnnnnnnnnnnnnnnnnnnnnnnnnnnnnnnnnnnnnnnnnnnnnnnnnnnnnnnnnnnnnnnnnnnnnnnnnnnnnnnnnnnnnnnnnnnnnnnnnnnnnnnnnnnnnnnnnnnnnnnnnnnnnnnnnnnnnnnnnnnnnnnnnnnnnnnnnnnnnnnnnnnnnnnnnnnnnnnnnnnnnnnnnnnnnnnnnnnnnnnnnnnnnnnnnnnnnnnnnnnnnnnnnnnnnnnnnnnnnnnnnnnnnnnnnnnnnnnnnnnnnnnnnnnnnnnnnnnnnnnnnnnnnnnnnnnnnnnnnnnnnnnnnnnnnnnnnnnnnnnnnnnnnnnnnnnnnnnnnnnnnnnnnnnnnnnnnnnnnnnnnnnnnnnnnnnnnnnnnnnnnnnnnnnnnnnnnnnnnnnnnnnnnnnnnnnnnnnnnnnnnnnnnnnnnnnnnnnnnnnnnnnnnnnnnnnnnnnnnnnnnnnnnnnnnnnnnnnnnnnnnnnnnnnnnnnnnnnnnnnnnnnnnnnnnnnnnnnnnnnnnnnnnnnnnnnctaacaatctaatactttcatagaatcatttggatcttgtatagaatgtaacttatgngggataaacacttcaacttttggcagaaaatactttggattctccccaaggtcatttgtattcagagtaaatcaatggtccacccccatgaaactgtaagacaagcctcctgtatgaagccagaagcacaagtgccttcagagggcagttgattccagtccagttgcctccctagcttgtgtgtggcctgcctccagcagagcagggactagggagggaggcagggaaggtttttttcttttctacgtcttcacaggttcggctgggggcagctgatgggcctaagtccataccttactatttaagatattctgatcgcacaactgcagagacagggttccctcactgctagtcagcttcctttggaaactggacaggccattgccacctgcactttgaagaagtgagcaaagacgtggccacatttccaataagctgaaatggtctttctcccttcctcagagagcaaccagnnnnnnnnnnnnnnnnnnnnnnnnnnnnnnnnnnnnnnnnnnnnnnnnnnnnnnnnnnnnnnnnnnnnnnnnnnnnnnnnnnnnnnnnnnnnnnnnnnnnnnnttatttaccagccctcagttgtgtttgcacgaggggcctttgagcaaagaaatgggttntgctgggtcattgtgccctgtgtgctaagccttgggtggctgcattcccctcctatcatagatctgaaccccagcatgattgtatttctttcccctccagtcaaaccgtaatacagtttccagaaaatttgacagtcctgcaatgccaaaagggtaaaaatctgtatttcacagttgtatagaataaaggctttagttaaaat

SEQ ID NO: 35426 - DNA, 680 bp, Macaca Mulatta
aaaactgatattttgtaaatgtgtcacagacacatgggacagaaccctactttttgtggaggaccttaatctgaataaagtcatgagtttttcagtaaatctccactgagttttctggtaatgttacaaaaacaggcccatcactgtccactggaaatgggttaaatagatagatattctttcagtttatccatgatttcgttcatcttgtcgcctggaattaacatcacagttcgcaagggcgtcattggtacgtcatcaaaagaccatttgcctcccagacaagtgtcgctctcctcctgcactgagtagttgaacttcagaattgccttctaaaccaaataagtaaccatgaattaaaaatcgggacaacccaaagacaaaacccatttaatctacggcaaagaatagtatgtttggcatatgcttaaataagaatgagagctaaaaaaagcaaaactcagaattttaaaagttcaaatggacattcaggcagaagttataaaacacaaaccaagtagattttaaacccacatgaggaacagggatagaggcgtgcaacttctaagagatgagcaagcagctaagtgatattttcatttaattgtcaaaataatcttgtgatacgtaagtgaaattaagactcataaaatttgataattaactagaacaggtcttca

SEQ ID NO: 35427 - DNA, 689 bp, Macaca Mulatta
  misc_feature (1)...(689): n = A,T,C or G
ggcacacgccactcccacccatccgtgggccgccagcaccacgcgggcccnccatccacatcgcggccaccaagtccctgggacacgcgttgtcccctggtgtacgccgagaccaagcacttcctctactcctcaggcgacaaggagcagctgcggccctccttcctactcaactccctgcggcccagcctgactggcgcccggaggctcgtggagaccatctttctgggttccaggccttggatgccagggactccccgcaggccgccccgcctgccccagcgctactggcaaatgcggcccctgtttctggagctgcttgggaaccacgcgcagtgcccctacggggcgctcctcaagacgcactgcccgctgcgggctgcggtcaccccagcagccggtgtctgtgcccgggagaagccccagggctcagtggcggcccccgaggaggaggacacagaccgccgtcgcctggtgcagctgcttcgccagcacagcagcccctggcaggtgtacggcttcgtgcgggcctgcctgcgccggctggtgccccccggcctctggggctccaggcacaaccaacgccgcttcctcaggaacaccaagaagttcatatctctggggaagcacgccaagctctccctgcgggagctgacgtggaagatgagcgagcgggactgtgcttggct

SEQ ID NO: 35428 - DNA, 7000 bp, Macaca Mulatta
  misc_feature (1)...(7000): n = A,T,C or G
tggctgcagaggagggagccggcaatgctgcttccgccggcggtagccggggcgccgcggccatggggcgggttctaccgatgctgttggtgccggtccccgccgaggcgatggggcagctgggctcacgggcgcagctgcacacacagcaggaggctctggggagcctgacggctgcgggcagcctccaggtgctttctttggcgcctggcagccggggccggggtcgctgctgcctggagggccccttctggcannnnnnnnnnnnnnnnnnnnnnnnnnnnnnnnnnnnnnnnnnnnnnnnnnnnnnnnnnnnnnnnnnnnnnnnnnnnnnnnnnnnnnnnnnnnnnnnnnnnnnnnnnnnnnnnnnnnnnnnnnnnnnnnnnnnnnnnnnnnnnnnnnnnnnnnnnnnnnnnnnnnnnnnnnnnnnnnnnnnnnnnnnnnnnnnnnnnnnnnnnnnnnnnnnnnnnnnnnnnnnnnnnnnnnnnnnnnnnnnnnnnnnnnnnnnnnnnnnnnnnnnnnnnnnnnnnnnnnnnnnnnnnnnnnnnnnnnnnnnnnnnnnnnnnnnnnnnnnnnnnnnnnnnnnnnnnnnnnnnnnnnnnnnnnnnnnnnnnnnnnnnnnnnnnnnnnnnnnnnnnnnnnnnnnnnnnnnnnnnnnnnnnnnnncatttttgatgttgtggatggtacgtatgtagctcatgtggatttagcacttcacgaagaagatatgtgtaatgagcagcaacaggagccagccaagatttcttcatttacttcactgaaagtgtctcaagacctcgatgttgtagtgattgtcagttcatccaactctgcaattgctcttaacttaaatttgtatttcaggnnnnnnnnnnnnnnnnnnnnnnnnnnnnnnnnnnnnnnnnnnnnnnnnnnnnnnnnnnnnnnnnnnnnnnnnnnnnnnnnnnnnnnnnnnnnnnnnnnnnnnnnnnnnnnnnnnnnnnnnnnnnnnnnnnnnnnnnnnnnnnnnnnnnnnnnnnnnnnnnnnnnnnnnnnnnnnnnnnnnnnnnnnnnnnnnnnnnnnnnnnnnnnnnnnnnnnnnnnnnnnnnnnnnnnnnnnnnnnnnnnnnnnnnnnnnnnnnnnnnnnnnnnnnnnnnnnnnnnnnnnnnnnnnnnnnnnnnnnnnnnnnnnnnnnnnnnnnnnnnnnnnnnnnnnnnnnnnnnnnnnnnnnnnnnnnnnnnnnnnnnnnnnnnnnnnnnnnnnnnnnnnnnnnnnnnnnnnnnnnnnnnnnnnttaaatgtgtgtctgtgacccgattcactgcactgtttacttgggaagtggaaaggatggcctataccattaccctctgggatttggagaaccagggcatgcagtgtttttcccttggcagaaagtgtattcctgtagacagtattggagagcagcaactgtgctttgttttgacagnagagaaaggactctctctgattttgtttggtttgacacaagaagagtttttaaacagactcatgatccatggaagtgccagcactgtggacattctttgtcatctcaatggctgggggaggtgctccattcccatacatgcactagaggnnggccgggatagaaaatcgtcagctggacacagtaaatttctttttgaagagcaaagaaaatctttttaatccatcctcaaaatcttctgtatctgatcagtttgatcacttttcatcccatttatatttaagaannnnnnnnnnnnnnnnnnnnnnnnnnnnnnnnnnnnnnnnnnnnnnnnnnnnnnnnnnnnnnnnnnnnnnnnnnnnnnnnnnnnnnnnnnnnnnnnnnnnnnnnnnnnnnnnnnnnnnnnnnnnnnnnnnnnnnnnnnnnnnnnnnnnnnnnnnnnnnnnnnnnnnnnnnnnnnnnnnnnnnnnnnnnnnnnnnnnnnnnnnnnnnnnnnnnnnnnnnnnnnnnnnnnnnnnnnnnnnnnnnnnnnnnnnnnnnnnnnnnnnnnnnnnnnnnnnnnnnnnnnnnnnnnnnnnnnnnnnnnnnnnnnnnnnnnnnnnnnnnnnnnnnnnnnggaagttactgccaatgccattttaaacaacagaataccagaggcacagactttcttcaggattgatagtcattctgctcagaaacttgaggagctgattggcataggcctaaatttggtctttgacaatttaaaaaagaacaatataaaggaagcctctgaacttttgaagaatatggnnnnnnnnnnnnnnnnnnnnnnnnnnnnnnnnnnnnnnnnnnnnnnnnnnnnnnnnnnnnnnnnnnnnnnnnnnnnnnnnnnnnnnnnnnnnnnnnnnnnnnnnnnnnnnnnnnnnnnnnnnnnnnnnnnnnnnnnnnnnnnnnnnnnnnnnnnnnnnnnnnnnnnnnnnnnnnnnnnnnnnnnnnnnnnnnnnnnnnnnnnnnnnnnnnnnnnnnnnnnnnnnnnnnnnnnnnnnnnnnnnnnnnnnnnnnnnnnnnnnnnnnnnnnnnnnnnnnnnnnnnnnnnnnnnnnnnnnnnnnnnnnnnnnnnnnnnnnnnnnnnnnnnnnnnnnnnnnnnnnnnnnnnnnnnnnnnnnnnnnnnnnnnnnnnnnnnnnnnnnnnnnnnnnnnnnnnnnnnnnnnnnnnnnnnnnnnnnnnnnnnnnnnnnnnnnnnnnnnnnnnnnnnnnnnnnnnnnnnnnnnnnnnnnnnnnnnnnnnnnnnnnnnnnnnnnnnnnnnnnnnnnnnnnnnnnnnnnnnnnnnnnnnnnnnnnnnnnnnnnnnnnnnnnnnnnnnnnnnnnnnnnnnnnnnnnnnnnnnnnnnnnnnnnnnnnnnnnnnnnnnnnnnnnnnnnnnnnnnnnnnnnnnnnnnnnnnnnnnnnnnnnnnnnnnnnnnnnnnnnnnnnnnnnnnnnnnnnnnnnnnnnnnnnnnnnnnnnnnnnnnnnnnnnnnnnnnnnnnnnnnnnnnnnnnnnnnnnnnnnnnnnnnnnnnnnnnnnnnnnnnnnnnnnnnnnnnnnnnnnnnnnnnnnnnnnnnnnnnnnnnnnnnnnnnnnnnnnnnnnnnnnnnnnnnnnnnnnnnnnnnnnnnnnnnnnnnnnnnnnnnnnnnnnnnnnnnnnnnnnnnnnnnnnnnnnnnnnnnnnnnnnnnnnnnnnnnnnnnnnnnnnnnnnnnnnnnnnnnnnnnnnnnnnnnnnnnnnnnnnnnnnnnnnnnnnnnnnnnnnnnnnnnnnnnnnnnnnnnnnnnnnnnnnnnnnnnnnnnnnnnnnnnnnnnnnnnnnnnnnnnnnaggttgttcagaatgaagaaaatgaaaactgtttgaagaaagtggatccccagcttttgaagatggcattaactccttaccccaagctaaaaactgctctcttcccacagtgcactcctcctagtgtcctgccatctgatattacactctaccaccttattcannnnnnnnnnnnnnnnnnnnnnnnnnnnnnnnnnnnnnnnnnnnnnnnnnnnnnnnnnnnnnnnnnnnnnnnnnnnnnnnnnnnnnnnnnnnnnnnnnnnnnnnnnnnnnnnnnnnnnnnnnnnnnnnnnnnnnnnnnnnnnnnnnnnnnnnnnnnnnnnnnnnnnnnnnnnnnnnnnnnnnnnnnnnnnnnnnnnnnnnnnnnnnnnnnnnnnnnnnnnnnnnnnnnnnnnnnnnnnnnnnnnnnnnnnnnnnnnnnnnnnnnnnnnnnnnnnnnnnnnnnnnnnnnnnnnnnnnnnnnnnnnnnnnnnnnnnnnnnnnnnnnnnnnnnnnnnnnnnnnnnnnnnnnnnnnnnnnnnnnnnnnnnnnnnnnnnnnnnnnnnnnnnnnnnnnnnnnnnnnnnnnnnnnnnnnnnnnnnnnnnnnnnnnnnnnnnnnnnnnnnnnnnnnnnnnnnnnnnnnnnnnnnnnnnnnnnnnnnnnnnnnnnnnnnnnnnnnnnnnnnnnnnnnnnnnnnnnnnnnnnnnnnnnnnnnnnnnnnnnnnnnnnnnnnnnnnnnnnnnnnnnnnnnnnnnnnnnnnnnnnnnnnnnnnnnnnnnnnnnnnnnnnnnnnnnnnnnnnnnnnnnnnnnnnnnnnnnnnnnnnnnnnnnnnnnnnnnnnnnnnnnnnnnnnnnnnnnnnnnnnnnnnnnnnnnnnnnnnnnnnnnnnnnnnnnnnnnnnnnnnnnnnnnnnnnnnnnnnnnnnnnnnnnnnnnnnnnnnnnnnnnnnnnnnnnnnnnnnnnnnnnnnnnnnnnnnnnnnnnnnnnnnnnnnnnnnnnnnnnnnnnnnnnnnnnnnnnnnnnnnnnnnnnnnnnnnnnnnnnnnnnnnnnnnnnnnnnnnnnnnnnnnnnnnnnnnnnnnnnnnnnnnnnnnnnnnnnnnnnnnnnnnnnnnnnnnnnnnnnnnnnnnnnnnnnnnnnnnnnnnnnnnnnnnnnnnnnnnnnnnnnnnnnnnnnnnnnnnnnnnnnnnnnnnnnnnnnnnnnnnnnnnnnnnnnnnnnnnnnnnnnnnnnnnnnnnnnnnnnnnnnnnnnnnnnnnnnnnnnnnnnnnnnnnnnnnnnnnnnnnnnnnnnnnnnnnnnnnnnnnnnnnnnnnnnnnnnnnnnnnnnnnnnnnnnnnnnnnnnnnnnnnnnnnnnnnnnnnnnnnnnnnnnnnnnnnnnnnnnnnnnnnnnnnnnnnnnnnnnnnnnnnnnnnnnnnnnnnnnnnnnnnnnnnnnnnnnnnnnnnnnnnnnnnnnnnnnnnnnnnnnnnnnnnnnnnnnnnnnnnnnnnnnnnnnnnnnnnnnnnnnnnnnnnnnnnnnnnnnnnnnnnnnnnnnnnnnnnnnnnnnnnnnnnnnnnnnnnnnnnnnnnnnnnnnnnnnnnnnnnnnnnnnnnnnnnnnnnnnnnnnnnnnnnnnnnnnnnnnnnnnnnnnnnnnnnnnnnnnnnnnnnnnnnnnnnnnnnnnnnnnnnnnnnnnnnnnnnnnnnnnnnnnnnnnnnnnnnnnnnnnnnnnnnnnnnnnnnnnnnnnnnnnnnnnnnnnnnnnnnnnnnnnnnnnnnnnnnnnnnnnnnnnnnnnnnnnnnnnnnnnnnnnnnnnnnnnnnnnnnnnnnnnnnnnnnnnnnnnnnnnnnnnnnnnnnnnnnnnnnnnnnnnnnnnnnnnnnnnnnnnnnnnnnnnnnnnnnnnnnnnnnnnnnnnnnnnnnnnnnnnnnnnnnnnnnnnnnnnnnnnnnnnnnnnnnnnnnnnnnnnnnnnnnnnnnnnnnnnnnnnnnnnnnnnnnnnnnnnnnnnnnnnnnnnnnnnnnnnnnnnnnnnnnnnnnnnnnnnnnnnnnnnnnnnnnnnnnnnnnnnnnnnnnnnnnnnnnnnnnnnnnnnnnnnnnnnnnnnnnnnnnnnnnnnnnnnnnnnnnnnnnnnnnnnnnnnnnnnnnnnnnnnnnnnnnnnnnnnnnnnnnnnnnnnnnnnnnnnnnnnnnnnnnnnnnnnnnnnnnnnnnnnnnnnnnnnnnnnnnnnnnnnnnnnnnnnnnnnnnnnnnnnnnnnnnnnnnnnnnnnnnnnnnnnnnnnnnnnnnnnnnnnnnnnnnnnnnnnnnnnnnnnnnnnnnnnnnnnnnnnnnnnnnnnnnnnnnnnnnnnnnnnnnnnnnnnnnnnnnnnnnnnnnnnnnnnnnnnnnnnnnnnnnnnnnnnnnnnnnnnnnnnnnnnnnnnnnnnnnnnnnnnnnnnnnnnnnnnnnnnnnnnnnnnnnnnnnnnnnnnnnnnnnnnnnnnnnnnnnnnnnnnnnnnnnnnnnnnnnnnnnnnnnnnnnnnnnnnnnnnnnnnnnnnnnnnnnnnnnnnnnnnnnnnnnnnnnnnnnnnnnnnnnnnnnnnnnnnnnnnnnnnnnnnnnnnnnnnnnnnnnnnnnnnnttcaagtctggatagtcagaagtttgtgacagtgccctccagtgatgaagtggtgactaacctggaagtgctgacaagtaaatgcctccatggaaagaactactgtcgacaggtcctctgtctgtatgatcttgccaaggnnnnnnnnnnnnnnnnnnnnnnnnnnnnnnnnnnnnnnnnnnnnnnnnnnnnnnnnnnnnnnnnnnnnnnnnnnnnnnnnnnnnnnnnnnnnnnnnnnnnnnnnnnnnnnnnnnnnnnnnnnnnnnnnnnnnnnnnnnnnnnnnnnnnnnnnnnnnnnnnnnnnnnnnnnnnnnnnnnnnnnnnnnnnnnnnnnnnnnnnnnnnnnnnnnnnnnnnnnnnnnnnnnnnnnnnnnnnnnnnnnnnnnnnnnnnnnnnnnnnnnnnnnnnnnnnnnnnnnnnnnnnnnnnnnnnnnnnnnnnnnnnnnnnnnnnnnnnnnnnnnnnnnnnnnnnnnnnnnnnnnnnnnnnnnnnnnnnnnnnnnnnnnnnnnnnnnnnnnnnnnnnnnnnnnnnnnnnnnnnnnnnnnnnnnnnnnnnnnnnnnnnnnnnnnnnnnnnnnnnnnnnnnnnnnnnnnnnnnnnnnnnnnnnnnnnnnnnnnnnnnnnnnnnnnnnnnnnnnnnnnnnnnnnnnnnnnnnnnnnnnnnnnnnnnnnnnnnnnnnnnnnnnnnnnnnnnnnnnnnnnnnnnnnnnnnnnnnnnnnnnnnnnnnnnnnnnnnnnnnnnnnnnnnnnnnnnnnnnnnnnnnnnnnnnnnnnnnnnnnnnnnnnnnnnnnnnnnnnnnnnnnnnnnnnnnnnnnnnnnnnnnnnnnnnnnnnnnnnnnnnnnnnnnnnnnnnnnnnnnnnnnnnnnnnnnnnnnnnnnnnnnnnnnnnnnnnnnnnnnnnnnnnnnnnnnnnnnnnnnnnnnnnnnnnnnnnnnnnnnnnnnnnnnnnnnnnnnnnnnnnnnnnnnnnnnnnaggactcctgtgtgcgacaggcccagcactgtcagcggctcaccaagttgataactctgcagattcactttctgaacactggccagaacaccatgctcatcaacttgggccgccacaagctaatggactgtattctggccctacctcggttctaccag

SEQ ID NO: 35429 - DNA, 2491 bp, Macaca Mulatta
  misc_feature (1)...(2491): n = A,T,C or G
atggggtatgatgtaacccgtttccagggggatgttgacgaagatcttatctgccctatttgcagtggagtcttggaggagccagtacagnnnnnnnnnnnnnnnnnnnnnnnnnnnnnnnnnnnnnnnnnnnnnnnnnnnnnnnnnnnnnnnnnnnnnnnnnnnnnnnnnnnnnnnnnnnnnnnnnnnnnnnnnnnnnnnnnnnnnnnnnnnnnnnnnnnnnnnnnnnnnnnnnnnnnnnnnnnnnnnnnnnnnnnnnnnnnnnnnnnnnnnnnnnnnnnnnnnnnnnnnnnnnnnnnnnnnnnnnnnnnnnnnnnnnnnnnnnnnnnnnnnnnnnnnnnnnnnnnnnnnnnnnnnnnnnnnnnnnnnnnnnnnnnnnnnnnnnnnnnnnnnnnnnnnnnnnnnnnnnnnnnnnnnnnnnnnnnnnnnnnnnnnnnnnnnnnnnnnnnnnnnnnnnnnnnnnnnnnnnnnnnnnnnnnnnnnnnnnnnnnnnnnnnnnnnnnnnnnnnnnnnnnnnnnnnnnnnnnnnnnnnnnnnnnnnnnnnnnnnnnnnnnnnnnnnnnnnnnnnnnnnnnnnnnnnnnnnnnnnnnnnnnnnnnnnnnnnnnnnnnnnnnnnnnnnnnnnnnnnnnnnnnnnnnnnnnnnnnnnnnnnnnnnnnnnnnnnnnnnnnnnnnnnnnnnnnnnnnnnnnnnnnnnnnnnnnnnnnnnnnnnnnnnnnnnnnnnnnnnnnnnnnnnnnnnnnnnnnnnnnnnnnnnnnnnnnnnnnnnnnnnnnnnnnnnnnnnnnnnnnnnnnnnnnnnnnnnnnnnnnnnnnnnnnnnnnnnnnnnnnnnnnnnnnnnnnnnnnnnnnnnnnnnnnnnnnnnnnnnnnnnnnnnnnnnnnnnnnnnnnnnnnnnnnnnnnnnnnnnnnnnnnnnnnnnnnnnnnnnnnnnnnnnnnnnnnnnnnnnnnnnnnnnnnnnnnnnnnnnnnnnnnnnnnnnnnnnnnnnnnnnnnnnnnnnnnnnnnnnnnnnnnnnnnnnnnnnnnnnnnnnnnnnnnnnnnnnnnnnnnnnnnnnnnnnnnnnnnnnnnnnnnnnnnnnnnnnnnnnnnnnnnnnnnnnnnnnnnnnnnnnnnnnnnnnnnnnnnnnnnnnnnnnnnnnnnnnnnnnnnnnnnnnnnnnnnnnnnnnnnnnnnnnnnnnnnnnnnnnnnnnnnnnnnnnnnnnnnnnnnnnnnnnnnnnnnnnnnnnnnnnnnnnnnnnnnnnnnnnnnnnnnnnnnnnnnnnnnnnnnnnnnnnnnnnnnnnnnnnnnnnnnnnnnnnnnnnnnnnnnnnnnnnnnnnnnnnnnnnnnnnnnnnnnnnnnnnnnnnnnnnnnnnnnnnnnnnnnnnnnnnnnnnnnnnnnnnnnnnnnnnnnnnnnnnnnnnnnnnnnnnnnnnnnnnnnnnnnnnnnnnnnnnnnnnnnnnnnnnnnnnnnnnnnnnnnnnnnnnnnnnnnnnnnnnnnnnnnnnnnnnnnnnnnnnnnnnnnnnnnnnnnnnnnnnnnnnnnnnnnnnnnnnnnnnnnnnnnnnnnnnnnnnnnnnnnnnnnnnnnnnnnnnnnnnnnnnnnnnnnnnnnnnnnnnnnnnnnnnnnnnnnnnnnnnnnnnnnnnnnnnnnnnnnnnnnnnnnnnnnnnnnnnnnnnnnnnnnnnnnnnnnnnnnnnnnnnnnnnnnnnnnnnnnnnnnnnnnnnnnnnnnnnnnnnnnnnnnnnnnnnnnnnnnnnnnnnnnnnnnnnnnnnnnnnnnnnnnnnnnnnnnnnnnnnnnnnnnnnnnnnnnnnnnnnnnnnnnnnnnnnnnnnnnnnnnnnnnnnnnnnnnnnnnnnnnnnnnnnnnnnnnnnnnnnnnnnnnnnnnnnnnnnnnnnnnnnnnnnnnnnnnnnnnnnnnnnnnnnnnnnnnnnnnnnnnnnnnnnnnnnnnnnnnnnnnnnnnnnnnnnnnnnnnnnnnnnnnnnnnnnnnnnnnnnnnnnnnnnnnnnnnnnnnnnnnnnnnnnnnnnnnnnnnnnnnnnnnnnnnnnnnnnnnnnnnnnnnnnnnnnnnnnnnnnnnnnnnnnnnnnnnnnnnnnnnnnnnnnnnnnnnnnnnnnnnnnnnnnnnnnnnnnnnnnnnnnnnnnnnnnnnnnnnnnnnnnnnnnnnnnnnnnnnngtccagcatcgatgcctgtgccctctggaaaaatttccttctagcccttccagggcctcatcataaaactctggatttagagtattcattttgaaggcaaccccccgcttccccaagttttcttggagctgtatagctgggttctaagcttcaccatgcaaatcagaaattttatctctaagtacaggctgtgctgtgtctcacccacaccccccggggacttcagttccatttcaggttacctggggcataccttgatccctagagtgactggcagagtaagtaagagaaggggagggatagtaggtgtgataattttaatatggaggtg

SEQ ID NO: 35430 - DNA, 1025 bp, Macaca Mulatta
gggctttttctttcggcggagcgcggcggcaagatggccgtgcaaatttccaagaagaggaagtttgtcgctgatggcatcttcaaagctgaactgaatgagtttcttactcgggagctggctgaagatggctactctggagttgaggtgcgagttacaccaaccaggacagaaatcattatcttagccaccagaacacagaatgttcttggtgagaagggccggcggattcgggaactgactgctgtagttcagaagaggtttggctttccagagggcagtgtagagctttatgctgaaaaggtggccactagaggtctgtgtgccattgcccaggcagagtctctgcgttacaaactcctaggagggcttgctgtgcggagggcctgctatggtgtgctgcggttcatcatggagagcggggccaaaggctgcgaggtcgtggtgtctgggaaactccgaggacagagggctaaatccatgaagtttgtggatggcctgatgatccacagcggagaccctgttaactactacgttgacactgctgtgcgccatgtgttgctccaacagggggtgctgggcatcaaggtgaagaacatgcttgccctgggaccgacaattggtaagattgggccctagcgaagccccctgcctggaccatggtgagcattggtgggagcccagacgatggaaatactgggcgctaacgctcgcgcattctccagaaacataaagggggtgggaatagccggagccgccatgcgatgccgccggccagtgccccacgagcgttacggggttctcccttgggcggcgtggaattcggggaaggcgtgatggtgggctcccggagagaaactgttaaagaaaaaggggagagcaggggggggggtcgacggaccggaataagccgagaggagaccatggtgaggcccgcgcgggggcccccgtagaaagcgttttgagagaacaatgccgggttgcaccaccggccgaggccacggtgaggcaaagggggcaagccg

SEQ ID NO: 35431 - DNA, 926 bp, Macaca Mulatta
ggcagtgggctcaggcccatcagctacccctgcagctggggaagacttctgccatcctggcagtgaggctgggctggccagccaccacggaccataccgactgggcctctgatgttcttccagtgaggcatctctctgggatgcagaacttccctccatccacccctctggcacctgggttggtctagtctgagcttgctgtggccttcctggttatgagagcctatgatccttagatgtgtctcctgtttcagaccagcgccaccatgcaacttcctttgactttctgtgtaccacagggatagaggaattaagaggacaatctagctctctatacttggaaccaccaaaccaaatgtgcattgaatactctgaaactgaagggactggatctacaggtgggatgagggggacagaccacttttctatattgcagtgtgaatgttgggcccctgctcaagtctctcctgatcacctcagggcataaagcatgtttcatcctctggcctgacagtgtctttgctcagggaggggaagtggaagggaagggcatatggggtcaggacagggccttgcaggggagcagcctacataacgacttctttggtctttacctgctggggccaacctggtctgggtctggggtttggggagcttgagctcaagatgtgctttaagtggcttaaagggacccactgagattggggtgggttgggaggaagtgctggacatcaggctgggaggtgaggacctaagtgtgcatgagctgggcgtctagaggcggcatcagcttctgggctgtaactagggccagtggagccacagcggcccttgcacccgccagaaacatcttggctcatcaagacacatccaagaaccccaagaacaatgctgccttgggttaaatcttcattccagtgggtgcc

SEQ ID NO: 35432 - DNA, 293 bp, Macaca Mulatta
aaaacaaatgtatggttaatcttttgatcttttatctagaaaatgatcagtattatcaggaatctgacaaataaaccttcaacagtggtgattttcccatagagatattattctgaatgccaaattaaaggtatagtctgaaaattctaatttttttaccctttgtagctacattgcactattacaatattcagggttactaaactatagccatgttcttatagaatggtgtactcaatactgtgaaaatgtctgaaaaagttaagctttttcctaaaattatttaggttttg

SEQ ID NO: 35433 - DNA, 114 bp, Macaca Mulatta
ggcttattcagctgttaactaccactgtaatgaagttgatccaggagctgaagttgtgccaaatgaatgctcagttcatgaagctactccaccctctggaaatggcccacaaaa

SEQ ID NO: 35434 - DNA, 762 bp, Macaca Mulatta
ggcccccaggtgccaggacttacacctgctaggggctgggcagggccccggctgtgctctctctgaagggcttgtccaagttcattgccctgttacaggtggtcaagacgtgcggccaccttgacctaggctacccttagccaatatcctctgcccctggctggctggtggctcagggtcggcagcgttaggggtctggtgaaagcccaccccatgggattgagggacagggctgcactccgaccgcctgcacctgctcttccctccacccccgtgggacctcttcttcacgtgccatgtgtgctgaaggcccagggcccagcagggggcagtggcacctgttgacagaaaaggcccaggtgctcaccggtggaccttctggcccgcctctcccctgtcacttgtcaggcatccagggccctgacctgtgcctagccgccagggtgacagaaggcagaactgaagcgggatctgtcccagtgggccacggaccaggccactgccttttgtcctcagtgactgtacattcctgttctcggacttgaactctactgtaactgttttcttaaatgaagctgtacaggatgattcactgccatgccagtcaagcgggcttgccatgttctgtgaatctcgattgagcggtgccacccggccccattactccaccaacggccgctgttgggggatgccacagccctggccaacggtcgtaacccaaacgagctcggcattggagttgtaaaaggggcccccgaaccg

SEQ ID NO: 35435 - DNA, 150 bp, Macaca Mulatta
cgacgacctgcgcaggcgtggcttgaggaaacgcccattgtgggtggagccacccgaaaggctccgatcgggggcgggaacaggatcggcccgcgggctggcgccaataggctgccgcagagacagggcgggctctgccaagggacgcgc

SEQ ID NO: 35436 - DNA, 992 bp, Macaca Mulatta
  misc_feature (1)...(992): n = A,T,C or G
ggagacaaaccgcacaagtgtgagttttgtgacaagtgcttcagccggaaggacaacctgaccatgcacatgcggtgccacaccagtgtgaagccacacaagtgtcacctgtgtgactatgctgccgtggacagcagtagcctcaagaagcacctgcggatccactctgacgagcggccgtacaaatgccagctctgcccctatgccagccgcaactccagccagctcaccgtccacctgcgatcccacacgggnggggatacccccttccagtgctggctctgtagcgccaagttcaaaatcagctcggacttgaaaaggcacatgatcgtgcactcgggggagaagcctttcaagtgcgagttctgcgacgtccgctgcaccatgaaggcgaatctcaaatcgcacatccgcatcaagcacaccttcaagtgtctgcactgtgccttccagggccgggaccgcgctgacctcctggagcacagccggctgcaccaggccgaccacccggagaagtgcccagagtgcagctactcctgctccagcgcggccgcgctgcgcgtgcacagcagagtccactgtaaggaccgtcccttcaagtgtgacttctgcagcttcgacacgaagcggcccagcagcctggccaagcacatcgacaaggtgcacagggacgaggccaagacggagaactgggcccctctgggcaaggaagggctcagagagagcagctctcaacatgtggccaagatcgtgacgcagagggccttccgctgtgagacctgcggcgcatccttcgtcagggatgactcgctgagatgccacaagaagcagcacagtgaccagagcgagaacaagaactcagacttggtcacccttccaccggaaagcggtgcgtcggggcagctcagcaccctggtctccgtggggcagctggaggcttccctagagcccagcaagacctctagctcagccgaagggggtcgtcagctgtc

SEQ ID NO: 35437 - DNA, 784 bp, Macaca Mulatta
  misc_feature (1)...(784): n = A,T,C or G
ggggtcagaggcttaagtctaaggcactgagcgtatcatgttgaagatgagcgggtggcagcgacagagccaaaatcagagctggaacctgaggagagagtgttcaagaaggaagtgtatcttcatacatcaccacacctgaaagcagactgatccaactgcagagatggcagctgagtcattgcctttctccttcgggacactgtccagctgggagctggaagcctggtatgaggacctgcaagaggtcctgtcttcagacgaaattgggggtacctatgtctcacctcctggaaatgaagaggaagaatcaaaaacctttaccactcttgaccctgcttcgctggcttggctgactgaggaggagccagaaccagcagaggtcacaaccacctcccagagccctcgctctccagattccagtcagagctccctggctcnnnnnnnnnnnnnnnnnnnccaagggagaaccaggaaacggaaacagagtggccattcccccacccgggctggaaagcagcgcatgatagacaaagaacaggagaatgaaacgaaagtggcacaactagctgaagagaaagaaacggttcaagccatgaaattccagcgccctaacccagggaaagtaaaaagccgactccgatcgaagctcttgatccgaacccgaaatggggggaaatctctggccaccaatagcnnnnnnnnnnnnnnnnnnggggaagccatctcagagtatacttcacaacgcattgagggggaccaacaacacttaaaccgccctacc

SEQ ID NO: 35438 - DNA, 2048 bp, Macaca Mulatta
  misc_feature (1)...(2048): n = A,T,C or G
agtgtcctgactatgatttgtgccagagaatttctgggcaaagacagcacaataatacgggatacatatacagtagagaccagtgggatcctgaagtcattgagaatcnnnnnnnnnnnnnnnnnnnnnnnnnnnnnnnnnnnnnnnnnnnnnnnnnnnnnnnnnnnnnnnnnnnnnnnnnnnnnnnnnnnnnnnnnnnnnnnnnnnnnnnnnnnnnnnnnnnnnnnnnnnnnnnnnnnnnnnnnnnnnnnnnnnnnnnnnnnnnnnnnnnnnnnnnnnnnnnnnnnnnnnnnnnnnnnnnnnnnnnnnnnnnnnnnnnnnnnnnnnnnnnnnnnnnnnnnnnnnnnnnnnnnnnnnnnnnnnnnnnnnnnnnnnnnnnnnnnnnnnnnnnnnnnnnnnnnnnnnnnnnnnnnnnnnnnnnnnnnnnnnnnnnnnnnnnnnnnnnnnnnnnnnnnnnnnnnnnnnnnnnnnnnnnnnnnnnnnnnnnnnnnnnnnnnnnnnnnnnnnnnnnnnnnnnnnnnnnnnnnnnnnnnnnnnnnnnnnnnnnnnnnnnnnnnnnnnnnnnnnnnnnnnnnnnnnnnnnnnnnnnnnnnnnnnnnnnnnnnnnnnnnnnnnnnnnnnnnnnnnnnnnnnnnnnnnnnnnnnnnnnnnnnnnnnnnnnnnnnnnnnnnnnnnnnnnnnnnnnnnnnnnnnnnnnnnnnnnnnnnnnnnnnnnnnnnnnnnnnnnnnnnnnnnnnnnnnnnnnnnnnnnnnnnnnnnnnnnnnnnnnnnnnnnnnnnnnnnnnnnnnnnnnnnnnnnnnnnnnnnnnnnnnnnnnnnnnnnnnnnnnnnnnnnnnnnnnnnnnnnnnnnnnnnnnnnnnnnnnnnnnnnnnnnnnnnnnnnnnnnnnnnnnnnnnnnnnnnnnnnnnnnnnnnnnnnnnnnnnnnnnnnnnnnnnnnnnnnnnnnnnnnnnnnnnnnnnnnnnnnnnnnnnnnnnnnnnnnnnnnnnnnnnnnnnnnnnnnnnnnnnnnnnnnnnnnnnnnnnnnnnnnnnnnnnnnnnnnnnnnnnnnnnnnnnnnnnnnnnnnnnnnnnnnnnnnnnnnnnnnnnnnnnnnnnnnnnnnnnnnnnnnnnnnnnnnnnnnnnnnnnnnnnnnnnnnnnnnnnnnnnnnnnnnnnnnnnnnnnnnnnnnnnnnnnnnnnnnnnnnnnnnnnnnnnnnnnnnnnnnnnnnnnnnnnnnnnnnnnnnnnnnnnnnnnnnnnnnnnnnnnnnnnnnnnnnnnnnnnnnnnnnnnnnnnnnnnnnnnnnnnnnnnnnnnnnnnnnnnnnnnnnnnnnnnnnnnnnnnnnnnnnnnnnnnnnnnnnnnnnnnnnnnnnnnnnnnnnnnnnnnnnnnnnnnnnnnnnnnnnnnnnnnnnnnnnnnnnnnnnnnnnnnnnnnnnnnnnnnnnnnnnnnnnnnnnnnnnnnnnnnnnnnnnnnnnnnnnnnnnnnnnnnnnnnnnnnnnnnnnnnnnnnnnnnnnnnnnnnnnnnnnnnnnnnnnnnnnnnnnnnnnnnnnnnnnnnnnnnnnnnnnnnnnnnnnnnnnnnnnnnnnnnnnnnnnnnnnnnnnnnnnnnnnnnnnnnnnnnnnnnnnnnnnnnnnnnnnnnnnnnnnnnnnnncaggtcaaatctggcatgttgccagcacccagaagccctctcatgtttcttctcaataccagtctcctcactctccacactaaggtaaccactgcccagaattttatggcattcacttccacacttcttttacagttttgccatgcaagcatacgtccaaataccataggctagttttgcatgttttttgaactttatagacttaaaacaatttatcttctttgtgcctggcttctttcacttaacattataattatgatatttgtccacactattgaatgtaggtgcattttattcatttttgttttattgtattctgttgattgacttataccataatgtatttatccacatttgagcactaataaaacttggattgattccagattggagtaaataacactactataa

SEQ ID NO: 35439 - DNA, 748 bp, Macaca Mulatta
  misc_feature (1)...(748): n = A,T,C or G
catgtgctaatgttctgtaaatccagaaaatcgtatcacataaaattcaataaggaattaaagaaatcaaattaatcacacttgtgttaaataaataagaataggtcagatacctgtttccaagttatgctgggtatataaaaagcttctctgcaatcatagaaaagtttgtaaagattcattgatgaaagcaccttgcaattcagatgaacttcaatacaatattgtggggcttttttatgtaagagctttaaaaagtatatatgcacctgtatatttgaatagatattgatgaaaggggccatacaggcctcagagtaatgcaccatcagaaatacttcaggggatacagtgtcttttaaatttgaatattcaagtatttaagttctatgaagttatatgatacctcctggatgtttcctagaagttctgttattcatagttagaaacaggcttttttaaagaggaaatgccaagtttctcaaatcaagtttcacataacttagagctctatttcnnnnnnnnnnnnnnnnnnnnnatggttgtttgtttttgctgttgttgttgttttttaacatagcaggacttctttggtgataaatattggagaaaaccttaaagagccttaagactgctgactagaaattcatgaggggcttcacatacatttttacattgctgctcacttttcagggggaaaggttgtgagtctgatagctcaaatctgtatcagaaaataaaaattaca

SEQ ID NO: 35440 - DNA, 279 bp, Macaca Mulatta
  misc_feature (1)...(279): n = A,T,C or G
gctgatgtagaaggccaatccttaagacaccgagacaagcgacttagtttaaatttgngccatgcaggttctccccaatgtaccccacagcttcagccagtatcgaagacagctatgtgcccatgagcccccaggctggtgcctctggtcttggaccccactgcagccctgatgactacattccaatgaactcaggaagcatctcaagccagttgcctgagctacctgcagacctggaacctcccccagtgaatagagatctcaagcctcagaggaaan

SEQ ID NO: 35441 - DNA, 3438 bp, Macaca Mulatta
  misc_feature (1)...(3438): n = A,T,C or G
aaaggataaaatcaaataccagcaagaaacggaaccttctaactgctctttgaccatctggaaccggaagagctatccgagcacctcacctacctggagttcaagtccttccgaaggatatcnnnnnnnnnnnnnnnnnnnnnnnnnnnnnnnnnnnnnnnnnnnnnnnnnnnnnnnnnnnnnnnnnnnnnnnnnnnnnnnnnnnnnnnnnnnnnnnnnnnnnnnnnnnnnnnnnnnnnnnnnnnnnnnnnnnnnnnnnnnnnnnnnnnnnnnnnnnnnnnnnnnnnnnnnnnnnnnnnnnnnnnnnnnnnnnnnnnnnnnnnnnnnnnnnnnnnnnnnnnnnnnnnnnnnnnnnnnnnnnnnnnnnnnnnnnnnnnnnnnnnnnnnnnnnnnnnnnnnnnnnnnnnnnnnnggttctcggtgagatgactgagctgctgtcctcctccagaaactatgacaattatcggcgagcctatggagagtgcaccgactnnnnnnnnnnnnnnnnnnnnnnnnnnnnnnnnnnnnnnnnnnnnnnnnnnnnnnnnnnnnnnnnnnnnnnnnnnnnnnnnnnnnnnnnnnnnnnnnnnnnnnnnnnnnnnnnnnnnnnnnnnnnnnnnnnnnnnnnnnnnnnnnnnnnnnnnnnnnnnnnnnnnnnnnnnnnnnnnnnnnnnnnnnnnnnnnnnnnnnnnnnnnnnnnnnnnnnnnnnnnnnnnnnnnnnnnnnnnnnnnnnnnnnnnnnnnnnnnnnnnnnnnnnnnnnnnnnnnnnnnnnnnnnnnnnnnnnnnnnnnnnnnnnnnnnnnnnnnnnnnnnnnnnnnnnnnnnnnnnnnnnnnnnnnnnnnnnnnnnnnnnnnnnnnnnnnnnnnnnnnnnnnnnnnnnnnnnnnnnnnnnnnnnnnnnnnnnnnnnnnnnnnnnnnnnnnnnnnnnnnnnnnnnnnnnnnnnnnnnnnnnnnnnnnnnnnnnnnnnnnnnnnnnnnnnnnnnnnnnnnnnnnnnnnnnnnnnnnnnnnnnnnnnnnnnnnnnnnnnnnnnnnnnnnnnnnnnnnnnnnnnnnnnnnnnnnnnnnnnnnnnnnnnnnnnnnnnnnnnnnnnnnnnnnnnnnnnnnnnnnnnnnnnnnnnnnnnntctggggagngatcaaacaaggatatcgatgnnnagactgcgggatgaactgccacaaacagtgcaaagatctggttgtgtttgagtgcaagaagcgagccaagaacccagtagctcccacagagaacaacacctctgtggggccagtgtccaacctctgctcattgggagccaaagatctgctccatnnnnnnnnnnnnnnnnnnnnnnnnnnnnnnnnnnnnnnnnnnnnnnnnnnnnnnnnnnnnnnnnnnnnnnnnnnnnnnnnnnnnnnnnnnnnnnnnnnnnnnnnnnnnnnnnnnnnnnnnnnnnnnnnnnnnnnnnnnnnnnnnnnnnnnnnnnnnnnnnnnnnnnnnnnnnnnnnnnnnnnnnnnnnnnnnnnnnnnnnnnnnnnnnnnnnnnnnnnnnnnnnnnnnnnnnnnnnnnnnnnnnnnnnnnnnnnnnnnnnnnnnnnnnnnnnnnnnnnnnnnnnnnnnnnnnnnnnnnnnnnnnnnnnnnnnnnnnnnnnnnnnnnnnnnnnnnnnnnnnnnnnnnnnnnnnnnnnnnnnnnnnnnnnnnnnnnnnnnnnnnnnnnnnnnnnnnnnnnnnnnnnnnnnnnnnnnnnnnnnnnnnnnnnnnnnnnnnnnnnnnnnnnnnnnnnnnnnnnnnnnnnnnnnnnnnnnnnnnnnnnnnnnnnnnnnnnnnnnnnnnnnnnnnnnnnnnnnnnnnnnnnnnnnnnnnnnnnnnnnnnnnnnnnnnnnnnnnnnnnnnnnnnnnnnnnnnnnnnnnnnnnnnnnnnnnnnnnnnnnnnnnnnnnnnnnnnnnnnnnnnnnnnnnnnnnnnnnnnnnnnnnnnnnnnnnnnnnnnnnnnnnnnnnnnnnnnnnnnnnnnnnnnnnnnnnnnnnnnnnnnnnnnnnnnnnnnnnnnnnnnnnnnnnnnnnnnnnnnnnnnnnnnnnnnnnnnnnnnnnnnnnnnnnnnnnnnnnnnnnnnnnnnnnnnnnnnnnnnnnnnnnnnnnnnnnnnnnnnnnnnnnnnnnnnnnnnnnnnnnnnnnnnnnnnnnnnnnnnnnnnnnnnnnnnnnnnnnnnnnnnnnnnnnnnnnnnnnnnnnnnnnnnnnnnnnnnnnnnnnnnnnnnnnnnnnnnnnnnnnnnnnnnnnnnnnnnnnnnnnnnnnnnnnnnnnnnnnnnnnnnnnnnnnnnnnnnnnnnnnnnnnnnnnnnnnnnnnnnnnnnnnnnnnnnnnnnnnnnnnnnnnnnnnnnnnnnnnnnnnnnnnnnnnnnnnnnnnnnnnnnnnnnnnnnnnnnnnnnnnnnnnnnnnnnnnnnnnnnnnnnnnnnnnnnnnnnnnnnnnnnnnnnnnnnnnnnnnnnnnnnnnnnnnnnnnnnnnnnnnnnnnnnnnnnnnnnnnnnnnnnnnnnnnnnnnnnnnnnnnnnnnnnnnnnnnnnnnnnnnnnnnnnnnnnnnnnnnnnnnnnnnnnnnnnnnnnnnnnnnnnnnnnnnnnnnnnnnnnnnnnnnnnnnnnnnnnnnnnnnnnnnnnnnnnnnnnnnnnnnnnnnnnnnnnnnnnnnnnnnnnnnnnnnnnnnnnnnnnnnnnnnnnnnnnnnnnnnnnnnnnnnnnnnnnnnnnnnnnnnnnnnnnnnnnnnnnnnnnnnnnnnnnnnnnnnnnnnnnnnnnnnnnnnnnnnnnnnnnnnnnnnnnnnnnnnnnnnnnnnnnnnnnnnnnnnnnnnnnnnnnnnnnnnnnnnnnnnnnnnnnnnnnnnnnnnnnnnnnnnnnnnnnnnnnnnnnnnnnnnnnnnnnnnnnnnnnnnnnnnnnnnnnnnnnnnnnnnnnnnnnnnnnnnnnnnnnnnnnnnnnnnnnnnnnnnnnnnnnnnnnnnnnnnnnnnnnnnnnnnnnnnnnnnnnnnnnnnnnnnnnnnnnnnnnnnnnnnnnnnnnnnnnnnnnnnnnnnnnnnnnnnnnnnnnnnnnnnnnnnnnnnnnnnnnnnnnnnnnnnattcatttgtcagcctctttttagttctcttnnnnnnnnnnnnnnatatgatcattttcctttttgggggtacttagcttccatgcctattaagtctgctactagactgacttgaaattcataaacaagttgtccaattgccaagaatatgttaacaattaaaagttccaaacctaaagccaatagcaccaagtcttcataagaatacgaagtatatatacagtattgcttacctggaggattcagatcatttaggaattctctttgatgaaaggccagttcccatttgcattcctccttgcactgaattttagtaatgtagaactagcttgtagttagt

SEQ ID NO: 35442 - DNA, 840 bp, Macaca Mulatta
ggcctcctcagcagagccccaagtccaccggaacattcactcccacgggcttcggagcaaccttcaagagatctttctacctgcctttccatgtcatgggaggaagaaacaagaatgacaagtgtgtgactgcctttgagctgtagttcccgtttatttacacatgtggatcctcgtttttcaagcatggcttgtttgttttgatttctactgggcttataaatcactaccagtgggcaagggagagaggggaaaatgggtgttgactgaggaatccccttgcttatcttcttttgaaaccgggcacctctgaagtcttggtgtcaagggcatcaagagaggacttctcagagattccaggtgatgctgagaccttggtgtctctaaactctgggcatgtggacaggaggggcttgcagccgtgtctctgacctgccggatatgcaggagggtctcgacttggcgcctgcacgttgtgcctggctgtgctttcttttatgcccccctctattctcctctctcccccaggggattttcatctcaacaacagtgtcctcacccaggcctgccttctggccagtatgggcttgtacaccaggcacattcctgcatgcgaggcctccggcctgccctcctctgtccacattcaagccctttctgacgagtttattgtgaaagtgaactgccacctatttcagaggagagatgactgccagaaatgaggtcttggtgcggaaggtctttggagtgggagggctctcaagtgcaggtggcaggtgttctgcaccctgctaggccaaggagcccgcagccagagaggcggggaaatgggaatcaggg

SEQ ID NO: 35443 - DNA, 1884 bp, Macaca Mulatta
  misc_feature (1)...(1884): n = A,T,C or G
gcacccagtcagtcagagtcagagccagagaaggctccattgtgcagtgtgcccccaccccctccttcagcctttgcagaaatgggtagtgatcacacacagtcatctgcaagcaaaacctcacaagatgtggacaaagaggatgagtttggttacagctggnnnnnnnnnnnnnnnnnnnnnnnnnnnnnnnnnnnnnnnnnnnnnnnnnnnnnnnnnnnnnnnnnnnnnnnnnnnnnnnnnnnnnnnnnnnnnnnnnnnnnnnnnnnnnnnnnnnnnnnnnnnnnnnnnnnnnnnnnnnnnnnnnnnnnnnnnnnnnnnnnnnnnnnnnnnnnnnnnnnnnnnnnnnnnnnnnnnnnnnnnnnnnnnnnnnnnnnnnnnnnnnnnnnnnnnnnnnnnnnnnnnnnnnnnnnnnnnnnnnnnnnnnnnnnnnnnnnnnnnnnnnnnnnnnnnnnnnnnnnnnnnnnnnnnnnnnnnnnnnnnnnnnnnnnnnnnnnnnnnnnnnnnnnnnnnnnnnnnnnnnnnnnnnnnnnnnnnnnnagacagagccaactgttactacttctgatgcagctgtggacctcagttcatttaaaaatgtgcaacatctggagcttcccaagnnnnnnnnnnnnnnnnnnnnnnnnnnnnnnnnnnnnnnnnnnnnnnnnnnnnnnnnnnnnnnnnnnnnnnnnnnnnnnnnnnnnnnnnnnnnnnnnnnnnnnnnnnnnnnnnnnnnnnnnnnnnnnnnnnnnnnnnnnnnnnnnnnnnnnnnnnnnnnnnnnnnnnnnnnnnnnnnnnnnnnnnnnnnnnnnnnnnnnnnnnnnnnnnnnnnnnnnnnnnnnnnnnnnnnnnnnnnnnnnnnnnnnnnnnnnnnnnnnnnnnnnnnnnnnnnnnnnnnnnnnnnnnnnnnnnnnnnnnnnnnnnnnnnnnnnnnnnnnnnnnnnnnnnnnnnnnnnnnnnnnnnnnnnnnnnnnnnnnnnnnnnnnnnnnnnnnnnnnnnnnnnnnnnnnnnnnnnnnnnnnnnnnnnnnnnnnnnnnnnnnnnnnnnnnnnnnnnnnnnnnnnnnnnnnnnnnnnnnnnnnnnnnnnnnnnnnnnnnnnnnnnnnnnnnnnnnnnnnnnnnnnnnnnnnnnnnnnnnnnnnnnnnnnnnnnnnnnnnnnnnnnnnnnnnnnnnnnnnnnnnnnnnnnnnaggtgaatggaattgacttgagaaaggccacacatgatgaagcaatcaatgtcctgagacagacgccacagagggtgcgcctgacactctacagagatgaggccccatacaaagaggaggaagtgtgtgacaccctcactattgagctgcagaagaagccgggaaaaggcctaggattaagtattgttggtaaaanagaaacgatactggagtatttgtgtcagacattgtcaaaggaggaattgcagatgccgatggaagactgatgcagggagaccagatattaatggtgaatggggaagatgttcgtaatgccacccaggaagcggttgccgctttgctaaannnnnnnnnnnnnnnnnnnnnnnnnnnnnnnnnnnnnnnnnnnnnnnnnnnnnnnnnnnnnnnnnnnnnnnnnnnnnnnnnnnnnnnnnnnnnnnnnnnnnnnnnnnnnnnnnnnnnnnnnnnnnnnnnnnnnnnnnnnnnnnnnnnnnnnnnnnnnnnnnnnnnnnnnnnnnnnnnnnnnnnnnnnnnnnnnnnnnnnnnnnnnnnnnnnnnnnnnnnnagggccctactgactcactgggaatcagcattgctggaggagtgggcagcccacttggtgatgtgcctatatttattgcaatgatgcacccaactggagttgcagcacagacccaaaaactcagag

SEQ ID NO: 35444 - DNA, 854 bp, Macaca Mulatta
  misc_feature (1)...(854): n = A,T,C or G
ggcttcctgtgtccagtaccggttagtggtccgggatgtgaacacccttcagatccttcagctgtacacgtgcctagaccagatccagcacatcgagtggtcagccgactcactcttcatcttgtgcgccatgtacaagcgagggctggtgcaggnnnnnnnnnnnnnnnnnnnnnnnnnnnnnnnnnnnnnnnnnnnnnnnnnnnnnnnnnnnnnnnnnnnnnnnnnnnnnnnnnnnnnnnnnnnnnnnnnnnnnnnnnnnnnnnnnnntgcggataaccgtctgggtcttgtgcacaaaatccgtatcttacatcaaatacccaaaagcttgtctgcagggnnggaatcaccttcacgagggacggccgctacatggcgctggcagaacggcgcgactgcaaagattacgtgagcatcttcgtctgcagtgattggcagctcctgcgnnnnnnnnnnnnnnnnnnnnnnnnnnnnnnnnnnnnnnnnnnnnnnnnnnnnnnnnnnnnnnnnnnnnnnnnnnnnnnnnnnnnnnnnnnnnnnnnnnnnnnnnnnnnnnnnnnnnnnnnnnnnnnnnnnnnnnnnnnnnnnnnnnnnnnnnnnnnnnnnnnnnnnnnnnnnnnnnnnnnnnnnnnnnnnnnnnnnnnnnnnnnnnnnnnnnnnnnnnnnnnnnnnnnnnnnnnnnnnnnnnnnnnnnnnnnnnnnnnnnnnnnnnnnnnnnnnnnnnnnnnnnnnnnnnnnnnnnnnnngtggtgtataaggaggccgagaagagcccgcagctggggctgggctgcctctccttcccgcccccgggggccggggctggccctgtcccgagctcagagagtaaa

SEQ ID NO: 35445 - DNA, 811 bp, Macaca Mulatta
ggagaaacacacacatcacgcaaaccaagtcagagcaatgagaattgtactttataatttaaactatctcctatttatcttttttcctcaatttcctaaaattctatttatctacagaacttgtgtgtacaatttttgtgtatgtccttaaattcaatgtaataatattttcaaagatgttttccaaataagaactacattgaagatacaagcataaattgttatgctgctattgtctagaaaatgctgtaccttgactttttaaaataatcttatgaaacataattctgataaaatataattgttcaattaacaaagtaaaatgatgtttgacagttatgtacttaatggtccatgctagtctttaaagctattttcagtaactactagcttccacttggtaaagaaaagtcacatatcaaaggcaatttttatgactgagttgtaccatactgatccaaggattgcttattttgcacatgaatccttagatattcaattttttgggaagcagtaggtagaagagcaagatgaattaaagttaactgaatagaaagaaaataatatgtaattgaggcttcactcaatttgtactcaacccgattaaccctgactaatttcgtattctaattaagtgtggaaaaatgttgacaaattgtagtcttttacatttttatcatttacgttttattcatcatcatgactactggtttgattaacacaggcttaatatgttagggcttttctgccaaatcgtgctttcagttgtcccctaagggctgtaaatgtttgtttaaacccctgattttca

SEQ ID NO: 35446 - DNA, 215 bp, Macaca Mulatta
gtatcctgtggaacacccagacaaattcctgaagtttggcatgacaccctccaagggagttctgttctatggacctcctggctgtgggaaaactttgttggccaaagccattgctaatgaatgccaggccaacttcatctccatcaaaggtcctgagctgctcaccatgtggtttggggagtctgaggccaatgtcagagaaatctttgacaagg

SEQ ID NO: 35447 - DNA, 374 bp, Macaca Mulatta
atgcctgaaccctctaagtctgctcctgcccctaaaaagggctctaagaaggccatcactaaggcgcagaagaaggatggtaagaagcgtaagcgcagccgaaaggagagctattccatctatgtgtacaaggttctgaagcaggtccaccccgacaccggcatctcctccaaggccatggggatcatgaactcctttgtcaatgacatcttcgagcgcatcgcgggcgaagcttcccgcctggcgcactacaacaagcgctcgaccatcacctccagggagatccagacggctgtgcgcctgctgctgcccggggaactggctaagcatgctgtgtccgagggcaccaaggctgttaccaagtacactagctc

SEQ ID NO: 35448 - DNA, 2771 bp, Macaca Mulatta
  misc_feature (1)...(2771): n = A,T,C or G
agaacgagaccgagcccatggacgcggaacccgcgggggacactcgcnnnnnnnnnnnnnnnnnnnnnnnnnnnnnnnnnnnnnnnnnnnnnnnnnnnnnnnnngcaccaacgtgaccctggaggcgctgctgagtaccaatttaaggggtggcgcagttctcgcagggcgcgcgcgnnnnnnnnnnnnnnnnnnnnnnnnnnnnnnnnnnnnnnnnnnnnnnnnnnnnnnnnnnnnnnnnnnnnnnnnnnnnnnnnnnnnnnnnnnnnnnnnnnnnnnnnnnnnnnnnnnnnnnnnnnnnnnnnnnnnnnnnnnnnnnnnnnnnnnnnnnnnnnnnnnnnnnnnnnnnnnnnnnnnnnnnnnnnnnnnnnnnnnnnnnnnnnnnnnnnnnnnnnnnnnnnnnnnnnnnnnnnnnnnnnnnnnnnnnnnnnnnnnnnnnnnnnnnnnnnnnnnnnnnnnnnnnnnnnnnnnnnnnnnnnnnnnnnnnnnnnnnnnnnnnnnnnnnnnnnnnnnnnnnnnnnnnnnnnnnnnnnnnnnnnnnnnnnnnnnnnnnnnnnnnnnnnnnnnnnnnnnnnnnnnnnnnnnnnnnnnnnnnnnnnnnnnnnnnnnnnnnnnnnnnnnnnnnnnnnnnnnnnnnnnnnnnnnnnnnnnnnnnnnnnnnnnnnnnnnnnnnnnnnnnnnnnnnnnnnnnnnnnnnnnnnnnnnnnnnnnnnnnnnnnnnnnnnnnnnnnnnnnnnnnnnnnnnnnnnnnnnnnnnnnnnnnnnnnnnnnnnnnnnnnnnnnnnnnnnnnnnnnnnnnnnnnnnnnnnnnnnnnnnnnnnnnnnnnnnnnnnnnnnnnnnnnnnnnnnnnnnnnnnnnnnnnnnnnnnnnnnnnnnnnnnnnnnnnnnnnnnnnnnnnnnnnnnnnnnnnnnnnnnnnnnnnnnnnnnnnnnnnnnnnnnnnnnnnnnnnnnnnnnnnnnnnnnnnnnnnnnnnnnnnnnnnnnnnnnnnnnnnnnnnnnnnnnnnnnnnnnnnnnnnnnnnnnnaaggagaagtacccccacatccagatgaacccctacccggtccccgagtacctggacaatgtgcccacttgctcgggcattccctacggcatgtcgttgcccccagagaagcccgtgaccacctggctggacagcaagcccgtgctgcccaccgtgcccacgtccgtggggctgcaactgccgcccactgtccctggcgcgcacggctacacggactcccccaccgccacccccgccagccgctccccttttttttcctcgcccgcctccagcgagtgcgcctccttgttcttaggcctgaaccacnnnnnnnnnnnnnnnnnnnnnnnnnnnnnnnnnnnnnnnnnnnnnnnnnnnnnnnnnnnnnnnnnnnnnnnnnnnnnnnnnnnnnnnnnnnnnnnnnnnnnnnnnnnnnnnnnnnnnnnnnnnnnnnnnnnnnnnnnnnnnnnnnnnnnnnnnnnnnnnnnnnnnnnnnnnnnnnnnnnnnnnnnnnnnnnnnnnnnnnnnnnnnnnnnnnnnnnnnnnnnnnnnnnnnnnnnnnnnnnnnnnnnnnnnnnnnnnnnnnnnnnnnnnnnnnnnnnnnnnnnnnnnnnnnnnnnnnnnnnnnnnnnnnnnnnnnnnnnnnnnnnnnnnnnnnnnnnnnnnnnnnnnnnnnnnnnnnnnnnnnnnnnnnnnnnnnnnnnnnnnnnnnnnnnnnnnnnnnnnnnnnnnnnnnnnnnnnnnnnnnnnnnnnnnnnnnnnnnnnnnnnnnnnnnnnnnnnnnnnnnnnnnnnnnnnnnnnnnnnnnnnnnnnnnnnnnnnnnnnnnnnnnnnnnnnnnnnnnnnnnnnnnnnnnnnnnnnnnnnnnnnnnnnnnnnnnnnnnnnnnnnnnnnnnnnnnnnnnnnnnnnnnnnnnnnnnnnnnnnnnnnnnnnnnnnnnnnnnnnnnnnnnnnnnnnnnnnntacgacgacaagaacgcggagattctgagcagctacgacgacgacatggacgagaactccatggaagacgacgccgagctgaaggacgcggccagcgacccggccaagccgctcctatcctacgcggggtcctgcccgccctccccgccctcggtcatctccagcatcgccgccctggagaaccagatgaagatgatcgactcggtcatgagctgccagcagctgaccagcctcaagtccgtggataacgggtccggagagagtgaccgcctgagcaacgactcctcgtcggccgtgggcgacctggagagccacagcgcgggtagccccgccctgtccgagtcctcgtcctcgcaggccctgtcgccggcccccagcaacggcgagagcttccgctccaagtccccgggcctgggcgccccggaggagccccaggagatcccgctcaagaccgagaggcccgacagcccggcccccgccccaggcagtggaggcgcccccggccgcgcgggcatcaaggaggaggcgcccttcagcctgctgttcctgaacagggagcggggtaagtgtcccagcactgtgtgtggtgtctgtggcaagccttttgcttgcaagagcgcgttggaaatccactaccgcagccatactaaggagcggccgttcgtatagcgcgctctgcaggcgagggtgctccactatgggtaatttaaaacagcacttactgacgcacagatgaaaaagctgccttctcagttatttgaccccaactttgctctaagtgccagccaaagcactcctagcct

SEQ ID NO: 35449 - DNA, 672 bp, Macaca Mulatta
  misc_feature (1)...(672): n = A,T,C or G
aaaatgaatggaaaagaagtattatgaataaagggaatcctattcccttcaactgatacataagagttactgtcttactcnnnnnnnnnnnnnnnnnnnnnnnngatttctttaaatggcattcagtcaaagcagaaaggtacaatgaaaaagcagaggtataatgaaaaagatagtacatgaagacaaatgcacagaataaacaccatattgcaagaataactgtacaagaaaatactattctttggtggggtgcaaattctagaattacatactgtggcaaagaataaaggacattagtcttttaaaattctattatttttgagacacggtcnnnnnnnnnnnnnnnnnnnnnnnaggatgctcaaccacaccagtctgagacagtcagatttctctcaatgtatatattaataaactggtacttgagattattaaaaaatgtttttctgagcttgatcttcatcttttgaactgatagaaaaaaaattcctggctgggcacnnnnnnnnnnnnnnnnnngnnnnnnnnnnnnnnnnnnnnnnnnnnnnggatcacaaggccaagagaccgagaccatcctaaccaacacggcaaaatctcatctctaccaaaaatagaaaaatcagccaggcgtgtggcacctgtnnnnnnnnnnnnnnnnnnactaag

SEQ ID NO: 35450 - DNA, 215 bp, Macaca Mulatta
acagcaactgtagatgctcctgttcctggttccccctttccacctccaaacccctcccctcactgcctcccatggccccccaagttccaggctcagtcttccagccacctggggctctccacctgggcccaagcaggtgtggggcctccttcgggcgttttcttctgaattttagaggatttctagaacgtggtcaggaatagccattctaggcg

SEQ ID NO: 35451 - DNA, 571 bp, Macaca Mulatta
  misc_feature (1)...(571): n = A,T,C or G
agaagctcttcactagncaagctttggacgtcatggacagaggactgatacctggaggtcagcggtcacgccatttatgccatcaggctgtgccagtgcaaggtgtactggtctgggccatgtgccccatcacttgttgctcccaacctgattgagagacaaaagaaggtcaagctattttgtctggaaacattccttagcgatctcattgcccaccagaaaggacagatagaaaagcagccaccgtttgagatctacttatgctttggggaagaatggccagatgggaaacccttggaaaggaaactcatcttggttcaggtcattccagtagtagctcggatgatctacgagatgttttctggtgatttcacacgatcctttgatagtggcagtgtccgcctgcagatctcaaccccagacatcaaagataacatcgttgctcagctgaagcagctgtaccgcatccttcaaacccaggagagctggcagtccatgcagcccaaccccagcatgcaactcccacctgccctgcctcctcaataatcgtgaatgccatcttcttcctttc

SEQ ID NO: 35452 - DNA, 153 bp, Macaca Mulatta
aggttgacttcaaagatgcctcagttactgagaaacattaatgggatcatcgaggccttcaggcgctacgcaaggacggagggcagctgcacagcgctcacccgaggggagctgaaaagactcttggagcaagagtttgccgatgtgattgtg

SEQ ID NO: 35453 - DNA, 269 bp, Macaca Mulatta
aggtgggtacctaggctgtggccatggacacaaaggccacccaggtcgtccccactggtcatgctgtgggaagtttaatgagaagtctgaatgcacgtggacaggtgggcagagcgcaccgaggagtctacttaggactgtggctctctgatgggtttgtgctcagccttttaaagctgcagtcagcaccactcgatatttccagaggacccagaccttctttcattctaaagagactgatagaattaaaaacaaagtgccttatcttg

SEQ ID NO: 35454 - DNA, 1678 bp, Macaca Mulatta
  misc_feature (1)...(1678): n = A,T,C or G
gagcgtagaggcctctatgctgagcagcaggagcagcccgcgccggacaacgtgcgagccatggggctggcggatgcgtcgggnnnnnnnnnnnnnnnnnnnnnnnnnnnnnnnnnnnnnnnnnnnnnnnnnnnnnnnnnnnnnnnnnnnnnnnnnnnnnnnnnnnnnnnnnnnnnnnnnnnnnnnnnnnnnnnnnnnnnnnnnnnnnnnnnnnnnnnnnnnnnnnnnnnnnnnnnnnnnnnnnnnnnnnnnnnnnnnnnnnnnnnnnnnnnnnnnnnnnnnnnnnnnnnnnnnnnnnnnnnnnnnnnnnnnnnnnnnnnnnnnnnnnnnnnnnnnnnnnnnnnnnnnnnnnnnnnnnnnnnnnnnnnnnnnnnnnnnnnnnnnnnnnnnnnnnnnnnnnnnnnnnnnnnnnnnnnnnnnnnnnnnnnnnnnnnnnnnnnnnnnnnnnnnnnnnnnnnnnnnnnnnnnnnnnnnnnnnnnnnnnnnnnnnnnnnnnnnnnnnnnnnnnnnnnnnnnnnnnnnnnnnnnnnnnnnnnnnnnnnnnnnnnnnnnnnnnnnnnnnnnnnnnnnnnnnnnnnnnnnnnnnnnnnnnnnnnnnnnnnnnnnnnnnnnnnnnnnnnnnnnnnnnnnnnnnnnnnnnnnnnnnnnnnnnnnnnnnnnnnnnnnnnnnnnnnnnnnnnnnnnnnnnnnnnnnnnnnnnnnnnnnnnnnnnnnnnnnnnnnnnnnnnnnnnnnnnnnnnnnnnnnnnnnnnnnnnnnnnnnnnnnnnnnnnnnnnnnnnnnnnnnnnnnnnnnnnnnnnnnnnnnnnnnnnnnnnnnnnnnnnnnnnnnnnnnnnnnnnnnnnnnnnnnnnnnnnnnnnnnnnnnnnnnnnnnnnnnnnnnnnnnnnnnnnnnnnnnnnnnnnnnnnnnnnnnnnnnnnnnnnnnnnnnnnnnnnnnnnnnnnnnnnnnnnnnnnnnnnnnnnnnnnnnnnnnnnnnnnnnnnnnnnnnnnnnnnnnnnnnnnnnnnnnnnnnnnnnnnnnnnnnnnnnnnnnnnnnnnnnnnnnnnnnnnnnnnnnnnnnnnnnnnnnnnnnnnnnnnnnnnnnnnnnnnnnnnnnnnnnnnnnnnnnnnnnnnnnnnnnnnnnnnnnnnnnnnnnnnnnnnnnnnnnnnnnnnnnnnnnnnnnnnnnnnnnnnnnnnnnnnnnnnnnnnnnnnnnnnnnnnnnnnnnnnnnnnnnnnnnnnnnnnnnnnnnnnnnnnnnnnnnnnnnnnnnnnnnnnnnnnnnnnnnnnnnnnnnnnnnnnnnnnnnnnnnnnnnnnnnnnnnnnnnnnnnnnnnnnnnnnnnnnnnnnnnnnnnnnnnnnnnnnnnnnnnnnnnnnnnnnnnnnnnnnnnnnnnnnnnnnnnnnnnnnnnnnnnnnnnnnnnnnnnnnnnnnnnnnnnnnnnnnnnnnnnnnnnnnnnnnnnnnnnnnnnnnnnnnnnnnnnnnnnnnnnnnnnnnnnnnnnnnnnnnnnnnnnnnnnnnnnnnnnnnnnnnnnnnnnnnnnnnnnnnnnnnnnnnnnnnnnnnnnnnnnnnnnnnnnnnnnnnnnnnnnnnnnnnngctgcctcctccaagggcgcttcagtttccattaacgtcaacaccagccttgaagacatgaggagcaacaacgttgaggactgcaaggtgatggtga

SEQ ID NO: 35455 - DNA, 1328 bp, Macaca Mulatta
  misc_feature (1)...(1328): n = A,T,C or G
agatgttaccctgaacatgagagtcagactaaatgtaggctttcaagaagacctcatgaacacttcctctgccctctataggtcctacaagaccgacttggaaacagcnnnnnnnnnnnnnnnnnnnnnnnnnnnnnnnnnnnnnnnnnnnnnnnnnnnnnnnnnnnnnnnnnnnnnnnnnnnnnnnnnnnnnnnnnnnnnnnnnnnnnnnnnnnnnnnnnnnnnnnnnnnnnnnnnnnnnnnnnnnnnnnnnnnnnnnnnnnnnnnnnnnnnnnnnnnnnnnnnnnnnnnnnnnnnnnnnnnnnnnnnnnnnnnnnnnnntctctgtcacaccagaaatcatctttgaaggggacacagtcagtctggtgtgtgaaaacgaacttttgtcctccaatgtgtcttggcgctatgaagaacagcagttggaaatccagaacagcagtaaattctcgatttacactgccgtgttcaacaacatgacttcggtgtccaagctcaccatccgcaacatcactccgggtgatgcaggtnnnnnnnnnnnnnnnnnnnnnnnnnnnnnnnnnnnnnnnnnnnnnnnnnnnnnnnnnnnnnnnnnnnnnnnnnnnnnnnnnnnnnnnnnnnnnnnnnnnnnnnnnnnnnnnnnnnnnnnnnnnnnnnnnnnnnnnnnnnnnnnnnnnnnnnnnnnnnnnnnnnnnnnnnnnnnnnnnnnnnnnnnnnnnnnnnnnnnnnnnnnnnnnnnnnnnnnnnnnnnnnnnnnnnnnnnnnnnnnnnnnnnnnnnnnnnnnnnnnnnnnnnnnnnnnnnnnnnnnnnnnnnnnnnnnnnnnnnnnnnnnnnnnnnnnnnnnnnnnnnnnnnnnnnnnnnnnnnnnnnnnnnnnnnnnnnnnnnnnnnnnnnnnnnnnnnnnnnnnnnnnnnnnnnnnnnnnnnnnnnnnnnnnnnnnnnnnnnnnnnnnnnnnnnnnnnnnnnnnnnnnnnnnnnnnnnnnnnnnnnnnnnnnnnnnnnnnnnnnnnnnnnnnnnnnnnnnnnnnnnnnnnnnnnnnnnnnnnnnnnnnnnnnnnnnnnnnnnnnnnnnnnnnnnnnnnnnnnnnnnnnnnnnnnnnnnnnnnnnnnnggaacctatcactgcatatttagatataagaattcatacagtattgcaaccaaagacgtcgttgttcacccgctgcctctagagctgaacatcatggttgatcctttggaagctacagttttatgcagtggttcccatcacatcaagtgctgcatagaggaggatggagactacaaagttactttccatatgggttccttgtcccttcctgct

SEQ ID NO: 35456 - DNA, 2294 bp, Macaca Mulatta
  misc_feature (1)...(2294): n = A,T,C or G
ggttactccgtgacctggctgccctccggggaaaagacttcgttgttggcctcaggagcccctcgataccagcacgtgggccgagtgctgctgttccaagagccacagggcggaggacgctggagccagatccagacaatccatgggacccannnnnnnnnnnnnnnnnnnnnnnnnnnnnnnnnnnnnnnnnnnnnnnnnnnnnnnnnnnnnnnnnnnnnnnnnnnnnnnnnnnnnnnnnnnnnnnnnnnnnnnnnnnnnnnnnnnnnnnnnnnnnnnnnnnnnnnnnnnnnnnnnnnnnnnnnnnnnnnnnnnnnnnnnnnnnnnnnnnnnnnnnnnnnnnnnnnnnnnnnnnnnnnnnnnnnnnnnnnnnnnnnnnnnnnnnnnnnnnnnnnnnnnnnnnnnnnnnnnnnnnnnnnnnnnnnnnnnnnnnnnnnnnnnnnnnnnnnnnnnnnnnnnnnnnnnnnnnnnnnnnnnnnnnnnntcagcggatagaagggacccaggtgctctcaggagttcggtggtttggacgctccatccatggggtgaaggaccttgaaggggacggcttggcagacgtggctgtgggggctgagagccagatgatcgtgctgannnnnnnnnnnnnnnnnnnnnnnnnnnnnnnnnnnnnnnnnnnnnnnnnnnnnnnnnnnnnnnnnnnnnnnnnnnnnnnnnnnnnnnnnnnnnnnnnnnnnnnnnnnnnnnnnnnnnnnnnnnnnnnnnnnnnnnnnnnnnnnnnnnnnnnnnnnnnnnnnnnnnnnnnnnnnnnnnnnnnnnnnnnnnnnnnnnnnnnnnnnnnnnnnnnnnnnnnnnnnnnnnnnnnnnnnnnnnnnnnnnnnnnnnnnnnnnnnnnnnnnnnnnnnnnnnnnnnnnnnnnnnnnnnnnnnnnnnnnnnnnnnnnnnnnnnnnnnnnnnnnnnnnnnnnnnnnnnnnnnnnnnnnnnnnnnnnnnnnnnnnnnnnnnnnnnnnnnnnnnnnnnnnnnnnnnnnnnnnnnnnnnnnnnnnnnnnnnnnnnnnnnnnnnnnnnnnnnnnnnnnnnnnnnnnnnnnnnnnnnnnnnnnnnnnnnnnnnnnnnnnnnnnnnnnnnnnnnnnnnnnnnnnnnnnnnnnnnnnnnnnnnnnnnnnnnnnnnnnnnnnnnnnnnnnnnnnnnnnnnnnnnnnnnnnnnnnnnnnnnnnnnnnnnnnnnnnnnnnnnnnnnnnnnnnnnnnnnnnnnnnnnnnnnnnnnnnnnnnnnnnnnnnnnnnnnnnnnnnnnnnnnnnnnnnnnnnnnnnnnnnnnnnnnnnnnnnnnnnnnnnnnnnnnnnnnnnnnnnnnnnnnnnnnnnnnnnnnnnnnnnnnnnnnnnnnnnnnnnnnnnnnnnnnnnnnnnnnnnnnnnnnnnnnnnnnnnnnnnnnnnnnnnnnnnnnnnnnnnnnnnnnnnnnnnnnnnnnnnnnnnnnnnnnnnnnnnnnnnnnnnnnnnnnnnnnnnnnnnnnnnnnnnnnnnnnnnnnnnnnnnnnnnnnnnnnnnnnnnnnnnnnnnnnnnnnnnnnnnnnnnnnnnnnnnnnnnnnnnnnnnnnnnnnnnnnnnnnnnnnnnnnnnnnnnnnnnnnnnnnnnnnnnnnnnnnnnnnnnnnnnccaggtgaggatccagccttccatccatgaccacaacatccccaccctggaggccgtggttggggtgccacagcctcccagcgaggggcccatcacacaacagtggagcgtgcagatgnnnnnnnnnnnnnnnnnnnnnnnnnnnnnnnnnnnnnnnnnnnnnnnnnnnnnnnnnnnnnnnnnnnnnnnnnnnnnnnnnnnnnnnnnnnnnnnnnnnnnnnnnnnnnnnnnnnnnnnnnnnnnnnnnnnnnnnnnnnnnnnnnnnnnnnnnnnnnnnnnnnnnnnnnnnnnnnnnnnnnnnnnnnnnnnnnnnnnnnnnnnnnnnnnnnnnnnnnnnnnnnnnnnnnnnnnnnnnnnnnnnnnnnnnnnnnnnnnnnnnnnnnnnnnnnnnnnnnnnnnnnnnnnnnnnnnnnnnnnnnnnnnnnnnnnnnnnnnnnnnnnnnnnnnnnnnnnnnnnnnnnnnnnnnnnnnnnnnnnnggttggtttcttcaaacggaacctaaaggagaagatggaggctggcggaggtgtcccgaatggaatccctgcagaagactctgggcagccggcgtctggggaagaggctggggatccgggctgcctgaaacccctccacgaggaggactctgagagtggcggtggcaaggactga

SEQ ID NO: 35457 - DNA, 2364 bp, Macaca Mulatta
  misc_feature (1)...(2364): n = A,T,C or G
atgggaatattgaatctgctaagaaggttaacatggcatgtactgttaccaatgcagaaattagtagggagtgttttgaatgttaaaaagtcagaagatactgataaaacatcatgaaaaagataattttagtccaggtttcttcagcttttgaagtaattaattaaaaaggcaagtatattatattggcaagaaagggctgccttttcactttttgctttctgtttttaagagcaagagacaaatgacaaagtaaacaagttgttatctgtagtttactcaaaaaagcaatttccagcatatgtcatttggcaatgtgaattcagccttactcctatctcttttacatctgnnnnnnnnnnnnnnnnnnnnnnnnnnnnnnnnnnnnnnnnnnnnnnnnnnnnnnnnnnnnnnnnnnnnnnnnnnnnnnnnnnnnnnnnnnnnnnnnnnnnnnnnnnnnnnnnnnnnnnnnnnnnnnnnnnnnnnnnnnnnnnnnnnnnnnnnnnnnnnnnnnnnnnnnnnnnnnnnnnnnnnnnnnnnnnnnnnnnnnnnnnnnnnnnnnnnnnnnnnnnnnnnnnnnnnnnnnnnnnnnnnnnnnnnnnnnnnnnnnnnnnnnnnnnnnnnnnnnnnnnnnnnnnnnnnnnnnnnnnnnnnnnnnnnnnnnnnnnnnnnnnnnnnnnnnnnnnnnnnnnnnnnnnnnnnnnnnnnnnnnnnnnnnnnnnnnnnnnnnnnnnnnnnnnnnnnnnnnnnnnnnnnnnnnnnnnnnnnnnnnnnnnnnnnnnnnnnnnnnnnnnnnnnnnnnnnnnnnnnnnnnnnnnnnnnnnnnnnnnnnnnnnnnnnnnnnnnnnnnnnnnnnnnnnnnnnnnnnnnnnnnnnnnnnnnnnnnnnnnnnnnnnnnnnnnnnnnnnnnnnnnnnnnnnnnnnnnnnnnnnnnnnnnnnnnnnnnnnnnnnnnnnnnnnnnnnnnnnnnnnnnnnnnnnnnnnnnnnnnnnnnnnnnnnnnnnnnnnnnnnnnnnnnnnnnnnnnnnnnnnnnnnnnnnnnnnnnnnnnnnnnnnnnnnnnnnnnnnnnnnnnnnnnnnnnnnnnnnnnnnnnnnnnnnnnnnnnnnnnnnnnnnnnnnnnnnnnnnnnnnnnnnnnnnnnnnnnnnnnnnnnnnnnnnnnnnnnnnnnnnnnnnnnnnnnnnnnnnnnnnnnnnnnnnnnnnnnnnnnnnnnnnnnnnnnnnnnnnnnnnnnnnnnnnnnnnnnnnnnnnnnnnnnnnnnnnnnnnnnnnnnnnnnnnnnnnnnnnnnnnnnnnnnnnnnnnnnnnnnnnnnnnnnnnnnnnnnnnnnnnnnnnnnnnnnnnnnnnnnnnnnnnnnnnnnnnnnnnnnnnnnnnnnnnnnnnnnnnnnnnnnnnnnnnnnnnnnnnnnnnnnnnnnnnnnnnnnnnnnnnnnnnnnnnnnnnnnnnnnnnnnnnnnnnnnnnnnnnnnnnnnnnnnnnnnnnnnnnnnnnnnnnnnnnnnnnnnnnnnnnnnnnnnnnnnnnnnnnnnnnnnnnnnnnnnnnnnnnnnnnnnnnnnnnnnnnnnnnnnnnnnnnnnnnnnnnnnnnnnnnnnnnnnnnnnnnnnnnnnnnnnnnnnnnnnnnnnnnnnnnnnnnnnnnnnnnnnnnnnnnnnnnnnnnnnnnnnnnnnnnnnnnnnnnnnnnnnnnnnnnnnnnnnnnnnnnnnnnnnnnnnnnnnnnnnnnnnnnnnnnnnnnnnnnnnnnnnnnnnnnnnnnnnnnnnnnnnnnnnnnnnnnnnnnnnnnnnnnnnnnnnnnnnnnnnnnnnnnnnnnnnnnnnnnnnnnnnnnnnnnnnnnnnnnnnnnnnnnnnnnnnnnnnnnnnnnnnnnnnnnnnnnnnnnnnnnnnnnnnnnnnnnnnnnnnnnnnnnnnnnnnnnnnnnnnnnnnnnnnnnnnnnnnnnnnnnnnnnnnnnnnnnnnnnnnnnnnnnnnnnnnnnnnnnnnnnnnnnnnnnaagttgatttctcagttatcatctgtattttctgtacttggaaagcattttacaaatatacatttcttctaagataaagagtgatacaagcatataatatagtgaaacaatattcaccatattgcatggtcatatgattgcaatagtgattgattttttttctaaatgatctcattgtaaattttacaagttttaatttccccttctttcttatgtaaaaaaactttcagatctcttgtggaagaggaagaccaacacatgaaattgtcccttggaggcagtgaaatgggcctctcatcccatttgcagtcttccaaggcaggacctacacgcatctttaccagcaatacccacagttctgtggtgttacag

SEQ ID NO: 35458 - DNA, 545 bp, Macaca Mulatta
atcatcaattaattgaaagtggttattcttggaagtagcattttccccctcctgtgaatatgtgcaaaacattgaaggcagaaggtttcttgttagaggcctcacaattaatacagtaacgccggactccctgcctgcttcaaagtcatggaaatctagtgttcatgctcaagaaactcctacaatgcttgaggcaaccctgacaatttaaaaactggggatgtgtgggcaccctagcctgaaccagttcagtcacggagactctgacataatacctgaggtgacttaaacttgagacttttgaaagacaacaaaagcataaattaaaattgaattcatactgtagagagattcacatatactgtttctatacacttaactaaaacatgtacaaccaatcagatctgccatagtatgggaactatataatcttccaagcccccttaagtgggcaataatgaaaactttattattaggaggaggtttagagagttcttttcattgacatcttgtcttgattcctcttctgtgtgacccactggatt

SEQ ID NO: 35459 - DNA, 337 bp, Macaca Mulatta
tggtttccctccacccgaaggcagtcaccttggtcgccggctcctgcctctgcgatgatccccacgagggctgcagagtggagggcacagcgaggttcggcctcattccccagggagccccaggcgagagcttggtcctggggagctgcccaggtctttgccatctcctggcctccatccagtccctcacaactcggctcctggccctgtgcaccgagcgatgactgctaggcccgtgcgcctaagagtcaggcctgtattcacttcagcttttattaaggactttcagggattggcttttttaaatcatcgtcaaatatattgttattaaaaggat

SEQ ID NO: 35460 - DNA, 140 bp, Macaca Mulatta
ttcagaggctgctgcctgcttaggaggttgtagaaagctctgtaggttctctctgtgtgtcctacaggagtcttcaggccagctccctgtcggatggcttttatgaaaaaatatctcctccccattctggggctcttcat

SEQ ID NO: 35461 - DNA, 530 bp, Macaca Mulatta
  misc_feature (1)...(530): n = A,T,C or G
aagaagtcacacaggtatccgttacatatatgttctcattgtggaaaggccttcagtcagatctcagaccttaatctacatcagaagacccacactggagacagaccctataaatgttatgaatgtggaaagggcttcagtcgcagctcacaccttattcagcatcaaagaacacatactggggagaggccttatgactgtaacgagtgtgggaaaagttttggaagaagttctcacctgattcagcatcagacaatccacactggagagaagcctcacaaatgcaatgagtgtggaaaaagtttctgccgtctctctcacctaatccaacaccaaaggacccacagtggggagaaaccctatgagtgtgaggagtgtgggaaaagcttcagcaggagctctcacctagctcagcaccaaaggacccacacngttcacacgggagagaagccttatgaatgtactgaatgtgagaagagtttcagcaggagctcagctcttattaaacataagagagttcatacagacta

SEQ ID NO: 35462 - DNA, 494 bp, Macaca Mulatta
  misc_feature (1)...(494): n = A,T,C or G
cgctactacagagcacccgaggtcatccttggcatgggctacaaggaaaacnnnnnnnnnnnnnnnnnnnnnnnnnnnnnnnnnnnnnnnnnnnnnnnnnnnnnnnnnnnnnnnnnnnnnnnnnnnnnnnnnnnnnnnnnnnnnnnnnnnnnnnnnnnnnnnnnnnnnnnnnnnnnnnnnnnnnnnnnnnnnnnnnnnnnnnnnnnnnnnnnnnnnnnnnnnnnnnnnnnnnnnnnnnnnnnnnnnnnnnnnnnnnnnnnnnnnnnnnnnnnnnnnnnnnnnnnnnnnnnnnnnnnnnnnnnnnnnnnnnnnnnnnnnnnnnnnnnnnnnnnnnnnnnnnnnnnnnnnnnnnnnnnnnnnnnnnnnnnnnnnnnnnnnnnnnnnnnnnnnnnnnnnnnnnnnnnnnnnnnnnnnnnnnnnnnnnnnnnnnnccaccaccaaagatccctgacaagcagttagatgaaagggaacacacaatagaagagtggaaa

SEQ ID NO: 35463 - DNA, 108 bp, Macaca Mulatta
aaagaacttctccagtcctctggagacaaccacaaatggttttggcacctgaagagctggattttatcctcaaagatcctgacaatccacagtgcagggaaggcagag

SEQ ID NO: 35464 - DNA, 1178 bp, Macaca Mulatta
  misc_feature (1)...(1178): n = A,T,C or G
ggagggaaccgcgcgcggcccaggacagcagcctcggggcgccggggccggggnnnnnnnnnnnnnnnnnnnnnnnnnnnnnnnnnnnnnnnnnnnnnnnnnnnnnngcaggtgtccaccccccagggttcctgacccctgcccccggacagcgaccccttctcagactccagtcgggccggactctccaaacctgcttccgcaatgggtgggttgtgagtgctggtaagacctgctagccaacattcagctgctctgccctctccatgcctggccggcccggcccatgcctgttcttttctcccctgtgctgccgccgcccgtggccacccctctcctgaacttaccgccactcaggtaatgaggagccgtgggtgcagccagccttggagatgccgaagagacgggacatcctagcgatcgtcctcatcgtgctgccctggactctgctcatcacggtctggcaccagagcaccctcgcacccctgcttgcggtgcataagggtgagnnnnnnnnnnnnnnnnnnnnnnnnnnnnnnnnnnnnnnnnnnnnnnnnnnnnnnnnnnnnnnnnnnnnnnnnnnnnnnnnnnnnnnnnnnnnnnnnnnnnnnnnnnnnnnnnnnnnnnnnnnnnnnnnnnnnnnnnnnnnnnnnnnnnnnnnnnnnnnnnnnnnnnnnnnnnnnnnnnnnnnnnnnnnnnnnnnnnnnnnnnnnnnnnnnnnnnnnnnnnnnnnnnnnnnnnnnnnnnnnnnnnnnnnnnnnnnnnnnnnnnnnnnnnnnnnnnnnnnnnnnnnnnnnnnnnnnnnnnnnnnnnnnnnnnnnnnnnnnnnnnnnnnnnnnnnnnnnnnnnnnnnnnnnnnnnnnnnnnnnnnnnnnnnnnnnnnnnnnnnnnnnnnnnnnnnnnnnnnnnnnnnnnnnnnnnnnnnnnnnnnnnnnnnnnnnnnnnnnnnnnnnnnnnnnnnnnnnnnnnnnnnnnnnnnnnnnnnnnnnnnnnnnnnnnnnnnnnnnnnnagatgcgcagcaccaggagggtgtccgtgtggcccgtcgctttcgtgggtggcctgcggtacgaggccccacgggtgaacggggcagggaaggtggtcggctggaagacggtgtttgacccccaccggccatttgcaatagacatggctggatatgcagtcaacctgc

SEQ ID NO: 35465 - DNA, 681 bp, Macaca Mulatta
taaacatgaaattaaaaatgaattatcaaacatacagtatgaagtgcgagagtagagaagtgttctgtagatatttttggagaactgaattatactttgtgcatcccggatgttaatgcatgtgtattttatgtctggaaacgctgtcacagagcctgactggtcctcttgtctaccccgttaggttgatccaaagctggtcatggagcaggccgaccgtgagagcagcagagggaagaacacctttctctaccagctccacaaactggttgtgctcggcacctgagcgtgtccacaggcggcctccagcacacccctcaggaagctgcggagggtggattccaggctccctccgcagactgactttcctctgtgtctggacattacagtctgtgcccactgcatcctaaaggccttttctttcttcttttctctttgggtgatagtcagagagtggtgtttttgttcaggtgggaaggattggaaactctagtcttttctagaaacagaaaatcactgtattaaatattttggaaaaattgttctgaaagaagactgtttggataaagagctatattttgctttaaatttatgaaggtaaatataagtagttaatcttagatgtaatgttccagaatgtgcctacatattctattctgttacaatgatttcaaccagtag

SEQ ID NO: 35466 - DNA, 187 bp, Macaca Mulatta
ggggtttcaaagactgggggaccccttcctcctgactccagcaccctggcctgggaagagctcggcccaatcagcctgggttcccccagcacctactcctggtggctctgggtccccggatccaccacccttcccccactgactcttcaaggacgtgccctctttgctctcagaaccttggggaagg

SEQ ID NO: 35467 - DNA, 1646 bp, Macaca Mulatta
  misc_feature (1)...(1646): n = A,T,C or G
ggtaaatcgtgagttaaaaaagttactggtggcttctgttggggatgatcttcagtatcactttgaacgtctagcccgtgagaaaaatcagcttattttagaaaatgaagccctaggtcgaaacacagctcagctttctgaacagttagaacgtatgtcaatacagtgtgatgtatggcgaagtaaattccttgcaagcaggnnnnnnnnnnnnnnnnnnnnnnnnnnnnnnnnnnnnnnnnnnnnnnnnnnnnnnnnnnnnnnnnnnnnnnnnnnnnnnnnnnnnnnnnnnnnnnnnnnnnnnnnnnnnnnnnnnnnnnnnnnnnnnnnnnnnnnnnnnnnnnnnnnnnnnnnnnnnnnnnnnnnnnnnnnnnnnnnnnnnnnnnnnnnnnnnnnnnnnnnnnnnnnnnnnnnnnnnnnnnnnnnnnnnnnnnnnnnnnnnnnnnnnnnnnnnnnnnnnnnnnnnnnnnnnnnnnnnnnnnnnnnnnnnnnnnnnnnnnnnnnnnnnnnnnnnnnnnnnnnnnnnnnnnnnnnnnnnnnnnnnnnnnnnnnnnnnnnnnnnnnnnnnnnnnnnnnnnnnnnnnnnnnnnnnnnnnnnnnnnnnnnnnnnnnnnnnnnnnnnnnnnnnnnnnnnnnnnnnnnnnnnnnnnnnnnnnnnnnnnnnnnnnnnnnnnnnnnnnnnnnnnnnnnnnnnnnnnnnnnnnnnnnnnnnnnnnnnnnnnnnnnnnnnnnnnnnnnnnnnnnnnnnnnnnnnnnnnnnnnnnnnnnnnnnnnnnnnnnnnnnnnnnnnnnnnnnnnnnnnnnnnnnnnnnnnnnnnnnnnnnnnnnnnnnnnnnnnnnnnnnnnnnnnnnnnnnnnnnnnnnnnnnnnnnnnnnnnnnnnnnnnnnnnnnnnnnnnnnnnnnnnnnnnnnnnnnnnnnnnnnnnnnnnnnnnnnnnnnnnnnnnnnnnnnnnnnnnnnnnnnnnnnnnnnnnnnnnnnnnnnnnnnnnnnnnnnnnnnnnnnnnnnnnnnnnnnnnnnnnnnnnnnnnnnnnnnnnnnnnnnnnnnnnnnnnnnnnnnnnnnnnnnnnnnnnnnnnnnnnnnnnnnnnnnnnnnnnnnnnnnnnnnnnnnnnnnnnnnnnnnnnnnnnnnnnnnnnnnnnnnnnnnnnnnnnnnnnnnnnnnnnnnnnnnnnnnnnnnnnnnnnnnnnnnnnnnnnnnnnnnnnnnnnnnnnnnnnnnnnnnnnnnnnnnnnnnnnnnnnnnnnnngtagtaggaagctggaggacttactttcaatttatggtaatttttntgagctacaaaagagccttgcagaaatggatgaaggtattactcttttaaaaataaatgctatatnnnnnnnnnnnnnnnnnattttagagccaaattaacaggtacttcagcaaaacatgctaattttatgcagaggattctgtattcggaatggacacaatctgacatatataaaagaaacagattattaactattgactcttatttagcaaatgcaacagacaagaatatccaacttgatatttattataggtagactttttctaaaacagtatataagctcaaagaaaaaaatgcaatctatcaattaatatatattatgtaatatatattattgtgtatttctgatt

SEQ ID NO: 35468 - DNA, 126 bp, Macaca Mulatta
ggtaagcaggtgattcaccctaaccaaattgccgtggtccaggagcagttttctccttcccctgaaaaaattaagtgggctgaagaactgattgctgcctttaaagaacatcaacaattaggaaag

SEQ ID NO: 35469 - DNA, 828 bp, Macaca Mulatta
  misc_feature (1)...(828): n = A,T,C or G
gctttgtgacaacaaactgtgctttgcagttttcatcccgtggaatccgacccggcctgaccatcgtcctagctcggaacctagacaagaacaccgtgggctacctgcagtggcgatggggtatccagtcagccatgaacactagcatcgtccgggacactaaaaccagccacttcactgtggccctgcagncagctgggaatccctcactcctttgcactgatcagctatcagcacaaattccaagatgacgatcagactcgcgtgaaaggatccctcaannnnnnnnnnnnnnnnnnnnnnnnnnnnnnnnnnnnnnnnnnnnnnnnnnnnnnnnnnnnnnnnnnnnnnnnnnnnnnnnnnnnnnnnnnnnnnnnnnnnnnnnnnnnnnnnnnnnnnnnnnnnnnnnnnnnnnnnnnnnnnnnnnnnnnnnnnnnnnnnnnnnnnnnnnnnnnnnnnnnnnnnnnnnnnnnnnnnnnnnnnnnnnnnnnnnnnnnnnnnnnnnnnnnnnnnnnnnnnnnnnnnnnnnnnnnnnnnnnnnnnnnnnnnnnnnnggaattggagaagcagaggggaagcgccgccaccgacgtgctgcaaaagaagcaagaggcggagtccgctgtnnnnnnnnngcaggaatctgtccgaagattaatgaggcagaagagtccagaatgggnggcctcatcatcgtcaatgcctggtacgggaagtttgtcaatgacaagagcaggaagagtgagaaggtgaaggtgattgacgtgactgtgcccctgcagtgcctggtgaaggactcgaagctcatcctcacggaggcctccaagg

SEQ ID NO: 35470 - DNA, 828 bp, Macaca Mulatta
  misc_feature (1)...(828): n = A,T,C or G
gacacctttacctgaaataggaaggcgagtgagagtgaataaatatcaaaaatctgttgggtggagatacagnnnnnnnnnnnnnnnnnnnnnnnnnnnnnnnnnnnnnnnnnnnnnnnnnnnnnnnnnnnnnnnnnnnnnnnnnnnnnnnnnnnnnnnnnnnnnnnnnnnnnnnnnnnnnnnnnnnnnnnnnnnnnnatggtgatggagttatgtgcagcaggttcggtcactgatgtagtgagaatgaccagaaatcagagtttaaaagaagattggattgcttatatctgccgagaaatccttcaggnnnnagggcttagctcaccttcacgcacaccgagtaattcaccgggacatcaaaggtcagaatgtgctgctgactcataatgctgaagtaaaactggnnnnnnnnnnnnnnnnnnnnnnnnnnnnnnnnnnnnnnnnnnnnnnnnnnnnnnnnnnnnnnnnnnnnnnnnnnnnnnnnnnnnnnnnnnnnnnnnnnnnnnnnnnnnnnnnnnnnnnnnnnnnnnnnnnnnnnnnnnnnnnnnnnnnnnnnnnnnnnnnnnnnnnnnnnnnnnnnnnnnnnnnnnnnnnnnnnnnnnnnnnnnnnnnnnnnnnnnnnnnnnnnnnnnnnnnnnnnnnnnnnnnnnnnnnnnnnnnnnnnnnnnggtcccgtaagttccacaatttcatggaaaagtgtacgataaaaaatttcctgtttcgtcctacttctgcaaacatgcttcatcgcccatttaataaagaaataaaaaatgaacgacatgttgttgagtcattaacgaggcatcttactggaatcat

SEQ ID NO: 35471 - DNA, 375 bp, Macaca Mulatta
tctttgtttatactgcccctgatgccactggttctgatgccactggttggggggcctgctttgaaatgcttgtctgcagagtcacagcagccgggaaaaccttgtgaccatgcaaatgagctctgctctaaaattgttgacattcacgtctctgagttacaaaagtgctaattcactacatgtaattgtgtaagtaaacattgtgcctttactacttctttatgtaatagaaattatatacctaagcttatataatacatggggaggattaaataaaggaataaagataaattgacaactcctgggtgcctcttagattgcttgaaaatgcccatgtagtagtggtaatatgcagcatttcagcctgtggggtga

SEQ ID NO: 35472 - DNA, 754 bp, Macaca Mulatta
ggggacgttgaggagcccgaggagaccgtgaggctctggcctgccgctcgcgccgccatggacgctgccgaggtcgagttcctcgccgagtaggaggtggttaccattatccccaacttcagtctggacaagatctacctcatcgggggggacctggggccttttaaccctggtttaccagtggaagtgcccctgtggctggcaattaacctgaaacaaagacagaaatgtcgcctgctccctccagagtggatggacgtagaaaaaaattggagaagatgagggatcatgaacgaaaggaagaaacttttaccccaatgcccagcccttactacatggaacttaccaagctcctattaaatcatgcttcagacaacatcccgaaggcagatgaaatccggaccctggtcaaggatatgtgggacactcgtatagccaaactccgagtgtctgctgacagctttgtgagacagcaggaggcacatgccaagctggataacttgaccttgatggagatcaacaccagcgggactttcctcacacaagcgctcaaccacttgtacaaactccgccacaaacctccagccttcggagagttctcagtctccgggacttctaaaaaaaggcccggttgcgggccggcttgcccgggggatgtgagtgctccgggactgatgaggtacctctgggttctgggagctctggaaacccttttaatggccttgaaaaccatttgtatggtgccagggaatgg

SEQ ID NO: 35473 - DNA, 285 bp, Macaca Mulatta
ttccccagccccctctggactccatgcaccaaggtcatggctaggagctcttggcagctcagccctgccgccccagagcatgtggcggctgctctctaccagccgagagcttcagagatgcagcatctgcggcgaatgccccgagtccggagcctgttccaggagcaggaggagcctgagcctggcatggaggaggctggtgagatggagcagaagcagctgcagaagagatttgggggcttcactggggcccggaagtcggcccggaagttggccaatcagaag

SEQ ID NO: 35474 - DNA, 866 bp, Macaca Mulatta
tttcaccagtcttccttaaaggtttagctataaggaataaatgtcagtgtccaaatgtccaaaatctaacatattatctcataattatgataggtacttgatgctaggagaaataagagatttgacagtgagaaaatttcctgatatacaattttgacagtacatgtaggatactcaaaaggaattaaggcaattcacgttataattctttctagttattaacaatatattccttgttaacataatctagcaggcaggcatgggcttttgaaggggcatagaaaaaaaatgaccaaatccactgaggaaaacttggtgataacattctctcttttttatttcaaaggtgtccttgaatggccattttggacaaaactggttgtggtagccattggcttcacaggaggtcttgtcttcatgtacgtccagtgtaaagtctacgttcagttgtggcgcaggctgaaggcctacaaccgtgtgatctttgtacaaaattgcccagacactgccaaaaaactggagaagaacttctcatgcaatgtaaacacagacatcaaggatgctgtggtagtgcctgtatcacaaacaggtacaaattcactgccatctgcagagggtggcccccctgaagttgtatcagtttgatggaacctgttgggagttccttcaccgaagaatatctttctagccctcagccactacaaatgacagaagtgatcttgaattatttactctcttcagctcctcctttctcctactgacacatttttcctgactttgttcaaagaggaaaggaggaaaacacgccaaatgcccaggatcccatgaagtatagcatgaagtatggtatggaaatgtgaagtttg

SEQ ID NO: 35475 - DNA, 840 bp, Macaca Mulatta
gacgctgagcccggggatcccagcggcgctctggccctggccaatggccatgtcaagactgactgagtatgaagtgggtggggggcctggggatctctcatggaactcaaggacaaagagaccaagctggtgaggttgccccatccatgcagcaaaagccctgccccggccaagtctcagccctgtggggcacacagagccccctaacctccgcgggggccagtgttggggggccgtggtcaggtgttgggggatggggtgtggaggcagcagagggacattgggaagggtccatgggtcctggcccagctcaggggttggtgccagaaggcctgtggctgagcagcgatagactatgtagttgactttggaagcagcaggccctgtcctggctaagggacaatgagaatggggccacaggtgggaggcaaggcctgacctccctccctctgatctggatttagttaagctttggctggttccattaggcaatattcaggtgcttgcttgcaaccaatacctccccaggggcctgctgagctgcagccgaggagagactgggcagccaggaggctgcgtggcagcaacgctggtctgcaagggctgggagaccctcccttggctcctctcccctcccccagggccctgcgctgctcccttggccttctggggcccccgtggtgctggattcccaccaaccttgggcttttggaggtttcaatccccgtgtgttcggtggcgtttcccccttttctgtcttgttttcaaggcctttaccactagcagctctttatccatgtcggtcaccacacctgccccaccccagctccctagccagca

SEQ ID NO: 35476 - DNA, 677 bp, Macaca Mulatta
gcagcggcacatgcgctgctgcaggaggagctacggcgctgccggcggctaggtgaagaacgggcaaccgaagctggcagcctggaggcccggctccgggagagtgagcaggcccgggcgctgctggagcgggaggctgaagaggctcgaaggcagctggccgccctgggccagaccgagccactcccagccgaggccccctgggcccgcagacctgtggatcctcggcggcgcagcctccctgcaggcgatgccctgtacttgagtttcaaccccccacaggtaaggtggcctgcagtggtaaacggacctggggtggacataagggtccgtggagcccaaaagaaattgggccattggggatttgagcccaaatgcaatcaggcaaccgacttgaaggatattgaggtactagttggagaactgaaaagaaatgtagatgggtgcaggggtggaggaaactaactcgggtggtggtgctgaaagaggccagttggtggtggatctcctgaaggggagtcatgggtgagccccagtgaggagagctgctgccttcagccaaacagaacctccagtcttcacactactcagtccctggcctgctgttcttcctgcccactgtccacagcccaaccgaggcacagacccgcctggatctgcctgtcactactcgctct

SEQ ID NO: 35477 - DNA, 2679 bp, Macaca Mulatta
  misc_feature (1)...(2679): n = A,T,C or G
gcacgctgacctgtgagctgaagagctgcccatactgcacccgtgccctggaggacccggagggggagctcagtggctcagagagtggagactcagatggccgtgtcatctacgaattcacgcaggacatccagcacggtgaccgccgggatcccatgcaaccaccccctgcgacggacacaccaggcccaggcagcccccggcggcgggcacagcagatggcagccccgggtgagccaggcagactgggccacctcagggctaccttcagcggcaagctgcgccgcatcgtggacagcaagtacttcagccgcggcatcatgatggccattctcgtcaacacgctgagcatgggcgtggagtaccatgagcagnnnnnnnnnnnnnnnnnnnnnnnnnnnnnnnnnnnnnnnnnnnnnnnnnnnnnnnnnnnnnnnnnnnnnnnnnnnnnnnnnnnnnnnnnnnnnnnnnnnnnnnnnnnnnnnnnnnnnnnnnnnnnnnnnnnnnnnnnnnnnnnnnnnnncagcgtctgggagatcgtggggcaggcggatggcggtctgtctgtgctgcgcaccttccggctgctgcgtgtgctgaagctggtgcgcttcctgccagcgctgcggcgccagcttgtggtactggtgaagaccatggacaatgtggccaccttctgcacgctgctcatgctcttcattttcatcttcannnnnnnnnnnnnnnnnnnnnnnnnnnnnnnnnnnnnnnnnnnnnnnnnnnnnnnnnnnnnnnnnnnnnnnnnnnnnnnnnnnnnnnnnnnnnnnnnnnnnnnnnnnnnnnnnnnnnnnnnnnnnnnnnnnnnnnnnnnnnnnnnnnnnnnnnnnnnnnnnnnnnnnnnnnnnnnnnnnnnnnnnnnnnnnnnnnnnnnnnnnnnnnnnnnnnnnnnnnnnnnnnnnnnnnnnnnnnnnnnnnnnnnnnnnnnnnnnnnnnnnnnnnnnnnnnnnnnnnnnnnnnnnnnnnnnnnnnnnnnnnnnnnnnnnnnnnnnnnnnnnnnnnnnnnnnnnnnnnnnnnnnnnnnnnnnnnnnnnnnnnnnnnnnnnnnnnnnnnnnnnnnnnnnnnnnnnnnnnnnnnnnnnnnnnnnnnnnnnnnnnnnnnnnnnnnnnnnnnnnnnnnnnnnnnnnnnnnnnnnnnnnnnnnnnnnnnnnnnnnnnnnnnnnnnnnnnnnnnnnnnnnnnnnnnnnnnnnnnnnnnnnnnnnnnnnnnnnnnnnnnnnnnnnnnnnnnnnnnnnnnnnnnnnnnnnnnnnnnnnnnnnnnnnnnnnnnnnnnnnnnnnnnnnnnnnnnnnnnnnnnnnnnnnnnnnnnnnnnnnnnnnnnnnnnnnnnnnnnnnnnnnnnnnnnnnnnnnnnnnnnnnnnnnnnnnnnnnnnnnnnnnnnnnnnnnnnnnnnnnnnnnnnnnnnnnnnnnnnnnnnnnnnnnnnnnnnnnnnnnnnnnnnnnnnnnnnnnnnnnnnnnnnnnnnnnnnnnnnnnnnnnnnnnnnnnnnnnnnnnnnnnnnnnnnnnnnnnnnnnnnnnnnnnnnnnnnnnnnnnnnnnnnnnnnnnnnnnnnnnnnnnnnnnnnnnnnnnnnnnnnnnnnnnnnnnnnnnnnnnnnnnnnnnnnnnnnnnnnnnnnnnnnnnnnnnnnnnnnnnnnnnnnnnnnnnnnnnnnnnnnnnnnnnnnnnnnnnnnnnnnnnnnnnnnnnnnnnnnnnnnnnnnnnnnnnnnnnnnnnnnnnnnnnnnnnnnnnnnnnnnnnnnnnnnnnnnnnnnnnnnnnnnnnnnnnnnnnnnnnnnnnnnnnnnnnnnnnnnnnnnnnnnnnnnnnnnnnnnnnnnnnnnnnnnnnnnnnnnnnnnnnnnnnnnnnnnnnnnnnnnnnnnnnnnnnnnnnnnnnnnnnnnnnnnnnnnnnnnnnnnnnnnnnnnnnnnnnnnnnnnnnnnggtggtggccctggggctgctttcgggcgagcacgcctaccttcagagcagctggaacctgctggacgggctgctggtgctggtgtccctggtcgacattgtcgtggccatggcctcggctggtggcgccaagatcctgggcgttctgcgcgtgctgcgtctgctgcggaccttgcggcctctgaggnnnnnnnnnnnnnnnnnnnnnnnnnnnnnnnnnnnnnnnnnnnnnnnnnnnnnnnnnnnnnnnnnnnnnnnnnnnnnnnnnnnnnnnnnnnnnnnnnnnnnnnnnnnnnnnnnnnnnnnnnnnnnnnnnnnnnnnnnnnnnnnnnnnnnnnnnnnnnnnnnnnnnnnnnnnnnnnnnnnnnnnnnnnnnnnnnnnnnnnnnnnnnnnnnnnnnnnnnnnnnnnnnnnnnnnnnnnnnnnnnnnnnnnnnnnnnnnnnnnnnnnnnnnnnnnnnnnnnnnnnnnnnnnnnnnnnnnnnnnnnnnnnnnnnnnnnnnnnnnnnnnnnnnnnnnnnnnnnngcagcccgtgcagaaccacaacccctggatgctgctgtacttcatctccttcctgctcatcgtcagcttcttcgtgctcaacatgttcgtgggtgtcgtggtcgagaacttccacaagtgccggcagcaccaggaggcggaggaggcgcggcggcgtgaggagaagcggctacggcgcctggagaggaggcgcagg

SEQ ID NO: 35478 - DNA, 769 bp, Macaca Mulatta
agagaaattctctgggataacatcaaagctggcaacttgactcgtgaacatcactttgaggaaaagctttgcctcattgttctccacccaactcagatatggcaaggataaactatgttgctctggcaaccaggaaggagatgatgtaacatgtactggggatgttatgtaggaggctgagtggttgagttggatgcggtgtgggatgtggggataattttatatcccagcagtatgattagtggagttagctactgctgtaacagaaccttccacaatttctcaatctccactcttatgttctgataaaaactgaaaaaaatactacttactgttttggtttgtcacattatttataatcatagacctattcatacatcttaccttggaacagtggttcttatttattgacattttgtgaaaggttgtagtgtttgcatttaaaacaaaatgcattttcacatttgaagactcacttaaaataattggttgtttatgtagccacatacagtaattatgagtcaacattccaagaaggatattgttgtcaaggcttattaaaatgattttgtgcaggactttctaaatgtgaacaaaatgtttttctctaagtgctggaggtaattcagtgaagaaatatcaactaaagttcttgttttgccctgatagggttaaaaaatggttgtttgtaatgaagactattattagccaaggaaaataaaagtttcaggcactacttcacagtactcagtttgagaggaattttaca

SEQ ID NO: 35479 - DNA, 578 bp, Macaca Mulatta
gtagaagatatttcttctacatcccatgaacgcatatgtagagctaaataaaaacccaagtcccaacaaaatataaaatttatgtaactagtaggatttggttgtttctgcaaaaatcattgttgcgctctctgcagatttcagtcggattgctaaatttctcaaagcaggcttcagtgtttcttaaccgtggctgcacattgcaatcactgggggagatttacgacacctgggtcccatccctagatatttccagtgtaattgatctgggatgtggtttggctgtagagattttcaagcatcctaaatgattccaatgtgcatctaaggttgaaaacccatgcattagtaaatctcaagccccacagtcaatttttctatataaacttgtaaagatagaagttaaaggcttatagaagaaaattatggctttcttaattcagcctattaaatcagaaaatttcattgaagacttaaggttttgtcatttggctaactgtacaaggctgtcaaatataagatacttaacaatctgttattactagtgaatatatatgtatatggaatatacatacata

SEQ ID NO: 35480 - DNA, 101 bp, Macaca Mulatta
aggttgttcctcaaagtcattcaagctgtactcgccgaaggagcccccgaacggcaacgccttcccccccttccatcccggcaccatgctagatcgggatg

SEQ ID NO: 35481 - DNA, 707 bp, Macaca Mulatta
gttatgactgtaactgtatttattgactagatgatttatcttcttaggtggcttctcctcaacctgtatcttctgagatatatagggatccatttggaaatccttttgcctaaattctgaacttggtctgcagaccatccggaggaataaaaaggttggccttagtagtcaaaaacaaagctgatagccagacatgccctgatttctgcctttgttccagctttgacatattatctgttgccttatttctcgttgcctcttctacctgtaaaatgcttttcactttctgtctaggttaaagctaaactgaatctatggctttaattaaattaagatcctaaactctctagcttaagtgtaaatgaagtacagtaattttcctactgaaccctgcctattgtgtccctggaacattctagaacacctgccttctaccctctggttgggagacgcagccaccacatcccttcatctcatagtgttttgaataaattttcaaatccttattgttcaaagttgttcgggggttctgtttcagagcataaaacctaaaggttatagtagaacaaggcaccttcttaaaagaaatcttgcttttagactgtcagttacagagaattttctaaagtacaattgaaagcaactacaaccttctcctttagacacctttggaattctaaaccaactgaaaggaacctttttttaaa

SEQ ID NO: 35482 - DNA, 379 bp, Macaca Mulatta
ataaacaaggagacttcagggctgtggaaggccatgacgagcataatcagggcacagtgtcaacaggggctaaagcactaagaaaggctcagcctggctaatcagcttgaactggtcacaggcccaggcactgtcgttcctcctgcaggggttggtagaggtcacaccaagcaggagggaacgaacagggctggtgtgcacaggtggttccactcaccatcttccgtcttcccttgcagtaggcacagaaatctgcaatggcggcccagcacccaagtcttcaacctgctgtatcctgtgagcaccagcctgtggggacccgatggctccctcagtcttcacccactaggatgtgggttctgcctgtggccatttgctg

SEQ ID NO: 35483 - DNA, 448 bp, Macaca Mulatta
aagcctggacctcccattgaatgcaaaggacagcctagtacagtggttctaaattccttctggtgattttagcagctgtgatgttggtacctgatgcagaccaggccaaagttctggaaagctcctgttgccatctgctgtggtggcaaaactataatttatttctggttggctagaactgggtgaccaacagctatgaaacaaacttcagctgtttgaagttgaactttgaggtttttctttaagaatgagcttcatcgttgcctcctctcggtcgttctccccatttctatccattacctcttagccattgagactgaaggaaatagggaataaatcaaattacttcctgtgtaggtcatggatcaggaaacatttgggaagctgctccctcggcaggctgtggtctcttctgcaaagcattttaattaaaaacctcagtaaccgt

SEQ ID NO: 35484 - DNA, 1744 bp, Macaca Mulatta
  misc_feature (1)...(1744): n = A,T,C or G
gtgatactggtgtacatctccttgttctaanagctatattcatccaacaagtcataaagccataatgtggtataacatcctttttgagaggtgaatattattgaatgaaaatggctgacagaagtgggaagattattccaggacaagtgtatattgaggtggaatatgattatgaatatgaagcaaaggatagaaagattgtgataaaacaaggggagcggtacatcttggtgaaaaagaccaatgatgactggtggcaagtcaagccggatgaaaactccaaagcgttttatgtgccagcccagtatgtgaaagaggtcacgcgcaaagctctaatgccacctgttaagcaggtagctggtctaccaaataactccacgaaaataatgcagagtttgcatcttcagagatcaacagaaaatgtgaacaaattgcctgagctttcaagtttcggaaagccgtcgtcgtctgttcaaggaacaggtcttactcgtgatgccaatcagaattttggacccagttataatccaggtcatactgtcaacctaagcctggacctgacccataataacggaaagtttaacaatgactcacattctcctaaagtttccagccagaataggacacgcttatttggtcattttcccggtccagagttcttggatgtagagaaaactagcttctcccaggaacaatcttgtgattccgcaggagaaggctctgaaagaatacatcaggattctgaatctggtgatgaacttagcagcagctccactgaacagataaggnnnnnnnnnnnnnnnnnnnnnnnnnnnnnnnnnnnnnnnnnnnnnnnnnnnnnnnnnnnnnnnnnnnnnnnnnnnnnnnnnnnnnnnnnnnnnnnnnnnnnnnnnnnnnnnnnnnnnnnnnnnnnnnnnnnnnnnnnnnnnnnnnnnnnnnnnnnnnnnnnnnnnnnnnnnnnnnnnnnnnnnnnnnnnnnnnnnnnnnnnnnnnnnnnnnnnnnnnnnnnnnnnnnnnnnnnnnnnnnnnnnnnnnnnnnnnnnnnnnnnnnnnnnnnnnnnnnnnnnnnnnnnnnnnnnnnnnnnnnnnnnnnnnnnnnnnnnnnnnnnnnnnnnnnnnnnnnnnnnnnnnnnnnnnnnnnnnnnnnnnnnnnnnnnnnnnnnnnnnnnnnnnnnnnnnnnnnnnnnnnnnnnnnnnnnnnnnnnnnnnnnnnnnnnnnnnnnnnnnnnnnnnnnnnnnnnnnnnnnnnnnnnnnnnnnnnnnnnnnnnnnnnnnnnnnnnnnnnnnnnnnnnnnnnnnnnnnnnnnnnnnnnnnnnnnnnnnnnnnnnnnnnnnnnnnnnnnnnnnnnnnnnnnnnnnnnnnnnnnnnnnnnnnnnnnnnnnnnnnnnnnnnnnnnnnnnnnnnnnnnnnnnnnnnnnnnnnnnnnnnnnnnnnnnnnnnnnnnnnnnnnnnnnnnnnnnnnnnnnnnnnnnnnnnnnnnnnnnnnnnnnnnnnnnnnnnnnnnnnnnnnnnnnnnnnnnnnnnnnnnnnnnnnnnnnnnnnnnnnnnnnnnnnnnnnnnnnnnnnnnnnnnnnnnnnnnnnnnnnnnnnnnnnnnnnnnnnnnnnnnnnnnnnnnnnnnnnnnnnnnnnnnnnnnnnnnnnagctgaaaactcgacaagggacagaactgctaattcagtccgacaatgacactgttattaatgattggtttaaagttcttagtagtacaatcaataatcag

SEQ ID NO: 35485 - DNA, 1769 bp, Macaca Mulatta
  misc_feature (1)...(1769): n = A,T,C or G
gaaaggttacaaaggcaaaggggcctttctgcccgtggacgccgccgaagaagcatcgttaaagtctctcttctccctgccgtcatgtctaagtcagagtctcctaaagagcccgaacagctgaggaagctcttcattggagggttgagctttgaaacaaccgatgagagcctgaggagccattttgagcaatggggaacgctcacggactgtgtggtaatgagagatccaaacaccaagcgttccaggggctttgggtttgtcacatatgccactgtggaggaggtggatgcagctatgaatgcaaggccacacaaggtggacggaagagttgtggaaccaaagagagctgtctcaagagaagattctcaaagaccaggtgcccacttaactgtgaaaaagatatttgttggtggcattaaagaagacaccgaagaacatcacctaagagattattttgaacagtatgggaaaattgaagtgattgaaatcatgactgaccgaggcagtggcaagaaaaggggctttgcctttgtaacctttgacgaccatgactccgtggataagattgtcattcagaaataccatactgtgaatggccacaactgtgaagttaggaaagccctgtcaaagcaagagatggctagtgcttcatccagccaaagaggtcgaagtggttctggaaactttggtggtggtccgtggaggtggtttcgggtgggaatgacaacttcggtcgtggaggaaacttcagtggtcgtggtggctttggtggcagccgtggtggtggtggatatggtggcagtggggatggctataatggatttggtaatgatggaagcaattttggaggtggtggaagctacaatgattttggcaattacaacaatcagtcttcaaattttggacccatgaagggaggaaattttggaggcagaagctctggcccctatggcggtggaggtcaatactttgcaaaaccacgaaaccaaggtggctatggcggttccagcagcagcagtagctatggcagtggcagaagattttaattaggaaacaaagcttagcaggagaggagagccagagaagtgacagggaagctacaggttacaacagatttgtgaactcagccaagcacagtggtggcagggcctagctgctacaaagaagacatgttttagacaaatactcatgtgtatgggcaaaaaactcgaggactgtatttgtgactaattgtataacaggttattttagtttctgtctgtggaggtaagtcacaagttaaatttttcctataaacggcataaatgtttaggacattnnnnnnnnnnacccatgctgttgattgctaaatgtaatagtctgatcgtgacgctgaataaatgttcttttttttaatgtgctgtgtaaagttagtctactctgaagccatcttggtaaacttccccaacagtgtgaagttagaattccttcagggtgatgtcaggttctatttggaatttatatacaacctgcttgggtggagaagccattgcttcgggaaccttggtgtagttggactgatagttactgttgtgacctgaagttcaccgttaaaagggattacccaaggaaaatcatggaattattggttataaaagtgattgttggcacatcctatgcaatatatctaaattgaataatggtaccagataaaattatagatgggaatgaagcttgtgtatcatccattatcatgtgtaatcaataaacgatttaattctcttgaa

SEQ ID NO: 35486 - DNA, 114 bp, Macaca Mulatta
agaaaactggtaaattcaaacagtgtgctaatgtttccactcgggaggaatgtaactgcacaaaggatcagaagttttcacatgctgttgctttctcagattgcagggaaaaag

SEQ ID NO: 35487 - DNA, 803 bp, Macaca Mulatta
  misc_feature (1)...(803): n = A,T,C or G
ggacctgaagaaggccatccagagatacgtgcagctcaagcaggagcgtgaagggggcattcagcacatcagctggtcttatgtgtggaggacgtaccatctgacctctgccggagagaaactcacagaagataaaaagaagctccgagattatggcatccggaatcgagatgaggtttccttcatcaaaaagctgaggcaaaagtgagcctccagataggacaactctcttgatcactggtggctgagctttttcccagcaggatcagatcctcgagtcattgtgcctctttcacacaaaggcacccaacaggaactgtcagcatgaacctgggggccctcaggactaggacagggtgagccagtgctcccttctttcatgtacttggcctgagactgacctctccttgggtccaaagaccctggtcacatggcagagccacagcctggccctgtgtataaaataaacctgtgtgcttctaaaagtcaaaagccacagtaccctgggtagcaaagactgaggttgccccatcacagaggtgagttaaggggagagaattggtacacgtgagtcctatagtccaagatgtcacaccaccaaagccttgtggccacaccactccccaaaccacacaactgtgttaccatcatctccacagcaaggaagaaaataaaagcagagtggcnnnnnnnnnnnnnnnnnnnnnnnnnnnnnnnnnnnnnnnnnnnnnnnnnnnnnnnnnnnnnnnnnnnnnnnnnnnnnnncctccgngnnncccnannnnccccanaaaaaaaatggg

SEQ ID NO: 35488 - DNA, 557 bp, Macaca Mulatta
ttttgtgagacttgcccttatcatctttcattacttttttcccatttagcccctggaatagctttcatgccaagtttagaattagccaatgaaatgtaaataaactttggacagaaaatagcaatgtatttttttaatataatttcattattcacaaatgaagaatgcaattccatagcttacttctttctcctaaatttaatgtacaaaaatgtacatggatgatattatcacttgttgctgtttttgttgcacaatagcacattaattatattaaatattctctttgtgaagttatgcacagaactgtaacatttcctctacctttttctcttatatgtaggttcatagctcagttgcattgttatgttatgaatttactacttgggtgttctcaatacagtttatcttaaaatatgtagtaaccatgaattcaaaaatggtttctgttttaacaatattaattaaattttcttgggtggattttataaaaacctgtgtaaaatcaatttgcttacttatggttatctggggttgtatttcaaagaatagggtta

SEQ ID NO: 35489 - DNA, 165 bp, Macaca Mulatta
  misc_feature (1)...(165): n = A,T,C or G
gacaagnnnnnnnnnnnnnnnnnnnnnnnnnnnnnnnnnnnnnnnnnnnnnnnnnnnnnnnnnnnnnaaaagcgctgatcctgtttatttggcaggaaaactagacaatccagcagcccaggagggaaaggtgggcttaatcctcatcctcgtcgtctccagccc

SEQ ID NO: 35490 - DNA, 855 bp, Macaca Mulatta
gggggggctttgcagacgctgccgccgaggaaagtcctgtactactagccatggtcaaccctaccgtgttcttcgacattgccgtcgacggcgagcctttgggccgcgtctccttcgagctgtttgcagacaaggttccaaagacagcagaaaattttcgtgctctgagcactggagagaaaggatttggttataagggttcctgctttcacagaattattccagggtttatgtgtcagggtggtgacttcacacgccataatggcactggtggcaagtccatctatggggagaaatttgaagatgagaacttcatcctaaagcatacaggtcctggcatcttgtccatggcaaatgctggacccaacacaaatggttcccagtttttcatctgcactgccaagactgagtggttggatggcaagcatgtggtctttggcaaagtgaaagaaggcatgaatattgtggaggccatggagcgctttgggtccaggaatggcaagaccagcaagaagatcaccattgctgactgtggacaactcgaataagtttgacttgtgttttatcttaaccaccagaccattccttctgtagctcaggagagcacccctccaccccattttgctcgcagtatcctagaatctttgtgctcttcgctgcagttccctttggggttccatggtttttccttgggtccccccccgcgcggcaggattccccacttgtggggttccccaggtgttttccccttgggtctccccccccacggcccccaaattggggatttgccaaaaatttaaaatttttaaggaattttgtgcaaaattaaaaacctttgtctccccaaaaaaaaac

SEQ ID NO: 35491 - DNA, 3062 bp, Macaca Mulatta
  misc_feature (1)...(3062): n = A,T,C or G
cgccggcggtggcggagagtccagggctggggcgcctaccgcccgccccgctcgcagagcccggccgccgcgcgtcgtccgcacacgccgccaccgccatgggctcctgagnnnnnnnnnnnnnnnnnnnnnnnnnnnnnnnnnnnnnnnnnnnnnnnnnnnnnnnnnnnnnnnnnnnnnnnnnnnnnnnnnnnnnnnnnnnnnnnnnnnnnnnnnnnnnnnnnnnnnnnnnnnnnnnnnnnnnnnnnnnnnnnnnnnnnnnnnnnnnnnnnnnnnnnnnnnnnnnnnnnnnnnnnnnnnnnnnnnnnnnnnnnnnnnnnnnnnnnnnnnnnnnnnnnnnnnnnnnnnnnnnnnnnnnnnnnnnnnnnnnnnnnnnnnnnnnnnnnnnnnnnnnnnnnnnnnnnnnnnnnnnnnnnnnnnnnnnnnnnnnnnnnnnnnnnnnnnnnnnnnnnnnnnnnnnnnnnnnnnnnnnnnnnnnnnnnnnnnnnnnnnnnnnnnnnnnnnnnnnnnnnnnnnnnnnnnnnnnnnnnnnnnnnnnnnnnnnnnnnnnnnnnnnnnnnnnnnnnnnnnnnnnnnnnnnnnnnnnnnnnnnnnnnnnnnnnnnnnnnnnnnnnnnnnnnnnnnnnnnnnnnnnnnnnnnnnnnnnnnnnnnnnnnnnnnnnnnnnnnnnnnnnnnnnnnnnnnnnnnnnnnnnnnnnnnnnnnnnnnnnnnnnnnnnnnnnnnnnnnnnnnnnnnnnnnnnnnnnnnnnnnnnnnnnnnnnnnnnnnnnnnnnnnnnnnnnnnnnnnnnnnnnnnnnnnnnnnnnnnnnnnnnnnnnnnnnnnnnnnnnnnnnnnnnnnnnnnnnnnnnnnnnnnnnnnnnnnnnnnnnnnnnnnnnnnnnnnnnnnnnnnnnnnnnnnnnnnnnnnnnnnnnnnnnnnnnnnnnnnnnnnnnnnnnnnnnnnnnnnnnnnnnnnnnnnnnnnnnnnnnnnnnnnnnnnnnnnnnnnnnnnnnnnnnnnnnnnnnnnnnnnnnnnnnnnnnnnnnnnnnnnnnnnnnnnnnnnnnnnnnnnnnnnnnnnnnnnnnnnnnnnnnnnnnnnnnnnnnnnnnnnnnnnnnnnnnnnnnnnnnnnnnnnnnnnnnnnnnnnnnnnnnnnnnnnnnnnnnnnggccgctgcgcccccatgaagagcatctccagcagcctcaaggagaccatgagcccgcacgacatcgtgcaggacgccatccacaacttctcacccgcctaccagcagtacacgcagcactccaccctggagcctgggcccgcctggcgtggtggcgcccatggcctctcccgctcccacagcctcagtggcgcccgcgacaacgagaagactctcctgctcagctctgatgatgagttctaggtgcgggctgtggtggcagaagtgctggtgccgtagccatggtcaggctgtgccccacctccagccacaccaccaggccaggaggcagctggcacagcactcacgccaccatttatttattggaccagaaacacatgtcacttccagaggacacggggacagccaggctcgcccatgggccttcaggaatatttatacacggcccagcctgcactgcccgggcgagggcagaggacactgggagcaaggctcatgcccctgctgcccatcctgtgctgggggcatgctggnnnnnnnnnnnnnnnnnnnnnnnnnnnnnnnnnnnnnnnnnnnnnnnnnnnnnnnnnnnnnnnnnnnnnnnnnnnnnnnnnnnnnnnnnnnnnnnnnnnnnnnnnnnnnnnnnnnnnnnnnnnnnnnnnnnnnnnnnnnnnnnnnnnnnnnnnnnnnnnnnnnnnnnnnnnnnnnnnnnnnnnnnnnnnnnnnnnnnnnnnnnnnnnnnnnnnnnnnnnnnnnnnnnnnnnnnnnnnnnnnnnnnnnnnnnnnnnnnnnnnnnnnnnnnnnnnnnnnnnnnnnnnnnnnnnnnnnnnnnnnnnnnnnnnnnnnnnnnnnnnnnnnnnnnnnnnnnnnnnnnnnnnnnnnnnnnnnnnnnnnnnnnnnnnnnnnnnnnnnnnnnnnnnnnnnnnnnnnnnnnnnnnnnnnnnnnnnnnnnnnnnnnnnnnnnnnnnnnnnnnnnnnnnnnnnnnnnnnnnnnnnnnnnnnnnnnnnnnnnnnnnnnnnnnnnnnnnnnnnnnnnnnnnnnnnnnnnnnnnnnnnnnnnnnnnnnnnnnnnnnnnnnnnnnnnnnnnnnnnnnnnnnnnnnnnnnnnnnnnnnnnnnnnnnnnnnnnnnnnnnnnnnnnnnnnnnnnnnnnnnnnnnncagaccagcttccgggggaaggcagtctggcagggaggctgggaggggtggccacacggtggggagctgagaggtgggggaatggtcccagactcctctcggggcccccatctacacagggcctggtgttctgccccatccggcccctggcccatctcttctgtgccttagtcacatatgaaagcgcccctctctggctccctgtctgtcccacatgctccctggggctcgttcagctgctggcgctcacaggatcctgcagtgctgggcccagagccctcagacaggcctcaggagtgttcaggaccaccaagcccctcctctccccctccacacctctagacctggggcctccggagccggagcccccagcaggctgggcttataccagctcctgacttaggaagagcctggtgtcacaacacatgtccctacaggcaaagtgtcctggcatctaaaacccagattatccctgggtttgggctgcagtggcctcaagaagctggtagggtaagggagagggaccctgccggtgttcactggggattgtttcttttggtccttcctggaatgaacaggttccctccctgccacctgtgaggagagtcggggcctggctgtcttcctggcctccttccttcccttgtggcagaggcctgcatgtgggtgccagaggccagctctccccctccgtcttnnnnnnnnnnnnnnnnnnnnnnnnnnnncccgggaaggtgggtgcagacacaggctga

SEQ ID NO: 35492 - DNA, 1184 bp, Macaca Mulatta
  misc_feature (1)...(1184): n = A,T,C or G
tggttttgtacacgaccccctttcctaacagctgtctgtctgccctgcactgtgtgtcctgggccctcatcttcccatgctactggctggtggaccggcttgctgcctccttcatacccaccacctacgagaannnnnnnnnnnnnnnnnnnnnnnnnnnnnnnnnnnnnnnnnnnnnnnnnnnnnnnnnnnnnnnnnnnnnnnnnnnnnnnnnnnnnnnnnnnnnnnnnnnnnnnnnnnnnnnnnnnnnnnnnnnnnnnnnnnnnnnnnnnnnnnnnnnnnnnnnnnnnnnnnnnnnnnnnnnnnnnnnnnnnnnnnnnnnnnnnnnnnnnnnnnnnnnnnnnnnnnnnnnnnnnnnnnnnnnnnnnnnnnnnnnnnnnnnnnnnnnnnnnnnnnnnnnnnnnnnnnnnnnnnnnnnnnnnnnnnnnnnnnnnnnnnnnnnnnnnnnnnnnnnnnnnnnnnnnnnnnnnnnnnnnnnnnnnnnnnnnnnnnnnnnnnnnnnnnnnnnnnnnnactcccccaccaacacctccatcagcgccgctagcttcagcagcctggtgtcaccacagggcggcgatggggtggcccgggccgtccccgggagcattaagaggacagcctctgtggagtacaagggtgacggcgggcggcaccctggtgatgaggctgccaacggcccagcctctggggaccctgtcgacggcagcagcccggaggatgcctgcatcgtgcgcatcggtggcgaggagggcagccggccacccgaagctgacgaccctgcgcccgggggccaggccaggaacggagctggcgggggcccgaggggccagacgcccaatcacaatcagcaggacggggattcggggagcctgggcagcccctcggcctccagggagtccctggtgaaggggcgagctgggccagacaccagtgccagcggggaaccgggtgccaacagcaagctcctgtacaaggcctcggtggtgaagaaggcggccgcgcgtaggaggcggcaccccgacgaggccttcgaccatgaggtctctgccttcttccccgccaacctggacttcctgtgcctgcaggaggtgtttgacaagcgggcagccaccaaattgaaagagcagctgcacggctactttgagtacatcctgtacgaaggtggggtctacggctgccag

SEQ ID NO: 35493 - DNA, 957 bp, Macaca Mulatta
  misc_feature (1)...(957): n = A,T,C or G
cacaactgcactccaacctggccacagagggagtnnnnnnnnnnnnnnnnnnnnnnnnnnnnnnnnnnnnnatatctattttatgtaggaaacttgttaatttaatacaatttacaacaaacctgctggcactttgatcttggacctccctgctctctgaactgtttactgccacctccagagaagctcactgctgaggtcctgggaatcatttgcattgtcctgatggccactgtgttaaaaacagtggttcttattcctttcctggagcagaacaattctttcccgaatacaagaacccagaaagtacgtcactgtggccattgtcctgaggagtggattacatattccaacagttgttattacattggcaaggaaaaaagaacttgggcagagagtttgctggcctgtacttcaaagaactctagtctgctttctatagataatgaagaagaaatgaaatttctgactgccatttcaccatccacatggactggtgtgtttcgtgacagcagtcatcatccatgggtgacaatcaacggtctgactttcaaacatgagatcaaagactcagatcatgctgaatataactgtgcaatgctacatctagatagacttaaatcagtccagtgtggatcttcaaaaagatattattagatgggatttcatcatgttgannnnnnnnnnnnnnnnnnnnnnnnnnagctcaagaaatctacacatcttgctctcccaagttgctgggattactgacataagccaccgcacctgagtgctcatgtaccatttagcttgtgtttttaaaatctactttttctgccctccctatttttaactaagtgacattttaaaaattacttttccctctctatatagtttgatttaagcattagtcatttacaacaaatattcctattaaaatgcagacagttatgattggaaaataaatcaatgaac

SEQ ID NO: 35494 - DNA, 819 bp, Macaca Mulatta
atctgcttgtgtcatccctcgctggcctgctcctcctgcagggcctgtgagctgctcacaattgggtcaacactttagtgctgaatcactcgtcgaggtctctcaaaaattcagcccaacaatgcttggtttatgtcaatcagctccgacacttgtttagaccatcggtcattctaaagttggtgagtttgttaagcaactatcgacttgatcagttcagccaagcaactgacgcatcgagaaacccacttgtcagttcagtaacataatttggtcaaaacaacagtctattgcattgatttataaatagttgtcacttcacatagcaatttaatcaagtagtcatcaattagctacccccatatataaatatatatgtaatcaatttcttcaactagcttgcttaaatgataatcagttagccaaccatgagtcgtttagaatagtgataaatagaatacatagaatagtgacgaaattcaatttaaaaaaccaagttaagcctccaaaccattttattcaaatgaacccatcaactggatgccaactctggtgaatgtaggacctctgagtgactgtataattgttaattcaaatgagattaatttaaacagttgacagactgtcattcaataattagctccaggaaataacagttatttcatcacaaaaccgtctcttcaaacacacaattgttctgcggaagagttgtcatcaacagtccattgctcacctattcagttgctctgtggtcagtgtggctgcatagtggttgattccttgaaaggagtcagctcaatcacagtcatttagtgacga

SEQ ID NO: 35495 - DNA, 682 bp, Macaca Mulatta
cgagaggtcgcgcagccgcagttttttttgaagaaatagtccagttctgactatggactcgcagccatcggcccttagtttccatcccctctagtgggccctcgggggttatagtgacctccctccttcccttgggactgggccggggaggtgttctcgggcgcgggaggttccgtatgcccaggcccggccaggggaggtgaccgattcgtcgctggggctgacagtccccatggcgccgcctctggccccgctcccttctcgggatccaaacggggcagtacccgagtggagaaagcccaggaccgtgagcttcgccgacgtggccgtgtacttctctcgggaggagtggggctgcctgcgacccgcgcagagggccctgtaccgggacgtgatgcgggagacctacggccacctgggcgcgctcggtgagagccccacctgctcacctgggccctgcgcccccacacgccctgccgcacctctgggagctgcgcgtggagttgggggtcccggggccgggcaggcggcctccccacagcgtggggtttgcgttcttctcccccaggagtcggaggcagcaagccggcgctcatctcctgggtggaggaggaggccgaactatgggatccagctgcccaggatccggaggtgacgaagtgtccgacagaaacggacccag

SEQ ID NO: 35496 - DNA, 1840 bp, Macaca Mulatta
  misc_feature (1)...(1840): n = A,T,C or G
ggtacaagtgcctgctcctggtggattcggtggtatccctgggtgggacccctctctacatggaccagcaaggnnnnnnnnnnnnnnnnnnnnnnnnnnnnnnnnnnnnnnnnnnnnnnnnagggacctcgttcatctccttcagtgacaaggccaaagaagatgtactcccgcaagacgaagcccttctccttctacctggacatcaagtggctggccaacttctggggttgtgacggccagcccaggatgtnnnnnnnnnnnnnnnnnnnnnnnnnnnnnnnnnnnnnnnnnnnnnnnnnnnnnnnnnnnnnnnnnnnnnnnnnnnnnnnnnnnnnnnnnnnnnnnnnnnnnnnnnnnnnnnnnnnnnnnnnnnnnnnnnnnnnnnnnnnnnnnnnnnnnnnnnnnnnnnnnnnnnnnnnnnnnnnnnnnnnnnnnnnnnnnnnnnnnnnnnnnnnnnnnnnnnnnnnnnnnnnnnnnnnnnnnnnnnnnnnnnnnnnnnnnnnnnnnnnnnnnnnnnnnnnnnnnnnnnnnnnnnnnnnnnggtgctgcggatcggcctgctgggctgcaatgccacccgcgagaatgtggaccgcgtgacggaggccctgggggcggccttgcagcactgccccaagaacaagctgtgacctgcctgctggcacacannnnnnnnnnnnnnnnnnnnnnnnnnnnnnnnnnnnnnngatcaggagcaagcagaccctgcaaggtcccccaggcctggggacaggaaagccacggacccagcccgggaggcagaaccaggcagccnnnnnnnnncaggcagcccttttccctccagtggcacctcctggaaacagtccacttgggcgcaggacccagtgccttccaaatgagcggcagttccccggccgtgagcctcccgggaatgtttaataaaaggcctggccacctcttctcactgtgtgggatggtctgtgaaagagtctgacaggagagcatctctgctctttgagctgcctgattgtggactttacggggacactcctcatcctggagcccatagggcaggtcctctcctggagggggtgctgccaccacactctagcnnnnnnnnnnnnnnnnnnnnnnnnnnnnnnnnnnnnnnnnnnnnnnnnnnnnnnnnnnnnnnnnnnnnnnnnnnnnnnnnnnnnnnnnnnnnnnnnnnnnnnnnnnnnnnnnnnnnnnnnnnnnnnnnnnnnnnnnnnnnnnnnnnnnnnnnnnnnnnnnnnnnnnnnnnnnnnnnnnnnnnnnnnnnnnnnnnnnnnnnnnnnnnnnnnnnnnnnnnnnnnnnnnnnnnnnnnnnnnnnnnnnnnnnnnnnnnnnnnnnnnnnnnnnnnnnnnnnnnnnnnnnnncaggctggagtgcagtggcacaatctcagctcacctttaactccgcctcccaggttcaagcgattctcctacctcagcctctggactagctgggacgacaggcacgcaccaccatgcccagctaatttttgtattatttagtacagatggggtttcaccatgttggccaggctggtctccatcgaactcctgacctcaagtgatccacctgcctcggcctcccaaagtgctgggattacatgcatgagctgccgtgcctggccatagttaaatttcgtggtcaggggaacacatggcaggtcctccactgtgccagcttctttcacttattgtttttgacactcacatgtgccattgtgggcgccggtgtgtctgttgctgagtgccgtcccgtggtgtggacgtgccgtcgtgggcgccggtgtgtctgttgctgagtgtcctcccgtggtatgga

SEQ ID NO: 35497 - DNA, 395 bp, Macaca Mulatta
gggcagatacaggagtatggacaacctcatctgagcccagccctgaccggcctcccccaacagaacgcctgtgccgcccctgtccctgggagtggacattcttccaaggaaactgttacttcatatcgaactcccagcggaactggcatgactccatcaccgcctgccaggaggtgggggcccagctcgtcgtaatcaaaagtgctgaggagcaggtacacctggtgggggtccccgtcctggcctggggcatggcttctggccaaccagggaggaggtgctcagagaggattttgcagaagagaggctttgctccacttaaaaagatgggaggagaaggatatgaatgagggagtcccaggtacccttagagcagatacaaaccaaatctgaac

SEQ ID NO: 35498 - DNA, 647 bp, Macaca Mulatta
  misc_feature (1)...(647): n = A,T,C or G
gttccttccacatgattgtggtcatgatgtactatgggccatttatttttacatatatgagacctaaatcataccacactccaggccaggataagttcctggcaatattctatacgatcctcacacccacactcaacccgttaatctacagctttaggaataaagatgttctggcggtgatgaaaaatatgctcaaaaggaagtttctgcataaaaaatgaataggaaaatttctgaatatgtgttctatttctacgttaaatacctgaagagtactcgtaataggttttctagaaagaaatcaaagcttttatcttgccacatgtggatagaagtgaatatttcagaaactttgttaataataaataataacctgtgtttgtgttgtaaacatttaccactagaaatgtattgttccttctgtggtaccatttatagtcatgcaacagttacaggaagtaaaagttacccaaggagtagtcctattccctaacattacaattgtaagactttataagaatatccttaagaataaaatcacacatttattgtataagancagacaaatccatataatgtttattttaataaaactttgtaaaattattttattaacaatcatttatcaaaaatcacaaattccatat

SEQ ID NO: 35499 - DNA, 618 bp, Macaca Mulatta
  misc_feature (1)...(618): n = A,T,C or G
ttagcagttagtgactgggccaacactttctcataaaaattggccttttacatgttgtctaataatcatttttccccaaattttgcgttgtaggactactgttcgaagatttttggaagaatactgagaacggcataaagtgaagatcgacatttaaaaaatgaggtgaaagaaagctatagtggcatagaaaaagtataaagctcagttagttttnnnnnnnnnnnnnnnnnnnnnnaaagttaattcaggactgatgtgacctaccagatttcagaacatgtgttaatagtatatatgccactgaaaacttaggtcctgtatcatacttttttctttaagactttttaagaaatattacttaaacatgtggcttgctcagtgtttaattgcaagttttcattcttggactttgaaaacaggattaaacgttagtattcgtgtgaatcagactaagtgggatttcatttttacaactctgctctacttagcctttggatttagaagtaaaaataaagtatatctgactttctgttacaaagttgattgtctctgtcattgaaaggttttagtattatctttttctaataaagttattgactctgaaaaaaaaaaaaa

SEQ ID NO: 35500 - DNA, 302 bp, Macaca Mulatta
aactgttactaaatggaaaagaaaagaatttctgaattaattattcctgtcaatacaggaaacactgctagtatcttatgttggtattagacctctctgcctgcattgagaatatagttttacatagtagcaaggtttgtgaagcagcatagtgaggtagctaaagccatgggctgcctctaaaggctttgaatcccagccatgtggcttagccatgagatgtgcatttgagaaatgttgtcgtcttttgctgtccaactccaaattttcagatgataatgtgattatcccagcttaagttc

SEQ ID NO: 35501 - DNA, 439 bp, Macaca Mulatta
  misc_feature (1)...(439): n = A,T,C or G
tacagcttgaacccatacacaggactgactccggagtacatgaaaatgannnnnnnnnnnnnnnnnnnnnnnnnnnnnnnnnnnnnnnnnnnnnnnnnnnnnnnnnnnnnnnnnnnnnnnnnnnnnnnnnnnnnnnnnnnnnnnnnnnnnnnnnnnnnnnnnnnnnnnnnnnnnnnnnnnnnnnnnnnnnnnnnnnnnnnnnnnnnnnnnnnnnnnnnnnnnnnnnnnnnnnnnnnnnnnnnnnnnnnnnnnnnngcttttgtcattgcgatcacctccgactttatcccccgcctggtgtaccagtactcctacagtcacaatgggactctgcacggctttgtcaaccacaccctctcctttttcaacgtcagccagctgaaggaggggacgcagccagaaaactcacagtttgaccaggaggttcagttctgcaggt

SEQ ID NO: 35502 - DNA, 618 bp, Macaca Mulatta
caccctgggcccacaaaccagccttccttcggaggaacgtgtgggctggactgagggaggaaatgatcgagttccctctgagaccagcggatccccaggggctgctgggcagtggcccgggaatggggtggattgtgagaaagtgcccaccacctgcaccctgtacgtccagcttttgaacacgagggaaccatgcttctcttagaggttaagcagggccattaacatcctcccccagtccctaacaccacattgtcctgcgtggctcctctggccctgagtggcacctgcccctctggtctcccagcacctggcttaggtaacagccttctgaaatcagagccagggagctgcttctctcttctcccagttctgcctcccccacagccttcctccccaggtgggactgatggagcaagggtccagactaacagccttccaccccagctgtgtctggcgcccctagatctctgcaagggaggtgttacagcttgttctgagcctcttgccttgtgatggtaagacaccagcctttacattctcccctgaggttgcggctgacagggcctacttggcccaactcttagtccagcgagctcctatatcaagatgctgtag

SEQ ID NO: 35503 - DNA, 276 bp, Macaca Mulatta
tcatcactgacttctcaaggcaaatgtcctgtttaaggaactttcttgtaactgatgctgctggtcagccatgctctgcggtactccctattctcactgaagttcttaaactaatcctggttcgatcaacttcgcctacttatttttcagggaataacttctaaattgacctttcagcaagctaaaggtgttatactcctgaacagctgctttgtaatcaagccaaccctacttcaaattgctaatctggatgtaaaccctgaccttacagggata

SEQ ID NO: 35504 - DNA, 910 bp, Macaca Mulatta
  misc_feature (1)...(910): n = A,T,C or G
agcgagtgcgcgctcctcctagcccgccgctagatccatcccggcccagccaccatgtccattcacttcagctccccggtattcacctcgcgctcagccgccttttcgggccgcggcgcgcaggtgcgcctgagctccgcgcgccccggcggccttggcagcagcagcctctacggcttgggcgcctcgcggccgcgcgtggcggtgcgctccgcctatggaggcccggtgggcgccggcatccgcgaggtcaccatcaaccagagcctgctggccccgctgcggctggacgccgacccctccctccagcgggtgcgccaggaggagcgcgagcagatcaagaccctcaacaacaagtttgcctccttcatcgacaaggtnnnnnnnnnnnnnnnnnnnnnnnnnnnnnnnnnnnnnnnnnnnnnnnnnnnnnnnnnnnnnnnnnnnnnnnnnnnnnnnnnnnnnnnnnnnnnnnnnnnnnnnnnnnnnnnnnnnnnnnnnnnnnnnnnnnnnnnnnnnnnnnnnnnnnnnnnnnnnnnnnnnnnnnnnnnnnnnnnnnnnnnnnnnnnnnnnnnnnnnnnnnnnnnnnnnnnnnnnnnnnnnnnnnnnnnnnnnnnnnnnnnnnnnnnnnnnnnnnnnnnnnnnnnnnnnnnnnnnnnnnnnnnnnnnnnnnnnnnnnnnnnnnnnnnnnnnnnnnnnnnnnnnnnnnnnnnnnnnnnnnnnnnnnnnnnnnnnnnnnnnnnnnggagttgacagagctgcagtcccagatctccgacacatctgtggtgctgtccatggacaacagtcgctctctggacctggacagcatcattgctgaggtcaaggcgcagtatgaggagatggccaaatgcagccgggctgaggctgaggcctggtaccagaccaa

SEQ ID NO: 35505 - DNA, 683 bp, Macaca Mulatta
  misc_feature (1)...(683): n = A,T,C or G
aggagatgaaggaggacatctagacagcgaggaggaggaggcacctcggcccatgccacacatcccagaggacctggagtgccaggaggccngagcagctttatggacctcccgaaggagaaggcggacaggaaggagcaggtggaaagactagagcttggattcatccagctctctggagcgacagagggcatgannnnnnnnnnnnnnnnnnnnnnnnnnnnnnnnnnnnnnnnnnnnnnnnnnnnnnnnnnnnnnnnnnnnnnnnnnnnnnnnnnnnnnnnnnnnnnnnnnnnnnnnnnnnnnnnnnnnnnnnnnnnnnnnnnnnnnnnnnncttgtgtgcaaccacgaggggcatgacaaattcccccccgctgcccagaaccgtggtgatgagcctgctccaggggccccagccccccaggagcttggggctgnnnnnnnnnnnnnnnnnnnnnnnnngtgagcctggccgacagcgtggagcctgcagcgggagaggccagggagggttctccccgtggcaaccccaccgcagagaagatcgtgcagctgcttcctgtaatgcaggacacccaggagcacccaggcttggccagcaaaccctgcgtccctttcttttaccgggcagcggagaacagggagatcaacatcgtcatcatctgagagctggtcaagaaat

SEQ ID NO: 35506 - DNA, 76 bp, Macaca Mulatta
agaggataacagtgtgacaagcagagacacccaatcagaggatgacttttacggcggcgacagcagtgaagaggta

SEQ ID NO: 35507 - DNA, 1707 bp, Macaca Mulatta
  misc_feature (1)...(1707): n = A,T,C or G
tttctcacgggggtggacaggatgtcaagtgctcccttggctacttcccctgtgggaacatcacaaagtgcttgcctcagctcctgcactgtaacggtgtggacgactgtgggaatcaggccgatgaggacaactgtgnnnnnnnnnnnnnnnnnnnnnnnnnnnnnnnnnnnnnnnnnnnnnnnnnnnnnnnnnnnnnnnnnnnnnnnnnnnnnnnnnnnnnnnnnnnnnnnnnnnnnnnnnnnnnnnnnnnnnnnnnnnnnnnnnnnnnnnnnnnnnnnnnnnnnnnnnnnnnnnnnnnnnnnnnnnnnnnnnnnnnnnnnnnnnnnnnnnnnnnnnnnntcacttcagtggaacttaataagaaagcttcctcctgattgcttcaagaattatcatgatcttcagaagctgtannnnnnnnnnnnnnnnnnnnnnnnnnnnnnnnnnnnnnnnnnnnnnnnnnnnnnnnnnnnnnnnnnnnnnnnnnnnnnnnnnnnnnnnnnnnnnnnnnnnnnnnnnnnnnnnnnnnnnnnnnnnnnnnnnnnnnnnnnnnnnnnnnnnnnnnnnnnnnnnnnnnnnnnnnnnnnnnnnnnnnnnnnnnnnnnnnnnnnnnnnnnnnnnnnnnnnnnnnnnnnnnnnnnnnnnnnnnnnnnnnnnnnnnnnnnnnnnnnnnnnnnnnnnnnnnnnnnnnnnnnnnnnnnnnnnnnnnnnnnnnnnnnnnnnnnnnnnnnnnnnnnnnnnnnnnnnnnnnnnnnnnnnnnnnnnnnnnnnnnnnnnnnnnnnnnnnnnnnnnnnnnnnnnnnnnnnnnnnnnnnnnnnnnnnnnnnnnnnnnnnnnnnnnnnnnnnnnnnnnnnnnnnnnnnnnnnnnnnnnnnnnnnnnnnnnnnnnnnnnnnnnnnnnnnnnnnnnnnnnnnnnnnnnnnnnnnnnnnnnnnnnnnnnnnnnnnnnnnnnnnnnnnnnnnnnnnnnnnnnnnnnnnnnnnnnnnnnnnnnnnnnnnnnnnnnnnnnnnnnnnnnnnnnnnnnnnnnnnnnnnnnnnnnnnnnnnnnnnnnnnnnnnnnatattttaagaaattccagtactgtgggtatgcaccacatgttnnnnnnnnnnnnnnnnnnnnnnnnnnnnnnnnnnnnnnnnnnnnnnnnnnnnnnnnnnnnnnnnnnnnnnnnnnnnnnnnnnnnnnnnnnnnnnnnnnnnnnnnnnnnnnnnnnnnnnnnnnnnnnnnnnnnnnnnnnnnnnnnnnnnnnnnnnnnnnnnnnnnnnnnnnnnnnnnnnnnnnnnnngtgccgactgcttaatgggaatatatttattcgtgatcggaggctttgacctaaaatttcgtggagaatacaataagcatgcgcagctgtggatggagagtactcactgtcagcttgtaggatctttggccattctgtccacagaagtatcagttttactgttaacatttctgacactggaaaaatacatctgcattgtctatccttttagatgtgtgagacctggaaaatgcagaacaattacagttctgattctcatttggattactgggtttatagtggctttcattccattgagcaataaggaatttttcaaaaactactatggcaccaatggagtatgcttccctcttcattcagaagatacagaaagtattggagcccagatttattcagtggcaattttccttggta

SEQ ID NO: 35508 - DNA, 463 bp, Macaca Mulatta
  misc_feature (1)...(463): n = A,T,C or G
ggggcggtatgcgcgccagcgtcccacagaagctggccgagacgctgagcagccagtatgggctgatcgtgttcgtggcggggctgctgctgctgctggcctgggcggtgcacgccgcgggcgtgggcaagagcgacctgctgtgcttcctgacggcgctcatgctgctgcagctgctgtggatgctgtggtacgtgggccgcagctccgcgcaccgccgcctcttccgcctcaaggacacgcacgccggcgccggctggctgcgcggnnnnnnnnnnnnnnnnnnnnnnnnnnnnnnnnnnnnnnnnnnnnnnnnnnnnnnnnnnnnnnnnnnnnnnnnnnnnnnnnnnnnnnnnnnnnnnnnnnnnnnnnnnnnnnnnnnnnnnnnnnnnnnnnnnnnnaggtatattttctttgggggcatgcaaaggatattatccagtctttcaaaacactggaaagg

SEQ ID NO: 35509 - DNA, 757 bp, Macaca Mulatta
ggtcaacactcaaactgcaacacacacaacagaatttattgtcagtgacagtacctactcggtggcgtccccttactctacagcacctgcccctactactactcctgctccagcttccacttctattccacggagaaaaaaattgatttgcattacagaagtttttatggaaactagcaccatgtctacagaaactgaaccatttgttgaaaataaagcagcattcaagaatgaagctgctgggtttggaggtgtccccacggctctgctagtgcttgctctcctcttttttggtgctgcagctggtcttggattttgctatgtcaaaaggtatgtgaaggccttcccttttacaaacaagaatcagcagaaggaaatgattgaaaccaaagtagtaaaggaggagaaggccgatgatatcaaccctaatgaagaatcaaagaaaacggataacaacccagaagagcccaagagtccaagcaaaactaccgtgcgatgcctggaagctgaagtttagatgagacagaaatgaggagacacacctgaggctggtttctttcaccatcctcaccctgccccagctgaagaaatcaaacgggccaaagaaccaaagaagaaagtccacccttagttccttactggaatcagctcaagactgccgttggaactatggagtgcaccaaagaaaatgcccctactttcttatttgcaaaccccctgtctgggatccctatcccttcctaacctccaaaagcca

SEQ ID NO: 35510 - DNA, 804 bp, Macaca Mulatta
  misc_feature (1)...(804): n = A,T,C or G
gggggaagccccttctccgtcattgagtacgaatgcaagcccaacgagacacgcagtctgatgtgggtgaacaaggagtccttcctctgaaagtggctctttctgatgctgctggacaatcttttcagaaacccacttttagataaaccagcgcaagccttaaacaaggcacgccgcaccactgctgttccccatctggtcccgatgacctactagccctgattattttgaaagtgtaattcccctctgatacaatatccctcacattcaagatggtgatgtaccacccccgagaatacttccgtctgtattttgtgctgatgttcctgcatccagttgttctcggtcatactattgaccactcgtgaccggagttcagtggccctggcaggcttgtcctgctcttgactgttccactgactgactatggtgttttgtttccaagtaaagtgattcctccttttttttgttcaatgttaaatttaaaaataaccatgtgtatgggtcctcccatgtgtaatacggtaacatgtaacttgcagtgtttgtcagctttcaaagcaggctttgtgaaaatgtaacacaaacagcagcgaatggggctccaatgttgtgcttcctatcaacagctctactctttcagggaaggatgataacaaccagaaggacattatgtacgtatttataatgtattaaaactctgtagntacttnangtatgtgcatggctagctagtagaatgaggaaagcatgcgtggacattgtagtgacagatgtaggtaccttgaagctcaagttcgaagc

SEQ ID NO: 35511 - DNA, 610 bp, Macaca Mulatta
  misc_feature (1)...(610): n = A,T,C or G
ggggaaacttttattttttcatttttcttttaagnnnnnnnnnnnnnnnnnnnnntgatttagggctgggtgcggtggctcaggcctgtaatcctnnnnnnnnnnnnnnnnnnnntgggaagatcgtttgaggccaannnnnnnnnnnnnnnnnnnnnnnnnnngcgagactcttatcnnnnnnnnnnnnnnnnnnnnnnnngatttaattctgttatttttcataaggggtttaattcctgaagtaaagatatgcacctattaagcttaaaactgccaaatgagttttgttccttttatgtgcatgataaagctacaaggaatggtgtggccacctcctcctcccgttcaagctagggcagcaggtagctctttccaccccctgagcccagccccttcccaagtggtgctggacaaaaaaactacatggcccttttatgtcttgggactggaaagggagggatgaattggggtgatagaaccctggtgaattcagagttatctttctttagaaaaatattgaaaaacactacttcaggataggagtttagaaaagcaccaaagctttcactttggtttggcacagtttctaccatctgtttttctaccn

SEQ ID NO: 35512 - DNA, 1283 bp, Macaca Mulatta
  misc_feature (1)...(1283): n = A,T,C or G
cagcctccctgcccctgctcacggactctgtcatccaggccctggctgagctnnnnnnnnnnnnnnnnnnnnnnnnnnnnnnnnnnnnnnnnnnnnnnnnnnnnnnnnnnnnnnnnnnnnnnnnnnnnnnnnnnnnnnnnnnnnnnnnnnnnnnnnnnnnnnnnnnnnnnnnnnnnnnnnnnnnnnnnnnnnnnnnnnnnnnnnnnnnnnnnnnnnnnnnnnnnnnnnnnnnnnnnnnnnnnnnnnnnnnnnnnnnnnnnnnnnnnnnnnnnnnnnnnnnnnnnnnnnnnnnnnnnnnnnnnnnnnnnnnnnnnnnnnnnnnnnnnnnnnnnnnnnnnnnnnnnnnnnnnnnnnnnnnnnnnnnnnnnnnnnnnnnnnnnnnnnnnnnnnnnnnnnnnnnnnnnnnnnnnnnnnnnnnnnnnnnnnnnnnnnnnnnnnnnnnnnnnnnnnnnnnnnnnnnnnnnnnnnnnnnnnnnnnnnnnnnnnnnnnnnnnnnnnnnnnnnnnnnnnnnnnnnnnnnnnnnnnnnnnnnnnnnnnnnnnnnnnnnnnnnnnnnnnnnnnnnnnnnnnnnnnnnnnnnnnnnnnnnnnnnnnnnnnnnnnnnnnnnnnnnnnnnnnnnnnnnnnnnnnnnnnnnnnnnnnnnnnnnnnnnnnnnnnnnnnnnnnnnnnnnnnnnnnnnnnnnnnnnnnnnnnnnnnnnnnnnnnnnnnnnnnnnnnnnnnnnnnnnnnnnnnnnnnnnnnnnnnnnnnnnnnnnnnnnnnnnnnnnnnnnnnnnnnnnnnnnnnnnnnnnnnnnnnnnnnnnnnnnnnnnnnnnnnnnnnnnnnnnnnnnnnnnnnnnnnnnnnnnnnnnnnnnnnnnnnnnnnnnnnnnnnnnnnnnnnnnnnnnnnnnnnnnnnnnnnnnnnnnnnnnnnnnnnnnnnnnnnnnnnnnnnnnnnnnnnnnnnnnnnnnnnnnnnnnnnnnnnnnnnnnnnnnnnnnnnnnnnnnnnnnnnnnnnnnnnnnnnnnnnnnnnnnnnnnnnnnnnnnnnnnnnnnnnnnnnnnnnnnnnnnnnnnnnnnnnnnnnnnnnnnggatgccccgccatccatccccgttgccgctggggagcggcgccttatcagggccgcccgacgccgctgcagctgccgctaggattcttgtacgtgcatcacacctacgtgcctgcaccaccctgcacggacttcgcgcgctgcgcagccaacatgcgctccatgcagcgctaccaccaggacacgcaaggctgggaagatatcggctaca

SEQ ID NO: 35513 - DNA, 229 bp, Macaca Mulatta
  misc_feature (1)...(229): n = A,T,C or G
agaggacagagctgcccagtccttactcaacaagctgatcagaagtaaccttgtcgataacacaaaccaagtagaagtcctgcagcgggatccaaactcccctctgtactcggtgaagtcgtttgaagagcttcnnngaaaccacagcttctccagggagtctatgccatgggcttcaatcgaccttccaagatacaagagaacgcattacccatgatgcttgctgaac

SEQ ID NO: 35514 - DNA, 654 bp, Macaca Mulatta
  misc_feature (1)...(654): n = A,T,C or G
tnnnnnnnnnnnnnnnnnnnnnnnnnnnnnnnnnnnnnnnnnnnnnnnnnnnnnnnnnnnnnnnnnnnnnnnnnnnnnnnnnnnnnnnnnnnnnnnnnnnnnnnnnnnnnnnnnnnnnnnnnnnnnnnnnnnnnnnnnnnnnnnnnnnnnnnnnnnnnnnnnnnnnnnnnnnnnnnnnnnnnnnnnnnnnnnnnnnnnnnnnnnnnnnnnnnnnnnnnnnnnnnnnnnnnnnnnnnnnnnatctgagtatttataattaaaagactcaaatactattttcaacgcaagagtatacaaagcaaaaagaagcaaaaaaggttgccacatgcaaaaaaacaaacccaaaaaaccaaccaaaaggccaagaaccctactaggaagtactttaatagtttttcttagaaaaaaaaaattccagacacttaacatttcacaacatttcaacagcaaagtattaattgagagaggggttttcaggagttggggattctagaatattaggaagaaatgttggtatcctccttcattatagatggatggcataggtcacaaatgggagactggcagcaaagccaatatcaaaacgccagtggaatgacacttctgtggagtttacttttcttcttgctatcttccctatcccacggaaatgtc

SEQ ID NO: 35515 - DNA, 3136 bp, Macaca Mulatta
  misc_feature (1)...(3136): n = A,T,C or G
aatacagggtggctgttggaggaagggaggagagtaaatgaagagaaagaactggaataacccctnnnnnnnnnnnnnnnnnnncaagcttagctgtacacgctgagagtcttgcaaaagctgcagccccacccaggagcggggtggtggctggggcgatggtggacgccctgaagatgccccatggctactgaaggggctgctcagttagtgaacagagtggcgggcatggtttgtagcctatgggtgctgctcctggtgtcttcagttctggctctggaannnnnnnnnnnnnnnnnnnnnnnnnnnnnnnnnnnnnnnnnnnnnnnnnnnnnnnnnnnnnnnnnnnnnnnnnnnnnnnnnnnnnnnnnnnnnnnnnnnnnnnnnnnnnnnnnnnnnnnnnnnnnnnnnnnnnnnnnnnnnnnnnnnnnnnnnnnnnnnnnnnnnnnnnnnnnnnnnnnnnnnnnnnnnnnnnnnnnnnnnnnnnnnnnnnnnnnnnnnnnnnnnnnnnnnnnnnnnnnnnnnnnnnnnnnnnnnnnnnnnnnnnnnnnnnnnnnnnnnnnnnnnnnnnnnnnnnnnnnnnnnnnnnnnnnnnnnnnnnnnnnnnnnnnnnnnnnnnnnnnnnnnnnnnnnnnnnnnnnnnnnnnnnnnnnnnnnnnnnnnnnnnnnnnnnnnnnnnnnnnnnnnnnnnnnnnnnnnnnnnnnnnnnnnnnnnnnnnnnnnnnnnnnnnnnnnnnnnnnnnnnnnnnnnnnnnnnnnnnnnnnnnnnnnnnnnnnnnnnnnnnnnnnnnnnnnnnnnnnnnnnnnnnnnnnnnnnnnnnnnnnnnnnnnnnnnnnnnnnnnnnnnnnnnnnnnnnnnnnnnnnnnnnnnnnnnnnnnnnnnnnnnnnnnnnnnnnnnnnnnnnnnnnnnnnnnnnnnnnnnnnnnnnnnnnnnnnnnnnnnnnnnnnnnnnnnnnnnnnnnnnnnnnnnnnnnnnnnnnnnnnnnnnnnnnnnnnnnnnnnnnnnnnnnnnnnnnnnnnnnnnnnnnnnnnnnnnnnnnnnnnnnnnnnnnnnnnnnnnnnnnnnnnnnnnnnnnnnnnnnnnnnnnnnnnnnnnnnnnnnnnnnnnnnnnnnnnnnnnnnnnngcctgcccacgggggctctataaggcttctgctgggaatgttccctgctcaccatgccctgcccgcagccacgctcccaatccagcagccccagtttgcccctgcctggagggcttctaccgggccagttccgacccaccagaggccccctgcactggtnnnnnnnnnnnnnnnnnnnnnnnnnnnnnnnnnnnnnnnnnnnnnnnnnnnnnnnnnnnnnnnnnnnnnnnnnnnnnnnnnnnnnnnnnnnnnnnnnnnnnnnnnnnnnnnnnnnnnnnnnnnnnnnnnnnnnnnnnnnnnnnntgccagcggtggtgggggcacttgtcgccgctgcagggatgaggtccactttgaccctcgccagagaggcctgactgagagccgagtgttagtgggggggctccgagcacatgtaccctacatcttagaggtgcaggctgtcaatggggtgtctgagctcagccctgaccctcctcaggctgcagctatcaatgtcagcaccagccatgaannnnnnnnnnnnnnnnnnnnnnnnnnnnnnnnnnnnnnnnnnnnnnnnnnnnnnnnnnnnnnnnnnnnnnnnnnnnnnnnnnnnnnnnnnnnnnnnnnnnnnnnnnnnnnnnnnnnnnnnnnnnnnnnnnnnnnnnnnnnnnnnnnnnnnnnnnnnnnnnnnnnnnnnnnnnnnnnnnnnnnnnnnnnnnnnnnnnnnnnnnnnnnnnnnnnnnnnnnnnnnnnnnnnnnnnnnnnnnnnnnnnnnnnnnnnnnnnnnnnnnnnnnnnnnnnnnnnnnnnnnnnnnnnnnnnnnnnnnnnnnnnnnnnnnnnnnnnnnnnnnnnnnnnnnnnnnnnnnnnnnnnnnnnnnnnnnnnnnnnnnnnnnnnnnnnnnnnnnnnnnnnnnnnnnnnnnnnnnnnnnnnnnnnnnnnnnnnnnnnnnnnnnnnnnnnnnnnnnnnnnnnnnnnnnnnnnnnnnnnnnnnnnnnnnnnnnnnnnnnnnnnnnnnnnnnnnnnnnnnnnnnnnnnnnnnnnnnnnnnnnnnnnnnnnnnnnnnnnnnnnnnnnnnnnnnnnnnnnnnnnnnnnnnnnnnnnnnnnnnnnnnnnnnnnnnnnnnnnnnnnnnnnnnnnnnnnnnnnnnnnnnnnnnnnnnnnnnnnnnnnnnnnnnnnnnnnnnnnnnnnnnnnnnnnnnnnnnnnnnnnnnnnnnnnnnnnnnnnnnnnnnnnnnnnnnnnnnnnnnnnnnnnnnnnnnnnnnnnnnnnnnnnnnnnnnnnnnnnnnnnnnnnnnnnnnnnnnnnnnnnnnnnnnnnnnnnnnnnnnnnnnnnnnnnnnnnnnnnnnnnnnnnnnnnnnnnnnnnnnnnnnnnnnnnnnnnnnnnnnnnnnnnnnnnnnnnnnnnnnnnnnnnnnnnnnnnnnnnnnnnnnnnnnnnnnnnnnnnnnnnnnnnnnnnnnnnnnnnnnnnnnnnnnnnnnnnnnnnnnnnnnnnnnnnnnnnnnnnnnnnnnnnnnnnnnnnnnnnnnnnnnnnnnnnnnnnnnnnnnnnnnnnnnnnnnnnnnnnnnnnnnnnnnnnnnnnnnnnnnnnnnnnnnnnnnnnnnnnnnnnnnnnnnnnnnnnnnnnnnnnnnnnnnnnnnnnnnnnnnnnnnnnnnnnnnnnnnnnnnnnnnnnggtactaaatgcaatagagcaggagttccggctgcccccacctccaggctgtcctcctggattacatctacttatgttggacacttggcagaaggaccgtgcccggcggcctcattttgaccagctggtggctgcatttgacaagatgatccgcaagccggataccctgcaggctggcggagacccaggggaaanaggccttcccaggcccttctgacccctgtggccctggactttccttgtctggactcaccccaggcctggctttcagccattggactggagtgctaccaggacaacttctccaagtttggcctctgtaccttcagtgatgtggctcagctcagcct

SEQ ID NO: 35516 - DNA, 184 bp, Macaca Mulatta
aagatgatgaccacacatggattttggatatgtaaatattgcatgtccagctggattctggcctgccaaagaagatgatgattaaaaacatagatattgcttgtatattatgcagttgactgcatgcacaatttacatttatttataatctctattctataataaaagagtatgatttttgtta

SEQ ID NO: 35517 - DNA, 1624 bp, Macaca Mulatta
  misc_feature (1)...(1624): n = A,T,C or G
agccattatacttgcccacgaatctttgagaacattataaagacctttgtgcctcttcttgcaaggtgttttctcagctgttatctcaagacatggatataaaaaattcaccatctagccttaattctccttcctcctacaactgcagtcaatccatcttacccctggagcacggctctatatacataccttcctcctatgtagagagccaccatgaatatccagccatgccattctatagccctgctgtgatgaatnnnnnnnnnnnnnnnnnnnnnnnnnnnnnnnnnnnnnnnnnnnnnnnnnnnnnnnnnnnnnnnnnnnnnnnnnnnnnnnnnnnnnnnnnnnnnnnnnnnnnnnnnnnnnnnnnnnnnnnnnnnnnnnnnnnnnnnnnnnnnnnnnnnnnnnnnnnnnnnnnnnnnnnnnnnnnnnnnnnnnnnnnnnnnnnnnnagagagacattgaaaaggaaggttagtgggaaccgttgcaccagccctgttactagtccaagttcaaagagggacgctcacttctgcgctgtctgcagtgatttcgcatcgggatatcactatggagtctggtcgtgtgaaggatgtaaggccttttnnnnnnnnnnnnnnnnnnncataatgattatatttgtccagctacaaatcagtgtacaatcgataaaaaccggcgcaagagctgccaggcctgccgacttcggaagtgttaagaagtgggaatggtgaagtgtggnnnnnnnnnnnnnnnnnnnnnnnnnnnnnnnnnnnnnnnnnnnnnnnnnnnnnnnnnnnnnnnnnnnnnnnnnnnnnnnnnnnnnnnnnnnnnnnnnnnnnnnnnnnnnnnnnnnnnnnnnnnnnnnnnnnnnnnnnnnnnnnnnnnnnnnnnnnnnnnnnnnnnnnnnnnnnnnnnnnnnnnnnnnnnnnnnnnnnnnnnnnnnnnnnnnnnnnnnnnnnnnnnnnnnnnnnnnnnnnnnnnnnnnnnnnnnnnnnnnnnnnnnnnnnnnnnnnnnnnnnnnnnnnnnnnnnnnnnnnnnnnnnnnnnnnnnnnnnnnnnnnnnnnnnnnnnnnnnnnnnnnnnnnnnnnnnnnnnnnnnnnnnnnnnnnnnnnnnnnnnnnnnnnnnnnnnnnnnnnnnnnnnnnnnnnnnnnnnnnnnnnnnnnnnnnnnnnnnnnnnnnnntggtcacagcgacccaggatgctgacagcagccggaagctggcccacttgctgaacgccgtgaccgacgctttggtctgggtgatcgccaagagcggcatctcctcccagcagcaatccatgcgcctggctaacctcctgatgctcctgtcccacgtcaggcatgcgaggnnagggcagaaaaggcctctcactcactcacctcatttggaatggaagacggagatactcttttgcctgaagcaacggatggatctgtgaccttctaatcaactcggtggcctaaagaaaaatcttgggtaacattttcacttcagtttccctctgggatcattgtaatccatgaaaataattttaaagagttaaactactttgaagttatgtggttaaaaaccaccttcctttaggtatcaatccaacaatttggtaactttaaa

SEQ ID NO: 35518 - DNA, 464 bp, Macaca Mulatta
  misc_feature (1)...(464): n = A,T,C or G
tgccactttccgactttattctggccctgaaggacaatccctactttggggctggatttgggctggtgggtgtgggcacagccctggccttggcccggaagggtgcccaactgggcctggtggcattccggcgccattacatgatcacactggaagtccctgctcgagacaggagctatgcctggttgcttagctggctcacccgccacagtacccgtactcagcacctcagtgtcgagacttcgtaccttcagcatgagagcggccgtatttccactaagtttgaatttgtccccagccctggaaaccactttatctggtanggtatcgggggaaatggatccgggtagaacgaagtcgagagatgcagatgatagacttgcagacgggaactccttgggaatctgtcaccttcacggccctgggcactgaccgaaaggttttcttcaacatcctggaggaag

SEQ ID NO: 35519 - DNA, 601 bp, Macaca Mulatta
gacccatgacctgcagcgctggcctcccgtggtggccactgtagcggccaccggaaactgcgaggccctcagggaaggccaaggcctgcagaagcctcctggcctggctgcgtcttccccacccagctctcccccgcacccctgtctttgtaaattgacctttctcgggtggagagggtggggggcagggctgcttttcttagtctggtgccaagcaaggccttttctgaataaactcgtttgactttgagtctttggtatggactggggtcctgttgggtggctggtagggctggtgtcacagctgctgtccctccaggctccggtggcctggcccggctactgcctcgcattgctccaccaggtgcccgtgggggcagagtggtggcacagccctccccacacacccacttggccacagtccccaggtgtgcacaggtgggcaggctgcagcctctcaaagcctttgaaggtcggactgaggtccctcggcaggctttgccacctgttgaagatgagtctggggattcccctggggttggctggaggcagtgcttgtgcatggtgggggtatagacgaggcctttctgcctgctgtgat

SEQ ID NO: 35520 - DNA, 365 bp, Macaca Mulatta
  misc_feature (1)...(365): n = A,T,C or G
gatattctacagagtagttgcagacattgcgccgggagaggagcttctgctgttcatgaagagcgaagactatccccatgaaactatggcgccggatatccacgnnnnnnnnnnnnnnnnnnnnnnnnnnnnnnnnnnnnnnnnnnnnnnnnnnnnnnnnnnnnnnnnnnnnnnnnnnnnnnnnnnnnnnnnnnnnnnnnnnnnnnnnnnnnnnnnnnnnnnnnnnnnnnnnnnnnnnnnnnnnnnnnnnnnnnnnnnnnnnnnnnnnnnnnnnnnnnnnnnnnnnnnnnnnnnnnnnnnnnnnnnnnnnnnnnnnnnnagcctggagaaacacatgctgtcacatactgaagagagggaataca

SEQ ID NO: 35521 - DNA, 3898 bp, Macaca Mulatta
  misc_feature (1)...(3898): n = A,T,C or G
ccttgggatttttgctgtggatcgtctgctgggcagacctcttctactctttctgggaaagaagtcggggcatattcctggccccagtgtttctggtcagcccaactctcttgggcatcaccatgnnnnnnnnnnnnnnnnnnnnnnnnnnnnnnnnnnnnnnnnnnnnnnnnnnnnnnnnnnnnnnnnnnnnnnnnnnnnnnnnnnnnnnnnnnnnnnnnnnnnnnnnnnnnnnnnnnnnnnnnnnnnnnnnnnnnnnnnnnnnnnnnnnnnnnnnnnnnnnnnnnnnnnnnnnnnnnnnnnnnnnnnnnnnnnnnnnnnnnnnnnnnnnnnnnnnnnnnnnnnnnnnnnnnnnnnnnnnnnnnnnnnnnnnnnnnnnnnnnnnnnnnnnnnnnnnnnnnnnnnnnnnnnnnnnnnnnnnnnnnnnnnnnnnnnnnnnnnnnnnnnnnnnnnnnnnnnnnnnnnnnnnnnnnnnnnnnnnnnnnnnnnnnnnnnnnnnnnnnnnnnnnnnnnnnnnnnnnnnnnnnnnnnnnnnnnnnnnnnnnnnnnnnnnnnnnnnnnnnnnnnnnnnnnnnnnnnnnnnnnnnnnnnnnnnnnnnnnnnnnnnnnnnnnnnnnnnnnnnnnnnnnnnnnnnnnnnnnnnnnnnnnnnnnnnnnnnnnnnnnnnnnnnnnnnnnnnnnnnnnnnnnnnnnnnnnnnnnnnnnnnnnnnnnnnnnnnnnnnnnnnnnnnnnnnnnnnnnnnnnnnnnnnnnnnnnnnnnnnnnnnnnnnnnnnnnnnnnnnnnnnnnnnnnnnnnnnnnnnnnnnnnnnnnnnnnnnnnnnnnnnnnnnnnnnnnnnnnnnnnnnnnnnnnnnnnnnnnnnnnnnnnnnnnnnnnnnnnnnnnnnnnnnnnnnnnnnnnnnnnnnnnnnnnnnnnnnnnnnnnnnnnnnnnnnnnnnnnnnnnnnnnnnnnnnnnnnnnnnnnnnnnnnnnnnnnnnnnnnnnnnnnnnnnnnnnnnnnnnnnnnnnnnnnnnnnnnnnnnnnnnnnnnnnnnnnnnnnnnnnnnnnnnnnnnnnnnnnnnnnnnnnnnnnnnnnnnnnnnnnnnnnnnnnnnnnnnnnnnnnnnnnnnnnnnnnnnnnnnnnnnnnnnnnnnnnnnnnnnnnnnnnnnnnnnnntgggccctcccatcctggctggagtggccgtgatggtcctcatggtgcccgtcaatgctgtgatggcgatgaagaccaagacgtatcaggtnnnnnnnnnnnnnnnnnnnnnnnnnnnnnnnnnnnnnnnnnnnnnnnnnnnnnnnnnnnnnnnnnnnnnnnnnnnnnnnnnnnnnnnnnnnnnnnnnnnnnnnnnnnnnnnnnnnnnnnnnnnnnnnnnnnnnnnnnnnnnnnnnnnnnnnnnnnnnnnnnnnnnnnnnnnnnnnnnnnnnnnnnnnnnnnnnnnnnnnnnnnnnnnnnnnnnnnnnnnnnnnnnnnnnnnnnnnnnnnnnnnnnnnnnnnnnnnnnnnnnnnnnnnnnnnnnnnnnnnnnnnnnnnnnnnnnnnnnnnnnnnnnnnnnnnnnnnnnnnnnnnnnnnnnnnnnnnnnnnnnnnnnnnnnnnnnnnnnnnnnnnnnnnnnnnnnnnnnnnnnnnnnnnnnnnnnnnnnnnnnnnnnnnnnnnnnnnnnnnnnnnnnnnnnnnnnnnnnnnnnnnnnnnnnnnnnnnnnnnnnnnnnnnnnnnnnnnnnnnnnnnnnnnnnnnnnnnnnnnnnnnnnnnnnnnnnnnnnnnnnnnnnnnnnnnnnnnnnnnnnnnnnnnnnnnnnnnnnnnnnnnnnnnnnnnnnnnnnnnnnnnnnnnnnnnnnnnnnnnnnnnnnnnnnnnnnnnnnnnnnnnnnnnnnnnnnnnnnnnnnnnnnnnnnnnnnnnnnnnnnnnnnnnnnnnnnnnnnnnnnnnnnnnnnnnnnnnnnnnnnnnnnnnnnnnnnnnnnnnnnnnnnnnnnnnnnnnnnnnnnnnnnnnnnnnnnnnnnnnnnnnnnnnnnnnnnnnnnnnnnnnnnnnnnnnnnnnnnnnnnnnnnnnnnnnnnnnnnnnnnnnnnnnnnnnnnnnnnnnnnnnnnnnnnnnnnnnnnnnnnnnnnnnnnnnnnnnnnnnnnnnnnnnnnnnnnnnnnnnnnnnnnnnnnnnnnnnnnnnnnnnnnnnnnnnnnnnnnnnnnnnnnnnnnnnnnnnnnnnnnnnnnnnnnnnnnnnnnnnnnnnnnnnnnnnnnnnnnnnnnnnnnnnnnnnnnnnnnnnnnnnnnnnnnnnnnnnnnnnnnnnnnnnnnnnnnnnnnnnnnnnnnnnnnnnnnnnnnnnnnnnnnnnnnnnnnnnnnnnnnnnnnnnnnnnnnnnnnnnnnnnnnnnnnnnnnnnnnnnnnnnnnnnnnnnnnnnnnnnnnnnnnnnnnnnnnnnnnnnnnnnnnnnnnnnnnnnnnnnnnnnnnnnnnnnnnnnnnnnnnnnnnnnnnnnnnnnnnnnnnnnnnnnnnnnnnnnnnnnnnnnnnnnnnnnnnnnnnnnnnnnnnnnnnnnnnnnnnnnnnnnnnnnnnnnnnnnnnnnnnnnnnnnnnnnnnnnnnnnnnnnnnnnnnnnnnnnnnnnnnnnnnnnnnnnnnnnnnnnnnnnnnnnnnnnnnnnnnnnnnnnnnnnnnnnnnnnnnnnnnnnnnnnnnnnnnnnnnnnnnnnnnnnnnnnnnnnnnnnnnnnnnnnnnnnnnnnnnnnnnnnnnnnnnnnnnnnnnnnnnnnnnnnnnnnnnnnnnnnnnnnnnnnnnnnnnnnnnnnnnnnnnnnnnnnnnnnnnnnnnnnnnnnnnnnnnnnnnnnnnnnnnnnnnnnnnnnnnnnnnnnnnnnnnnnnnnnnnnnnnnnnnnnnnnnnnnnnnnnnnnnnnnnnnnnnnnnnnnnnnnnnnnnnnnnnnnnnnnnnnnnnnnnnnnnnnnnnnnnnnnnnnnnnnnnnnnnnnnnnnnnnnnnnnnnnnnnnnnnnnnnnnnnnnnnnnnnnnnnnnnnnnnnnnnnnnnnnnnnnnnnnnnnnnnnnnnnnnnnnnnnnnnnnnnnnnnnnnnnnnnnnnnnnnnnnnnnnnnnnnnnnnnnnnnnnnnnnnnnnnnnnnnnnnnnnnnnnnnnnnnnnnnnnnnnnnnnnnnnnnnnnnnnnnnnnnnnnnnnnnnnnnnnnnnnnnnnnnnnnnnnnnnnnnnnnnnnnnnnnnnnnnnnnnnnnnnnnnnnnnnnnnnnnnnnnnnnnnnnnnnnnnnnnnnnnnnnnnnnnnnnnnnnnnnnnnnnnnnnnnnnnnnnnnnnnnnnnnnnnnnnnnnnnnnnnnnnnnnnnnnnnnnnnnnnnnnnnnnnnnnnnnnnnnnnnnnnnnnnnnnnnnnnnnnnnnnnnnnnnnnnnnnnnnnnnnnnnnnnnnnnnnnnnnnnnnnnnnnnnnnnnnnnnnnnnnnnnnnnnnnnnnnnnnnnnnnnnnnnnnnnnnnnnnnnnnnnnnnnnnnnnnnnnnnnnnnnnnnnnnnnnnnnnnnnnnnnnnnnnnnnnnnnnnnnnnnnnnnnnnnnnnnnnnnnnnnnnnnnnnnnnnnnnnnnnnnnnnnnnnnnnnnnnnnnnnnnnnnnnnnnnnnnnnnnnnnnnnnnnnnnnnnnnnnnnnnnnnnnnnnnnnnnnnnnnnnnnnnnnnnnnnnnnnnnnnnnnnnnnnnnnnnnnnnnnnnnnnnnnnnnnnnnnnnnnnnnnnnnnnnnnnnnnnggtcggcatcgtgggacggacgggagctgggaagtcatccctgacgctgggcttatttcggatcagcgagtctgccgaaggagagatcatcatcgatggcatcaacatcgccaggatcggcctgcacgacctccgcttcaagatcaccatcatcccccagg

SEQ ID NO: 35522 - DNA, 222 bp, Macaca Mulatta
ccagggcatggatggcttcagaggagttgttgaattgaagcccagggtccttgttgatgtttcttctcctagccacacttggaggagagttgcaggtgggttgggcagggagcaggaatggttctgctttgctgtttgtcttcctagttgtaaggctctttataaagagcttgttcttcatgttttaagcactttatgaagaataaaacattcatgtactgc

SEQ ID NO: 35523 - DNA, 248 bp, Macaca Mulatta
  misc_feature (1)...(248): n = A,T,C or G
ttaaatgcacggaacgtgagagcattgntctcacnaaatagaaagtttcacccaggaagcttcataaagatnaagagagnngccaggnaaatnancattagnccttctttacctgtgagaggtgacacagaaaaatcaaacatgctggagtttaaattatgtccagatatctactaaagaatacaaactctgtgagggaacggaaggatgtaaagcntcatcncaggaaggagcaagccactgtgcaa

SEQ ID NO: 35524 - DNA, 550 bp, Macaca Mulatta
ccttctgtctgttcactctgtggcctctggaactccagctcttctgcctcagaagaagccttctcttccacctgcctgtagatgtcccagaagtgagaaggcagccttcgaagtcctgggcattgggtgagaaagtgaggctagtgggggcatgcttttgtgcacactgtctggggctccagtgtgaagggtgccctggtgctgagggccttgtggaggatggtcggtgatggcgatggaggtggagagcattaaactgtctgcactgcactggtggctttgtgtcgatgctgggccaagtggtgtgtgagtgatctccaggcggggctggagtgtcacagggaggctgccaggccctacgtgcccccacgccttggcacatggtccttcaccttgtcccccaactcttcctctccagggctcattggggattgcagccaaccagcctgaattgggaagcaggggcagttcttccctttggccagcagatggtgctgctccccacagaatccttggctttcgggcaactgtgagcagtgatttctgtcac

SEQ ID NO: 35525 - DNA, 674 bp, Macaca Mulatta
  misc_feature (1)...(674): n = A,T,C or G
ggtgagcaaaggggcggggccctggctgctgtggcctnnnnnnnnnnnnnnnnnnnctgctggggtcctcggccaagcccccttctcactgaactgnnnnnnnnnnnnnnnnnnnnnnnnnnnnnnnnnnnnnnnnnnnnnnnnnnnnnnnnnnnnnnnnnnnnnnnnnnnnnnnnnnnnnnnnnnnnnnnnnnnnnnnnnnnnnnnnnnnnnnnnnnnnnnnnnnnnnnnnnnnnnnnnnnnnnnnnnnnnnnnnnnnnnnnnnnnnnngggaagctggaagatgggacagagtttgacagcagcctgccccagaaccagccctttgtcttctcccttggcacaggccaggtcatcaagggctgggaccaggggctgctggggnggatgtgtgagggggagaagcgcaagctggtgatcccgtctgagctnnnnnnnnnnnnnnnnnnnnnnnnnnnnnnnnnnnnnnnnnnnnnnnnnnnnnnnnnnnnnnnnnnnnnnnnnnnnnnnnnnnnnnnnnnnnnnnnnnnnnnnnnnnnnnnnnnnnnnnnnnnnnnnnnnnnnnnnnnnnnnnnnnnnnnttaaaagcccaaggagtacgcttgtgtgtgtttgtgggcccttagagactcagagacctcatctctggcataccccaccaccttctcttttcc

SEQ ID NO: 35526 - DNA, 360 bp, Macaca Mulatta
atcagagtaaatttatcactgacagaagagacctatacagcaagagaaccttctataactgttgacagcgagtgaggcataactgaaattagaaaataaggcaaagaatggtataataaaaggccagaagacaaatgtcagaaactttacaactttactgaaggtaagccctgttacgtaagcacaatctccttgttccacttaatcttggaatcatgagaaaaattatcataactatttcctacatctgtgtagagtgttttatctttgctttttgtttttcaaaacatctttctaatctattagtctattttatattcctaattttcctatggagttggtaagaacaccaccacaatt

SEQ ID NO: 35527 - DNA, 2296 bp, Macaca Mulatta
  misc_feature (1)...(2296): n = A,T,C or G
acctgaaacatgaatttgatgcagacttacagnnnnnnnnnnnnnnnnnnnnnnnnnnnnnnnnnnnnnnnnnnnnnnnnnnnnnnnnnnnnnnnnnnnnnnnnnnnnnnnnnnnnnnnnnnnnnnnnnnnnnnnnnnnnnnnnnnnnnnnnnnnnnnnnnnnnnnnnnnnnnnnnnnnnnnnnnnnnnnnnnnnnnnnnnnnnnnnnnnnnnnnnnnnnnnnnnnnnnnnnnnnnnnnnnnnnnnnnnnnnnnnnnnnnnnnnnnnnnnnnnnnnnnnnnnnnnnnnnnnnnnnnnnnnnnnnnnnnnnnnnnnnnnnnnnnnnnnggtacatccaggcagcaacttctccgaaagacgtggtcattttagttgacgtcagtggcagcatgaaaggactccgcctgactatcgcgaagcaaacagtctcatccattttggatacacttggggatgatgacttcttcaacataattgctntataatgaggagcttcactatgtggaaccttgcctgaatggaactttggtgcaagccgacaggacaaacaaagagnnnnnnnnnnnnnnnnnnnnnnnnnnnnnnnnnnnnnnnnnnnnnnnnnnnnnnnnnnnnnnnnnnnnnnnnnnnnnnnnnnnnnnnnnnttcaaccacacgggacaaggaagtatctgcagtcaggccatcatgctcataactgatggggcggtggacacctannnnnnnnnnnnnnnnnnnnnnnnnnnnnnnnnnnnnnaggttcgcatcttcacatacctcattggacgagaggctgcatttgcagacaatctaaagtggatggcctgtgccaacaaaggnaggattttttactcaaatctccaccttggctgatgtgcaggagaatgtcatggaataccttcacgtgctcagccggcccaaagtcatcgaccaggagcatgatgtggtgtggactgaagcttacatcgacagcactnnagatcgaagggcattctcctgggagtggttggcacagatgtcccagtgaaagaacttctgaagaccatccccaaatacaagnnnngaagaaggaaaaaagcgaaggaaacctaactatagtagcgttgacctctctgaggtggagtgggaagaccgagatgacgtgntgagaaatgctatggtgatcgaaagacggggaagttttccatggaggtgaagaagacagtggacaaagggnncagtttaggtgtggcgctctccagaggtcatgggaaatatttcttccgagggaatgtaaccatcgaagaaggnnnnnnnnnnnnnnnnnnnnnnnnnnnnnnnnnnnnnnnnnnnnnnnnnnnnnnnnnnnnnnnnnnnnnnnnnnnnnnnnnnnnnnnnnnnnnnnnnnnnnnnnnnnnnnnnnnnnnnnnnnnnnnnnnnnnnnnnnnnnnnnnnnnnnnnnnnnnnnnnnnnnnnnnnnnnnnnnnnnnnnnnnnnnnnnnnnnnnnnnnnnnnnnnnnnnnnnnnnnnnnnnnnnnnnnnnnnnnnaattctgacaagggcgtggaggttgccttcctcggcactcgcacgggcctctccagaatcaacctgtttgtcggagctgagcaactcaccaatcagnnnnnnnnnnnnnnnnnnnnnnnnnnnnnnnnnnnnnnnnnnnnnnnnnnnnnnnnnnnnnnnnnnnnnnnnnnnnnnnnnnnnnnnnnnnnnnnnnnnnnnnnnnnnnnnnnnnnnnnnnnnnnnnnnnnnnnnnnnnnnnnnnnnnnnnnnnnnnnnnnnnnnnnnnnnnnnnnnnnnnnnnnnnnnnnnnnnnnnnnnnnnnnnnnnnnnnnnnnnnnnnnnnnnnnnnnnnnnnnnnnnnnnnnnnnnnnnnnnnnacagtgtgcctccctggatggcaaatgctccatcagctgcgatgatgagnnnnnnnnnnnnnnnnnnnnnnnnnnnnnnnnnnnnnnnnnnnnnnnnnnnnnnnnnnnnnnagaattaccctttatgactaccaagccatgtgtagagccaacaaggaaagcagcgatggcgcccatggcctcctggatnccttataatgccttcctctctgcagtaaaatggatcatgacagaacttgtcttgtnnnnnnnnnnnnnnnnnnnnnnnnnnnnnnnnnnnnnnnnnnnnnnnnnnnnagcccagaaattgaaacagaccctggagccttgtgatactgaatatccggcatttgtctccgagcgcaccatcaaggagactacagggaatattgcttgtgaagactgctccaagt

SEQ ID NO: 35528 - DNA, 670 bp, Macaca Mulatta
  misc_feature (1)...(670): n = A,T,C or G
aagagaagtgcatgtgaagatggttgccactgttattagattgacaagatgttaatttctctgtaggttgtaacgttaaaaataaatgaaattatttaagggttatgctccactagtattccttagaggaaactgttctttaaagttaggaaagggagtaggcaggcatgtgttggcaaaggctgttaatagtagtaagtgttaagactgcttttctttaatgttttcatggtaatgcatatttagagcactgtatttttgtcttgttaagaaaatttagcatttctaaaagaaaaaagtaaccctctttcaaactgttaattctgtcacagcctgtatattttagtcatttgtaaatctcttcatacaatagtgacttcttttttgactgatacagtatcttaattacaaggttattttgtacttgtcttaatacactgagtgtaataaaaacagcttgannnnnnnnnnnnnnnnnnnnnnnnnnnnnnnnnnnnnnnnnnnnnnnnnnnnnnnnnnnnnnnnnnnnnnnnnnnnnnnnnnnnnnnnnnnnnnnnnnnnnnnnnnnnnnnnnnnnnnnnnnnnnnnnnnnnnnnnnnnnnnnnnnnnnnnnnnnnnnnnnnnnnnnnnnnnnnnnnnnnnnnnnnnnnnnnnnnnnnnnnnnnnnnnn

SEQ ID NO: 35529 - DNA, 194 bp, Macaca Mulatta
  misc_feature (1)...(194): n = A,T,C or G
gtcgagagtggctgaagtggtcccgggaggagtgttgggacagctgaagcccatgtnttcatggcatcaagtggagctgtgggaatggaacagaggagttctctgtagaacagctggtgcagcagattttagacacccacccaaccaagcctgcgccccgaacccacgcctgcctctgcagtgggggacttggt

SEQ ID NO: 35530 - DNA, 181 bp, Macaca Mulatta
aagcacccacaaaccaccttcagctcattttttttctggattctgaagatttttcatcatttgtcctatggttttggttttattttacttcaatggcattattttatttgcaataacagaaaaggaattgcatgtatgaagttttaaattgtgggcttttctttgttgtggggagggggtt

SEQ ID NO: 35531 - DNA, 840 bp, Macaca Mulatta
gaggtagggagagggtactggaagctgggcaagggaccaccacctcatccaagggagtcttgaaaaagtccttgctgctcctcttgggggcagcaggggaccctcaaactcttccccgaacctctcggggttgattgcatagctcctcatgtctctgcactcggggccagcacgtggaccttgcactgctgctggtaggagggcctctgctcgtgtcctggcacgggttgtccatgaactccagggtccagacgtggtcatttttggtgcagaggtagagcaggtgcacgtagtggcatatgagctttatgcaggacgggttcagctgctcttgcccagggagccgcagcagctgtactgcttgtgcaggttctcatgggtgaagagcttggggaacagggacaccagcaggtgagaggcgaagttgccaatggacaggctgctctggtagatactgcgaagatgctccttgctgagcaggcagtcggtgccgggcacctccaagttgggctggaggatctccaatttgtccaagtcgataggtaccagccagatcttcttggatcggcaccgctggccctggaagctatcctccaccctgattactgagatgtcattgggcaggctggaggagtcatagcagtcgacacgtggggggcttgccttcgctgcctgcgtccagcctgaggccctggagcttgtcgttgatgcgctgggtgcactattgcagccaggcctcctcctcctgcatgtgggggaagtagacctctgtgttgttgcagatgatctgcagcctctgcgggtccagctcctgcttacacgctgtccccgtagcagctg

SEQ ID NO: 35532 - DNA, 519 bp, Macaca Mulatta
tccaacgatgtagagacaatacaattcagggacaacaggtgtactatcccatcatatttagccagtatgacccaaaggtaacaaatgggggaaatcctcccactgatgattactttgtattctcaaaaaagactggattttggagagactatggatatggaatcacctgtatttacaaaagtgatcttctaggtgcaggtggatttgatacctcaatacaaggctggggactagaagatgtagatctctacaataaagtcattctatctggcttaaggccctttagaagtcaagaagtaggagtggtgcatattttccatccagttcattgtgatcctaacttggaccctaagcagtataagatgtgcttaggatccaaggcaagtacttttgcctcaaccatgcaactggctgaactctggctagaaaaacatttgggtgtcaggtacaatcgaactctctcctgacagtccaggcaacacattttgcctttttaaaggggagtttacctcattgttg

SEQ ID NO: 35533 - DNA, 898 bp, Macaca Mulatta
atgcctggcaacctgcctttaggaatgagacagcctgcccttagattttaccggtctgtaaaatggaaatgttgagatcacctggaaagctttgttaaggagttgatctttgctttccttaacaagacagtaaaatgtaaacagaaattgaaaacttgaaggatatttcagtgtaatggacttcctcaaattgaagtgctattttcttatttttaatcaaataactagacatatatcagaaacattaaaatgtaaaagttgaacactttcaacattttattacgattattattcagcaacacattctgagggaggaacaatccacaccaccaataataacctggtaagatttcaggagctaaagaaggtagaataattgatggggagatagggcctgaagtaaacaagatatgggcatgcatgctaaagggaaaatgtgcaggtctactgcattaaatcctgtgtgctcctcttttggatttacagaaatgtgtcaaatgtaaatcttacaaagccatttaaaaatattcactttagttctctgtgaagaagaggataaaagcagtcctcctgattgtattgttttaaactttaagaatttatctaaatgccggtacttaggacctaaatttatctatgtctgtcatacgctaaaatgatattggtctttgaatttggtatacatttattgtgttcactatcacaaaatcatctatatttatagaggaatagaagtttatatatataaaataccgtatttttaatttcgcaaataaaaaattcaaagttttgtacaaaattatatggtttttgtgcctgaaaataatagagcttgagctgtctgaactattttacattttatggtgtctcatagccaatcccacagtgtaaaaattca

SEQ ID NO: 35534 - DNA, 613 bp, Macaca Mulatta
gggtgataaggacacagaaatgaaacagaatgaactaaatgctctcaaagccacaaaggccagtgacttagcacaccttcaagacctggcaaagacgataagagagtgtgaacaggtcatcattgaagatcgtatagaaaaggagaagagcaagaataagatagaacaggatctcttggaattaaagagcgtcataaagctccaggcctggtggcggggcactatgatacggagagaaattggtggtttcaagatgcctaaagacaaagttgatagcaaggattcaaaaggaaaaggcaaaggcaaggataagaggagaagcaagaagaagtgacaaagttaacttctgtcttttcctctggtattctggaagtgggaaggacttgagaaatttaaaaaccacctgtaccctcaaaatgaatcctcaccggttgtttccattggaactttcccgggaaaccgaattcctccgcccgtaaattcccccgcccgatttccaaggctaaaattccttggccggtaatcccctggccgtaattccccccccatttccagcccgaaatttttgggcgtgtatgccttgccgatattccccccccatacgggtttaacg

SEQ ID NO: 35535 - DNA, 533 bp, Macaca Mulatta
gacatggccattcgtggtctcgggaagaccggactctgacaccaaagaagtttccgcagccaacagactatgtggaaccaccgcttaaatcgtactggaattcacttgatgggattattcgttaaatgcgagtgtttgggggccacggagagaagggagagctcgtgagatgggaagaagtttccgtgggattctccttgacccttcccctttccctggaactgtgatcacgacaggtggcgggcatggctgtctctgctcagcgcccacggctacagctgcggcggatctaggcgaccacgttttgcctctccagaaagagcctcctttcgtgtccagaacgcggacgcaggtccaccctccggccctagctctgtagactaactctcggctgctgccccagcccgcgccagacagcccaggggtccgttctcagccgagccagattcatcgcacacgtgcgggacgattccacacagcccgggcctttcgcggtgacacaatggttaggaaacggttagaacgcgctctac

SEQ ID NO: 35536 - DNA, 112 bp, Macaca Mulatta
  misc_feature (1)...(112): n = A,T,C or G
naggcccccaacaaagaccccactgctgctgccgctgcgctcaatggaggccactgtctggcccagccggccgcagagcccggcctcggtgccgtggtccggagcatcaaag

SEQ ID NO: 35537 - DNA, 2143 bp, Macaca Mulatta
  misc_feature (1)...(2143): n = A,T,C or G
ggtttaactggagccaagggggagcctggccccatggggatccctggagtcaagnnnnnnnnnnnnnnnnnnnnnnnnnnnnnnnnnnnnnnnnnnnnnnnnnnnnnnnnnnnnnnnnnnnnnnnnnnnnnnnnnnnnnnnnnnnnnnnnnnnnnnnnnnnnnnnnnnnnnnnnnnnnnnnnnnnnnnnnnnnnnnnnnnnnnnnnnnnnnnnnnnnnnnnnnnnnnnnnnnnnnnnnnnnnnnnnnnnnnnnnnnnnnnnnnnnnnnnnnnnnnnnnnnnnnnnnnnnnnnnnnnnnnnnnnnnnnnnnnnnnnnnnnnnnnnnnnnnnnnnnnnnnnnnnnnnnnnnnnnnnnnnnnnnnnnnnnnnnnnnnnnnnnnnnnnnnnnnnnnnnnnnnnnnnnnnnnnnnnnnnnnnnnnnnnnnnnnnnnnnnnnnnnnnnnnnnnnnnnnnnnnnnnnnnnnnnnnnnnnnnnnnnnnnnnnnnngggccctcatggatataaaggcatggtgggcgccatcggtgccactgggcccccgnnnnnnnnnnnnnnnnnnnnnnnnnnnnnnnnnnnnnnnnnnnnnnnnnnnagggcagcccaggtattcgtggaccccaggggatcacaggcccgaagggagcaacggnnnnnnnnnnnnnnnnnnnnnnnnnnnnnnnnnnnnnnnnnnnnnnnnnnnnnnnnnnnnnnnnnnnnnnnnnnnnnnnnnnnnnnnnnnnnnnnnnnnnnnnnnnnnnnnnnnnnnnnnnnnnnnnnnnnnnnnnnnnnnnnnnnnnnagggtgaaccgggcccgcagggccttcctgggttctctggtccccctgggaaagaggnnnnnnnnnnnnnnnnnnnnnnnnnnnnnnnnnnnnnnnnnnnnnnnnnnnnnnnnnnnnnnnnnnnnnnnnnnnnnnnnnnnnnnnnnnnnnnnnnnnnnnnnnnnnnnnnnnnnnnnnnnnnnnnnnnnnnnnnnnnnnnnnnnnnnnnnnnnnnnnnnnnnnnnnnnnnnnnnnnnnnnnnnnnnnnnnnnnnnnnnnnnnnnnnnnnnnnnnnnnnnnnnnnnnnnnnnnnnnnnnnnnnnnnnnnnnnnnnnnnnnnnnnnnnnnnnnnnnnnnnnnnnnnnnnnnagcaaggagtacgtggagaacccggctaccccggccccagtggggatgcgggcgccccaggggttcagggctaccctggtctccccggccctcgaggactggtggggaaccgaggcgttccaggacagcccgggagacagggcgtgnnnnnnnnnnnnnnnnnnnnnnnnnnnnnnnnnnnnnnnnnnnnnnnnnnnnnnngagcaactggctgaggtcgccgtgagtgccaagcgggaagccctgggtgcggtgggcatggtgggtcccccaggacctcctgggccccctggatacccaggcaagcagggaccccatgggcaccctggccctcggggtgttcctggcatcgtgggagccgtgggtcagatcgggaacacggggcccaagggnnnnnnnnnnnnnnnnnnnnnnnnnnnnnnnnnnnnnnnnnnnnnnnnnnnnnnnnnnnnnnnnnnnnnnnnnncaggactccctggccggcctggccaggcaatcaacggcaaggatggcgatcgagggtccccaggggctccaggagaggcaggtcgacctgggctgccaggccccgtagggctgccaggcttctgtgaacctgcagcctgccttggagcttcggcctatgcctctgcccgccttgcagagcccggatccatcaaggggccttgagcatcaggcccggacagagcccggcaggcatcctgggggagaggaccaggtcccctctgggtggacatgtacccatccccaacccaggaaaccatctcccccagcaccttctgtctggaacccaggagtcctgaggaaaaggaattctaaaacatcggggaagtggggggagagcactgatgggtgaaaaagtgaggccaacacacagggcaagtggtgtcgatggagtcgaagctctgaaggaatggggtggctttccttccatggggcatcattcggctgtcaccaaaacaaacatcgcaatctgcgccattctccactgggcat

SEQ ID NO: 35538 - DNA, 387 bp, Macaca Mulatta
atcaccgacgtgtctcctgtttttctgggtgccctcgggacacctgccctgcccccatgtatttcaagactatgactctttttagggctgggcaggtgcctggacatttgccttgctggacggggactggggatgtgggagggagcagacaggaggaatgatgtcagacgtgtgtgtgaaaggaagctcgactgtcaccctccacctcttcacccccgactcaccagtgtcccctccactgtcgcattgtaaccaaacttcaggataataaagtgtttgcctccagtcatgtccttcctccttcttgagtccagctggtgcctggtcaggggctgggaaggtggctgaagggtgggagaggcctgatggaggtcggggaggaggtcc

SEQ ID NO: 35539 - DNA, 262 bp, Macaca Mulatta
tagggtcactcatctaagttttataacttggcagtcaatgcagttgctttacaagatcacattttacgtgatcttcaacttcgaaatctttcagttgcagatcattctaagacacaggtacaaaagaaagagaacaaatctctaaaaagagatacaaaggcaataatagatactggacttaaaaaaactatgcagtgccccaaactagaagattcagaaaaagaatatgttcttgatcccaaaccaccaccattgactttgg

SEQ ID NO: 35540 - DNA, 924 bp, Macaca Mulatta
ggcaatgtgagtagaaggaagtcgacaataggtgggagggcactcggttgtctttacttttaaaagtaatacttggtgctaagaatttcaggattattgtatttatgttcaaatgaagagggcttttgtacttcctgtggacatgtagtaatgtctatattggctcataaaactaacctgaaaaacaaataaatgctttggaaatgtttcagttgctttagaaacaatagtgcctgcctggatccccttagttttgaaatatttgccattgttgtttaaatacctatcactgtggtagagcttgcattgatcttttccacaagtattaaactgccaaaatgtgaatatgcaaagccttttccgaatctataataatggtacttctactgggggagagtgtaatattttggactgcttgttttccattaatgaaggagagcaacagggcccctgattacagttccgcaaagtaataagatgttaaattattaactcagccagaaaagtacattgtcctcccttccatttgggaaggatttgggtggttaaaatacccaaacttgctagccctagttattattgggagatgaaacatggatggtaaccttgtaaatagcccagaataagtttaatggaatggaaacctagttctctataaagtttaatcctttaatttaaaagactttagccctgtgcccttaaaaccttagagattcaacctttttcttcagcctgccaaaagcctttctaagtcctttccaagaaaagtttttatacttttattaaaaattggcacccgctaagcatttatttttcagaccatttttgaacttttactctccaaattaataaagtattcctctgttgctttagtatttattattttaaaaagggtttgaaatatagctgttctttatgcataaa

SEQ ID NO: 35541 - DNA, 674 bp, Macaca Mulatta
tcttcattcttggagatgtcatattcagataaactctatacctaaagaatgtgcagaaaatacaggctccagaaatacaaggtcaggtgtccatagctgtgcccatggatgcgtacacagtcgcttacggggtcactcccacagtgaagcaaggctgcctgatgatactgccgcagaatctggagatcatggtagtagctccttctcagaattccgctatctcttcaagtggttgcaaaaaagtcttccatatattttgattctgagtgtcaaacttgttatgcagcatataacaggaatttctcttggaattgggctgctaacaacttttatgtatgcaaacaaaagcattgtaaatcaggtttttctaagagaaaggtcctcaaagattcagtgtgcttggttactggtattcttagcaggatcttctgttcttttatattacacctttcattctcagtcactttattacagcttaatttttttaaatcctactttggaccatttgagcttctgggaagtactttggattgttggaattacagacttcattctgaaattctttttcatgggcttaaaatgccttattttattggtgccttctttcatcatgccttttaaatctaagggttactggtacatgcttttagaagaattatgtccatactaccgaa

SEQ ID NO: 35542 - DNA, 1311 bp, Macaca Mulatta
  misc_feature (1)...(1311): n = A,T,C or G
atgggggccccctcagcccctccctgcacactgcacatcagctggaaggagctcctgctcacannnnnnnnnnnnnnnnnnnnnnnnnnnnnnnnnnnnnnnnnnnnnnnnnnnnnnnnnnnnnnnnnnnnnnnnnnnnnnnnnnnnnnnnnnnnnnnnnnnnnnnnnnnnnnnnnnnnnnnnnnnnnnnnnnnnnnnnnnnnnnnnnnnnnnnnnnnnnnnnnnnnnnnnnnnnnnnnnnnnnnnnnnnnnnnnnnnnnnnnnnnnnnnnnnnnnnnnnnnnnnnnnnnnnnnnnnnnnnnnnnnnaatgcatccctgctgatccagtatgtcacccagaaggacacaggatcctacaccatacaaatcatacagcgaggtgataagactaaaggagtaactggacatttcaccttnnnnnnnnnnnnnnnnnnnnnnnnnnnnnnnnnnnnnnnnnnnnnnnnnnnnnnnnnnnnnnnnnnnnnnnnnnnnnnnnnnnnnnnnnnnnnnnnnnnnnnnnnnnnnnnnnnnnnnnnnnnnnnnnnnnnnnnnnnnnnnnnnnnnnnnnnnnnnnnnnnnnnnnnnnnnnnnnnnnnnnnnnnnnnnnnnnnnnnnnnnnnnnnnnnnnnnnnnnnnnnnnnnnnnnnnnnnnnnnnnnnnnnnnnnnnnnnnnnnnncaggttgcagctgtccgaaagcaacaggaccctcattctatttggtgtcacaaagcgtactgcaggaccctacgaatgtcaaatgaagagcccagtgagttccagccgcagtgacccagtcaccctgaatnnnnnnnnnnnnnnnnnnnnnnnnnnnnnnnnnnnnnnnnnnnnnnnnnnnnnnnnnnnnnnnnnnnnnnnnnnnnnnnnnnnnnnnnnnnnnnnnnnnnnnnnnnnnnnnnnnnnnnnnnnnnnnnnnnnnnnnnnnnnnnnnnnnnnnnnnnnnnnnnnnnnnnnnnnnnnnnnnnnnnnnnnnnnnnnnnnnnnnnnnnnnnnnnnnnnnnnnnnnnnnnnnnnnnnnnnnnnnnnnnnnnnnnnnnnnnnnnnnnnnnnnnnnnnnnnnnnnnnnnnnnnnatggtccacacatccccaggattttccctccaagtacctattaccattcaggaaaagccctccagttgtcctgcttcgcggactctaacccaccggcagagtatacttggacgataaatgggaagtttctgcaatcaggacaagagctctatatccgcaatattactacagagcatagcgggctctatcgttgctctgctcgtaactcagccactggc

SEQ ID NO: 35543 - DNA, 676 bp, Macaca Mulatta
agatgttccttctcgtcgtgatggcctttgaccgctacatcgccatctgccggcctttacgctattcaactgtcatgaaccctagaacccgctatgcattattgttggctctgtggcttgggggctttacccattccattgtacaagtagcccttatcctgcacttgcctttctgtggcccaaaccagctcgataacttcttctgtgatgttccacaagtcatcaagctggcctgccccgatacctttatagtggagcttctgatggtctccaacagtggcctgctcagcctcctgtgcttcctgggccttctggcctcctatgcagtcatcctctgtcatataaggaagtactcctctgaaggaaagaacaaggctatctccacatgcaccacccatattatcattgtatttctcatgtttggacctgctattttcatctacactcgtcccttccaggctttcctagctgacaagatagtttctcttttccatactgtcatctttcctttaatgaaccctgttatttatacgcttcgcaaccaggaagtgaaagcttccatgaggaagttgttaagtcaatatatggttttctgaatagaagaatgagaaaaacaagaaaggagaaagtccagctgaatttagctaaatcattttcttattcatgcattgaatct

SEQ ID NO: 35544 - DNA, 402 bp, Macaca Mulatta
cccctcaccttccataccctgcagattcgctcccggggtgtgccctatgcctcctgcactgccacccagagcttctctaccttccggtagccctggacttggggtcaggggaagatagagctggagcttttacagaaataaaacctgagagtttgattatatgatgtgtgtttggcaactgctagagatttgagctgggaggtggcgggggctttcccggctggtgaggaaggagcctttggcactgagtctgttgcatgatatgccaagggtcttgttagggtgaggatggtagactgggagaaaggcagagggagtcaggtacgatttagcaccccctctaggcagagagattgaggggactaggcaggatgatggcactcagccccttctcagagggtg

SEQ ID NO: 35545 - DNA, 341 bp, Macaca Mulatta
aaatgtatttatgtatgtatttgattgttttatataagatggtttcttacctttgagcacaaaatgtccatggtgaaataaagtcaacattataagctttatcttttgaaactgatgtgtcttggcgcattaaaaataatccctaatttcaaagaaaccaacccaacaaaaaccacaaagccctgtgatctcaaggcatcgtcatggtgggatggggacatggcctcaagggtagcggtagcaggctttcttttctttcagagtttttaatgctctgaaatgttattaaatatctcaagtacttgaggcacttgggagaaactgcttttcaaagcagggca

SEQ ID NO: 35546 - DNA, 900 bp, Macaca Mulatta
acagaatttgtgttgctgggactgtctagttcaagggagctccagcctttcttgtttcttacattttcactactttatctagcaattctgttgggcaactttctcatcatcgtcactgtgacctcagattcccgctttcacacccctatgtactttctgcttgcaaacctgtcatttatagacgtatgtgttgcctcttttgctacccctaaaatgattgcagactctctggttgagcgcaagactatttcttttgatgcctgcctggcccagatgttctttgttcatctcttcactggcagtgaaatggtgctcctagtttccatggcctatgaccgttatgttgctatatgcaaacctccccactacatgacgatcatgagccgccgcgtatgtgttgtgctcgtcctcatttcctggtttgtgggcttcatccataccaccagccagttagcattcactgttaacctgccattttgtggtcctaataagggagacagttttttctgtgaccttcctctagtgaccaagttagcctgcacagacacttacgttgtcagcctactaatagttgcagatagcggctttctctctctgagttcctttctcctcttggttgtctcctacactgtaatacttgttacagttaggaatcgctcctctgcgagcatggcgaaagcccgctccacattgactgctcacatcactgtggtcactttattctttggaccgtgcattttcatctacgtgtggctcttccgcagttactcagttgacaaagtccttgctgttttctacaccattttcacgcctattttaaaccctgtaatctacacgctaagaaacaaagaagtgaaggcagctatgtcaaaactgaaaagtcggtatctgaagcctagt

SEQ ID NO: 35547 - DNA, 635 bp, Macaca Mulatta
actcagaggccgccatcaaccgccagatcaactggagctctacgcttcctacgtttacctgtccatgtcttactactttgaccgcgatgatgtggctttgaagaactttgccaaatactttcttcaccaatctcatgaggaaagggaacatgccgagaaactgatgaagctgcagaaccaacgaggtggccgaatcttccttcaggatattaagaaaccagactatgacgactgggagagcgggctgaatgcaatggagtgtgctttacatttggaaaaaaatgtgaatcagtcactactggaactgcacaaactggccactgacaaaaatgacccccatgtgagtactggaaacccaggaaaaagaggaaatcatttgccttagggattgggaaagctgcccactaactgtcttgcccattgttttgtagttgtgtgacttcattgagacacattacctgaatgagcaggtgaaagccatcaaagaattgggtgaccacgtgaccaacttgcgcaagatgggagcacccgaatctggcttggcagagtatctctttgacaagcacaccctgggagacagtgataatgaaagctaagcctcaggctaatttccctatagccatggggtgacttcc

SEQ ID NO: 35548 - DNA, 576 bp, Macaca Mulatta
ggctaccgcggctcctacccatcgggcgggacgcgcaggcggacgccaagttccgccgagtggcgcgcatcaccgtgtgcggcaagacgtcgctggccaaggaggtttttggggacaccctgaacgaaagccgggacccggaccgtcccccggagcgctacacctcgcgctattacctcaagttcaacttcctggagcaggccttcgacaagctgtccgagtcgggcttccacatggtggcgtgcagctccacgggcacctgcgcctttgccagcagcaccgaccagagcgaggacaagatctggaccagctacaccgagtacgtcttctgcagggagtgagctccccagaccccgtcgccactccggcgcccactccttttcctgcccgagagatgattacagagcctcttgtcctcgctctgtcccccagctgcccctctcccaatctccccctccagtattagctggctgagacctgtccgcccaccttccctccacttcagaacctgcagccgcagatcctctcggctgcttcatcttctttggacctcctgaacctagagaacccagagga

SEQ ID NO: 35549 - DNA, 837 bp, Macaca Mulatta
ggtgactctgccgtccccctagtacaggaagactcacggcggctttggtttcttgtggggatagtaagctggggagatcagtgtggcctgccagataggccaggagtgtatacccgagtgacaacctaccgagactggattaggcaacgaactgggatctagtgcaccaagtgcatccctgttgcaaagtctgtatgcgggtgtgcctgtcttaaattccaaagctttacatttcaaccgaaaaagaaactggaaatgtcctaatttaacaacttgttacataaacatggtttaacaaacactgtctaatctttctttattattaaaggttttctattttctccagagaactatatgaatgttgcatagtactgtggctgtgtaacagaaaaaacacactaaactaattacaaagttaacaatttcattacagttgtgctaaatactagtagtgagaaaaacaggaaccttgagcatgtatactaggggaatctgcacaggtctaatgggtcataggggtcttctctgagggtttcactgaggatgagaagcaagcaaaatgtggaaacatgcgaaggaaaaagtgatggaataatattcaggacaaaaagaacaatatgaggcaagagaaataatatgtatttaaaatatttggttactcaatatcttatagtcagtatgagtcctaaaattaaaaatgtgaaactgttgtactatatataacctaatcttaattattctgtacgaacatgctcccataggaattagtggataattttcagctatttaaggcaaaaggtaaaatagttcactcctcaactgagacccaaataattg

SEQ ID NO: 35550 - DNA, 870 bp, Macaca Mulatta
tgtctgaaatcttgcctaaagcagaagttcagagtaaacgcaagagaacagaaggcagcagccctccatatggtaagaacaaggggcctgcggtgaaagccagcaaagaaaagcatgccgatggagtcaccaaaacccctgctgccaagaggccagctgcaagggacagaagcagccaaccccccaaaaagacatctttgaaagagaacaaagtgaagatccctaaaaagtccgctgggaagagctgccctccctccaggaaagaaaaagagaatacaaacaaaaggccttcccagtctattgcctcggaaacactgacgaaacctgcaaaacagaagggggccagtgaatcctcttcaaggcctcagaaagccacgaataggaagcagagtagtggaaagactcgggccagaccctcaacgaaaaccccagagagcagtgcagctcagagaaagcgaaagctgaaggcaaagctggactcttcgcatggcaaacggaggcggctggatgcaaagtgattggaaagatggtagccaagagtaaaactgttctatagaagtaaccttttattttgcattaactaaatctgcttttataagcttatcaagcctttcaaatttacagttaatggagaacaccgtaatttgagatgtccgaaaatgcatctcacatggagaagggaacttgcagagtccttctctgaggttaagggaagttatatattatattctggttgttccttgggttttaaacttggaaccaagcagttttcgtttttaaagtacagtgccttatttatcctttttgtttttaaatttacaaaagctaaaaagctgatctatgtgattaaaggcttgtattttatacttg

SEQ ID NO: 35551 - DNA, 122 bp, Macaca Mulatta
  misc_feature (1)...(122): n = A,T,C or G
gctccaaaagaagcacttgctcagtgtgtcttggcagagattccccagcaggtggtgggntacttcaatacatacaaactccttcctcccaagaacccagccacgaaacaacagaagcagtg

SEQ ID NO: 35552 - DNA, 532 bp, Macaca Mulatta
  misc_feature (1)...(532): n = A,T,C or G
gggtggaggaaaaattctagtattttgattatttgaatcttacagcaacaaataggaattcctggccaatgagagctcttgaccagtgaatcaccagccaataagaacatcttgccaactaaaatgtgtggcaaatagaagtatatcaagcaataatctcccacccaaggcctctgtaaactgggaccaattattacctcatagggctgttgtgagggttaggatgaaatatctgtgaaagtgcctaggcaatgccagccaaataggaggcattcaataaacagtgtttgcatataaaccaaaaaataacttgttatcaataaaaacttgcatccaacatgaatttccagccaatgataatcctggccaaaggtttagttgttgttatttcctctgcattattttcttcattacaaaagaaatgcaagttctttataaaaatccaaacaatacctcatgatnnnnnnnnnnnnnnnnnnnatcctcctcaaaaaacnnnnnnnnnnnnnnnnnnnnnnnnnnnnnnnttgtc

SEQ ID NO: 35553 - DNA, 951 bp, Macaca Mulatta
actggagcgcgcaccctgcagcagtgatgttccagaactgtgtgctgtggagttcgtggacaggccagttattggctcatctcagatctacgatcatctctccaaacctgttgagcaaagactcatggccccaccccccaaaaaaacaaagattcgtggctggagcatgtatgatgatgaaagcctgtgactttgagggattctactctgaatgtacctcccagatcctccctgtcatgccacattgcactgattggagtgtggaattggaaaggaatttcggatgtggattttcacctgaggtttccctgcatccctgcagtgccaaagccccaccttcagggaccacctggaatgtgtgaggggctaacagcacagtaacgtgcatacatatctgcagggttggaatgggagctttaaaggtggtagtgatttgtattttggaagaatcatgttgcctttttgttaaataaaatctgtactcaaatgataatgtcactgtttttaatgtgcaggtattaaattatatggtctgacttaaatcataactagacttgagtgggctgaataaaccacttcactaacttgaagttcaaaaggatggaaaatagtctttgtttgatctgcggactgctgcttttctgatcgttatttggcttgcttttggattagataactgacaaatacagctcaaaacaattatgcaaacaatctaagtgattcacagttgcacagtgtacatagtatggtgtatctatatagaagcatagtattttagccactaaaatggtgagagatctatacttatatgcaaatgtcctgatacatgaaaaaacagattaccttaaattggatcccattttgtgtgtttcaacataagaacttcgcatattcacacagtacaggcctatacacatatcagtagttaggcatgcacgtgtgtgtgtgctg

SEQ ID NO: 35554 - DNA, 874 bp, Macaca Mulatta
ttactccagacaaaccaggagcttcctttttgaacatggcactattgtagctgttgtgaatgcatatacacataaaaaacccatataacacaatatttcatctcttgtagtttatagtaaaaaagaaactgcaaaattcattatatgcaaaattaacctgttaatcaaatccacaggtatatttgggggtttccatgatctctctttaagtggggtattagatcctctaattaattcaagtcaattagacacaaacagtatgtgagaatatttctgattatggattataaaacatagatacatgaacatgaaatgaatcgcctatggtttgggcaaatgaggacacattgggcaggaaacatcccataaagattaagaattagtcttggattacttccaagaattgaaaaagaagagaaagagatactgaaagaaagagtgccaagaataggtgggatataattggaggagtgaaaaatatattttatattgtttctattaccagagaaattttggttccattttatatgtgaacatttcctaaaaagatctataattctaagacttctttccagatagcaaggtgtaatgaagacactgaacaaacttccaatataaattatttttgtctttgattaggttcactaccttatggttctgtctgccaactgggcctatgtgaaagacgcctgccggatgcagaagtatgaagacatcaagtcgaaggaagagcaagagcttcatgacatccattctactcgctccaaagagcggctcaatgcatacacataaatgcatcttcctgttctttctaccatttgaatgcattggtgtttaactaagggccatccaaccatccaaccttaaaaaacaa

SEQ ID NO: 35555 - DNA, 523 bp, Macaca Mulatta
taaaaatattaactgacgaagaagcaactgagttaataacaatgactcttaaaacatgtaatagaagatttacaaaagcaattttcatttacctttccagtatgaaaagctatgttaaaatatagaaaactaatctaacctgtagctgtatagtatcaaaacaaatgacatccaattggcatgctgcatgcaaaactacacagaattcacgttttgcagagttttgccaaaatgagtaatcatataatatctaccgtaatgtttaaaatacattattgctcacgattttatttcttcataatcaactaaggaagaattatcaattggatacaatcttcttacaaaaaatgacacttaaaatgtatatatatcctagcccctaaccaaatcctgacctattgggatacttataaaaatttgagtaagtgggatacacaaagaataataactattaacttttaattatgagcaaaaacctaagggttaaatttaaactaattgaaactgtatttgattggactta

SEQ ID NO: 35556 - DNA, 221 bp, Macaca Mulatta
gactatattaacgaacactttaggatcatggttgctacatatttcatcaggcgtgaggctacaagtgatctctcctgtctggttcttatgttctgtgcacttcccctccctagctggcttccgccgcagcatgcgcctgtgtcgcaggaagtctcacctcagcccgctgcatgccagtgtgtgctgcaccggcagctgctacagtgcagtgggtgcccctt

SEQ ID NO: 35557 - DNA, 1718 bp, Macaca Mulatta
  misc_feature (1)...(1718): n = A,T,C or G
accacacccttcgcgggaagtctccaggcttccagcaaagctcagcttatcccgcccccgcttccaacccggaaccccagaagaatagcatgatgaacctccagcagcccggcgggccacctccccgcggctcagtttgaagacacttgtgcagaaccctttcatgtccccaccctgcccagctttcacaactccgccgggttaaatggccaaagacaaacttctgcctcttctatcccgggtcccagcttttcaaaaactacagctggcaaacccacannnnnnnnnnnnnnnnnnnnnnnnnnnnnnnnnnnnnnnnnnnnnnnnnnnnnnnnnnnnnnnnnnnnnnnnnnnnnnnnnnnnnnnnnnnnnnnnnnnnnnnnnnnnnnnnnnnnnnnnnnnnnnnnnnnnnnnnnnnnnnnnnnnnnnnnnnnnnnnnnngggaaaacaggacaactagcaagagctagcaagaactagcaagagcttgaacaaacgcctggactcagattggaagactgctcatttgtctactccctcattcctggaaattgcactgaaaccgtctgattaagnnnnnnnnnnnnnnnnnnnnnnnnnnnnnnnnnnnnnnnnnnnnnnnnnnnnnnnnnnnnnnnnnncttcacctgaacctaaaatggtgagcgagagtcaccatgaggccctggcagccccaccagtcaccactgtcgcgactgttctgccaagcaatgccacagagccagccagtcctggagaaggaaaggaagatgccttttctaagctgaaggagaagtttatgaatgagttgcataaaattccannnnnnnnnnnnnnnnnnnnnnnnnnnnnnnnnnnnnnnnnnnnnnnnnnnnnnnnnnnnnnnnnnnnnnnnnnnnnnnnnnnnnnnnnnnnnnnnnnnnnnnnnnnnnnnnnnnnnnnnnnnnnnnnnnnnnnnnnnnnnnnnnnnnnnnnnnnnnnnnnnnnnnnnnnnnnnnnnnnnnnnnnnnnnnnnnnnnnnnnnnnnnnnnnnnnnnnnnnnnnnnnnnnnnnnnnnnnnnnnnnnnnnnnnnnnnnnnnnnnnnnnnnnnnnnnnnnnnnnnnnnnnnnnnnnnnnnnnnnnnnnnnnnnnnnnnnnnnnnnnnnnnnnnnnnnnnnnnnnnnnnnnnnnnnnnnnnnnnnnnnnnnnnnnnnnnnnnnnnnnnnnnnnnnnnnnnnnnnnnnnnnnnnnnnnnnnnnnnnnnnnnnnnnnnnnnnnnnnnnnnnnnnnnnnnnnnnnnnnnnnnnnnnnnnnnnnnnnnnnnnnnnnnnnnnnnnnnnnnnnnnnnnnnnnnnnnnnnnnnnnnnnnnnnnnnnnnnnnnnnnnnnnnnnnnnnnnnnnnnnnnnnnnnnnnnnnnnnnnnnnnnnnnnnnnnnnnnnnnnnnnnnnnnnnnnnnnnnnnnnnnnnnnnnnnnnnnnnnnnnnnnnnnnnnnnnnnnnnnnnnnnnnnnnnnnnnnnnnnnnnnnnnnnnnnnnnnnnnnnnnnnnnnnnnnnnnnnnnnnnnnnnnnnnnnnnnnnnnnnnnnnnnnnnnnnnnnnnnnnngatccttatgtgaagattcacctgatgcagaatggtaagaggctgaagaagaaaaagacaacaattaaaaagaacacacttaacccctactacaatgagtcattcagctttgaagtaccttttgaacaaatcca

SEQ ID NO: 35558 - DNA, 1087 bp, Macaca Mulatta
  misc_feature (1)...(1087): n = A,T,C or G
aggtagtgtacattctttttcaaatggaagagctggttatagccaacaacatcagcatcgacatagtggacatgaaagagaagaggaaagaggagatnnnnnnnnnnnnnnnnnnnnnnnnnnnnnnnnnnnnnnnnnnnnnnnnnnnnnnnnnnnnnnnnnnnnnnnnnnnnnnnnnnnnnnnnnnnnnnnnnnnnnnnnnnnnnnnnnnnnnnnnnnnnnnnnnnnnnnnnnnnnnnnnnnnnnnnnnnnnnnnnnnnnnnnnnnnnnnnnnnnnnnnnnnnnnnnnnnnnnnnnnnnnnnnnnnnnnnnnnnnnnnnnnnnnnnnnnnnnnnnnnnnnnnnnnnnnnnnnnnnnnnnnnnnnnnnnnnnnnnnnnnaaacagatatgcagtatgcagcaaaagtgtaccgtgatgatcgactccgaaggaaggcagatgccttgagcatggacaactgtaaagaattagagcggcttaccagtctttataaaggaggatgaactggaatttttatttataccttttagcgtactctttattttttctgtaagtaagtttagtttcatcatgagagatgaagaaaaagatttgatactgaaaactaaactgaatagttggttcctgaaatcttggactgtttatgacctactggctcctttaaatagtaattgaaaactaaaatggaatattttagttacgcttctacaattattttcattttaaaagcttacatgattcctaactaaaatgtcttgagaaaggattatcacacctgtagcaacttccagttttagtgattctccattttttcccttgtcatgtaaatatttatggaatgatcattttgtgtacatacaggttactgcttttttatttaaattcctttagtgtttagctccatgagacacttcagtttaaattgatggaataaatgttatatgacacatttacattttccttatcaaggtgtcaaatatgtggactttaaacaatgaaactttnnnnnnnnnnnnnnnnnnnnctttaactttgtgtaaaatcttatagtattatcagcttagagggaattgatatttttaatat

SEQ ID NO: 35559 - DNA, 3768 bp, Macaca Mulatta
  misc_feature (1)...(3768): n = A,T,C or G
tggtgtttttgtgaggcagtgagagctaaggtnnnnnnnnnnnnnnnnnnnnnnnnnnnnnnnnnnnnnnnnnnnnnnnnnnnnnnnnnnnnnnnnnnnnnnnnnnnnnnnnnnnnnnnnnnnnnnnnnnnnnnnnnnnnnnnnnnnnnnnnnnnnnnnnnnnnnnnnnnnnnnnnnnnnnnnnnnnnnnnnnnnnnnnnnnnnnnnnnnnnnnnnnnnnnnnnnnnnnnnnnnnnnnnnnnnnnnnnnnnnnnnnnnnnnnnnnnnnnnnnnnnnnnnnnnnnnnnnnnnnnnnnnnnnnnnnnnnnnnnnnnnnnnnnnnnnnnnnnnnnnnnnnnnnnnnnnnnnnnnnnnnnnnnnnnnnnnnnnnnnnnnnnnnnnnnnnnnnnnnnnnnnnnnnnnnnnnnnnnnnnnnnnnnnnnnnnnnnnnnnnnnnnnnnnnnnnnnnnnnnnnnnnnnnnnnnnnnnnnnnnnnnnnnnnnnnnnnnnnnnnnnnnnnnnnnnnnnnnnnnnnnnnnnnnnnnnnnnnnnnnnnnnnnnnnnnnnnnnnnnnnnnnnnnnnnnnnnnnnnnnnnnnnnnnnnnnnnnnnnnnnnnnnnnnnnnnnnnnnnnnnnnnnnnnnnnnnnnnnnnnnnnnnnnnnnnnnnnnnnnnnnnnnnnnnnnnnnnnnnnnnnnnnnnnnnnnnnnnnnnnnnnnnnnnnnnnnnnnnnnnnnnnnnnnnnnnnnnnnnnnnnnnnnnnnnnnnnnnnnnnnnnnnnnnnnnnnnnnnnnnnnnnnnnnnnnnnnnnnnnnnnnnnnnnnnnnnnnnnnnnnnnnnnnnnnnnnnnnnnnnnnnnnnnnnnnnnnnnnnnnnnnnnnnnnnnnnnnnnnnnnnnnnnnnnnnnnnnnnnnnnnnnnnnnnnnnnnnnnnnnnnnnnnnnnnnnnnnnnnnnnnnnnnnnnnnnnnnnnnnnnnnnnnnnnnnnnnnnnnnnnnnnnnnnnnnnnnnnnnnnnnnnnnnnnnnnnnnnnnnnnnnnnnnnnnnnnnnnnnnnnnnnnnnnnnnnnnnnnnnnnnnnnnnnnnnnnnnnnnnnnnnnnnnnnnnnnnnnnnnnnnnnnnnnnnnnnnnnnnnnnnnnnnnnnnnnnnnnnnnnnnnnnnnnnnnnnnnnnnnnnnnnnnnnnnnnnnnnnnnnnnnnnnnnnnnnnnnnnnnnnnnnnnnnnnnnnnnnnnnnnnnnnnnnnnnnnnnnnnnnnnnnnnnnnnnnnnnnnnnnnnnnnnnnnnnnnnnnnnnnnnnnnnnnnnnnnnnnnnnnnnnnnnnnnnnnnnnnnnnnnnnnnnnnnnnnnnnnnnnnnnnnnnnnnnnnnnnnnnnnnnnnnnnnnnnnnnnnnnnnnnnnnnnnnnnnnnnnnnnnnnnnnnnnnnnnnnnnnnnnnnnnnnnnnnnnnnnnnnnnnnnnnnnnnnnnnnnnnnnnnnnnnnnnnnnnnnnnnnnnnnnnnnnnnnnnnnnnnnnnnnnnnnnnnnnnnnnnnnnnnnnnnnnnnnnnnnnnnnnnnnnnnnnnnnnnnnnnnnnnnnnnnnnnnnnnnnnnnnnnnnnnnnnnnnnnnnnnnnnnnnnnnnnnnnnnnnnnnnnnnnnnnnnnnnnnnnnnnnnnnnnnnnnnnnnnnnnnnnnnnnnnnnnnnnnnnnnnnnnnnnnnnnnnnnnnnnnnnnnnnnnnnnnnnnnnnnnnnnnnnnnnnnnnnnnnnnnnnnnnnnnnnnnnnnnnnnnnnnnnnnnnnnnnnnnnnnnnnnnnnnnnnnnnnnnnnnnnnnnnnnnnnnnnnnnnnnnnnnnnnnnnnnnnnnnnnnnnnnnnnnnnnnnnnnnnnnnnnnnnnnnnnnnnnnnnnnnnnnnnnnnnnnnnnnnnnnnnnnnnnnnnnnnnnnnnnnnnnnnnnnnnnnnnnnnnnnnnnnnnnnnnnnnnnnnnnnnnnnnnnnnnnnnnnnnnnnnnnnnnnnnnnnnnnnnnnnnnnnnnnnnnnnnnnnnnnnnnnnnnnnnnnnnnnnnnnnnnnnnnnnnnnnnnnnnnnnnnnnnnnnnnnnnnnnnnnnnnnnnnnnnnnnnnnnnnnnnnnnnnnnnnnnnnnnnnnnnnnnnnnnnnnnnnnnnnnnnnnnnnnnnnnnnnnnnnnnnnnnnnnnnnnnnnnnnnnnnnnnnnnnnnnnnnnnnnnnnnnnnnnnnnnnnnnnnnnnnnnnnnnnnnnnnnnnnnnnnnnnnnnnnnnnnnnnnnnnnnnnnnnnnnnnnnnnnnnnnnnnnnnnnnnnnnnnnnnnnnnnnnnnnnnnnnnnnnnnnnnnnnnnnnnnnnnnnnnnnnnnnnnnnnnnnnnnnnnnnnnnnnnnnnnnnnnnnnnnnnnnnnnnnnnnnnnnnnnnnnnnnnnnnnnnnnnnnnnnnnnnnnnnnnnnnnnnnnnnnnnnnnnnnnnnnnnnnnnnnnnnnnnnnnnnnnnnnnnnnnnnnnnnnnnnnnnnnnnnnnnnnnnnnnnnnnnnnnnnnnnnnnnnnnnnnnnnnnnnnnnnnnnnnnnnnnnnnnnnnnnnnnnnnnnnnnnnnnnnnnnnnnnnnnnnnnnnnnnnnnnnnnnnnnnnnnnnnnnnnnnnnnnnnnnnnnnnnnnnnnnnnnnnnnnnnnnnnnnnnnnnnnnnnnnnnnnnnnnnnnnnnnnnnnnnnnnnnnnnnnnnnnnnnnnnnnnnnnnnnnnnnnnnnnnnnnnnnnnnnnnnnnnnnnnnnnnnnnnnnnnnnnnnnnnnnnnnnnnnnnnnnnnnnnnnnnnnnnnnnnnnnnnnnnnnnnnnnnnnnnnnnnnnnnnnnnnnnnnnnnnnnnnnnnnnnnnnnnnnnnnnnnnnnnnnnnnnnnnnnnnnnnnnnnnnnnnnnnnnnnnnnnnnnnnnnnnnnnnnnnnnnnnnnnnnnnnnnnnnnnnnnnnnnnnnnnnnnnnnnnnnnnnnnnnnnnnnnnnnnnnnnnnnnnnnnnnnnnnnnnnnnnnnnnnnnnnnnnnnnnnnnnnnnnnnnnnnnnnnnnnnnnnnnnnnnnnnnnnnnnnnnnnnnnnnnnnnnnnnnnnnnnnnnnnnnntaatttggtatttttattttctctcctttcaatcttagagaccagcagagaatctgggagagaaagtatttcaggatgttggaaatttaactgaatctgaggtagttctaaaaagtgccattttgcttcatttatgggctaaagtatcagcttagtcaggtaagagccctgacccccttcagatggacacactacttctgactgccttcagatggaatcacagatttcagtcagggcagcataacaaattgatcagtgtatggctgggcgtctgcagataaattgtttcagctgtagaagctccattagcatatacgcttcctttttcccccttcctttaaaatcatctggaaagaaactgttttgtgcccttggggactcctgtctgtctgtttcagtttaccaagatggagctgggttaggaaagaagtgagggcccattttgtggttcaagtgcactagacagctgctggggtaatggaagcagaggcgatgtctgtaatcagctgtgggagagcggtgactgagaacagtctgaggtctccgcttggaagtatctggggtgtgatgaaatcacaattatcttgaagcctaagaggggactacaggactgttaactaagataatgtaggcgcctaaaagggtatgttacaatcaccatttctcaggtcaaaatactgtgaataa

SEQ ID NO: 35560 - DNA, 99 bp, Macaca Mulatta
gccaaaggacaagagctgtttgatcagattatgtaccacctggacctttatgaaagcgactattttggtctgagatttatggattcagcacaagtagca

SEQ ID NO: 35561 - DNA, 428 bp, Macaca Mulatta
  misc_feature (1)...(428): n = A,T,C or G
ngccatgaatcatcttaatggacagaaaatgtatggaaaaattattcgtgttactctgtcgaaacatcagactgtacaactacctcgagagggacttgatgatcaagggctaacaaaagattttgggaattccccattgcatcgttttaagaaacctggatccaaaaattttcaaaacatttttcctccttctgccactcttcacctatctaatatccnnnnnnnnnnnnnnnnnnnnnnnnnnnnnnnnnnnnnnnnnnnnnnnnnnnnnnnnnnnnnnnnnnnnnnnnnnnnnnnnnnnnnnnnnnnnnnnnnnnnnnnnnnnnnnnnnnnnnnnnnnnnnnnnnnnnnnnnnnnnnnnnnnnnnnnnnnnnnnnnnnnnnnnnnnnnatcatctgagagtgtctttttccaagtcaacaatttaa

SEQ ID NO: 35562 - DNA, 125 bp, Macaca Mulatta
tcagtctgcttaggcagacacaacctgaatctattaaagttgctgacaattcacctcagtctctcaatgtgtgctattaatgaggcctctgagcttcctatccagcagtggtgaaggccttgccc

SEQ ID NO: 35563 - DNA, 709 bp, Macaca Mulatta
  misc_feature (1)...(709): n = A,T,C or G
nnnnnnnnnnnnnnnnnnnnnnnnnnnnnnnnnnnnnnnnnnnnnnnnnnnnnnnnnnnnnnnnnnnnnnnnnnnnnnnnnnnnnnnnnnnnnnnnnnnnnnnnnnnnnnnnnnnnnnnnnnnnnnnnnnnnnnnnnnnnnnnnnnnnnnnnnnnnnnnnnnnnnnnnnnnnnnnnnnnnnnnnnnnnnnnnnnnnnnnnnnnnnnnnnnnnnnnnnnnnnnnctttaaaaatatcttcaataataagacatcctattttggggggggttagggatagagataaatatgaaaactttttttttgataaaacacctagtaaggatatgtttccaggtttaaagttcatgaacatataaaacagaaattgggtcctgccaccttgagtgcaggattctgaggtcctacatctggttctgaggttctgggtttgattctggggtacagacagctcaagtaggaggtctccttatgtcatagaactacatgatgcagaggttctgctccccaccaaggcttgtccggggcccgtcagctgcctggggaagaggccccaacgaggctcctgggtccagcatggctcctgggggggcccctactctcaccatgcaagagcccccaccaggagccctgggccagccagctgtgggccgatgagaaggcttctggcccaccctgcacctggagttcctgcttggcncacgggtgggc

SEQ ID NO: 35564 - DNA, 2604 bp, Macaca Mulatta
  misc_feature (1)...(2604): n = A,T,C or G
gtgaccgtttccatggccgttggatgcagggattaataaggannnnnnnnnnnnnnnnnnnnnnngactttgaaaagtggagaaagtgtatactttaaagagaatttacttctaaaagccacaggtgcttttacaaagcaaactgcattgaactgaaaacttctaaaaataacaggcaaatattatagatatattacagtgggatttaaaaaatcttgttaaacattctataaagaagtaaaacaaaaacaaaatccttttatctcagttatttgctcatcacaagcacattttaaaaatgctgctttgtgtgtgtttgacttctgcatttgagtatcagtctcaggtcctagtttaccttccctggttggagatttatttcttatttcctaacaatgaattcgctagaagaaacagcatcacatcactcttcacctctcatgttgattttccttatgaaactgaagccatttagaaaatccctctgtgtcaaaattacattcaaaacgctctccttgtaattgcgatttataagtttagtaactcaataagaacatgcctgtgactccctttctggatgaaacctgggctgtggctctctgtagtttgtggtgctgtgatggtgtctactggtagaatagcttttctggaggtgggtggcaactccatgcaggagtcattggctgggcttgagccctcagcctgtgatatgtggatgcagctgtccagccactgccctttnnnnnnnnnnnnnnnnnnnnnnnnnnnnnnnnnnnnnnnnnnnnnnnnnnnnnnnnnnnnnnnnnnnnnnnnnnnnnnnnnnnnnnnnnnnnnnnnnnnnnnnnnnnnnnnnnnnnnnnnnnnnnnnnnnnnnnnnnnnnnnnnnnnnnnnnnnnnnnnnnnnnnnnnnnnnnnnnnnnnnnnnnnnnnnnnnnnnnnnnnnnnnnnnnnnnnnnnnnnnnnnnnnnnnnnnnnnnnnnnnnnnnnnnnnnnnnnnnnnnnnnnnnnnnnnnnnnnnnnnnnnnnnnnnnnnnnnnnnnnnnnnnnnnnnnnnnnnnnnnnnnnnnnnnnnnnnnnnnnnnnnnnnnnnnnnnnnnnnnnnnnnnnnnnnnnnnnnnnnnnnnnnnnnnnnnnnnnnnnnnnnnnnnnnnnnnnnnnnnnnnnnnnnnnnnnnnnnnnnnnnnnnnnnnnnnnnnnnnnnnnnnnnnnnnnnnnnnnnnnnnnnnnnnnnnnnnnnnnnnnnnnnnnnnnnnnnnnnnnnnnnnnnnnnnnnnnnnnnnnnnnnnnnnnnnnnnnnnnnnnnnnnnnnnnnnnnnnnnnnnnnnnnnnnnnnnnnnnnnnnnnnnnnnnnnnnnnnnnnnnnnnnnnnnnnnnnnnnnnnnnnnnnnnnnnnnnnnnnnnnnnnnnnnnnnnnnnnnnnnnnnnnnnnnnnnnnnnnnnnnnnnnnnnnnnnnnnnnnnnnnnnnnnnnnnnnnnnnnnnnnnnnnnnnnnnnnnnnnnnnnnnnnnnnnnnnnnnnnnnnnnnnnnnnnnnnnnnnnnnnnnnnnnnnnnnnnnnnnnnnnnnnnnnnnnnnnnnnnnnnnnnnnnnnnnnnnnnnnnnnnnnnnnnnnnnnnnnnnnnnnnnnnnnnnnnnnnnnnnnnnnnnnnnnnnnnnnnnnnnnnnnnnnnnnnnnnnnnnnnnnnnnnnnnnnnnnnnnnnnnnnnnnnnnnnnnnnnnnnnnnnnnnnnnnnnnnnnnnnnnnnnnnnnnnnnnnnnnnnnnnnnnnnnnnnnnnnnnnnnnnnnnnnnnnnnnntagcagagactgattaggatctgagatgaagcactggattgcaggaataactgtccaaattagttcttcctcctcaactcacaggagtagctgtggacagaggaaccaacatctgccacctctggnnnnnnnnnnnnnnnnnnnnnnnggagttttgctcttatcccccaggctggagtacaatggcactatctcggctcactgcaacctccacctcccaggttcaagcgattctgcctcagcctcctgagtagatgggattacaggtgcctgccacctcacccagctaatttttgtattttcagtaaagacgtcgtttcaccatgttggccaggctagtctcaaactcctgacctcaagtgatctgcccacctcggcctcccaaagtgctgagattacagacctgagccaccgcacctggcctattttcttaaaggggaacaaatgatcttgacgacatattattccataacaccagtttaggacgcatgccagttcctgattagaacacagggcccatggaagggactatcagaggtgcaaaaattacttcaagataagtttgttgttttcatttaatattgcagaagttagaagtcattttacaaatttagaagagaaaattttttcttggtagtgtttaaaaattaggggattgaaaggatccaggatgggctttgtgtgtgtgtctccgattctcatttattagtgagcacacctgtgtatatatataattcacaaggagatcatcaagggaaaacattttgcatgtgtaaagcttcatgaagttctcttgaaaaaataccaaa

SEQ ID NO: 35565 - DNA, 115 bp, Macaca Mulatta
ggtggataaacacattcgaaggcttgacgcagacctggcgcgctttgaggcagatctgaaggacaagatggagggcagtgattttgaaagctcctgagggcgatggataaaaagc

SEQ ID NO: 35566 - DNA, 1878 bp, Macaca Mulatta
  misc_feature (1)...(1878): n = A,T,C or G
atttatattggtcacattgtaccactgggtgctgctgataccgacggccgcctgaggtctggagatgaattaatctgtgtggatgggacgccagtaattggaaaatcacaccagcttgtggtccagcttatgcaacaagctgccaaacaaggccacgtcaatctcacagtgcggcgtaaagtggtttttgcgnnnnnnnnnnnnnnnnnnnnnnnnnnnnnnnnnnnnnnnnnnnnnnnnnnnnnnnnnnnnnnnnnnnnnnnnnnnnnnnnnnnnnnnnnnnnnnnnnnnnnnnnnnnnnnnnnnnnnnnnnnnnnnnnnnnnnnnnnnnnnnnnnnnnnnnnnnnnnnnnnnnnnnnnnnnnnnnnnnnntggtcagcactgtggtgcagccntacgacgtggagatccggcgtggggagaacgagggcttcggcttcgtcatcgtgtcctcggtgagcaggcccgaagcaggcacgacctttgnnnnnnnnnnnnnnnnnnnnnnnnnnnnnnnnnnnnnnnnnnnnnnnnnnnnnnnnnnnnnnnnnnnnnnnnnnnnnnnnnnnnnnnnnnnnnnnnnnnnnnnnnnnnnnnnnnnnnnnnnnnnnnnnnnnnnnnnnnnnnnnnnnnnnnnnnnnnnnnnnnnnnnnnnnnnnnnnnnnnnnnnnnnnnnnnnnnnnnnnnnnnnnnnnnnnnnnnnnnnnnnnnnnnnnnnnnnnnnnnnnnnnnnnnnnnnnnnnnnnnnnnnnnnnnnnnnnnnnnnnnnnnnnnnnnnnnnnnnnnnnnnnnnnnnnnnnnnnnnnnnnnnnnnnnnnnnnnnnnnnnnnnnnnnnnnnnnnnnnnnnnnnnnnnnnnnnnnnnnnnnnnnnnnnnnnnnnnnnnnnnnnnnnnnnnnnnnnnnnnnnnnnnnnnnnnnnnnnnnnnnnnnnnnnnnnnnnnnnnnnnnnnnnnnnnnnnnnnnnnnnnnnnnnnnnnnnnnnnnnnnnnnnnnnnnnnnnnnnnnnnnnnnnnnnnnnnnnnnnnnnnnnnnnnnnnnnnnnnnnnnnnnnnnnnnnnnnnnnnnnnnnnnnnnnnnnnnnnnnnnnnnnnnnnnnnnnnnnnnnnnnnnnnnnnnnnnnnnnnnnnnnnnnnnnnnnnnnnnnnnnnnnnnnnnnnnnnnnnnnnnnnnnnnnnnnnnnnnnnnnnnnnnnnnnnnnnnnnnnnnnnnnnnnnnnnnnnnnnnnnnnnnnnnnnnnnnnnnnnnnnnnnnnnnnnnnnnnnnnnnnnnnnnnnnnnnnnnnnnnnnnnnnnnnnnnnnnnnnnnnnnnnnnnnnnnnnnnnnnnnnnnnnnnnnnnnnnnnnnnnnnnnnnnnnnnnnnnnnnnnnnnnnnnnnnnnnnnnnnnnnnnnnnnnnnnnnnnnnnnnnnnnnnnnnnnnnnnnnnnnnnnnnnnnnnnnnnnnnnnnnnnnnnnnnnnnnnnnnnnnnnnnnnnnnnnnnnnnnnnnnnnnnnnnnnnnnnnnnnnnnnnnnnnnnnnnnnnnnnnnnnnnnnnnnnnnnnnnnnnnnnnnnnnnnnnnnnnnnnnnnnnnnnnnnnnnnnnnnnnnnnnnnnnnnnnnnnnnnncgtctctggagagactctggagcaaaggaggtcccccgagcgcaggagagggggctcgcccgagcgcagggccaagtccaccgaccgagggcgcgcgcgctcccccgagcgcaggagagagcgttccctggacaaaaggaacagagaggacagagccagccaccgagaaaggnaagaggngaatctgaaacaggatgccggcagaagttccagacatcccacggagcagagaaggcgagcttacaaagaatgtagcaccgacctcagtatctg

SEQ ID NO: 35567 - DNA, 108 bp, Macaca Mulatta
aaaggtagcccgggaccctcgctttgatgatctgtcaggggaatataatcctgaggtgtttgacaaaacatatcaattcttgaatgacatccgagcaaaagagaaaga

SEQ ID NO: 35568 - DNA, 466 bp, Macaca Mulatta
cagaaagaactggcatcaaacccattctgccttcaagttttgagatgcagagcttttagttcctctgctaatagagcctcatatgaatactctgcttgaaaggcaaaagacatctgcctcaacttcaatcaaggaaaaatagaccaactgtacagcaggcagaatttatgatgactggaattttgtctatcaatggatgtaattaatcctttggcttgagggcaataaaattttgtcttaaagtagcagatcctgctccatcaaaccacaactcaacagagagtaaatgcaaacatgtatctatattgagagatagattttactctgattagaaagacgaaggagggttttggggataaacaataagaaattgctgagcagagctgagccagccagaaggaaaagcgatagcaagagaaactgtaggcagatgcaacggcaggataaaataggtatgccaggggtg

SEQ ID NO: 35569 - DNA, 506 bp, Macaca Mulatta
  misc_feature (1)...(506): n = A,T,C or G
tcagcttatggaagaaggatcattgtcagatttcgcagttcaggaatgaccttagacaatatcaatcgggcagttgtggatcgaataatccgggtggatcatgcgggcgaatatggagcaaaccgcatctatgccgggcagatggcagtcctgggtcggacaagcgtcgggccagtcattcannnnnnnnnnnnnnnnnnnnnnnnnnnnnnnnnnnnnnnnnnnnnnnnnnnnnnnnnnnnnnnnnnnnnnnnnnnnnnnnnnnnnnnnnnnnnnnnnnnnnnnnnnnnnnnnnnnnnnnnnnnnnnnnnnnnnnnnnnnnnnnnnnnnnnnnnnnnnnnnnnnnnnnnnnnnnnnnnnnnnnnnnnnnnnnnnnnnnnnnnnnnnnnnnnnnnnnnnnnnnnnnnnnnnnnnnnnnnnnnnnnnnnnnnnnnnnnngataaagaaatttcgggatgaagagcttgagcaccatgacacaggccttgaacatgatgccgaattgg

SEQ ID NO: 35570 - DNA, 845 bp, Macaca Mulatta
  misc_feature (1)...(845): n = A,T,C or G
ntcggaattcccaaagtttgttgtgatattaggcccnnnnnnnnnnnnnnnnnnaaaaaacctttttgggatttctttccccttttttatttccgctagggtttctggggtgtagaaatatttttggcctattattgtgacccgcgagccctttgggggatgtttttcatttctggaaaacttccccccctttcattttttgggaaaaaattcttcatttcttttttaggaattactgaaaatggaaaggtggagcttctaaaattcatcttcaaattctcctgtttattctcttttcggtcctatttcccatctccttttctctctgggagacttgttaaacctcaccttttaactcttccattacagacnnnnnnnnnnnnnnnnnnnnnnaatattcaagatttgctcttttctgactccttcttttctgtcctttcttcctgctttcttccctntctctctctctctcccctccccttgctgtctttatttctttaagaggaggtctctgtcacccaggccaggttggtcttcaactcctgatttcaagcgatccatctgcattggcctctccaaagtactgggattacagacgcgagtcaccacgcctggccagtaaataaatatttaaagagctctaccttttgacttgatttgtaggctttacttccttttgtgtgaattgagcccatttccctgaaaggaccgggaggtactgctcacagccagagggagtcaactcagtagtcatgcaaacacacggagtcctgggggtgggggaaacatgtttcatttctcccattttgatgctgattaatccagagtccactttggacgggccc

SEQ ID NO: 35571 - DNA, 1258 bp, Macaca Mulatta
gaggacccagacagcgtgccccccatcgatgtcctctggatcaaaggggcccagggaggtgactacttctactccttcgggggctgccaccgctacgcggcctaccagcagctgcagcaagagaccatccccgccaagcttgtccagtccactctctcagacctaaaggtgtacctgggggcatccacaccagacttgcagtagcagcctccttggcacctgctgccaccttcaagagcccagaagacacacctggcctccagcaggctgggccatgcagaagggatagcaggggtgcattctctttgcacctggggagaaggtctgactctgggcacccctctcgccagctacaaggccttggactcactgtgcagtgtgggagccccagttcccacctctgtgacaataggatcatggccttacccttgaagcattactgagaaggtgaaatgagaacagagatgcgcttggagagccacatgctgccggctccaaattcccaaggacaaggatccctctgcatttttgtctatgtaacctcttatgtagactacattcagctgcaaggataggaaaaccttggttgcagtggtttaaacaaacagaagattcttggaacacatagcatggattctggagatgggtggctaatggtattggttcaacaactccacaaaggtaggggtgacatcttggatccttttgccttgatctcagtgcttgttacttcatggtcccaagatggctgctgtatccccaagaatcatgtctgcgttcaaggaaggaggggtggaggaagaggaagggccaaactagctggacctgtcacctatcagaaagtaaaacctagtcagaagtctgtttcctgctctctccctctgcatattttcacttagatgcccttggcctgagccagctaccattgcacctctagctgcaaagaaagttaagacagcagggaacagaattgtcatggttgagtagaccaatcgtgttccatctactgagactggtacactgcctcctgcaataaaactgggatcccattaccaagagagaaaggcggaattgtgtaccagttagcttttgctgtataacaaaccatccccaaacttggcagctagaaacaaaccctctattttcccacaatcctgtgggttagcagtttgggctgggctcaacagggcagttctgctgctcccacctgggatccctcatggagttaaggtcagctgttgacctcagctgggcctgg

SEQ ID NO: 35572 - DNA, 868 bp, Macaca Mulatta
  misc_feature (1)...(868): n = A,T,C or G
ggnnnnnnnnnnnnnnnnnnnnnagccaggaaggtctcaatctcctgacatcgtgatccgcccacctcggtnnnnnnnnnnnnnnnnnnnnnnnnnnnnnnnnnnngtgcccggcccaagtattttttattcaggacggcataacgtaactgataatatgtaataaagttaaatttttttatgatgtgttttatttacaaaatatacactgctggtgttaccatatgaaaggaaataaagtcaattgataattgcttcatttttattgcccttatttcattttccgttgttcatagtaataggctttgtttctgatatagaaaataacacaatctctttataaactgccataaatttgtttgaatggagtttataacgtgtatcagcagataggaatttgaggcctttgagaagattttgtaggaaaagaagcaactgagctggggaatgaagaatatggcagaagtaaaagaaacacacaaacaaaaaagaaaataggaaaagcaaatggaaatgactcacctacagactggaagaaattagttgtagaaagaggtgtatggatatttaaaaaactaacatagggcctggggtgcagtggcctcatgcctaataatcccagcacttttgaaaggccagcacagggaggattgctttgagccctaaggaaatctgagaccagccctggggcaacatggttgaaaacccccacctcttccaaaaaattaccccaaaaatttaagcccnggttgtgggttggtgatacaactttggtaacccccccagcctgggggttgaagaaaaaattcacctgtgaacccccaagggaaagtttggaaaccttccacgtgaaaccccatgaattgcg

SEQ ID NO: 35573 - DNA, 852 bp, Macaca Mulatta
  misc_feature (1)...(852): n = A,T,C or G
gtgaagctcttcgaggtgattgagactgagaagacgctgtacctggtgatggagtatgcaagtgccggtgagctgcccaccctctccaccctgcccctgtgctgcctccccctgcccctgcacctgatcctgaccccgctcggcctctgccctgcaggagaagtgtttgactacctcgtgtcgcatggccgcatgaaggagaaggaagctcgagccaagttccgacagnnnnnnnnnnnnnnnnnnnnnnnnnnnnnnnnnnnnnnnnnnnnnnnnnnnnnnnnnnnnnnnnnnnnnnnnnnnnnnnnnnnnnnnnnnnnnnnnnnnnnnnnnnnnnnnnnnnnnnnnnnnnnnnnnnnnnnnnnnnnnnnnnnnnnnnnnnnnnnnnnnnnnnnnnnnnnnnnnnnnnnnnnnnnnnnnnnnnnnnnnnnnnnnnnnnnnnnnnnnnnnnnnnnnnnnnnnnnnnnnnnnnnnnnnnnnnnnnnnnnnnnnnnnnnnnnnnnnnnnnnnnnnnnnnnnnnnnnnnnnnnnnnnnnnnnnnnnnnnnnnnnnnnnnnnnnnnnnnnnnnnnnnnnnnnnnnnnnnnnnnnnnnnnnnnnnnnnnnnnnnnnnnnnnnnnnnnnnnnnnnnnnnnnnnnnnnnnnnnnnnnnnnnnnnnnnnnnnnnnnnnnnnnnnnnnnnnnnnnnnnnnnnnnnnnnnnnnnnnnnnnnnnnnnnnnnnnnnnnnnnnnnnnnnnnnnngaggtgatggtgggtatgggctacacgcgggaagaaatcaaagaggccttgaccagccagaagtacaacgaagtgaccgccacctacctcctgctgggcaggaagactgag

SEQ ID NO: 35574 - DNA, 321 bp, Macaca Mulatta
aacaggtgacataacagaagaaaaatatcattcaagattggttctgattcttttggaaaataacagtttaagcacttggttcctcagttggataacattagatccaaagtgcattggttcagtggtgtgaagaaaggaagcacaattggcaggttatcactttccagtcattccaatagatgatggttaacatgaattttacatgtgcaatgttcctgactgcaatgaagaaaaggccgtctggagatttctgttttttaagcacattctccttccatccaaatgttttacatccatgtaatggccagttaagctagggct

SEQ ID NO: 35575 - DNA, 651 bp, Macaca Mulatta
  misc_feature (1)...(651): n = A,T,C or G
ggcggatgacttcagcattagatggtcaggtgtattttttgattaataggtgcattcagtttggaaaagacagcttttcattaacgtcccacgtaaaggaatatggcctatacggtacgtacgctgctgcgtggtcatatttgttcctgtgatcttactgtattttcaaagtttggaaatatacataccgtgtgctttgcaattgttttatgcttcctggaatttggggattcacgagagacttgaggttagagttctgcaagagagaagacactacatgattgcagctgctacatcaagaacccaagccccagtcaaggttgtgaatacgactttggatgagattgagaaggcccagtggacggttggtcttgaagagtggcagtgtatggacttgaggacctctgcagaccatcagatcaaaggaagagagctgttttgnnnnnnnnnnnnnnnnnnnnnnnnnnnnnnnnnnnnnnnnnnggaatgtaattttcctatgacatgttaaccggtgcacatcgtgtaacctgtctggtgagcaacctacaattgggatgagttctaggtacatgtgtttgctgactttggggtaaactttgttaaaatacagtctctgccacaaatgcatgtgaactgttcaagggccca

SEQ ID NO: 35576 - DNA, 559 bp, Macaca Mulatta
ctcccccacccccagcggagcaggaagatcaggcgctgtcaccatcacccaccaatggtaacccactgttgccctttccaggtgcacaggtcagacaaaatgtgaaaaacagacttcttgttaaaaaccaggatgtcagtatttcaaccgttcagcccaaaacatcaaattttgtaccatccagtgccaacatgcagtatcaaggacaacagatgaaaccactgaaacatttgagacagaccagaacagttcctcaaagtcagactcagccgctgcataaagtactccagatcaaacccacagatgtggaggagccagctgtgccccagactcctcgagtggcgtccatccagggccggccccaggacacaaagcctggcgtgaaaaggactgtcacgcacaggacaaacagtggtggtggagacgggccccacatcagctccaaggtcagggtgattaagctgtcaggtggggtaagttgacaagttttatgacagcttctttgagtctgtgtttcacatagaatgccctcatttgcagagaatatttttgaagaaag

SEQ ID NO: 35577 - DNA, 539 bp, Macaca Mulatta
atatatgagagaggagtgtttttctatcatagatgccataggggaaagtttggggatgaaggagagcttaaaggcatttcagttaagttagaaaactgacacagactgttgagaaatctttgctacttttcccaccccaaacagcctgggtcctgacatcttctgccctgggcccccttctcttgatgtggaaagtctgaatgcagtatttatagatttctaaggttttaacatccagtatcaggaggaatatcagaaatactggttggtgaaataaagagtttaggcattgttggcctgtcttttttgaagcgtgtgtgtcttgtgtagttagatatatttcacttatgtgagtcatcatggtgtcagtcttgtagcccattatttttcctgtgcttccgcagcttcccaaagaagctagttagaacttcaggtaaacattaattcttgggttggtggagtgggtattgccagttagaagacatggatcagttactgattatattgaaactcaatataatcaattatgcgcttttgag

SEQ ID NO: 35578 - DNA, 767 bp, Macaca Mulatta
gggatattgtacctgtggatgcatcttatgaagtaaaagaactatatgtgccagaaaataaacttcatttggcaaaaacagatgcggaaacattaccagcactgaaaattaacaaagtggatatgcagtgggtgcaggttttggcagaaggttgggcaaccccattgaatggctttatgagagagagggagtacttgcagtgccttcattttgattgtcttctggatggaggtgtcattaacttgtcagtacctatagttctgactgctactcatgaagataaagagaggctggatggctgtacagcatttgctctgatgtatgagggccgccgtgtggccattcttcgcaatccagagttttttgagcacaggaaagaggagcgctgtgccagacagtggggaacaacatgcaggaaccacccctacattaagatggttatggaacaaggagattggctgattggaggagatcttcaagtcttggatcgagtttattggaatgatggtcttgatcagtatcgtcttactcctactgagctaaagcagaaatttaaagatatgaatgctgatgctgtctttgcatttcaattacgcaacccagtgcacaatggacatgccctgttaatgcaagatacccataagcaactttctagagagggggctaccgggcgccccggtccttcttactccaccctctggggtggcttggacaaaggatgatgacgttccctttgatggttgccgtatggaagcaacatgcctgcc

SEQ ID NO: 35579 - DNA, 261 bp, Macaca Mulatta
  misc_feature (1)...(261): n = A,T,C or G
caggtggcattcttcttcagagcagggcaagtgtaattctggaccaatgtatgattnnnnnnnnnnnnnnnnnnnnnnnnnnnnnnnnnnnnnnnnnnnnnnnnnnnnnnnnnnnnnnnnnnnnnnnnnnagattctctgctacttattcaaggtgacacaatgcccttcacactccacctgaggtcccgccttcccactgccctaaggagtttgattctacaaaagaaaccaaacatcagaaatacatccagcatggctg

SEQ ID NO: 35580 - DNA, 517 bp, Macaca Mulatta
  misc_feature (1)...(517): n = A,T,C or G
aatgacaaaggacagatccctgctgatgttgttccagacccagtagatatgccgttagagatggctgacgccgcagccactgctaaggaaatcaagcagatgctcctagatgcggtgcctctgtcatgtaacatctcaaaggccatgctcccaaattatgatcatgtcactggcaaggcaatgcttacgtcactnnnnnnnnnnnnnnnnnnnnnnnnnnnnnnnnnnnnnnnnnnnnnnnnnnnnnnnnnnnnnnnnnnnnnnnnnnnnnnnnnnnnnnnnnnnnnnnnnnnnnnnnnnnnnnnnnnnnnnnnnnnnnnnnnnnnnnnnnnnnnnnnnnnnnnnnnnnnnnnnnnnnnnnnnnnnnnnnnngtatttttgcacctctttcaaagataagtaaagcaaaagatcgaaggaagaatatagcacacactccttctacaaaagctgccgtgcctctcatcaggtcccagaaaattgacatagctcatgtaacgtccaaagtaaatactgg

SEQ ID NO: 35581 - DNA, 356 bp, Macaca Mulatta
tccacctctccccagctctttgaaggctaatggtgagctcctaccccattccccaggggcacacaatgagaaactttcacttcatagatggggaaatgcactttgcatggaaagatggtgtgtttttttctggagactgggcaggtaggacagggcagctggtatagaggggtgcaggttgaggtctgccctgggaaggccctggggaaaacacttctctactcctcattccagcctcacctccacctcctggatccaaggcagggacacgtccctatgactccatccaggctgcacaggagatctgacctgctcccatcagcctctgacttccaaccccagcccagcatccccag

SEQ ID NO: 35582 - DNA, 753 bp, Macaca Mulatta
  misc_feature (1)...(753): n = A,T,C or G
ggggagagttctcattttaaacttccaacagctttgtgggtggaggggtcgttattctgattttacaggtggggaagcgctagggtacagagaggtttagaaacttgccgcatctcacagccagtgagcagagctgggcgaggctggagggtcagctgtgggccctccaggtgggtcagccgagagtgaccagactgctccctagggtgtgagggtaaagtgggcatggctgccgtgcagctagcccccggccagactttcgacgggcagaagttgtaccggcacgttcgcgcttggctccctgcctacgctaccccccatttcatccgcatccaggacgccgtggaggtcacaagcacgttcaaattgatgaagacccggctggtgcgtgaaggcttcaacgtggggatcgtggttgaccctctgtttgtactcgacaaccaggcccagtccttccggcccctgacggcagaaacgtaccaggctgtgtgtgagggaacctggaggctctgactatctggccaacccactggggcagggatcaaagccagacacccccaccccaacacattctttcaacctgggcctgcgtgaatcccagtctggccataccctcaacctcagtgggctgggaatgatagtgggccctgtagcagtggcagaataaactcaaatgtggtcacnnnnnannnanatnnnnnnnnnnnnnnnnnnnnngtcgggccgccttcgggcccttcgaaaaaccctttc

SEQ ID NO: 35583 - DNA, 1361 bp, Macaca Mulatta
ttgaacttcaggtctatcgtgcatctatgaatctatcacaagcatttcttcactgaaaagcctgaaaattctgcggatcagaggatatgtcttcaaagagctgaaaagctttaacctctctccattacataatcttcaaaatcttgaagttcttgatcttggtactaactttataaaaattgctaacctcagcatgtttaaacaatttaaaagattgaaagtcatagatctttcagtgaataaaatatcaccttcaggagattcaagtgaagttggcttctgctcaaatgccagaacttctgtagaaagttatgaaccccaggtcctggaacaattatattatttcagatatgataagtatgcaaggagttgcaggttcaaaaacaaagaggcttctttcacgtctgttaatgaaagctgctacaagtatgggcagaccttggatctaagtaaaaatagtatattttttatcaagtcctctgattttcagcatctttctttcctcaaatgcctgaatttgtcaggaaatctcattagccaaactcttaatggcagtgaattccaacctttagcagagctgagatatttggacttctccaacaaccggcttgatttactccattcaacagcatttgaagagcttcgcaaattggaagttctggatataagcagtaatagccattattttcaatcagaaggaattactcatatgctaaactttaccaagaacctaaaggttctgcagaaactgatgatgaacgacaatgacatctcttcctccaccagcaggaccatggagagtgagtctcttagaactctggaattcagaggaaatcacttagatgttttatggagagatggtgataacagatacttacaattattcaagaatctgctaaaattagaggaattagacatctctaaaaattccctaagtttcttgccttctggagtttttgatggtatgcctccaaatctaaagaatctctctttggccaaaaatgggctcaaatctttcatttgggaaaaactccgttatctaaagaacctggaaactttggacctcagccacaaccaactgacgactgtccctgagagattatccaactgttccagaagcctcaagaatctgattcttaagaataatcaaatcaggagtctgacgaagtattttctacaagatgccttccagttgcgatatctggatctcagctcaaataaaatccagatgatccaaaagaccagcttcccagaaaatgtcctcaacaatctgaagatgttgcttttgcatcataatcgatttttgtgcacctgtgatgctgtgtggtttgtctggtgggttaaccatacggaggtgacta

SEQ ID NO: 35584 - DNA, 405 bp, Macaca Mulatta
atttgtaaactaagctagatttggacgttagtataagtggcttaatccctgtgaatgataattatattattaggtgttatccataggtggtacttgattttaggatgcttgcttttgaagccaggtattagtctgaagtgtcttacctgtatcaaaaagcaaaggttggagttgatcctccttttttggagagatgcttctttgttcacacgttacttacctattagtacttgtttttagttttaccaatcctcaaacccaagaatgactattttaatactgtttcttctctacttgattcccaagtatttaaaagtggggagttagtgtcaacactttcttcaatcaagttttatgtccatttaaaatattttctagaaactcacatatacatacacacactta

SEQ ID NO: 35585 - DNA, 598 bp, Macaca Mulatta
  misc_feature (1)...(598): n = A,T,C or G
catttgcctgatgtgtagtgctatagataatattttaaattggaaaagtttgttttaaattatttttacagtgaagactgttttcagctctttttatattgtacatagtcttttatgtaatctactggcatatgttttgtagactgtttaatgactggatatcttccttcaacttttgaaatacaaaaccagtgtttttttacttgtacactgttttaaagtctattaaaactgtcatttgacttttttcnnnnnnnnnnnnnnnnnnnnnnnnnnnnnnnnnnnnnnnnnnnnnnnnnnnnnnnnnnnnnnnnnnnnnnnnnnnnnnnnnnnnnnnnnnnnnnnnnnnnnnnnnnnnnnnnnnnnnnnnnnnnnnnnnnnnnnnnnnnnnnnnnnnnnnnnnnnnnnnnnnnnnnnnnnnnnnnnnnnnnnnnnnnnnnnnnnnnnnnnnnnnnnnnnnnnnnnnnnnnnnnnnnnnnnnnnnnnnnnnnnnnnnnnnnnnnnnnnnnnnnnnnnnnnnnnnnnnnnnnnnnnnnnnnnnnnnnnnnnnnnnnnnnnnnnnnnnnnnnnnnnnnnnnnnnnnnnnnnnnnnnnnnnn

SEQ ID NO: 35586 - DNA, 144 bp, Macaca Mulatta
  misc_feature (1)...(144): n = A,T,C or G
gaccaaatggctcgaaatccagctgctattgacatgtttattataggnnnnnnntataggtgctacttttactgactggtttacctcttatgtcaaaaatgttgtatcaggtggcttccctatcatcagagaccaaattttcag

SEQ ID NO: 35587 - DNA, 749 bp, Macaca Mulatta
  misc_feature (1)...(749): n = A,T,C or G
actattggacccagttttcaatttaacttaattgggggccccgcggcggcaaaaaacgaattggttttgaaaaagttttttgaggggcccgaggcggccgnnnnnnnnnnnnnnnnnnnnnnnnnnnnnnnnnnnnnaaannnnnnnnnnnnnnnnnnnnnnnnnnnnnagccaggatagtctcnnnnnnnnnnnnnnnnnnnncacccnnnnnnnnnnnnnnnnnnnnnnnnnnnnnnnnnnnnnnnnnnnnnnnncggccggagtcttttaggatttgtgtcttctatcttcccagttatactataaacactcaacagcagaaactttgctctccactgaccctggcagccgtggacaggacgatggggacagcaggagtcatttcagagaagcagcagcgccctgtcgccctcagcatctgcaggggaccaatcccacgacccccacagataccgaaatcccctgatgctcaagtcttttctataaaacagagcaatatttgcacctaacctacacacatcttcccatgtacgttaaatcacctctaaattacttataatatctagcacaatgtacatgctatgcaaatagctgttacactattggggtggattttttttgtatttttttaatggctgcattttttaagtgtttttgatcctcagttgattgaatttgcagatgtggggcggtgggtgtgggggccgccggcagtactgcagactcagagctcgcacaagcagccc

SEQ ID NO: 35588 - DNA, 840 bp, Macaca Mulatta
  misc_feature (1)...(840): n = A,T,C or G
gagtgcaccgcctgctccgcaaaggcaattacgcagagcgggtcggggcaggcgcgccggtgtacctggcggctgtgttggagtacctgactgccgagatcctggagctggccggcaacgcggctcgcgacaacaagaagacccgcatcatcccgcgccacttgcagctggccatccgtaacgacgaggagctcaacaagctgctaggccgtgtgacaattgctcagggcggcgtccttcctaatatccaggccgtgcttttgcctaagaaaaccgagagtcaccacaaggctaagggcaagtgatttgacaggcatctgagcttccgtgaaacgctatcaaacccaaaggctcttttcagagcccccttaccgtttcagaggaagagctaacctcactgcttgtacgtacgagggaaaaaagcactaaggtnnnnnnnnnnnnnnnnnnnnnnnnnnnnnnnnnnnnnnnnnnnnnnnnnnnnnnnnnnnnnnnnnnnnnnnnnnnnnnnnnnnnnnnnnnnnnnnnnnnnnnnnnnnnnnnnnnnnnnnnnnnnnnnnnnnnnnnattaaaaacattctacatcatgtgtgggggggataaggagggtaaaatggagagaaagaaattattgaggggaagttctttctgagtanncnaannaatgtgtttaattttttaaataagtattacatttacagggttcaaacgatttgaagtaaaaagataaatagaaagaatccacccctcaacttaccccaggtgatcacttttctttttcttgtgtatctgcccagtattcattcctggtaatatcagtcaataatgaatgatacgtgt

SEQ ID NO: 35589 - DNA, 686 bp, Macaca Mulatta
  misc_feature (1)...(686): n = A,T,C or G
cccacctcaacctctagaatagctgggactacaggtacacaccaccacgcccagctaatgtttggatttttttgtagagacagggtctcaccatacttcccgggcaggtttccaactcctaggctcaagtgatccagcagccttagcctcccaaaacgctagggttacaggcatgagcactgcacccggccannnnnnnnnnnnnngaaacagggtctcactctgttgcccaggctggaatacagtggcacaatctcagctcactgcaaccttgaactcctgggcttcagtgatcctcccacctcagtctccccaatgggtgtaactacaggcatgtaccaccacacctggctnnnnnnnnnnnnnnnnnnngggtcttgctgtgttgcccaggctggtcttgaattcctgggctcaagagagccactcatccccaagtcccagagtgttgggattacatgagccaccatgcccggccaaacttcagccttgaatattagtaattttgccatattagtttaccacctgtactattatttgctttatatttttctctaaattggttcattattcacttattaaaattattgtgacaggactctttttttgtatcacttctgtaaatgaaaaatcagtctcatttgccatcaatagaaggtaaaagatgaaaataaatataatgtaaa

SEQ ID NO: 35590 - DNA, 128 bp, Macaca Mulatta
cagtaactagctttagccttctccagagcactcccagcccaatcttaaggctgctgttttggggtcctaaaatttccctaggaggtatggctaaatgagaaaaattggactccaaattctccagttat

SEQ ID NO: 35591 - DNA, 3892 bp, Macaca Mulatta
  misc_feature (1)...(3892): n = A,T,C or G
gacctgggatgacgagctggagaagtctgcggcggcatgggccagtcagtgcatctgggagcatgggcccaccagtctgctggtgtccatcgggcagaacctggctgcccactggggcaggtnnnnggtatcgctctcccgggttccacgtgcagccctggtatgacgaggtgaaggactacacctacccctacccgagcgagtgcaatccctggtgtccggagaggtgctcaggggccatgtgcacgcactacacacagncagatagtttgggccaccaccaacaaggtcggctgtgctgtgaacacctgccagaggatgaccgtctggggagaagttttttagaacgccgtctactttgtctgcaattattctccaaagggggaactggatcggagaagccccctacaagaatggccggccctcctctgagtgtccgcccagctatggaggcggctgcaggaacaacttgtgttaccgannnnnnnnnnnnnnnnnnnnnnnnnnnnnnnnnnnnnnnnnnnnnnnnnnnnnnnnnnnnnnnnnnnnnnnnnnnnnnnnnnnnnnnnnnnnnnnnnnnnnnnnnnnnnnnnnnnnnnnnnnnnnnnnnnnnnnnnnnnnnnnnnnnnnnnnnnnnnnnnnnnnnnnnnnnnnnnnnnnnnnnnnnnnnnnnnnnnnnnnnnaggtaccagtgcccagcaggctgcctgaaccacaaggcgaagatctttggaactctgttctatgannnnnnnnnnnnnnnnnnnnnnnnnnnnnnnnnnnnnnnnnnnnnnnnnnnnnnnnnnnnnnnnnnnnnnnnnnnnnnnnnnnnnnnnnnnnnnnnnnnnnnnnnnnnnnnnnnnnnnnnnnnnnnnnnnnnnnnnnnnnnnnnnnnnnnnnnnnnnnnnnnnnnnnnnnnnnnnnnnnnnnnnnnnnnnnnnnnnnnnnnnnnnnnnnnnnnnnnnnnnnnnnnnnnnnnnnnnnnnnnnnnnnnnnnnnnnnnnnnnnnnnnnnnnnnnnnnnnnnnnnnnnnnnnnnnnnnnnnnnnnnnnnnnnnnnnnnnnnnnnnnnnnnnnnnnnnnnnnnnnnnnnnnnnnnnnnnnnnnnnnnnnnnnnnnnnnnnnnnnnnnnnnnnnnnnnnnnnnnnnnnnnnnnnnnnnnnnnnnnnnnnnnnnnnnnnnnnnnnnnnnnnnnnnnnnnnnnnnnnnnnnnnnnnnnnnnnnnnnnnnnnnnnnnnnnnnnnnnnnnnnnnnnnnnnnnnnnnnnnnnnnnnnnnnnnnnnnnnnnnnnnnnnnnnnnnnnnnnnnnnnnnnnnnnnnnnnnnnnnnnnnnnnnnnnnnnnnnnnnnnnnnnnnnnnnnnnnnnnnnnnnnnnnnnnnnnnnnnnnnnnnnnnnnnnnnnnnnnnnnnnnnnnnnnnnnnnnnnnnnnnnnnnnnnnnnnnnnnnnnnnnnnnnnnnnnnnnnnnnnnnnnnnnnnnnnnnnnnnnnnnnnnnnnnnnnnnnnnnnnnnnnnnnnnnnnnnnnnnnnnnnnnnnnnnnnnnnnnnnnnnnnnnnnnnnnnnnnnnnnnnnnnnnnnnnnnnnnnnnnnnnnnnnnnnnnnnnnnnnnnnnnnnnnnnnnnnnnnnnnnnnnnnnnnnnnnnnnnnnnnnnaattgtgaagcattcacagtgtcgcattcggcctttcgagcaagtgccggtgagtttcaggaatgagtagaaggtagttatttaaaaataaaaagcacagtccgtccctaccaacagagaaaaatagttttaatgtttgctggtcagacagacaaatgggctagaataagagggctgggggtatgagagaccccggctctgccctggcacgtgtccttgctggcggcctgccacgggcccccttcagtggccgcattcaggccggctctatacacagcagtgctggtttatgtagagttcagcagtcacttcagagatgtatcttgtctttgtcaggtccttcgtcttcatggcccacctgttttctgccgtgacctttggtcccgttgaggactaaggattaggaccctttctttaccccctacccgttgtggctcccaccctgcctcagactggtttacgtgtcctggttcacacccaggacttttctttgcaagcaatcctgtttgaagcccacttcttaactcctggtctcgtaaggttccactgagatgagatgtctgggaacaaccaaagaagggctgctctttgctccttttaaaaatgacaattaaatgtgcagattccccatgtacccaatgacctattttttcagccgtgggaggaatggagtctttggtacattcctccccgaggttagcagctcagtttgtggttatganaccatcctgtggcctcatgacagtgagagatgggaatacactagaaggatctcttttcctgnnnnnnnnnnnnnnnnnnnnnnnnnnnnnnnnnnnnnnnnnnnnnnnnnnnnnnnnnnnnnnnnnnnnnnnnnnnnnnnnnnnnnnnnnnnnnnnnnnnnnnnnnnnnnnnnnnnnnnnnnnnnnnnnnnnnnnnnnnnnnnnnnnnnnnnnnnnnnnnnnnnnnnnnnnnnnnnnnnnnnnnnnnnnnnnnnnnnnnnnnnnnnnnnnnnnnnnnnnnnnnnnnnnnnnnnnnnnnnnnnnnnnnnnnnnnnnnnnnnnnnnnnnnnnnnnnnnnnnnnnnnnnnnnnnnnnnnnnnnnnnnnnnnnnnnnnnnnnnnnnnnnnnnnnnnnnnnnnnnnnnnnnnnnnnnnnnnnnnnnnnnnnnnnnnnnnnnnnnnnnnnnnnnnnnnnnnnnnnnnnnnnnnnnnnnnnnnnnnnnnnnnnnnnnnnnnnnnnnnnnnnnnnnnnnnnnnnnnnnnnnnnnnnnnnnnnnnnnnnnnnnnnnnnnnnnnnnnnnnnnnnnnnnnnnnnnnnnnnnnnnnnnnnnnnnnnnnnnnnnnnnnnnnnnnnnnnnnnnnnnnnnnnnnnnnnnnnnnnnnnnnnnnnnnnnnnnnnnnnnnnnnnnnnnnnnnnnnnnnnnnnnnnnnnnnnnnnnnnnnnnnnnnnnnnnnnnnnnnnnnnnnnnnnnnnnnnnnnnnnnnnnnnnnnnnnnnnnnnnnnnnnnnnnnnnnnnnnnnnnnnnnnnnnnnnnnnnnnnnnnnnnnnnnnnnnnnnnnnnnnnnnnnnnnnnnnnnnnnnnnnnnnnnnnnnnnnnnnnnnnnnnnnnnnnnnnnnnnnnnnnnnnnnnnnnnnnnnnnnnnnnnnnnnnnnnnnnnnnnnnnnnnnnnnnnnnnnnnnnnnnnnnnnnnnnnngagaccaagtttcactctgttgcccaggctagagtgcagtggcgtgatctccactcattgcaactgccgcctcccgggttcaagtgattctcgtgcctcagcctcccaagtagctgggactacaaacgtatgcccggctaatttttgtatttttaataaagatgggctttcactatgttggccaggctggtctcgaactccttacctcaggtgatccacccacctcggcctcccaaagtgctgggattaaaggcatgagccactgcgcccggccgtggacctggctgtctttatcatccccacaaacattttgaaactggaatatttgtcttcagaaaatggaaacaagactataaattataagccctgtccctagcaccacctctcctgtgtgtggactagagctcctcatgctatcagcacttaccctgtgtttaaaaagatcttgcaccaagccaatggcgttcctggctctcctgcccccagaatgaacattttaaagttccttaggagttttgccctactgtattccaaagcgtaaggggtttctcatattgtctgtagg

SEQ ID NO: 35592 - DNA, 1733 bp, Macaca Mulatta
  misc_feature (1)...(1733): n = A,T,C or G
gatgaagttgttttaaaatttgaaaatggcaaagccagagctaagaatacattttatgaaacattaccagtggcgattaatggaaatggacccaccaagnnnnnnnnnnnnnnnnnnnnnnnnnnnnnnnnnnnnnnnnnnnnnnnnnnnnnnnnnnnnnnnnnnnnnnnnnnnnnnnnnnnnnnnnnnnnnnnnnnnnnnnnnnnnnnnnnnnnnnnnnnnnnnnnnnnnnnnnnnnnnnnnnnnnnnnnnnnnnnnnnnnnnnnnnnnnnnnnnnnnnnnnnnnnnnnnnnnnnnnnnnnnnnnnnnnnnnnnnnnnnnnnnnnnnnnnnnnnnnnnnnnnnnnnnnnnnnnnnnnnnnnnnnnnnnnnnnnnnnnnnnnnnnnnnnnnnnnnnnnnnnnnnnnnnnnnnnnnnnnnnnnnnnnnnnnnnnnnnnnnnnnnnnnnnnnnnnnnnnnnnnnnnnnnnnnnnnnnnnnnnnnnnnnnnnnnnnnnnnnnnnnnnnnnnnnnnnnnnnnnnnnnnnnnnnnnnnnnnnnnnnnnnnnnnnnncagaaagatcattgctcctcttgtaactcgtcatggaaaggtgtggtccaatttctggggagcattgagtcctgatggatagtatgcacgatctgaagattnnnnnnnnnnnnnnnnnnnnnnnnnnnnnnnnnnnnnnnnnnnnnnnnnnnnnnnnnnnnnnnnnnnnnnnnnnnnnnnnnnnnnnnnnnnnnnnnnnnnnnnnnnnnnnnnnnnnnnnnnnnnnnnnnnnnnnnnnnnnnnnnnnnnnnnnnnnnnnnnnnnnnnnnnnnnnnnnnnnnnnnnnnnnnnnnnnnnnnnnnnnnnnnnnnnnnnnnnnnnnnnnnnnnnnnnnnnnnnnnnnnnnnnnnnnnnnnnnnnnnnnnnnnnnnnnnnnnnnnnnngactggaaggaaaagtatataaaccgtgattatnnnnnnnnnnnnnnnnnnnnnnnnnnnnnnnnnnnnnnnnnnnnnnnnnnnnnnnnnnnnnnnnnnnnnnnnnnnnnnnnnnnnnnnnnnnnnnnnnnnnnnnnnnnnnnnnnnnnnnnnnnnnnnnnnnnnnnnnnnnnnnnnnnnnnnnnnnnnnnnnnnnnnnnnnnnnnnnnnnnnnnnnnnnnnnnnnnnnnnnnnnnnnnnnnnnnnnnnnnnnnnnnnnnnnnnnnnnnnnnnnnnnnnnnnnnnnnnnnnnnnnnnnnnnnnnnnnnnnnnnnnnnnnnnnnnnnnnnnnnnnnnnnnnnnnnnnnnnnnnnnnnnnnnnnnnnnnnnnnnnnnnnnnnnnnnnnnnnnnnnnnnnnnnnnnnnnnnnnnnnnnnnnnnnnnnnnnnnnnnnnnnnnnnnnagggaggtggttgcaaatttctaaggtacaattgctctattgaatcaccacgaaaaggctggagcttcatgcatcctgggagactcacacatttgcatgaaggacttcctgttaaaaatggaacaagatacattgcagtgtcatttatagatccctaagttatttacttttcattgaattgaaatttctttggacgaatgactggcatgaacacgtctttgaagttgtgtctgagaatatgagaggaatatttaaatagcgtcaacagaacaacttcactttgggccaaacatttgaaaaactttttataaaaattgtttgatatttcttaatgtctgctctgagccttaaaacaca

SEQ ID NO: 35593 - DNA, 624 bp, Macaca Mulatta
acaaatagttatctttcaattacagaagagtttcttaacttatttttctaagtttttattgtttaatataaatttataatgcaggggaagtactactcttcaaatgttgagggaagcttccgtaacattgatgactggcttaattggcagtaattctcagctgtaattgcataagcattactcaagaggaaaatccaaaagtgtagcaggagaactcttttccttgaaaaaggaaaaatattgaactaaatgatagcacctaaacttacatttaaaaggcagacattccttctacatgtaatgacacttcttgtgttaaactaaaaatttacaagagaagaaagtgaaagcaaatggggtttcacaaatagctgtaaatatagtgaagcaatttgaaataattttcaagcaaaatattgtgaaagtattctaagctaagttttaaatattacctaacagacaagagtggtatataataagtagatcctgagaagtacctttgttacagctaccataaatatatatagagagaatgtactttaatttattttgtgaatgcttttgaaaatgtatatgttcctttgtaattgacactatatatttcttaataaaataattctcaaa

SEQ ID NO: 35594 - DNA, 854 bp, Macaca Mulatta
  misc_feature (1)...(854): n = A,T,C or G
ggcaagggcttcaaattcatggtctggataccactagttttacttgtagccagcaagccaagaggaagtctgtattcttgatagtcctacttaaaaaatttttgtttggctgtaagacaagaatcccagatacacaaattcaatcgtcagagtccatctttatctggtccttctgtctgttgaggttgttgccaaggttcccgcactcagacccatagaatgcctctctgcaatatgctggtaccaccgtcactgctgaggagagccattgacttacccaatcatggcactgtaggatcctgttctttgtctcaacacgtttagaacttttatctgtgctgaagacatgcatttgggaagaataatcagtgatgtgctgggtaagtggctctttgaaaagattttaaaagccctgaattgtactgtttgccagtttccatggtgtgaatacccccaaccatggccaatttcaagcagcccaagaatttaaaaaccgggcttgccaaaatctctgaaaatttcaatttctcacctccaatgaactgaaattaaacctacttttccccggccgaggaataaatgaaataactttggataactaaggggctcccaagggggnnnnnnnnnnnnnnnnnntcccaatnnnnnnnnnnnnnnnnnnnngcctnnnnnnnnnnnnnnnnnnnnnnccgggcccctttaagggggccaaaaaaaatacaccctcttataccacctttaaaaaaggggggggaaaatatttgccccacaaacaaatttttcccaacctctggtgtgaaaaaaacaaaaaaacctttgtgtttaaaatatcctctccccacaccattcttttt

SEQ ID NO: 35595 - DNA, 4326 bp, Macaca Mulatta
  misc_feature (1)...(4326): n = A,T,C or G
ccggccgtacacagatggcccttgcggctctgggcagtacacacacaaggtgtatcatgcgtgcatgcacatccccagctggttccgctccatcctgcccaaggcagccctgcgggtggtggaggagtcctggaatgcctacccctacacccgaaccaggtnnnnnnnnnnnnnnnnnnnnnnnnnnnnnnnnnnnnnnnnnnnnnnnnnnnnnnnnnnnnnnnnnnnnnnnnnnnnnnnnnnnnnnnnnnnnnnnnnnnnnnnnnnnnnnnnnnnnnnnnnnnnnnnnnnnnnnnnnnnnnnnnnnnnnnnnnnnnnnnnnnnnnnnnnnnnnnnnnnnnnnnnnnnnnnnnnnnnnnnnnnnnnnnnnnnnnnnnnnnnnnnnnnnnnnnnnnnnnnnnnnnnnnnnnnnnnnnnnnnnnnnnnnnnnnnnnnnnnnnnnnnnnnnnnnnnnnnnnnnnnnnnnnnnnnnnnnnnnnnnnnnnnnnnnnnnnnnnnnnnnnnnnnnnnnnnnnnnnnnnnnnnnnnnnnnnnnnnnnnnnnnnnnnnnnnnnnnnnnnnnnnnnnnnnnnnnnnnnnnnnnnnnnnnnnnnnnnnnnnnnnnnnnnnnnnnnnnnnnnnnnnnnnnnnnnnnnnnnnnnnnnnnnnnnnnnnnnnnnnnnnnnnnnnnnnnnnnnnnnnnnnnnnnnnnnnnnnnnnnnnnnnnnnnnnnnnnnnnnnnnnnnnnnnnnnnnnnnnnnnnnnnnnnnnnnnnnnnnnnnnnnnnnnnnnnnnnnnnnnnnnnnnnnnnnnnnnnnnnnnnnnnnnnnnnnnnnnagcgagtccttcccgccacagcttctcggagtggaggatgcagagtatcgccagggacttggacgagagctcagacgacgagttcttcgatgcgcacnnnnnnnnnnnnnnnnnnnnnnnnnnnnnnnnnnnnnnnnnnnnnnnnnnnnnnnnnnnnnnnnnnnnnnnnnnnnnnnnnnnnnnnnnnnnnnnnnnnnnnnnnnnnnnnnnnnnnnnnnnnnnnnnnnnnnnnnnnnnnnnnnnnnnnnnnnnnnnnnnnnnnnnnnnnnnnnnnnnnnnnnnnnnnnnnnnnnnnnnnnnnnnnnnnnnnnnnnnnnnnnnnnnnnnnnnnnnnnnnnnnnnnnnnnnnnnnnnnnnnnnnnnnnnnnnnnnnnnnnnnnnnnnnnnnnnnnnnnnnnnnnnnnnnnnnnnnnnnnnnnnnnnnnnnnnnnnnnnnnnnnnnnnnnnnnnnnnnnnnnnnnnnnnnnnnnnnnnnnnnnnnnnnnnnnnnnnnnnnnnnnnnnnnnnnnnnnnnnnnnnnnnnnnnnnnnnnnnnnnnnnnnnnnnnnnnnnnnnnnnnnnnnnnnnnnnnnnnnnnnnnnnnnnnnnnnnnnnnnnnnnnnnnnnnnnnnnnnnnnnnnnnnnnnnnnnnnnnnnnnnnnnnnnnnnnnnnnnnnnnnnnnnnnnnnnnnnnnnnnnnnnnnnnnnnnnnnnnnnnnnnnnnnnnnnnnnnnnnnnnnnnnnnnnnnnnnnnnnnnnnnnnnnnnnnnnnnnnnnnnnnnnnnnnnnnnnnnnnnnnnnnnnnnnnnnnnnnnnnnnnnnnnnnnnnnnnnnnnnnnnnnnnnnnnnnnnnnnnnnnnnnnnnnnnnnnnnnnnnnnnnnnnnnnnnnnnnnnnnnnnnnnnnnnnnnnnnnnnnnnnnnnnnnnnnnnnnnnnnnnnnnnnnnnnnnnnnnnnnnnnnnnnnnnnnnnnnnnnnnnnnnnnnnnnnnnnnnnnnnnnnnnnnnnnnnnnnnnnnnnnnnnnnnnnnnnnnnnnnnnnnnnnnnnnnnnnnnnnnnnnnnnnnnnnnnnnnnnnnnnnnnnnnnnnnnnnnnnnnnnnnnnnnnnnnnnnnnnnnnnnnnnnnnnnnnnnnnnnnnnnnnnnnnnnnnnnnnnnnnnnnnnnnnnnnnnnnnnnnnnnnnnnnnnnnnnnnnnnnnnnnnnnnnnnnnnnnnnnnnnnnnnnnnnnnnnnnnnnnnnnnnnnnnnnnnnnnnnnnnnnnnnnnnnnnnnnnnnnnnnnnnnnnnnnnnnnnnnnnnnnnnnnnnnnnnnnnnnnnnnnnnnnnnnnnnnnnnnnnnnnnnnnnnnnnnnnnnnnnnnnnnnnnnnnnnnnnnnnnnnnnnnnnnnnnnnnnnnnnnnnnnnnnnnnnnnnnnnnnnnnnnnnnnnnnnnnnnnnnnnnnnnnnnnnnnnnnnnnnnnnnnnnnnnnnnnnnnnnnnnnnnnnnnnnnnnnnnnnnnnnnnnnnnnnnnnnnnnnnnnnnnnnnnnnnnnnnnnnnnnnnnnnnnnnnnnnnnnnnnnnnnnnnnnnnnnnnnnnnnnnnnnnnnnnnnnnnnnnnnnnnnnnnnnnnnnnnnnnnnnnnnnnnnnnnnnnnnnnnnnnnnnnnnnnnnnnnnnnnnnnnnnnnnnnnnnnnnnnnnnnnnnnnnnnnnnnnnnnnnnnnnnnnnnnnnnnnnnnnnnnnnnnnnnnnnnnnnnnnnnnnnnnnnnnnnnnnnnnnnnnnnnnnnnnnnnnnnnnnnnnnnnnnnnnnnnnnnnnnnnnnnnnnnnnnnnnnnnnnnnnnnnnnnnnnnnnnnnnnnnnnnnnnnnnnnnnnnnnnnnnnnnnnnnnnnnnnnnnnnnnnnnnnnnnnnnnnnnnnnnnnnnnnnnnnnnnnnnnnnnnnnnnnnnnnnnnnnnnnnnnnnnnnnnnnnnnnnnnnnnnnnnnnnnnnnnnnnnnnnnnnnnnnnnnnnnnnnnnnnnnnnnnnnnnnnnnnnnnnnnnnnnnnnnnnnnnnnnnnnnnnnnnnnnnaacgtgacggccaaccaccggatcaatgatgccctcgccaatgaggatggcccccaggttctgacgggcaggttcatgtatgggcccctggacatggtcaccctgactggggagaaggtnaggtggatgtgcacatcatgacccagccaccctcgggcgagtggctctacctggatacgctggtgaccaacaacagtgggcgtgtctcctacaccatccctgagtcgcaccgcctgggcgtgggtgtctaccccatcaagatggtggtcaggncaggggagaccacacgtttgccgacagctacatcactgtgctgcccaagggcacagagttcgtggtcttcagcatcgacggctcctttgccgctagcgtgtccatcatgggcagcgaccccaaggtgcgggccggggccgtggacgtggtgcggnnnnnnnnnnnnnnnnnnnnnnnnnnnnnnnnnnnnnnnnnnnnnnnnnnnnnnnnnnnnnnnnnnnnnnnnnnnnnnnnnnnnnnnnnnnnnnnnnnnnnnnnnnnnnnnnnnnnnnnnnnnnnnnnnnnnnnnnnnnnnnnnnnnnnnnnnnnnnnnnnnnnnnnnnnnnnnnnnnnnnnnnnnnnnnnnnnnnnnnnnnnnnnnnnnnnnnnnnnnnnnnnnnnnnnnnnnnnnnnnnnnnnnnnnnnnnnnnnnnnnnnnnnnnnnnnnnnnnnnnnnnnnnnnnnnnnnnnnnnnnnnnnnnnncagttcatcacggacggctatgcagcccacctggcgcagctgaagtacagccaccgggcgcggcctgctcgcaacacagccacccgcatggcgctgcgcaagggcagcttcggcctgcctggccagggcgacttcctgcgttcccggaaccacctgcttcgcaccatctcggcccagcccagcgggcccagccaccggcacgagcggacacagagccaagcagatggcgagcagcggggccagcgcagcatgagcatggcggccggctgctggggccgcgccatgactggccgcctggagccgggggcggccacgggctccaagtagggcaccgtgagtgcagtgcgaggtctccatggtgctagnnnnnnnnnnnnnnnnnnnnaggaggcctggcctgggtacatgcagagacgtgggcccgggagcttgtcccagggccttgcagaggacacgggccacaccacacagtgctccctgccctgcctcacgtccttgggcctgacgggtccagcttgtcatggaagctggcagggaccaccagccccacgatggcagagggaccaggactccccactcagactggcctgggaggctgtcccagacattttgtcctgcgtggatctccaagtgtcctggtgccaggtgtgggcccaagcccagcctgtcacatccccattcactggccaccctcactcccaggtcccctcccatttggtagcagctccaacaggggtccagcctgca

SEQ ID NO: 35596 - DNA, 4623 bp, Macaca Mulatta
  misc_feature (1)...(4623): n = A,T,C or G
tgaccatgtggtgcctgagcctgagtccagcctgactgaggcctatgagaaatggagagagtgggctgatgggaagagctgctgtgactatgccctgcatgtggacataacccactggaatgacagcgtcaagcaggaagtgcagaacctcttctaggacaaaggnnnnnnnnnnnnnnnnnnnnnnnnnnnnnnnnnnnnnnnnnnnnnnnnnnnnnnnnnnnnnnnnnnnnnnnnnnnnnnnnnnnnnnnnnnnnnnnnnnnnnnnnnnnnnnnnnnnnnnnnnnnnnnnnnnnnnnnnnnnnnnnnnnnnnnnnnnnnnnnnnnnnnnnnnnnnnnnnnnnnnnnnnnnnnnnnnnnnnnnnnnnnnnnnnnnnnnnnnnnnnnnnnnnnnnnnnnnnnnnnnnnnnnnnnnnnnnnnnnnnnnnnnnnnnnnnnnnnnnnnnnnnnnnnnnnnnnnnnnnnnnnnnnnnnnnnnnnnnnnnnnnnnnnnnnnnnnnnnnnnnnnnnnnnnnnnnnnnnnnnnnnnnnnnnnnnnnnnnnnnnnnnnnnnnnnnnnnnnnnnnnnnnnnnnnnnnnnnnnnnnnnnnnnnnnnnnnnnnnnnnnnnnnnnnnnnnnnnnnnnnnnnnnnnnnnnnnnnnnnnnnnnnnnnnnnnnnnnnnnnnnnnnnnnnnnnnnnnnnnnnnnnnnnnnnnnnnnnnnnnnnnnnnnnnnnnnnnnnnnnnnnnnnnnnnnnnnnnnnnnnnnnnnnnnnnnnnnnnnnnnnnnnnnnnnnnnnnnnnnnnnnnnnnnnnnnnnnnnnnnnnnnnnnnnnnnnnnnnnnnnnnnnnnnnnnnnnnnnnnnnnnnnnnnnnnnnnnnnnnnnnnnnnnnnnnnnnnnnnnnnnnnnnnnnnnnnnnnnnnnnnnnnnnnnnnnnnnnnnnnnnnnnnnnnnnnnnnnnnnnnnnnnnnnnnnnnnnnnnnnnnnnnnnnnnnnnnnnnnnnnnnnnnnnnnnnnnnnnnnnnnnnnnnnnnnnnnnnnnnnnnnnnnnnnnnnnnnnnnnnnnnnnnnnnnnnnnnnnnnnnnnnnnnnnnnnnnnnnnnnnnnnnnnnnnnnnnnnnnnnnnnnnnnnnnnnnnnnnnnnnnnnnnnnnnnnnnnnnnnnnnnnnnnnnnnnnnnnnnnnnnnnnnnnnnnnnnnnnnnnnnnnnnnnnnnnnnnnnnnnnnnnnnnnnnnnnnnnnnnnnnnnnnnnnnnnnnnnnnnnnnnnnnnnnnnnnnnnnnnnnnnnnnnnnnnnnnnnnnnnnnnnnnnnnnnnnnnnnnnnnnnnnnnnnnnnnnnnnnnnnnnnnnnnnnnnnnnnnnnnnnnnnnnnnnnnnnnnnnnnnnnnnnnnnnnnnnnnnnnnnnnnnnnnnnnnnnnnnnnnnnnnnnnnnnnnnnnnnnnnnnnnnnnnnnnnnnnnnnnnnnnnnnnnnnnnnnnnnnnnnnnnnnnnnnnnnnnnnnnnnnnnnnnnnnnnnnnnnnnnnnnnnnnnnnnnnnnnnnnnnnnnnnnnnnnnnnnnnnnnnnnnnnnnnnnnnnnnnnnnnnnnnnnnnnnnnnnnnnnnnnnnnnnnnnnnnnnnnnnnnnnnnnnnnnnnnnnnnnnnnnnnnnnnnnnnnnnnnnnnnnnnnnnnnnnnnnnnnnnnnnnnnnnnnnnnnnnnnnnnnnnnnnnnnnnnnnnnnnnnnnnnnnnnnnnnnnnnnnnnnnnnnnnnnnnnnnnnnnnnnnnnnnnnnnnnnnnnnnnnnnnnnnnnnnnnnnnnnnnnnnnnnnnnnnnnnnnnnnnnnnnnnnnnnnnnnnnnnnnnnnnnnnnnnnnnnnnnnnnnnnnnnnnnnnnnnnnnnnnnnnnnnnnnnnnnnnnnnnnnnnnnnnnnnnnnnnnnnnnnnnnnnnnnnnnnnnnnnnnnnnnnnnnnnnnnnnnnnnnnnnnnnnnnnnnnnnnnnnnnnnnnnnnnnnnnnnnnnnnnnnnnnnnnnnnnnnnnnnnnnnnnnnnnnnnnnnnnnnnnnnnnnnnnnnnnnnnnnnnnnnnnnnnnnnnnnnnnnnnnnnnnnnnnnnnnnnnnnnnnnnnnnnnnnnnnnnnnnnnnnnnnnnnnnnnnnnnnnnnnnnnnnnnnnnnnnnnnnnnnnnnnnnnnnnnnnnnnnnnnnnnnnnnnnnnnnnnnnnnnnnnnnnnnnnnnnnnnnnnnnnnnnnnnnnnnnnnnnnnnnnnnnnnnnnnnnnnnnnnnnnnnnnnnnnnnnnnnnnnnnnnnnnnnnnnnnnnnnnnnnnnnnnnnnnnnnnnnnnnnnnnnnnnnnnnnnnnnnnnnnnnnnnnnnnnnnnnnnnnnnnnnnnnnnnnnnnnnnnnnnnnnnnnnnnnnnnnnnnnnnnnnnnnnnnnnnnnnnnnnnnnnnnnnnnnnnnnnnnnnnnnnnnnnnnnnnnnnnnnnnnnnnnnnnnnnnnnnnnnnnnnnnnnnnnnnnnnnnnnnnnnnnnnnnnnnnnnnnnnnnnnnnnnnnnnnnnnnnnnnnnnnnnnnnnnnnnnnnnnnnnnnnnnnnnnnnnnnnnnnnnnnnnnnnnnnnnnnnnnnnnnnnnnnnnnnnnnnnnnnnnnnnnnnnnnnnnnnnnnnnnnnnnnnnnnnnnnnnnnnnnnnnnnnnnnnnnnnnnnnnnnnnnnnnnnnnnnnnnnnnnnnnnnnnnnnnnnnnnnnnnnnnnnnnnnnnnnnnnnnnnnnnnnnnnnnnnnnnnnnnnnnnnnnnnnnnnnnnnnnnnnnnnnnnnnnnnnnnnnnnnnnnnnnnnnnnnnnnnnnnnnnnnnnnnnnnnnnnnnnnnnnnnnnnnnnnnnnnnnnnnnnnnnnnnnnnnnnnnnnnnnnnnnnnnnnnnnnnnnnnnnnnnnnnnnnnnnnnnnnnnnnnnnnnnnnnnnnnnnnnnnnnnnnnnnnnnnnnnnnnnnnnnnnnnnnnnnnnnnnnnnnnnnnnnnnnnnnnnnnnnnnnnnnnnnnnnnnnnnnnnnnnnnnnnnnnnnnnnnnnnnnnnnnnnnnnnnnnnnnnnnnnnnnnnnnnnnnnnnnnnnnnnnnnnnnnnnnnnnnnnnnnnnnnnnnnnnnnnnnnnnnnnnnnnnnnnnnnnnnnnnnnnnnnnnnnnnnnnnnnnnnnnnnnnnnnnnnnnnnnnnnnnnnnnnnnnnnnnnnnnnnnnnnnnnnnnnnnnnnnnnnnnnnnnnnnnnnnnnnnnnnnnnnnnnnnnnnnnnnnnnnnnnnnnnnnnnnnnnnnnnnnnnnnnnnnnnnnnnnnnnnnnnnnnnnnnnnnnnnnnnnnnnnnnnnnnnnnnnnnnnnnnnnnnnnnnnnnnnnnnnnnnnnnnnnnnnnnnnnnnnnnnnnnnnnnnnnnnnnnnnnnnnnnnnnnnnnnnnnnnnnnnnnnnnnnnnnnnnnnnnnnnnnnnnnnnnnnnnnnnnnnnnnnnnnnnnnnnnnnnnnnnnnnnnnnnnnnnnnnnnnnnnnnnnnnnnnnnnnnnnnnnnnnnnnnnnnnnnnnnnnnnnnnnnnnnnnnnnnnnnnnnnnnnnnnnnnnnnnnnnnnnnnnnnnnnnnnnnnnnnnnnnnnnnnnnnnnnnnnnnnnnnnnnnnnnnnnnnnnnnnnnnnnnnnnnnnnnnnnnnnnnnnnnnnnnnnnnnnnnnnnnnnnnnnnnnnnnnnnnnnnnnnnnnnnnnnnnnnnnnnnnnnnnnnnnnnnnnnnnnnnnnnnnnnnnnnnnnnnnnnnnnnnnnnnnnnnnnnnnnnnnnnnnnnnnnnnnnnnnnnnnnnnnnnnnnnnnnnnnnnnnnnnnnnnnnnnnnnnnnnnnnnnnnnnnnnnnnnnnnnnnnnnnnnnnnnnnnnnnnnnnnnnnnnnnnnnnnnnnnnnnnnnnnnnnnnnnnnnnnnnnnnnnnnnnnnnnnnnnnnnnnnnnnnnnnnnnnnnnnnnnnnnnnnnnnnnnnnnnnnnnncctcctcatgttgcctctgaacccagatggcaatccatcctggttctctctgagggccacgggcttgggcagtggagagggtgtttgtgaaattgttgaatcagttacctgttgtagagatatttcttttacttctaagttttctagaagtggcaggattgtagtcatcctgaaaatgggtttccttcaaaatccctcagccttgttcttcacaactatctgtactgagaatgtcatgtttccacaaagggctgacacctgagccgtgattttcactcatccctgagaagccctttccagtagggtgggcaattcccaacttccttgccacaagcttcccaggctttctcccctggaaaactccagcttgagtcccagatacactcatgggctgcactgggcagccagcattcattgtaagttccctctttgaaaactggtgtgtgggtgttcagttctgtgtctggtgggtatggacagacagtaatctcccgtgatctgtgctagctgtgaagcagctctggaacgtgaagagctgtttggtttgaaccgtgaacaaaactgtgttttgagtttagctgagattaaagaaaaaaaattcatcaagtgactgttaatgtaaacctggttattaaaataactatgaaatta

SEQ ID NO: 35597 - DNA, 857 bp, Macaca Mulatta
  misc_feature (1)...(857): n = A,T,C or G
gggcctttcccccccctctagcgccgctgggcctgcaggtctctgtcgacccgcggacgctggtctctgttccgcaggatggggtttgttaaagttgttaagaataaggcctactttaagagataccaagtgaaatttagaagacgacgagagggtaaaactgattactatgctcggaaacgcttggtgatacaggataaaaataaatacaacacacccaaatacaggatgatagttcgtgtaacaaacagagatatcatttgtcagattgcttatgcccgtatagagggggatatgatagtctgcgcagcatatgcacacgaactgccaaaatacggtgtgaaggttggcctgacaaactatgctgcagcatattgtactggcctgctgctggcccgcaagccttctcaataagtttggcatggacaagatctatgaaagccaaatggaaagtaactgggcgatgaattacaatgtggaaaagcattgaatgggtcagcccagggtgcaccattacactggctaattttgggatgcccggggccctttgcccggaaaactaaaccaactgggggcaaatataaggttttttttggggcggcccctggtaaagggggagacctgttgtggaattggaaaggccatagatcctaatacccccttccccaagataacccccaaaccgaatttccccccggggttaaatgaaaatactggaaaaaccccaaggggaaatttttggattccccggaaagaatcccccccgggcacagcgacaccttctaatgagtgctcataaaaaaatggttcgtctagaaatttaaccttggccacccgtaacataataantgaggggc

SEQ ID NO: 35598 - DNA, 121 bp, Macaca Mulatta
cagctcctggacgaaacggccacactggtcttctttgttctaacggggtataaattccgtccagcttcggataacccctacctacagctctctcaggaagaagatgacttggaaatggagt

SEQ ID NO: 35599 - DNA, 584 bp, Macaca Mulatta
  misc_feature (1)...(584): n = A,T,C or G
gggggctctccactttgggctttctgatatttattcacacctctggagttgcaacttgccacatacaataattagtctcatagtgtagtaaacttcacccccaaaattttgaaaatgtatttcccccctgttttaaattggctttgnnnnnnnnnnnnnnnnnnnnnnnngacttagtaccagaaccaaaaatacctagatttttggagaacttattatatacatagaaacatgaatatggtttaccactaataggtaggagttatctgtcctccatctttaggtgctttttcttaaatgtggttctacttatactgatatttttaatttccatcttccatgcaacctcagagtgaataaaccccttaaatttggtgctggttcgaaaaagtctaaagggtttattaggggttgtttttagcaaatattacatcaatccttaaagcaacaagattgattttctgcttaaaatatttgggaagataggtgaggaggaggagggggttttaaaatataaaaaccagtttttctatattaaggtgcatatttgtaacattacaggggatgaaagtaaatgtaattaa

SEQ ID NO: 35600 - DNA, 1069 bp, Macaca Mulatta
  misc_feature (1)...(1069): n = A,T,C or G
tagacattcaaacacaactggaaaaatgggacgatgttaagtttcannnnnnnnnnnnnnnnnnnnnnnnnnnnnnnnnnnnnnnnnnnnnnnnnnnnnnnnnnnnnnnnnnnnnnnnnnnnnnnnggtcctcagagcacagatctcaaccagaactgagtggtggaaaaagcgccctcaactctgagtcggcttcagagttggaattagtggctccaactcagnnnnnnnnnnnnnnnnnnnnnnnnnnnnnnnnnnnnnnnnnnnnnnnnnnnnnnnnnnnnnnnnnnnnnnnnnnnnnnnnnnnnnnnnnnnnnnnnnnnnnnnnnnnnnnnnnnnnnnnnnnnnnnnnnnnnnnnnnnnnnnnnnnnnnnnnnnnnnnnnnnnnnnnnnnnnnnnnnnnnnnnnnnnnnnnnnnnnnnnnnnnnnnnnnnnnnnnnnnnnnnnnnnnnnnnnnnnnnnnnnnnnnnnnnnnnnnnnnnnnnnnnnnnnnnnnnnnnnnnnnnnnnnnnnnnnnnnnnnnnnnnnnnnnnnnnnnnnnnnnnnnnnnnnnnnnnnnnnnnnnnnnnnnnnnnnnnnnnnnnnnnnnnnnnnnnnnnnnnnnnnnnnnnnnnnnnnnnnnnnnnnnnnnnnnnnnnnnnnnnnnnnnnnnnnnnnnnnnnnnnnnnnnnnnnnnnnnnnnnnnnnnnnnnnnnnnnnnnnnnnnnnnnnnnnnnnnnnnnnnnnnnnnnnnnnnnnnnnnnnnnnnnnnnnnnnnnnnnnnnnnnnnnnnnnnnnnnnnnnnnnnnnnnnnnnnnnnnnnnnnnnnnnnnnnnnnnnnnnnnnnnnnnnnnnnnnnnnnnnnnnnnnnnnnnnnnnnnnnnnnnnnnnnnnnnnnnnnnnnnnnnnnnnnnnnnnnnnnnnnnnnnnnnnnnnnnnnnnnnnnnnnnnnnnnnnnnnnnnnnnnnnnnnnnnnnnnnntttagtaggactttctccagtatatgtagtatccatcagatctaagattttttgtaggctgtcaagaagtccagaattatggcccaagaggaaaagagttgcatttttc

SEQ ID NO: 35601 - DNA, 2964 bp, Macaca Mulatta
  misc_feature (1)...(2964): n = A,T,C or G
ccagctgtcccctctgctcctgtagaatcagcgctggtctccgtctatgtacatctggacttttcagataagacctggccccatgaagtctccaggaccctgactctccctgctgcctcagcttcctcttccccaaggcctcttctcactggcctcagactcacaacannnnnnnnnnnnnnnnnnnnnnnnnnnnnnnnnnnnnnnnnnnnnnnnnnnnnnnnnnnnnnnnnnnnnnnnnnnnnnnnnnnnnnnnnnnnnnnnnnnnnnnnnnnnnnnnnnnnnnnnnnnnnnnnnnnnnnnnnnnnnnnnnnnnnnnnnnnnnnnnnnnnnnnnnnnnnnnnnnnnnnnnnnnnnnnnnnnnnnnnnnnnnnnnnnnnnnnnnnnnnnnnnnnnnnnnnnnnnnnnnnnnnnnnnnnnnnnnnnnnnnnnnnnnnnnnnnnnnnnnnnnnnnnnnnnnnnnnnnnnnnnnnnnnnnnnnnnnnnnnnnnnnnnnnnnnnnnnnnnnnnnnnnnnnnnnnnnnnnnnnnnnnnnnnnnnnnnnnnnnnnnnnnnnnnnnnnnnnnnnnnnnnnnnnnnnnnnnnnnnnnnnnnnnnnnnnnnnnnnnnnnnnnnnnnnnnnnnnnnnnnnnnnnnnnnnnnnnnnnnnnnnnnnnnnnnnnnnnnnnnnnnnnnnnnnnnnnnnnnnnnnnnnnnnnnnnnnnnnnnnnnnnnnnnnnnnnnnnnnnnnnnnnnnnnnnnnnnnnnnnnnnnnnnnnnnnnnnnnnnnnnnnnnnnnnnnnnnnnnnnnnnnnnnnnnnnnnnnnnnnnnnnnnnnnnnnnnnnnnnnnnnnnnnnnnnnnnnnnnnnnnnnnnnnnnnnnnnnnnnnnnnnnnnnnnnnnnnnnnnnnnnnnnnnnnnnnnnnnnnnnnnnnnnnnnnnnnnnnnnnnnnnnnnnnnnnnnnnnnnnnnnnnnnnnnnnnnnnnnnnnnnnnnnnnnnnnnnnnnnnnnnnnnnnnnnnnnnnnnnnnnnnnnnnnnnnnnnnnnnnnnnnnnnnnnnnnnnnnnnnnnnnnnnnnnnnnnnnnnnnnnnnnnnnnnnnnnnnnnnnnnnnnnnnnnnnnnnnnnnnnnnnnnnnnnnnnnnnnnnnnnnnnnnnnnnnnnnnnnnnnnnnnnnnnnnnnnnnnnnnnnnnnnnnnnnnnnnnnnnnnnnnnnnnnnnnnnnnnnnnnnnnnnnnnnnnnnnnnnnnnnnnnnnnnnnnnnnnnnnnnnnnnnnnnnnnnnnnnnnnnnnnnnnnnnnnnnnnnnnnngaatctcctgattgccacagacaaggtcctagatatggacaccaggtctctgtggaccctggcccaagcccggaagccctgggcaggctcaactctcctgctggctgtggagaccctggcatgcagcctgtgcccacaggaccaccccttcaccttcagcttgcccaatgtgctgctgcagagccagctgtttggacccacgtttcctgctgactacagcatctccttccctactcggcccccactgcaggctcagattcccaggcactcactggccccactggtccgtaatggaactgaaataagtattactagcctggtgttgcaaaaactggaccaccttctgccttcaaactatggacaagggctgggggattccctctatgccactcctggcctggtccttgtcatttccatcatggcaggcgaccaggccttcagccagggcgaggtcatcatggattttgggaacacggatggttcccctcactgtgtcttctgggatcacagcctcttccagggcagggggggttggtccaaagaagggtgccaggcacaggcggccagtggcagccccactgctcggtgcctctgccagcacctcactgccttctccgtcctcatgtccccacacactgttccggaagaacccgctctggcgctgctgactcaagtgggcttgggagcttccatactggcgctgcttgtgtgcctgggtgtgtacaggctggtctggagagtcgtggtgcggaataaggtctcctatttccgccacgccgccctgctcaacatggtgctctgcttgctggccgcagacacttgcttcctaggcgcccccttcctccctccagggccccgaagcccgctctgcctggctgccaccttcctctgtcatttcctctacctggccacctttttctggatgctggcgcaggcccnnnnnnnnnnnnnnnnnnnnnnnnnnnnnnnnnnnnnnnnnnnnnnnnnnnnnnnnnnnnnnnnnnnnnnnnnnnnnnnnnnnnnnnnnnnnnnnnnnnnnnnnnnnnnnnnnnnnnnnnnnnnnnnnnnnnnnnnnnnnnnnnnnnnnnnnnnnnnnnnnnnnnnnnnnnnnnnnnnnnnnnnnnnnnnnnnnnnnnnnnnnnnnnnnnnnnnnnnnnnnnnnnnnnnnnnnnnnnnnnnnnnnnnnnnnnnnnnnnnnnnnnnnnnnnnnnnnnnnnnnnnnnnnnnnnnnnnnnnnnnnnnnnnnnnnnnnnnnnnnnnnnnnnnnnnnnnnnnnnnnnnnnnnnnnnnnnnnnnnnnnnnnnnnnnnnnnnnnnnnnnnnnnnnnnnnnnnnnnnnnnnnnnnnnnnnnnnnnnnnnnnnnnnnnnnnnnnnnnnnnnnnnnnnnnnnnnnnnnnnnnnnnnnnnnnnnnnnnnnnnnnnnnnnnnnnnnnnnnnnnnnnnnnnnnnnnnnnnnnnnnnnnnnnnnnnnnnnnnnnnnnnnnnnnngaggacatgggcacagccagaagttgagagaagactggggttgttttatagaatgagcaggtttcaggttccagctccccaccggtgaaatgagcagcctggtcagagcagtcaggatcagggtcccgggttcctgatcatcacctggactcctgctgattctcttgtctctggtttctccatcta

SEQ ID NO: 35602 - DNA, 2011 bp, Macaca Mulatta
  misc_feature (1)...(2011): n = A,T,C or G
tggtggtatctgccgaccctttgtccggcgagagggcagagatgaacatcctagaaatcaaccaggaattgcgctcccagctggcagagagcaatcagcagttccgagacctcaaagagaaattccttataactcaagctactgcctactccctggccaaccagctgaagaaatacagtaagttnnttgaggaagtacaggaatcacctgctcccagnnnnnnnnnnnnnnnnnnnnnnnnnnnnnnnnnnnnnnnnnnnnnnnnnnnnnnnnnnnnnnnnnnnnnnnnnnnnnnnnnnnnnnnnnnnnnnnnnnnnnnnnnnnnnnnnnnnnnnnnnnnnnnnnnnnnnnnnnnnnnnnnnnnnnnnnnnnnnnnnnnnnnnnnnnnnnnnnnnnnnnnnnnnnnnnnnnnnnnnnnnnnnnnnncagaaaatcaaaatgatcatgaggaagaacaggggaatgtgccagtgctccccagacaccatgatatatccaactcttacctgcatcatgaagtcactttcttggcgctggatgaagagaaagtttgctctgttcaggatgttgccagggattactccaaatccaaatgggatgaatccccacttggcttccnngaaaagcaaaataatcttgaagaggtgaaaggaaaagaaacagttgatcccagnnncaggctcagcagggaaccgctgagggtggacaagtatgaagtcccccgggagttactggatggatgttatttgattgcttctgttcttcctgacctgactcactcctgccagccttaaaggagaactctgtattcttttgaagaaaagcaagtcnnnnnnnnnnnnnnnnnnnnnnnnnnnnnnnnnnnnnnnnnnnnnnnnnnnnnnnnnnnnnnnnnnnnnnnnnnnnnnnnnnnnnnnnnnnnnnnnnnnnnnnnnnnnnnnnnnnnnnnnnnnnnnnnnnnnnnnnnnnnnnnnnnnnnnnnnnnnnnnnnnnnnnnnnnnnnnnnnnnnnnnnnnnnnnnnnnnnnnnnnnnnnnnnnnnnnnnnnnnnnnnnnnnnnnnnnnnnnnnnnnnnnnccacccaggcagactgtccccaagggacttggagtggagacttgagccaccacctgtcagaggtgcaggcttcacaggcacagctggagccaagcaccctggcgcccaattgtctgagactacagctggatcaagggttctactatggaaatgacttggccaggcggggcccctcctccaccacctgcagcttcacagccaatgctgattctgggaaccaccggcccttccaagnnnnnnnnnnnnnnnnnnnnnnnnnnnnnnnnnnnnnnnnnnnnnnnnnnnnnnnnnnnnnnnnnnnnnnnnnnnnnnnnnnnnnnnnnnnnnnnnnnnnnnnnnnnnnnnnnnnnnnnnnnnnnnnnnnnnnnnnnnnnnnnnnnnnnnnnnnnnnnnnnnnnnnnnnnnnnnnnnnnnnnnnnnnnnnnnnnnnnnnnnnnnnnnnnnnnnnnnnnnnnnnnnnnnnnnnnnnnnnnnnnnnnnnnnnnnnnnnnnnnnnnnnnnnnnnnnnnnnnnnnnnnnnnnnnnnnnnnnnnnnnnnnnnnnnnnnnnnnnnnnnnnnnnnnnnnnnnnnnnnnnnnnnnnnnnnnnnnnnnnnnnnnnnnnnnnnnnnnnnnnnnnnnnnnnnnnnnnnnnnnnnnnnnnnnnnnnnnnnnnnnnnnnnnnnnnnnnnnnnnnnnnnnnnnnnnnnnnnnnnnnnnnnnnnnnnnnnnnnnnnnnnnnnnnnnnnnnnnnnnnnnnnnnnnnnnnnnnnnnnnnnncgtgtagagaacaggagtcaggaccctctggcaggagacagcatgtcagccggaactctgcaagggcagagtatgaacaatgccatgttcttgctgaaaacgcttagcctgagtttcacaggaggtaaccctcagacaactgcagaatgtagaacattgaacaagacaactgacctg

SEQ ID NO: 35603 - DNA, 289 bp, Macaca Mulatta
ctagttgcatagatttctcattgtttgggttggaatacatatgtcattgtttatttttgttccttctttgtcttctggcttttcagctgttctttgtagtcccttttattatgtgtaacatcaagaaattcttagattaaatcagaatgctgaataaccttgtagccagcaataaggtgacttacaattgtataaacaggaagccaggcttttgaactgtttacttaagattctctggcaagacatctctgttattgtttccagtcaatatttacaaagcatcctaaaa

SEQ ID NO: 35604 - DNA, 6532 bp, Macaca Mulatta
  misc_feature (1)...(6532): n = A,T,C or G
agaatgatctgaaagtgctgtttacatcactggctgacaacaaatacatcattctgcagaaactggcaaatgtatttgaacaacccgtagcagaacaaatagagnnnnnnnnnnnnnnnnnnnnnnnnnnnnnnnnnnnnnnnnnnnnnnnnnnnnnnnnnnnnnnnnnnnnnnnnnnnnnnnnnnnnnnnnnnnnnnnnnnnnnnnnnnnnnnnnnnnnnnnnnnnnnnnnnnnnnnnnnnnnnnnnnnnnnnnnnnnnnnnnnnnnnnnnnnnnnnnnnnnnnnnnnnnnnnnnnnnnnnnnnnnnnnnnnnnnnnnnnnnnnnnnnnnnnnnnnnnnnnnnnnnnnnnnnnnnnnnnnnnnnnnnnnnnnnnnnnnnnnnnnnnnnnnnnnnnnnnnnnnnnnnnnnnnnnnnnnnnnnnnnnnnnnnnnnnnnnnnnnnnnnnnnnnnnnnnnnnnnnnnnnnnnnnnnnnnnnnnnnnnnnnnnnnnnnnnnnnnnnnnnnnnnnnnnnnnnnnnnnnnnnnnnnnnnnnnnnnnnnnnnnnnnnnnnnnnnnnnnnnnnnnnnnnnnnnnnnnnnnnnnnnnnnnnnnnnnnnnnnnnnnnnnnnnnnnnnnnnnnnnnnnnnnnnnnnnnnnnnnnnnnnnnnnnnnnnnnnnnnnnnnnnnnnnnnnnnnnnnnnnnnnnnnnnnnnnnnnnnnnnnnnnnnnnnnnnnnnnnnnnnnnnnnnnnnnnnnnnnnnnnnnnnnnnnnnnnnnnnnnnnnnnnnnnnnnnnnnnnnnnnnnnnnnnnnnnnnnnnnnnnnnnnnnnnnnnnnnnnnnnnnnnnnnnnnnnnnnnnnnnnnnnnnnnnnnnnnnnnnnnnnnnnnnnnnnnnnnnnnnnnnnnnnnnnnnnnnnnnnnnnnnnnnnnnnnnnnnnnnnnnnnnnnnnnnnnnnnnnnnnnnnnnnnnnnnnnnnnnnnnnnnnnnnnnnnnnnnnnnnnnnnnnnnnnnnnnnnnnnnnnnnnnnnnnnnnnnnnnnnnnnnnnnnnnnnnnnnnnnnnnnnnnnnnnnnnnnnnnnnnnnnnnnnnnnnnnnnnnnnnnnnnnnnnnnnnnnnnnnnnnnnnnnnnnnnnnnnnnnnnnnnnnnnnnnnnnnnnnnnnnnnnnnnnnnnnnnnnnnnnnnnnnnnnnnnnnnnnnnnnnnnnnnnnnnnnnnnnnnnnnnnnnnnnnnnnnnnnnnnnnnnnnnnnnnnnnnnnnnnnnnnnnnnnnnnnnnnnnnnnnnnnnnnnnnnnnnnnnnnnnnnnnnnnnnnnnnnnnnnnnnnnnnnnnnnnnnnnnnnnnnnnnnnnnnnnnnnnnnnnnnnnnnnnnnnnnnnnnnnnnnnnnnnnnnnnnnnnnnnnnnnnnnnnnnnnnnnnnnnnnnnnnnnnnnnnnnnnnnnnnnnnnnnnnnnnnnnnnnnnnnnnnnnnnnnnnnnnnnnnnnnnnnnnnnnnnnnnnnnnnnnnnnnnnnnnnnnnnnnnnnnnnnnnnnnnnnnnnnnnnnnnnnnnnnnnnnnnnnnnnnnnnnnnnnnnnnnnnnnnnnnnnnnnnnnnnnnnnnnnnnnnnnnnnnnnnnnnnnnnnnnnnnnnnnnnnnnnnnnnnnnnnnnnnnnnnnnnnnnnnnnnnnnnnnnnnnnnnnnnnnnnnnnnnnnnnnnnnnnnnnnnnnnnnnnnnnnnnnnnnnnnnnnnnnnnnnnnnnnnnnnnnnnnnnnnnnnnnnnnnnnnnnnnnnnnnnnnnnnnnnnnnnnnnnnnnnnnnnnnnnnnnnnnnnnnnnnnnnnnnnnnnnnnnnnnnnnnnnnnnnnnnnnnnnnnnnnnnnnnnnnnnnnnnnnnnnnnnnnnnnnnnnnnnnnnnnnnnnnnnnnnnnnnnnnnnnnnnnnnnnnnnnnnnnnnnnnnnnnnnnnnnnnnnnnnnnnnnnnnnnnnnnnnnnnnnnnnnnnnnnnnnnnnnnnnnnnnnnnnnnnnnnnnnnnnnnnnnnnnnnnnnnnnnnnnnnnnnnnnnnnnnnnnnnnnnnnnnnnnnnnnnnnnnnnnnnnnnnnnnnnnnnnnnnnnnnnnnnnnnnnnnnnnnnnnnnnnnnnnnnnnnnnnnnnnnnnnnnnnnnnnnnnnnnnnnnnnnnnnnnnnnnnnnnnnnnnnnnnnnnnnnnnnnnnnnnnnnnnnnnnnnnnnnnnnnnnnnnnnnnnnnnnnnnnnnnnnnnnnnnnnnnnnnnnnnnnnacttcagctttggcaaagataccagtactactcgaaacagtgtgcttcgtcggttcagcagcacgaggatcgaaccaatgagctgttgaaggcagccacaaacaaggacatcgccgatgatgaggttgctacatggattcaagattgcaacgnnnnnnnnnnnnnnnnnnnnnnnnnnnnnnnnnnnnnnnnnnnnnnnnnnnnnnnnnnnnnnnnnnnnnnnnnnnnnnnnnnnnnnnnnnnnnnnnnnnnnnnnnnnnnnnnnnnnnnnnnnnnnnnnnnnnnnnnnnnnnnnnnnnnnnnnnnnnnnnnnnnnnnnnnnnnnnnnnnnnnnnnnnnnnnnnnnnnnnnnnnnnnnnnnnnnnnnnnnnnnnnnnnnnnnnnnnnnnnnnnnnnnnnnnnnnnnnnnnnnnnnnnnnnnnnnnnnnnnnnnnnnnnnnnnnnnnnnnnnnnnnnnnnnnnnnnnnnnnnnnnnnnnnngggacagatgttaaaattcagcagcatggctccagatttagaccgtctaaatgagcttggatatagattacccttgaatgataaggaaatcaaaaggatgcagaatctgaaccgccattggtctctgatctcctctcagactacagaaagattcagnnnnnnnnnnnnnnnnnnnnnnnnnnnnnnnnnnnnnnnnnnnnnnnnnnnnnnnnnnnnnnnnnnnnnnnnnnnnnnnnnnnnnnnnnnnnnnnnnnnnnnnnnnnnnnnnnnnnnnnnnnnnnnnnnnnnnnnnnnnnnnnnnnnnnnnnnnnnnnnnnnnnnnnnnnnnnnnnnnnnnnnnnnnnnnnnnnnnnnnnnnnnnnnnnnnnnnnnnnnnnnnnnnnnnnnnnnnnnnnnnnnnnnnnnnnnnnnnnnnnnnnnnnnnnnnnnnnnnnnnnnnnnnnnnnnnnnnnnnnnnnnnnnnnnnnnnnnnnnnnnnnnnnnnnnnnnnnnnnnnnnnnnnnnnnnnnnnnnnnnnnnnnnnnnnnnnnnnnnnnnnnnnnnnnnnnnnnnnnnnnnnnnnnnnnnnnnnnnnnnnnnnnnnnnnnnnnnnnnnnnnnnnnnnnnnnnnnnnnnnnnnnnnnnnnnnnnnnnnnnnnnnnnnnnnnnnnnnnnnnnnnnnnnnnnnnnnnnnnnnnnnnnnnnnnnnnnnnnnnnnnnnnnnnnnnnnnnnnnnnnnnnnnnnnnnnnnnnnnnnnnnnnnnnnnnnnnnnnnnnnnnnnnnnnnnnnnnnnnnnnnnnnnnnnnnnnnnnnnnnnnnnnnnnnnnnnnnnnnnnnnnnnnnnnnnnnnnnnnnnnnnnnnnnnnnnnnnnnnnnnnnnnnnnnnnnnnnnnnnnnnnnnnnnnnnnnnnnnnnnnnnnnnnnnnnnnnnnnnnnnnnnnnnnnnnnnnnnnnnnnnnnnnnnnnnnnnnnnggaattagaaaatgcagttgggagctggacagatgacttgacccagttgacgctgctgaaggacaccctctctgcctacatcagtgctgatgatatctccattcttaatgaacgcatagcgcttctgcaaaggcagtgggaagaactatgccaccagnnnnnnnnnnnnnnnnnnnnnnnnnnnnnnnnnnnnnnnnnnnnnnnnnnnnnnnnnnnnnnnnnnnnnnnnnnnnnnnnnnnnnnnnnnnnnnnnnnnnnnnnnnnnnnnnnnnnnnnnnnnnnnnnnnnnnnnnnnnnnnnnnnnnnnnnnnnnnnnnnnnnnnnnnnnnnnnnnnnnnnnnnnnnnnnnnnnnnnnnnnnnnnnnnnnnnnnnnnnnnnnnnnnnnnnnnnnnnnnnnnnnnnnnnnnnnnnnnnnnnnnnnnnnnnnnnnnnnnnnnnnnnnnnnnnnnnnnnnnnnnnnnnnnnnnnnnnnnnnnnnnnnnnnnnnnnnnnnnnnnnnnnnnnnnnnnnnnnnnnnnnnnnnnnnnnnnnnnnnnnnnnnnnnnnnnnnnnnnnnnnnnnnnnnnnnnnnnnnnnnnnnnnnnnnnnnnnnnnnnnnnnnnnnnnnnnnnnnnnnnnnnnnnnnnnnnnnnnnnnnnnnngcaggaacttcagagagacatagagaagcacagtacaggtgttgcttctgtcctcaacctgtgtgaagtcctgctgcacgactgtgatgcctgtgccactgatgccgagtgtgactctatccagcaggctacaagaaacctggaccggcggtggagaaacatttgtgctatgtccatggaaaggannnnnnnnnnnnnnnnnnnnnnnnnnnnnnnnnnnnnnnnnnnnnnnnnnnnnnnnnnnnnnnnnnnnnnnnnnnnnnnnnnnnnnnnnnnnnnnnnnnnnnnnnnnnnnnnnnnnnnnnnnnnnnnnnnnnnnnnnnnnnnnnnnnnnnnnnnnnnnnnnnnnnnnnnnnnnnnnnnnnnnnnnnnnnnnnnnnnnnnnnnnnnnnnnnnnnnnnnnnnnnnnnnnnnnnnnnnnnnnnnnnnnnnnnnnnnnnnnnnnnnnnnnnnnnnnnnnnnnnnnnnnnnnnnnnnnnnnnnnnnnnnnnnnnnnnnnnnnnnnnnnnnnnnnnnnnnnnnnnnnnnnnnnnnnnnnnnnnnnnnnnnnnnnnnnnnnnnnnnnnnnnnnnnnnnnnnnnnnnnnnnnnnnnnnnnnnnnnnnnnnnnnnnnnnnnnnnnnnnnnnnnnnnnnnnnnnnnnnnnnnnnnnnnnnnnnnnnnnnnnnnnnnnnnnnnnnnnnnnnnnnnnnnnnnnnnnnnnnnnnnnnnnnnnnnnnnnnnnnnnnnnnnnnnnnnnnnnnnnnnnnnnnnnnnnnnnnnnnnnnnnnnnnnnnnnnnnnnnnnnnnnnnnnnnnnnnnnnnnnnnnnnnnnnnnnnnnnnnnnnnnnnnnnnnnnnnnnnnnnnnnnnnnnnnnnnnnnnnnnnnnnnnnnnnnnnnnnnnnnnnnnnnnnnnnnnnnnnnnnnnnnnnnnnnnnnnnnnnnnnnnnnnnnnnnnnnnnnnnnnnnnnnnnnnnnnnnnnnnnnnnnnnnnnnnnnnnnnnnnnnnnnnnnnnnnnnnnnnnnnnnnnnnnnnnnnnnnnnnnnnnnnnnnnnnnnnnnnnnnnnnnnnnnnnnnnnnnnnnnnnnnnnnnnnnnnnnnnnnnnnnnnnnnnnnnnnnnnnnnnnnnnnnnnnnnnnnnnnnnnnnnnnnnnnnnnnnnnnnnnnnnnnnnnnnnnnnnnnnnnnnnnnnnnnnnnnnnnnnnnnnnnnnnnnnnnnnnnnnnnnnnnnnnnnnnnnnnnnnnnnnnnnnnnnnnnnnnnnnnnnnnnnnnnnnnnnnnnnnnnnnnnnnnnnnnnnnnnnnnnnnnnnnnnnnnnnnnnnnnnnnnnnnnnnnnnnnnnnnnnnnnnnnnnnnnnnnnnnnnnnnnnnnnnnnnnnnnnnnnnnnnnnnnnnnnnnnnnnnnnnnnnnnnnnnnnnnnnnnnnnnnnnnnnnnnnnnnnnnnnnnnnnnnnnnnnnnnnnnnnnnnnnnnnnnnnnnnnnnnnnnnnnnnnnnnnnnnnnnnnnnnnnnnnnnnnnnnnnnnnnnnnnnnnnnnnnnnnnnnnnnnnnnnnnnnnnnnnnnnnnnnnnnnnnnnnnnnnnnnnnnnnnnnnnnnnnnnnnnnnnnnnnnnnnnnnnnnnnnnnnnnnnnnnnnnnnnnnnnnnnnnnnnnnnnnnnnnnnnnnnnnnnnnnnnnnnnnnnnnnnnnnnnnnnnnnnnnnnnnnnnnnnnnnnnnnnnnnnnnnnnnnnnnnnnnnnnnnnnnnnnnnnnnnnnnnnnnnnnnnnnnnnnnnnnnnnnnnnnnnnnnnnnnnnnnnnnnnnnnnnnnnnnnnnnnnnnnnnnnnnnnnnnnnnnnnnnnnnnnnnnnnnnnnnnnnnnnnnnnnnnnnnnnnnnnnnnnnnnnnnnnngggtttccatgaaatgagccatggtttgcttcttatgctggagaacattgacagaaggaaaaatgaaattgtccctattgattctaaccttgatgcagagatacttcaggaccatcacaaacagcttatgngcaaataaagcatgagctgttggaatcccaactcagagtagcctctttgcaagacatgtcttgccaactactggtgaatgctgaaggaacagactgtttagaagccaaagaaaaagtccatgttattggaaatcggctcaaacttctctagagaggaggtcagtcgtcatatcaaggaactggagaagttaatggacgtgtcaagtagtcagcagn

SEQ ID NO: 35605 - DNA, 457 bp, Macaca Mulatta
  misc_feature (1)...(457): n = A,T,C or G
tgagcggggcagttttgtgagccttcatctgcagcnttcagttcacccctgtccacaggcttcagcttgaaagaacggagtctntgcacttacacacactcttcctgttctgccttcacctatgccgggataagcagagatctcatcaatgagctcttctctgcaaggtcttccactgcttctgtctgtcttccatatcaagcctggatgcagctgctgctgcttagagcagggatgaagaaagtgttctgcataagtggcttcctgaatgatgaccagaataaaggtttttgatcaacctcagtctagtgtgttttataatctcacctttgttcttaccctgtgatgggagagccaccatacctgatcacagaccttcctgatcttccctgccagccattctaacctgcagtcctttcattaatttgttcttttattttccagcacatcaccagaa

SEQ ID NO: 35606 - DNA, 128 bp, Macaca Mulatta
tcagttctttcgggaggaccattgcctcaagggcatgaatttgaactgtatgaagtgagatttcactggggaagagaaaaccagcgtggttctgagcacacggttaatttcaaagcttttcccatgga

SEQ ID NO: 35607 - DNA, 121 bp, Macaca Mulatta
ttaaacacatcattgaagtattcactgtcaggcttatcactgcaaagcttaagcctatttagacatacatgaaagtagaagtccaataaatacaaatcaaattatcaaagaacaattgatt

SEQ ID NO: 35608 - DNA, 359 bp, Macaca Mulatta
agatgcctgctgcttggattctgagtggtcagggatccataaagcatgactttcaaggacggtttttagggcactgtgaaagtgttgggacttcctccaggatgcctgcatgggacaccccctggagctggtgtggccgttccccaagtgccaccggctcatggatgggggtgggtaccggtgccacctgggctggctgtgggttctgtgtccttccaggatctgtgtcatttcccatgaggggccagggcaggtggctggggggacacaggctggagtgttctccattctactggttctacactgtgaggtggcaatgggatttgctctgatgccacccaataaaatacctgttactt

SEQ ID NO: 35609 - DNA, 772 bp, Macaca Mulatta
  misc_feature (1)...(772): n = A,T,C or G
gacccccaggctgtggtgagggtctgagagctggcaccacggagcctgggcaacctcctccgcccacccatgcccaccccgcatgaggctgagaagcannnnnnnnnnnnnnnnnnnnnnnnnnnnnnnnnnnnnnnnnnnnnnnnnnnnnnnnnnnnnnnnnnnnnnnnnnnnnnnnnnnnnnnnnnnnnnnnnnnnnnnnnnnnnnnnnnnnnnnnnnnnnnnnnnnnnnnnnnnnnnnnnnnnnnnnnnnnnnnnnnnnnnnnnnnnnnnnnnnnnnnnnnnnnnnnnnnntgccacgccaagtcctgaggaggtgcagagcttggcccagtcttttgacaagctgatgcacagcccggcgggacgcagcgtgttccgggcgttcctgcggacagagtacagcgaggagaacatgctcttctggctggcctgtgaggagctgaaggccgaggccaaccagcacgtggtggacgagaaggcgaggctcatctacgaggactacgtgtccatcctgtcccccaaggaggtgnaggtgagcctggactcccgtgtgcgggagggcatcaacaagaagatgcaggagccgtccgcacacacgtttgacgacgcacagctgcagatctacacactcatgcaccgggactcctacccacgctttctcagctctcccacctaccgtgccctgctgctgcaggggccgtcacagtcctcctccgaggcctaggccgcccccagcagcacagaccccaccgcctcctatggtcgactc

SEQ ID NO: 35610 - DNA, 466 bp, Macaca Mulatta
  misc_feature (1)...(466): n = A,T,C or G
tggacggggacaccctcagccctcataacagattccagggagagggcaccctcttgtcctcatctctgccctttgtgtctctcttgcacacacatctgcccctcagcacgtcggtgtggggagggaattgctccttaaacctcaggtggctgactgtccctacccagcccaggacattttaggnnnnnnnnnnnaaatgtggggggcttctcatctccccaagattctcttccattcagccagatgtttcctgtataaatgtttggatctgcctgtttattttggtgggtggtctttcctccctcccctaccacccatgccccccttctcagtctgcccctggcctccagcccctaggggactagctgggttggggttcctcaggcctttcctctcctccctcttttctttctgttgattgtcgctcgagctggctgtattgctttttaatattgcaccgaaggtt

SEQ ID NO: 35611 - DNA, 845 bp, Macaca Mulatta
acaccccctaatgccagccttgggctctcttcctcggtagcccctcccgcaactctgcagctcctctcgcgcccagaggagctccattccccagcaggcctcactggtaggatcctgaccatcttctccaaaccttccccgggagagactctgcctttagggtcatccaagtgtccctgctctcagcgcagaggcccactggttttctataacgtactctttccctcctgccgcatcctgcccccttcacgttcacgagtcattaccagccagggaaggtcatccaagtttcctcctgcgtgggctgtatctttgggaccgagcctttccttggagagctgctgagagtggacagtcccagaaagaagtgtcaaagggcccaggggaaaggggactgtgccctgcaggctcacctcacaggggtcagggtttgctccacagctgcagctctgggctgacgccccccagaccccttccttctcggagtgacccacccccaggccacctgctcccgagagttctgtgcactttactctttggacttctcctcacatgtgccctggttttatggggagagggaattgctgttgggaaggcagagccgttgctgccctctctgcccttgcttcctgtggctggagcccaggcaaagagagcaggagccagcgtgagactgaggcccctggtgcccatcgaggaccagagtgaaggggactacatctcccagcccttcaccttttaaatgtgagtggttttaaaaggaaaaaacaaaaccaggcaacagcaacaatattctgtttttaaaatagggacaagactttgtccctttttagacatgtatccca

SEQ ID NO: 35612 - DNA, 131 bp, Macaca Mulatta
ggaattattacaacatattattaaaagttttaaggatgttgtttcaagtgactggtataaaattactagtaagccaagatattgtacgtattacccctacacaatgattgtgaaagaactgacatttaact

SEQ ID NO: 35613 - DNA, 344 bp, Macaca Mulatta
tcttcttccctctctcagaattaagttttagttcatgtctccctccccattctcgatcaccttccttgacttttcctgtaattatgatattaaatcctaatgattttgtagtcattatctcaggaagaaactgtccaacttaaagcaattatagaccaaccagcaatgtcatgtggtggagatcagacagcagtacagggactggctattgtcatggcagtgacagctattactgtccagccagcccagagagcatgccactgtcttgggctcttgtgtgggcagctgtcagggacatttctgggaacaatgatattctccgaatatataaaatatagggctta

SEQ ID NO: 35614 - DNA, 170 bp, Macaca Mulatta
ttttggacccagcatccagccagccatcaggactgatgcttaccagtctaccaaggggaagtcaccgggcctaagtgaaagacagtggggtcttggtccacctactctgtgcctgggagaccttcattctaatccctaggttggccccagggtgatgacattgcttccct

SEQ ID NO: 35615 - DNA, 3152 bp, Macaca Mulatta
  misc_feature (1)...(3152): n = A,T,C or G
tgcagcttaaaataatgccgaaaaggaagcgcttatctgcgggcagactgcccctgattctcttcctgtgccagatgattagtgcactggaagtacctcttgatcnnnnnnnnnnnnnnnnnnnnnnnnnnnnnnnnnnnnnnnnnnnnnnnnnnnnnnnnnnnnnnnnnnnnnnnnnnnnnnnnnnnnnnnnnnnnnnnnnnnnnnnnnnnnnnnnnnnnnnnnnnnnnnnnnnnnnnnnnnnnnnnnnnnnnnnnnnnnnnnnnnnnnnnnnnnnnnnnnnnnnnnnnnnnnnnnnnnnnnnnnnnnnnnnnnnnnnnnnnnnnnnnnnnnnnnnnnnnnnnnnnnnnnnnnnnnnnnnnnnnnnnnnnnnnnnnnnnnnnnnnnnnnnnnnnnnnnnnnnnnnnnnnnnnnnnnnnnnnnnnnnnnnnnnnnnnnnnnnnnnnnnnnnnnnnnnnnnnnnnnnnnnnnnnnnnnnnnnnnnnnnnnnnnnnnnnnnnnnnnnnnnnnnnnnnnnnnnnnnnnnnnnnnnnnnnnnnnnnnnnnnnnnnnnnnnnnnnnnnnnnnnnnnnnnnnnnnnnnnnnnnnnnnnnnnnnnnnnnnnnnnnnnnnnnnnnnnnnnnnnnnnnnnnnnnnnnnnnnnnnnnnnnnnnnnnnnnnnnnnnnnnnnnnnnnnnnnnnnnnnnnnnnnnnnnnnnnnnnnnnnnnnnnnnnnnnnnnnnnnnnnnnnnnnnnnnnnnnnnnnnnnnnnnnnnnnnnnnnnnnnnnnnnnnnnnnnnnnnnnnnnnnnnnnnnnnnnnnnnnnnnnnnnnnnnnnnnnnnnnnnnnnnnnnnnnnnnnnnnnnnnnnnnnnnnnnnnnnnnnnnnnnnnnnnnnnnnnnnnnnnnnnnnnnnnnnnnnnnnnnnnnnnnnnnnnnnnnnnnnnnnnnnnnnnnnnnnnnnnnnnnnnnnnnnnnnnnnnnnnnnnnnnnnnnnnnnnnnnnnnnnnnnnnnnnnnnnnnnnnnnnnnnnnnnnnnnnnnnnnnnnnnnnnnnnnnnnnnnnnnnnnnnnnnnnnnnnnnnnnnnnnnnnnnnnnnnnnnnnnnnnnnnnnnnnnnnnnnnnnnnnnnnnnnnnnnnnnnnnnnnnnnnnnnnnnnnnnnnnnnnnnnnnnnnnnnnnnnnnnnnnnnnnnnnnnnnnnnnnnnnnnnnnnnnnnnnnnnnnnnnnnnnnnnnnnnnnnnnnnnnnnnnnnnnnnnnnnnnnnnnnnnnnnnnnnnnnnnnnnnnnnnnnnnnnnnnnnnnnnnnnnnnnnnnnnnnnnnnnnnnnnnnnnnnnnnnnnnnnnnnnnnnnnnnnnnnnnnnnnnnnnnnnnnnnnnnnnnnnnnnnnnnnnnnnnnnnnnnnnnnnnnnnnnnnnnnnnnnnnnnnnnnnnnnnnnnnnnnnnnnnnnnnnnnnnnnnnnnnnnnnnnnnnnnnnnnnnnnnnnnnnnnnnnnnnnnnnnnnnnnnnnnnnnnnnnnnnnnnnnnnnnnnnnnnnnnnnnnnnnnnnnnnnnnnnnnnnnnnnnnnnnnnnnnnnnnnnnnnnnnnnnnnnnnnnnnnnnnnnnnnnnnnnnnnnnnnnnnnnnnnnnnnnnnnnnnnnnnnnnnnnnnnnnnnnnnnnnnnnnnnnnnnnnnnnnnnnnnnnnnnnnnnnnnnnnnnnnnnnnnnnnnnnnnnnnnnnnnnnnnnnnnnnnnnnnnnnnnnnnnnnnnnnnnnnnnnnnnnnnnnnnnnnnnnnnnnnnnnnnnnnnnnnnnnnnnnnnnnnnnnnnnnnnnnnnnnnnnnnnnnnnnnnnnnnnnnnnnnnnnnnnnnnnnnnnnnnnnnnnnnnnnnnnnnnnnnnnnnnnnnnnnnnnnnnnnnnnnnnnnnnnnnnnnnnnnnnnnnnnnnnnnnnnnnnnnnnnnnnnnnnnnnnnnnnnnnnnnnnnnnnnnnnnnnnnnnnnnnnnnnnnnnnnnnnnnnnnnnnnnnnnnnnnnnnnnnnnnnnnnnnnnnnnnnnnnnnnnnnnnnnnnnnnnnnnnnnnnnnnnnnnnnnnnnnnnnnnnnnnnnnnnnnnnnnnnnnnnnnnnnnnnnnnnnnnnnnnnnnnnnnnnnnnnnnnnnnnnnnnnnnnnnnnnnnnnnnnnnnnnnnnnnnnnnnnnnnnnnnnnnnnnnnnnnnnnnnnnnnnnnnnnnnnnnnnnnnnnnnnnnnnnnnnnnnnnnnnnnnnnnnnnnnnnnnnnnnnnnnnnnnnnnnnnnnnnnnnnnnnnnnnnnnnnnnnnnnnnnnnnnnnnnnnnnnnnnnnnnnnnnnnnnnnnnnnnnnnnnnnnnnnnnnnnnnnnnnnnnnnnnnnnnnnnnnnnnnnnnnnnnnnnnnnnnnnnnnnnnnnnnnnnnnnnnnnnnnnnnnnnnnnnnnnnnnnnnnnnnnnnnnnnnnnnnnnnnnnnnnnnnnnnnnnnnnnnnnnnnnnnnnnnnnnnnnnnnnnnnnnnnnnnnnnnnnnnnnnnnnnnnnnnnnnnnnnnnnnnnnnnnnnnnnnnnnnnnnnnnnnnnnnnnnnnnnnnnnnnnnnnnnnnnnnnnnnnnnnnnnnnnnnnnnnnnnnnnnnnnnnnnnnnnnnnnnnnnnnnnnnnnnnnnnnnnnnnnnnnnnnnnnnnnnnnnnnnnnnnnnnnnnnnnnnnnnnnnnnnnnnnnnnnnnnnnnnnnnnnnnnnnnnnnnnnnnnnnnnnnnnnnnnnnnnnnnnnnnnnnnnnnnnnnnnnnnnnnnnnnnnnnnnnnnnnnnnnnnnnnnnnnnnnnnnnnnnnnnnnnnnnnnnnnnnnnnnnnnnnnnnnnnnnnnnnnnnnnnnnnnnnnnnnnnnnnnnnnnnnnnnnnnnnnnnnnnnnnnnnnnnnnnnnnnnnnnnnnnnnnnnnnnnnnnnnnnnnnnnnnnnnnnnnnnnnnnnnnnnnnnnnnnnnnnnnnnnnnnnnnnnnnnnnnnnnnnttaacagcacacatgaattaggccctctggtagatttaaaaattcctgccaacaagacacggtggactttaaaaaatttaaatttcagcactcgatataagttttatttctatgcacaaacatcagcaggatcaggaagtcaaattacagaggaagcagtaacaactatggatgaa

SEQ ID NO: 35616 - DNA, 1339 bp, Macaca Mulatta
  misc_feature (1)...(1339): n = A,T,C or G
ggtggtgggcgccccgtttgtgacaaatgcccggagtcctgggagctcgctgttacttgttttgtcacgatgtctacagcagaagaggccacaaaatgcattaaccacctgcacaagacggagctccacggaaagatgatctccgtggagaaagngccaaaaatgaacctgtgggaaagaaaacctctgacaaaagagacagtgacgggaaaaaggagaagtcgagcaacagtgacagnagatctgcaaaccttaagagggacgataaatgtgacagaaaagatgatgctaagaagggtgaagacggaagtggagaaaagagtaaggaccaagatgatcannnnnnnnnnnnnnnnnnnnnnnnnnnnnnnnnnnnnnnnnnnnnnnnnnnnnnnnnnnnnnnnnnnnnnnnnnnnnnnnnnnnnnnnnnnnnnnnnnnnnnnnnnnnnnnnnnnnnnnnnnnnnnnnnnnnnnnnnnnnnnnnnnnnnnnnnnnnnnnnnnnnnnnnnnnnnnnnnnnnnnnnnnnnnnnnnnnnnnnnnnnnnnnnnnnnnnnnnnnnnnnnnnnnnnnnnnnnnnnnnnnnnnnnnnnnnnnnnnnnnnnnnnnnnnnnnnnnnnnnnnnnnnnnnnnnnnnnnnnnnnnnnnnnnnnnnnnnnnnnnnnnnnnnnnnnnnnnnnnnnnnnnnnnnnnnnnnnnnnnnnnnnnnnnnnnnnnnnnnnnnnnnnnnnnnnnnnnnnnnnnnnnnnnnnnnnnnnnnnnnnnnnnnnnnnnnnnnnnnnnnnnnnnnnnnnnnnnnnnnnnnnnnnnnnnnnnnnnnnnnnnnnnnnnnnnnnnnnnnnnnnnnnnnnnnnnnnnnnnnnnnnnnnnnnnnnnnnnnnnnnnnnnnnnnnnnnnnnnnnnnnnnnnnnnnnnnnnnnnnnnnnnnnnnnnnnnnnnnnnnnnnnnnnnnnnnnnnnnnnnnnnnnnnnnnnnnnnnnnnnnnnnnnnnnnnnnnnnnnnnnnnnnnnnnnnnnnnnnnnnnnnnnnnnnnnnnnnnnnnnnnnnnnnnnnnnnnnnnnnnnnnnnnnnnnnnnnnnnnnnnnnnnnnnnnnnnnnnnnnnnnnnnnnnnnnnnnnnnnnnnnnnnnnnnnnnnnnnnnnnnnnnnnnnnnnnnnnnnnnnnnnnagacgtgactggggggaccatggccgaagagaggatgaccgggcatggcagggcacggctgacggtggcatgatggacagggatcacaagaggtggcaaggtgnaggtggtgagagaagcatgtccggtcactcggggcctggccacatgatgaaccgaggagggatgtcaggg

SEQ ID NO: 35617 - DNA, 3510 bp, Macaca Mulatta
  misc_feature (1)...(3510): n = A,T,C or G
ctccctggcattgggcagtgttacagtgcactcttctgaacctgaagtcagaattcctgagaataatcnnnnnnnnnnnnnnnnnnnnnnnnnnnnnnnnnnnnnnnnnnnnnnnnnnnnnnnnnnnnnnnnnnnnnnnnnnnnnnnnnnnnnnnnnnnnnnnnnnnnnnnnnnnnnnnnnnnnnnnnnnnnnnnnnnnnnnnnnnnnnnnnnnnnnnnnnnnnnnnnnnnnnnnnnnnnnnnnnnnnnnnnnnnnnnnnnnnnnnnnnnnnnnnnnnnnnnnnnnnnnnnnnnnnnnnnnnnnnnnnnnnnnnnnnnnnnngtgcctccatccaagcctacagttagcatctcctcctcttccaccattgggaaccgggcagtggtgacatgctcagaaaaagatggttccccaccttctgaatacacctggttcaaagatgggattgtgatgcctacgaattccaagagtacccgtgccttcagcaactgttcttatgtcctgaatcccacaacaggagagctggnnnnnnnnnnnnnnnnnnnnnnnnnnnnnnnnnnnnnnnnnnnnnnnnnnnnnnnnnnnnnnnnnnnnnnnnnnnnnnnnnnnnnnnnnnnnnnnnnnnnnnnnnnnnnnnnnnnnnnnnnnnnnnnnnnnnnnnnnnnnnnnnnnnnnnnnnnnnnnnnnnnnnnnnnnnnnnnnnnnnnnnnnnnnnnnnnnnnnnnnnnnnnnnnnnnnnnnnnnnnngacttcgagtaagaaggtgatttacagccagcctagtgctcgaagtgaagnnnnnnnnnnnnnnnnnnnnnnnnnnnnnnnnnnnnnnnnnnnnnnnnnnnnnnnnnnnnnnnnnnnnnnnnnnnnnnnnnnnnnnnnnnnnnnnnnnnnnnnnnnnnnnnnnnnnnnnnnnnnnnnnnnnnnnnnnnnnnnnnnnnnnnnnnnnnnnnnnnnnnnnnnnnnnnnnnnnnnnnnnnnnnnnnnnnnnnnnnnnnnnnnnnnnnnnnnnnnnnnnnnnnnnnnnnnnnnnnnnnnnnnnnnnnnnnnnnnnnnnnnnnnnnnnnnnnnnnnnnnnnnnnnnnnnnnnnnnnnnnnnnnnnnnnnnnnnnnnnnnnnnnnnnnnnnnnnnnnnnnnnnnnnnnnnnnnnnnnnnnnnnnnnnnnnnnnnnnnnnnnnnnnnnnnnnnnnnnnnnnnnnnnnnnnnnnnnnnnnnnnnnnnnnnnnnnnnnnnnnnnnnnnnnnnnnnnnnnnnnnnnnnnnnnnnnnnnnnnnnnnnnnnnnnnnnnnnnnnnnnnnnnnnnnnnnnnnnnnnnnnnnnnnnnnnnnnnnnnnnnnnnnnnnnnnnnnnnnnnnnnnnnnnnnnnnnnnnnnnnnnnnnnnnnnnnnnnnnnnnnnnnnnnnnnnnnnnnnnnnnnnnnnnnnnnnnnnnnnnnnnnnnnnnnnnnnnnnnnnnnnnnnnnnnnnnnnnnnnnnnnnnnnnnnnnnnnnnnnnnnnnnnnnnnnnnnnnnnnnnnnnnnnnnnnnnnnnnnnnnnnnnnnnnnnnnnnnnnnnnnnnnnnnnnnnnnnnnnnnnnnnnnnnnnnnnnnnnnnnnnnnnnnnnnnnnnnnnnnnnnnnnnnnnnnnnnnnnnnnnnnnnnnnnnnnnnnnnnnnnnnnnnnnnnnnnnnnnnnnnnnnnnnnnnnnnnnnnnnnnnnnnnnnnnnnnnnnnnnnnnnnnnnnnnnnnnnnnnnnnnnnnnnnnnnnnnnnnnnnnnnnnnnnnnnnnnnnnnnnnnnnnnnnnnnnnnnnnnnnnnnnnnnnnnnnnnnnnnnnnnnnnnnnnnnnnnnnnnnnnnnnnnnnnnnnnnnnnnnnnnnnnnnnnnnnnnnnnnnnnnnnnnnnnnnnnnnnnnnnnnnnnnnnnnnnnnnnnnnnnnnnnnnnnnnnnnnnnnnnnnnnnnnnnnnnnnnnnnnnnnnnnnnnnnnnnnnnnnnnnnnnnnnnnnnnnnnnnnnnnnnnnnnnnnnnnnnnnnnnnnnnnnnnnnnnnnnnnnnnnnnnnnnnnnnnnnnnnnnnnnnnnnnnnnnnnnnnnnnnnnnnnnnnnnnnnnnnnnnnnnnnnnnnnnnnnnnnnnnnnnnnnnnnnnnnnnnnnnnnnnnnnnnnnnnnnnnnnnnnnnnnnnnnnnnnnnnnnnnnnnnnnnnnnnnnnnnnnnnnnnnnnnnnnnnnnnnnnnnnnnnnnnnnnnnnnnnnnnnnnnnnnnnnnnnnnnnnnnnnnnnnnnnnnnnnnnnnnnnnnnnnnnnnnnnnnnnnnnnnnnnnnnnnnnnnnnnnnnnnnnnnnnnnnnnnnnnnnnnnnnnnnnnnnnnnnnnnnnnnnnnnnnnnnnnnnnnnnnnnnnnnnnnnnnnnnnnnnnnnnnnnnnnnnnnnnnnnnnnnnnnnnnnnnnnnnnnnnnnnnnnnnnnnnnnnnnnnnnnnnnnnnnnnnnnnnnnnnnnnnnnnnnnnnnnnnnnnnnnnnnnnnnnnnnnnnnnnnnnnnnnnnnnnnnnnnnnnnnnnnnnnnnnnnnnnnnnnnnnnnnnnnnnnnnnnnnnnnnnnnnnnnnnnnnnnnnnnnnnnnnnnnnnnnnnnnnnnnnnnnnnnnnnnnnnnnnnnnnnnnnnnnnnnnnnnnnnnnnnnnnnnnnnnnnnnnnnnnnnnnnnnnnnnnnnnnnnnnnnnnnnnnnnnnnnnnnnnnnnnnnnnnnnnnnnnnnnnnnnnnnnnnnnnnnnnnnnnnnnnnnnnnnnnnnnnnnnnnnnnnnnnnnnnnnnnnnnnnnnnnnnnnnnnnnnnnnnnnnnnnnnnnnnnnnnnnnnnnnnnnnnnnnnnnnnnnnnnnnnnnnnnnnnnnnnnnnnnnnnnnnnnnnnnnnnnnnnnnnnnnnnnnnnnnnnnnnnnnnnnnnnnnnnnnnnnnnnnnnnnnnnnnnnnnnnnnnnnnnnnnnnnnnnnnnnnnnnnnnnnnnnnnnnnnnnnnnnnnnnnnnnnnnnnnnnnnnnnnnnnngccattctcctgcctcagtctcctgagtagctgagactacaggcgcatgccaccatgcctggctaatttttgtatttttagtagagacagggtttcaccatgttggtccagctggtctcaaactcctgacctcttgatctacctgcctcggcctcccaaagtggtgggattacaggtgtgagccaccgtgcatagccaaggatgagatttttaaagtatgtttcagttctgtgtcatggttggaagagacagtagaagggatatggaaaaggtcatggggaagcagaggtgattcatggctctgtgaatttgaggtgaatggttccttgttgtctaggtcacttgtgaagaatatgagtcagttattaccagccttggaatttacttctatagcttacaacagaccttttgaactggaaaacaccttgtctgcattcactttaaaatgtcaaaactaatttttgtaataaatgtttatttttcacattga

SEQ ID NO: 35618 - DNA, 136 bp, Macaca Mulatta
gggtgcactatgtgtttgatacgaggatagctgcggattttagtatcctggagagccaaaaagaattcgtgcgtcgctatcgccagcacagtgaggaggagcgcaccctgcccatgctgacctctgcctgtcctgg

SEQ ID NO: 35619 - DNA, 1689 bp, Macaca Mulatta
  misc_feature (1)...(1689): n = A,T,C or G
gatgatgggaagctctcatttgaggaattccagaattactttgctgatggggttctcagcccgggggagctgcaggaactgttcagcggcattgatgggcatnnnnnnnnnnnnnnnnnnnnnnnnnnnnnnnngactacttcgcagagcacctgggtgtctaccggccggtgctggctgcattggaatcgctgaaccgtgcagtgctcgctgccatggatgccaccaagctgnnnnnnnnnnnnnnnnnnnnnnnnnnnnnnnnnnnnnnnnnnnnnnnnnnnnnnnnnnnnnnnnnnnnnnnnnnnnnnnnnnnnnnnnnnnnnnnnnnnnnnnnnnnnnnnnnnnnnnnnnnnnnnnnnnnnnnnnnnnnnnnnnnnnnnnnnnnnnnnnnnnnnnnnnnnnnnnnnnnnnnnnnnnnnnnnnnnnnnnnnnnnnnnnnnnnnnnnnnnnnnnnnnnnnnnnnnnnnnnnnnnnnnnnnnnnnnnnnnnnnnnnnnnnnnnnnnnnnnnnnnnnnnnnnnnnnnnnnnnnnnnnnnnnnnnnnnnnnnnnnnnnnnnnnnnnnnnnnnnnnnnnnnnnnnnnnnnnnnnnnnnnnnnnnnnnnnnnnnnnnnnnnnnnnnnnnnnnnnnnnnnnnnnnnnnnnnnnnnnnnnnnnnnnnnnnnnnnnnnnnnnnnnnnnnnnnnnnnnnnnnnnnnnnnnnnnnnnnnnnnnnnnnnnnncacatcctcgtggcccagaggcaggtccaggtggcagaggaaggcctgcaggacttccaccgagccctgcgctgctacgtggacttcacaggggcccagagccattgtctgcantgtgtctgcccagaacatgccggacggtgcctccttcaccctgtatgagttctggnnnnnnnnnnnnnnnnnnnnnnnnnnnnnnnnnnnnnnnnnnnnnnnnnnnnnnnnnnnnnnnnnnnnnnnnnnnnnnnnnnnnnnnnnnnnnnnnnnnnnnnnnnnnnnnnnnnnnnnnnnnnnnnnnnnnnnnnnnnnnnnnnnnnnnnnnnnnnnnnnnnnnnnnnnnnnnnnnnnnnnnnnnnnnnnnnnnnnnnnnnnnnnnnnnnnnnnnnnnnnnnnnnnnnnnnnnnnnnnnnnnnnnnnnnnnnnnnnnnnnnnnnnnnnnnnnnnnnnnnnnnnnnnnnnnnnnnnnnnnnnnnnnnnnnnnnnnnnnnnnnnnnnnnnnnnnnnnnnnnnnnnnnnnnnnnnnnnnnnnnnnnnnnnnnnnnnnntctgcctgactcaggagacctggattctggtnnnnnnnnnnnnncctggctgagcgacccagggcaggttctgtccctgtgtgggtgggccttgggccatctggctgcctagcaagggtcctggtttcttcccgctgtcttggggccaggcttctgctccttcccagctagcagaaaaaacagggctgatgctcagggacccaacccctcaaaccttgcccctgaggctgggctggacctgggtgcccctgttgccctcccaggccactaggctctgactcttccagcacccatggatgtgccagaggcctctgggttggtttgcatgccattttcttatcatttgcatgccctcaccccacccattctcagggcactatgggaagccccaaggtgacctggccaagtagcaataatttgg

SEQ ID NO: 35620 - DNA, 801 bp, Macaca Mulatta
  misc_feature (1)...(801): n = A,T,C or G
ctaagcccaaaaacagtgtatggaagaggcttaaatcaccattccggaagaagaaagattcagtaacttgaagagaagatgggaagtgtttatctgtgaactgcagtgctgtatcaaagcagtccagtaacctgcagtactgagcatggtgcttgctctttctcctaactgataagagggacatgcctactaggagtttttagtgatgtggtatttgaagtattgtctcttagttaagtatgatttattaacccagtggagcactgtctgcttttaaatcgtcacattagaatttgatctaccaatgttttgggttctgttgcgctgatattaattaatgtaaatttgtttatacccaggagaatatgtataccatgtgtgtttgactaagttcacaagggaagtttttggctctgcactccacattatccttcaatttcaatttcctgggactatcccagagaaagacctcagtctcttctattcacattatgcttcctagagactgaacaaaagtcatgtagggaaattggggctaaggagatcaatgccagatttcagcagatacctgtggggctgacacctgttgcagactatggagtggtgagatttggggaagttgggctctatgtttgcagaaaggtaggttcagaacaatattctcaatacaagcttggctttcctaagaagtacacatttggcccaaatgcaccgggatgagtgagaacagccagaagcatataanatgtgatgaaggtttctcccgggaaccttattttacacttcatttcagggttttct

SEQ ID NO: 35621 - DNA, 1891 bp, Macaca Mulatta
  misc_feature (1)...(1891): n = A,T,C or G
tgtccatgccacaaatgacagccacagactctagagggaggtccataccactaatgagggcctcaggccccagaacaatgtccacaccacagacagcctttggagtgatgtccactctggaaaccaaagccacagactctggagaggcgtccatctctcacagtaacatcacagcctctggatcaaagcccacaccgcacatgactgccacaactcctgaaactacgaaaccaccaccaaaggaagtgccatccttcggaatgttgaccccagcactctgttacctcttagaagagcaggaagcagcccggggctcatgctctgtggaggaagagatggagattgatgaggagaagcaaatgaaggggtttttnnnnnnnnnnnnnnnnnnnnnnnnnnnnnnnnnnnnnnnnnnnnnnnnnnnnnnnnnnnnnnnnnnnnnnnnnnnnnnnnnnnnnnnnnnnnnnnnnnnnnnnnnnnnnnnnnnnnnnnnnnnnnnnnnnnnnnnnnnnnnnnnnnnnnnnnnnnnnnnnnnnnnnnnnnnnnnnnnnnnnnnnnnnnnnnnnnnnnnnnnnnnnnnnnnnnnnnnnnnnnnnnnnnnnnnnnnnnnnnnnnnnnnnnnnnnnnnnnnnnnnnnnnnnnnnnnnnnnnnnnnnnnnnnnnnnnnnnnnnnnnnnnnnnnnnnnnnnnnnnnnnnnnnnnnnnnnnnnnnnnnnnnnnnnnnnnnnnnnnnnnnnnnnnnnnnnnnnnnnnnnnnnnnnnnnnnnnnnnnnnnnnnnnnnnnnnnnnnnnnnnnnnnnnnnnnnnnnnnnnnnnnnnnnnnnnnnnnnnnnnnnnnnnnnnnnnnnnnnnnnnnnnnnnnnnnnnnnnnnnnnnnnnnnnnnnnnnnnnnnnnnnnnnnnnnnnnnnnnnnnnnnnnnnnnnnnnnnnnnnnnnnnnnnnnnnnnnnnnnnnnnnnnnnnnnnnnnnnnnncatcagaaggcccataccaacaagtaaaactccatggaatcttctcctgtgatatctgactcgactgctaactggaggactggttcctggacccattccattcaactacatcataaaccttgttgccttcacccttcagcctcctgctccaggcacatcccaccttacctctcacttggctgatttgaccttctctttcacccacatgcctatgacctgccctgacaatcagagtgtggaccacaggagtgtatggtgtatgaagttttgaactcccatcaccaccgaggccagtactagttcttggtccagggagaagtctaggcaggataaatcatatcttacctcaacaccccttagtgtatcttgccatgtatcagcaggcaaacttgaggaagccctggttctatttcacctggcaggggagcctataaggagagtgatgcccactcctataccaccctagtaacccagtagacttgccctgtatgccccaactcatagcacctaaaatgggtctccagggtccttgccctgtttatagtatccatcctgaaccattcgttttgacccataataataattatagtgatagtatgatggctaccagttattgataatgtatctatcatgtgacaggcattgggctaaactcttgacaagcaccatctcactacattcttacagtaacacaacttgttcttgtgttgtcagcttctgacctcttgatctgttgtttctggcctttgttgtgtccctcagtgcgcgttctccagctctgacctctgggtgaccccctcagttgttgattgctctcactccccttggctgttgtgcttcatggccagcactcttgatgagggtcttggtctataaacaggcatagatagttagaacataatgtgagcagtgtttgcc

SEQ ID NO: 35622 - DNA, 472 bp, Macaca Mulatta
tctctctctgcccctcagggaaaagtatgtcctggagctgcagagcccacgctacacccgcttccgggactggcaccaccagcgctctgcccacgtgctcaacgtgcagtcgtagcccggccctctccagccggctgccctctctgcctccctttttctgttcctcctgcccagggcacccccttagtgcctccagcttctgcctacctcaccccccactttcctgcccatgacctgagcctcctgctggcctggccctggccgcacaactgggttcatctgacactgccttacctctttgccctgtggtactgctgtctgccaggtctgtgctgccttgggcctggaaataaacattctcagccctgcttgctctgcctctgttttctatctttgtgcacctggtttgcatttggggtgtgggggtgtttcgaggtttggactcagtttgggccctgccgtcctcgttttc

SEQ ID NO: 35623 - DNA, 243 bp, Macaca Mulatta
aggagcgggctgcagccccacctttccagccctgggcatcgggatggactcttgcgtcatccccctgaggcacgggggcctgtcactggtgcagaccacggacttcttttaccccttggtggaagatccctacatgatggggcgcatagcttgagccaacgtgctgagtgacctctacgccatggggattactgagtgtgacaacatgttgatgatactcagcgtcagccagagtatgagtga

SEQ ID NO: 35624 - DNA, 4050 bp, Macaca Mulatta
  misc_feature (1)...(4050): n = A,T,C or G
gaagaagcgcacgctgaaggggtccattgagctgtcccgaatcaaatgtgtcgagattgtgaaaagtgacatcagcatcccatgccactataaatacccgtttcaggnntgcatgacaactacctcctgtatgtgtttgctccagatcgtgagagccggcagcgctgggtgctggcccttaaagaannnnnnnnnnnnnnnnnnnnnnnnnnnnnnnnnnnnnnnnnnnnnnnnnnnnnnnnnnnnnnnnnnnnnnnnnnnnnnnnnnnnnnnnnnnnnnnnnnnnnnnnnnnnnnnnnnnnnnnnnnnnnnnnnnnnnnnnnnnnnnnnnnnnnnnnnnnnnnnnnnnnnnnnnnnnnnnnnnnnnnnnnnnnnnnnnnnnnnnnnnnnnnnnnnnnnnnnnnnnnnnnnnnnnnnnnnnnnnnnnnnnnnnnnnnnnnnnnnnnnnnnnnnnnnnnnnnnnnnnnnnnnnnnnnnnnnnnnnnnnnnnnnnnnnnnnnnnnnnnnnnnnnnnnnnnnnnnnnnnnnnnnnnnnnnnnnnnnnnnnnnnnnnnnnnnnnnnnnnnnnnnnnnnnnnnnnnnnnnnnnnnnnnnnnnnnnnnnnnnnnnnnnnnnnnnnnnnnnnnnnnnnnnnnnnnnnnnnnnnnnnnnnnnnnnnnnnnnnnnnnnnnnnnnnnnnnnnnnnnnnnnnnnnnnnnnnnnnnnnnnnnnnnnnnnnnnnnnnnnnnnnnnnnnnnnnnnnnnnnnnnnnnnnnnnnnnnnnnnnnnnnnnnnnnnnnnnnnnnnnnnnnnnnnnnnnnnnnnnnnnnnnnnnnnnnnnnnnnnnnnnnnnnnnnnnnnnnnnnnnnnnnnnnnnnnnnnnnnnnnnnnnnnnnnnnnnnnnnnnnnnnnnnnnnnnnnnnnnnnnnnnnnnnnnnnnnnnnnnnnnnnnnnnnnnnnnnnnnnnnnnnnnnnnnnnnnnnnnnnnnnnnnnnnnnnnnnnnnnnnnnnnnnnnnnnnnnnnnnnnnnnnnnnnnnnnnnnnnnnnnnnnnnnnnnnnnnnnnnnnnnnnnnnnnnnnnnnnnnnnnnnnnnnnnnnnnnnnnnnnnnnnnnnnnnnnnnnnnnnnnnnnnnnnnnnnnnnnnnnnnnnnnnnnnnnnnnnnnnnnnnnnnnnnnnnnnnnnnnnnnnnnnnnnnnnnnnnnnnnnnnnnnnnnnnnnnnnnnnnnnnnnnnnnnnnnnnnnnnnnnnnnnnnnnnnnnnnnnnnnnnnnnnnnnnnnnnnnnnnnnnnnnnnnnnnnnnnnnnnnnnnnnnnnnnnnnnnnnnnnnnnnnnnnnnnnnnnnnnnnnnnnnnnnnnnnnnnnnnnnnnnnnnnnnnnnnnnnnnnnnnnnnnnnnnnnnnnnnnnnnnnnnnnnnnnnnnnnnnnnnnnnnnnnnnnnnnnnnnnnnnnnnnnnnnnnnnnnnnnnnnnnnnnnnnnnnnnnnnnnnnnnnnnnnnnnnnnnnnnnnnnnnnnnnnnnnnnnnnnnnnnnnnnnnnnnnnnnnnnnnnnnnnnnnnnnnnnnnnnnnnnnnnnnnnnnnnnnnnnnnnnnnnnnnnnnnnnnnnnnnnnnnnnnnnnnnnnnnnnnnnnnnnnnnnnnnnnnnnnnnnnnnnnnnnnnnnnnnnnnnnngagaccagaagatcggccagccttctccagactgctgcgtcaactggctgaaattgcagaatcgggactttagtagagactgagtaccaggccacgggctgcagatcctgaacggaggaaggatatgtcctccttccatagagcattagaagctgccaccaacccaggaccctccagaggcagcctggcctgtggcatcagtccctgagtcaccatggaagcagcatcctgaccacagctggcagtcaagccacagctggagggtcagccaccaagctgggagccaggccagaacagaaatgacgtctctgccctccctctagcctcttgtcacatgtggtgcacaaacctcaacctgacagctttcaggcagcattcttgcacttcttagtaatagagagagacatgagtaagacccagattggtatttttattgttatttttaacatgaatctaaagtttatggttccagggactttttatttgacccaacaacacagtatcccaggatatggaggcaaggggaacaaagagcatgactctttttctaagaaaactggtgagttaactaaggttagagtgagtgtgctctgttgctgtgatgctgtcagccacagcttcctgctgtagagaatgnnnnnnnnnnnnnnnnnnnnnnnnnnnnnnnnnnnnnnnnnnnnnnnnnnnnnnnnnnnnnnnnnnnnnnnnnnnnnnnnnnnnnnnnnnnnnnnnnnnnnnnnnnnnnnnnnnnnnnnnnnnnnnnnnnnnnnnnnnnnnnnnnnnnnnnnnnnnnnnnnnnnnnnnnnnnnnnnnnnnnnnnnnnnnnnnnnnnnnnnnnnnnnnnnnnnnnnnnnnnnnnnnnnnnnnnnnnnnnnnnnnnnnnnnnnnnnnnnnnnnnnnnnnnnnnnnnnnnnnnnnnnnnnnnnnnnnnnnnnnnnnnnnnnnnnnnnnnnnnnnnnnnnnnnnnnnnnnnnnnnnnnnnnnnnnnnnnnnnnnnnnnnnnnnnnnnnnnnnnnnnnnnnnnnnnnnnnnnnnnnnnnnnnnnnnnnnnnnnnnnnnnnnnnnnnnnnnnnnnnnnnnnnnnnnnnnnnnnnnnnnnnnnnnnnnnnnnnnnnnnnnnnnnnnnnnnnnnnnnnnnnnnnnnnnnnnnnnnnnnnnnnnnnnnnnnnnnnnnnnnnnnnnnnnnnnnnnnnnnnnnnnnnnnnnnnnnnnnnnnnnnnnnnnnnnnnnnnnnnnnnnnnnnnnnnnnnnnnnnnnnnnnnnnnnnnnnnnnnnnnnnnnnnnnnnnnnnnnnnnnnnnnnnnnnnnnnnnnnnnnnnnnnnnnnnnnnnnnnnnnnnnnnnnnnnnnnnnnnnnnnnnnnnnnnnnnnnnnnnnnnnnnnnnnnnnnnnnnnnnnnnnnnnnnnnnnnnnnnnnnnnnnnnnnnnnnnnnnnnnnnnnnnnnnnnnnnnnnnnnnnnnnnnnnnnnnnnnnnnnnnnnnnnnnnnnnnnnnnnnnnnnnnnnnnnnnnnnnnnnnnnnnnnnnnnnnnnnnnnnnnnnnnnnnnnnnnnatggaaagtcagtaaagaagtaaatatagaaccactagcgatagtgttgctctggcacagaccactgtggttgatggcatggccctccaacttggaataggattttccttttcctactctgtatccttaccttggtcatgttaataactttggagttattcagttaatgaaccctttaattctcacaacccaccagtcatgttgcttgaagccatttatagacgagcttcaaagcaactttagaagattcttctgtagaagtatgagtccttcctttaattatcattccaactttcagctgtagtctccttgaatacttcatgaggagggacattccctgatatgagaggatgatgttgcaattggctctttctaaatcatgtgacattttgactgacttgagattcagatgcataacttttaattataattattgtgaagtggagagcctcaagataaaactctgtcattcagaagatgattttactcagcttatccaaaattatctctgtttcctttttagaattttgtacgttatcttttggaacccttaattagagatgatttctggaacattcagtctagaaagaaaacattggaactgactgatctctgtggtttggtttagaaaattcccctgtgcatggtattatctttttcaagctcagattcatcaaagccttaactgaacatgtgtagatacttcacctcccggtgtcctatcccgcaaaatgggcttcctgcctggtttttctcgtctcacgttttgtaaatggtcaagggtgtttgtagagaagtcccttatgcagagttttggttatggttttattttgtagattttgcattttg

SEQ ID NO: 35625 - DNA, 598 bp, Macaca Mulatta
tatttagaagaggagctcttcaattctgaattctgtctgccacttataagcagaaggaagtttttttctttcattattttagcaactatcagtattagaaatgcctactcttcagagatgtaataggaataaattgtaaagtacttttgatgttctaagatgaaagatggtattacacagtcaataattcaatgctttccactttatgaattttgtcaaaattatatagagagctgttagttcagtccaacaacaaaacaggcttatataaaaacaaaaacctcctgggtcatgccatcctacaccaaatccctgttaaacagaggcatgatttattccagtgaccttgctatttctccataactgcaatatgtctaatgttagacattttaaattaatattctattaggtaaactgagaatttaggtctctcgcaccacccaggcacatactcttatctttctccacaaacatccaactatggtaatgtaactggattaatatgttcatatgactatataattgttcacagctgagccacttaggtactataatttgatacacaaattttgttttactgtgattaaaattgcctgat

SEQ ID NO: 35626 - DNA, 616 bp, Macaca Mulatta
catcttcattcattgtgcttcaacgcaatgcgttggttcaggtattcagtagtttggtgcactttatatagtttgtatttattaactgtttgagaatagcaccattagtggggagattatctgttaacgaatatggagggaccggtattaatcctgattttctttccccgtttttctttttcagtgaatcatctacagcctctgccctggtcgcataaatttgtctgtgtactcaagcaataaaatgattgtttaactaaaagcatgttttatgtttattttcctagaagaaaaatgtatatatatcagtggttcatatgtgttgatcttgtttgatggggaagtgttttaggtgactgatgttaggattccagggagcagtaagatagtgtacatcacatcccttcattggccccttaaaccagttgagcagcttataacctcataggtggttgccttaaatatggagaactggaagacactaggaaataatgcctttgtgtttgttttggtgtcatggcaaaaatgtttctaagtttttttgatacatttaatgttaaagacagatagatctctggcagatgttaaccactggtagcatcagaaatagtaatat

SEQ ID NO: 35627 - DNA, 1544 bp, Macaca Mulatta
  misc_feature (1)...(1544): n = A,T,C or G
tttgggaggtcatcagtgatgaacatgggattgaccccactggcagttaccatggagacagtgatttgcagctggagagaatcaatgtttactacaacgaagccactggtaanggtaacaaatatgttccgcgggccatccttgtggatctggagccaggcacgatggattcggttaggtctggaccattcggccagatcttcagaccagacaatttcgtgtttggnnnnnnnnnnnnnnnnnnnnnnnnnnnnnnnnnnnnnnnnnnnnnnnnnnnnnnnnnnnnnnnnnnnnnnnnnnnnnnnnnnnnnnnnnnnnnnnnnnnnnnnnnnnnnnnnnnnnnnnnnnnnnnnnnnnnnnnnnnnnnnnnnnnnnnnnnnnnnnnnnnnnnnnnnnnnnnnnnnnnnnnnnnnnnnnnnnnnnnnnnnnnnnnnnnnnnnnnnnnnnnnnnnnnnnnnnnnnnnnnnnnnnnnnnnnnnnnnnnnnnnnnnnnnnnnnnnnnnnnnnnnnnnnnnnnnnnnnnnnnnnnnnnnnnnnnnnnnnnnnnnnnnnnnnnnnnnnnnnnnnnnnnnnnnnnnnnnnnnnnnnnnnnnnnnnnnnnnnnnnnnnnnnnnnnnnnnnnnnnnnnnnnnnnnnnnnnnnnnnnnnnnnnnnnnnnnnnnnnnnnnnnnnnnnnnnnnnnnnnnnnnnnnnnnnnnnnnnnnnnnnnnnnnnnnnnnnnnnnnnnnnnnnnnnnnnnnnnnnnnnnnnnnnnnnnnnnnnnnnnnnnnnnnnngggcagccagcagtaccgcgcgctcacggtgcccgagctcacccagcagatgttcgactccaagaacatgatggccgcctgcgacccgcgccacggccgctacctgacggtggctgccatcttccggggccgcatgtccatgaaggaggtggacgagcagatgctcaacgtgcagaacaagaacagcagctacttcgtggagtggatccccaacaacgtgaagacggccgtgtgcgacatcccgccccgcggcctgaagatgtcggccaccttcatcggcaacagcacggccatccaggagctgttcaagcgcatctcggagcagttcacggccatgttccggcgcaaggccttcctgcactggtacacgggcgagggcatggacgagatggagttcaccgaggccgagagcaacatgaacgacctggtgtctgagtaccagcagtaccaggacgccacggccgacgaacagggggagttcgaggaggaggagggcgaggacgaggcgtaggtgccccgcgaggcggaggcgggttaggggaagcggaggaggaaagcgagggggtggggggcttcccgggacggtaccctggcagtcgaaggaaagaagcatggtctactttaggtgtgcgctgggtctctggtgctcttcactgttgcctgtcannnnnnnnnnnnnnnnngtaatattgatgacatcaatgtaacatttgagatatttctgaattactgttgtaatggctaaaatcacataaacgtttgtgtcgga

SEQ ID NO: 35628 - DNA, 719 bp, Macaca Mulatta
agcacgtctgacagcccgcagcgcacgccgccgggcactcaaggcccgctccaagtcctgccacaatctggccgtgctctgaagcctcccgcccttctgagagttggcgggtcgctgagttgccttatgggttccacggacgccactgcgggacaaaggcgccgttacctggagtctgcatcatgtgtcttgcttgcctgctgccctgatggcctgagcatcccccagatccaagcctgggggaccccgggaaagcgatgaacagacagacgacggggccgaagccccaagctgggcacaaagtagttttttacgtggtgggtgtctttttgtaaaaaatcttccttgtccctgggctctggccaaccctcagaaaccctcacaataaaccagaccagaaggatgtcccgtctgaatgcccagacatctctgtctcggctcttccaggcgtctccacctactgccctcccatctacacttgactgtagactgactggtttagcctgccggctgggcgtcagggccaatcaataaagtacttggaccaattttgtgctcaggcccttctcccgacagtggatcacaaccacagtttcgtgaccagctactttctcattaacccattttttacgttctagattcacatgtctggaaggacctcagtactcatcctggcaatagaattgctggcgtttgttgggagctggataataagctgt

SEQ ID NO: 35629 - DNA, 148 bp, Macaca Mulatta
gagcccatggccacagagtgtgaccacatccagatcacggcattgtcccaggccctgagcatcgccctgcaggtggaatacgtggacgagatggataccgccctgaaccacgacatttccctgaggccgccaccccttcggattacct

SEQ ID NO: 35630 - DNA, 1272 bp, Macaca Mulatta
  misc_feature (1)...(1272): n = A,T,C or G
cgggagggtggaggtggatgtagctcaccgccacgctaccacagaagagcgaaagctgctttctcagccaccggagagcacgaannnnnnnnnnnnnnnnnnnnnnnnnnnnnnnnnnnnnnnnnnnnnnnnnnnnnnnnnnnnnnnnnnnnnnnnnnnnnnnnnnnnnnnnnnnnnnnnnnnnnnnnnnnnnnnnnnnnnnnnnnnnnnnnnnnnnnnnnnnnnnnnnnnnnnnnnnnnnnnnnnnnnnnnnnnnnnnnnnnnnnnnnnnnnnnnnnnnnnnnnnnnnnnnnnnnnnnnnnnnnnnnnnnnnnnnnnnnnnnnnnnnnnnnnnnnnnnnnnnnnnnnnnnnnnnnnnnnnnnnnnnnnnnnnnnnnnnnnnnnnnnnnnnnnnnnnnnnnnnnnnnnnnnnnnnnnnnnnnnnnnnnnnnnnnnnnnnnnnnnnnnnnnnnnnnnnnnnnnnnnnnnnnnnnnnnnnnnnnnnnnnnnnnnnnnnnnnnnnnnnnnnnnnnnnnnnnnnnnnnnnnnnnnnnnnnnnnnnnnnnnnnnnnnnnnnnnnnnnnnnnnnnnnnnnnnnnnnnnnnnnnnnnnnnnnnnnnnnnnnnnnnnnnnnnnnnnnnnnnnnatggcagaagcttctgcagatgcctcaactctgcctgtaacagtgaagaaaaagaaaagcctatccattgaggaaaagatcgacatcataaatgcagtggaaagtggcaagaaaaaagcagagattgctgctgaatatggaataaagaaaaattcattgtcttctattatgaagaataaagacaaagttctagaagcctttgaatctctaagatntgatccaaagagaaaaagactgagaactgcttnttatacagatctggaagaggcattaatgagatggtatcgaattgctcagtgtctaaatgtaccagttaatggtccgatgttacgtctgaaagctaatgattttgcccagaaactgggccataatgatnttaagtgcagtaatggttggctggatcgttttaaatccaggtatggtttagtattcagagctcaacctgtagaagctacaggtgtatcagtagacccttcgactgtctggtaccaaaatgtacttccttattatttaaatgattatcatcctaaaaatgtttttaatataaaagagactggactgctttatcgaatgttacctaccaatacatttgcatttaaaggtgaaacgtgatcagttggaaagttatgcaaagacagagataactc

SEQ ID NO: 35631 - DNA, 11467 bp, Macaca Mulatta
  misc_feature (1)...(11467): n = A,T,C or G
ggatgagcaattcttaggttttggctcagatgaagaagtcagagtgcgaagtcccacaaggtctccttcagnnnnnnnnnnnnnnnnnnnnnnnnnnnnnnnnnnnnnnnnnnnnnnnnnnnnnnnnnnnnnnnnnnnnnnnnnnnnnnnnnnnnnnnnnnnnnnnnnnnnnnnnnnnnnnnnnnnnnnnnnnnnnnnnnnnnnnnnnnnnnnnnnnnnnnnnnnnnnnnnnnnnnnnnnnnnnnnnnnnnnnnnnnnnnnnnnnnnnnnnnnnnnnnnnnnnnnnnnnnnnnnnnnnnnnnnnnnnnnnnnnnnnnnnnnnnnnnnnnnnnnnnnnnnnnnnnnnnnnnnnnnnnnnnnnnnnnnnnnnnnnnnnnnnnnnnnnnnnnnnnnnnnnnnnnnnnnnnnnnnnnnnnnnnnnnnnnnnnnnnnnnnnnnnnnnnnnnnnnnnnnnnnnnnnnnnnnnnnnnnnnnnnnnnnnnnnnnnnnnnnnnnnnnnnnnnnnnnnnnnnnnnnnnnnnnnnnnnnnnnnnnnnnnnnnnnnnnnnnnnnnnnnnnnnnnnnnnnnnnnnnnnnnnnnnnnnnnnnnnnnnnnnnnnnnnnnnnnnnnnnnnnnnnnnnnnnnnnnnnnnnnnnnnnnnnnnnnnnnnnnnnnnnnnnnnnnnnnnnnnnnnnnnnnnnnnnnnnnnnnnnnnnnnnnnnnnnnnnnnnnnnnnnnnnnnnnnnnnnnnnnnnnnnnnnnnnnnnnnnnnnnnnnnnnnnnnnnnnnnnnnnnnnnnnnnnnnnnnnnnnnnnnnnnnnnnnnnnnnnnnnnnnnnnnnnnnnnnnnnnnnnnnnnnnnnnnnncggtttaagaggatgaggattatgaccctctaattaaaattgcccgattagagtctacaccgaatagtcttttcagtgccccgtcctgtggatcttctgaaaaatcaagtgcagcttctcagcactcctctcaaatgtcttcagactcctcccgatctagtagccccagtgttgatacctccacagactctcaggcttctgaggagattcaggtacttcctgaggagcggagcgatacccctgaagttcacactccactgcccatttcccagtccccagaaaatgagagtaacgataggagaagcagaaggtattcagtgtcggagagaagttttggatccagaacgacgaaaaaattaactctacaaagtgccccccagcagcagacctcctcgtctccacctccacctctgctgactccacccccaccactgcagccagcctccagtatctctgaccacacaccttggcttatgcctccaacaatccccttagcatcaccatttttgcctgcttccactgctcctatgcaagggaagcgaaaatctattttgcgagaaccgacattnnnnnnnnnnnnnnnnnnnnnnnnnnnnnnnnnnnnnnnnnnnnnnnnnnnnnnnnnnnnnnnnnnnnnnnnnnnnnnnnnnnnnnnnnnnnnnnnnnnnnnnnnnnnnnnnnnnnnnnnnnnnnnnnnnnnnnnnnnnnnnnnnnnnnnnnnnnnnnnnnnnnnnnnnnnnnnnnnnnnnnnnnnnnnnnnnnnnnnnnnnnnnnnnnnnnnnnnnnnnnnnnnnnnnnnnnnnnnnnnnnnnnnnnnnnnnnnnnnnnnnnnnnnnnnnnnnnnnnnnnnnnnnnnnnnnnnnnnnnnnnnnnnnnnnnnnnnnnnnnnnnnnnnnnnnnnnnnnnnnnnnnnnnnnnnnnnnnnnnnnnnnnnnnnnnnnnnnnnnnnnnnnnnnnnnnnnnnnnnnnnnnnnnnnnnnnnnnnnnnnnnnnnnnnnnnnnnnnnnnnnnnnnnnnnnnnnnnnnnnnnnnnnnnnnnnnnnnnnnnnnnnnnnnnnnnnnnnnnnnnnnnnnnnnnnnnnnnnnnnnnnnnnnnnnnnnnnnnnnnnnnnnnnnnnnnnnnnnnnnnnnnnnnnnnnnnnnnnnnnnnnnnnnnnnnnnnnnnnnnnnnnnnnnnnnnnnnnnnnnnnnnnnnnnnnnnnnnnnnnnnnnnnnnnnnnnnnnnnnnnnnnnnnnnnnnnnnnnnnnnnnnnnnnnnnnnnnnnnnnnnnnnnnnnnnnnnnnnnnnnnnnnnnnnnnnnnnnnnnnnnnnnnnnnnnnnnnnnnnnnnnnnnnnnnnnnnnnnnnnnnnnnnnnnnnnnnnnnnnnnnnnnnnnnnnnnnnnnnnnnnnnnnnnnnnnnnnnnnnnnnnnnnnnnnnnnnnnnnnnnnnnnnnnnnnnnnnnnnnnnnnnnnnnnnnnnnnnnnnnnnnnnnnnnnnnnnnnnnnnnnnnnnnnnnnnnnnnnnnnnnnnnnnnnnnnnnnnnnnnnnnnnnnnnnnnnnnnnnnnnnnnnnnnnnnnnnnnnnnnnnnnnnnnnnnnnnnnnnnnnnnnnnnnnnnnnnnnnnnnnnnnnnnnnnnnnnnnnnnnnnnnnnnnnnnnnnnnnnnnnnnnnnnnnnnnnnnnnnnnnnnnnnnnnnnnnnnnnnnnnnnnnnnnnnnnnnnnnnnnnnnnnnnnnnnnnnnnnnnnnnnnnnnnnnnnnnnnnnnnnnnnnnnnnnnnnnnnnnnnnnnnnnnnnnnnnnnnnnnnnnnnnnnnnnnnnnnnnnnnnnnnnnnnnnnnnnnnnnnnnnnnnnnnnnnnnnnnnnnnnnnnnnnnnnnnnnnnnnnnnnnnnnnnnnnnnnnnnnnnnnnnnnnnnnnnnnnnnnnnnnnnnnnnnnnnnnnnnnnnnnnnnnnnnnnnnnnnnnnnnnnnnnnnnnnnnnnnnnnnnnnnnnnnnnnnnnnnnnnnnnnnnnnnnnnnnnnnnnnnnnnnnnnnnnnnnnnnnnnnnnnnnnnnnnnnnnnnnnnnnnnnnnnnnnnnnnnnnnnnnnnnnnnnnnnnnnnnnnnnnnnnnnnnnnnnnnnnnnnnnnnnnnnnnnnnnnnnnnnnnnnnnnnnnnnnnnnnnnnnnnnnnnnnnnnnnnnnnnnnnnnnnnnnnnnnnnnnnnnnnnnnnnnnnnnnnnnnnnnnnnnnnnnnnnnnnnnnnnnnnnnnnnnnnnnnnnnnnnnnnnnnnnnnnnnnnnnnnnnnnnnnnnnnnnnnnnnnnnnatgagaaaatgtcagaatctacaatggatgccttccaaagcctacctgcagaagcaagctaaagnnnnnnnnnnnnnnnnnnnnnnnnnnnnnnnnnnnnnnnnnnnnnnnnnnnnnnnnnnnnnnnnnnnnnnnnnnnnnnnnnnnnnnnnnnnnnnnnnnnnnnnnnnnnnnnnnnnnnnnnnnnnnnnnnnnnnnnnnnnnnnnnnnnnnnnnnnnnnnnnnnnnnnnnnnnnnnnnnnnnnnnnnnnnnnnnnnnnnnnnnnnnnnnnnnnnnnnnnnnnnnnnnnnnnnnnnnnnnnnnnnnnnnnnnnnnnnnnnnnnnnnnnnnnnnnnnnnnnnnnnnnnnnnnnnnnnnnnnnnnnnnnnnnnnnnnnnnnnnnnnnnnnnnnnnnnnnnnnnnnnnnnnnnnnnnnnnnnnnnnnnnnnnnnnnnnnnnnnnnnnnnnnnnnnnnnnnnnnnnnnnnnnnnnnnnnnnnnnnnnnnnnnnnnnnnnnnnnnnnnnnnnnnnnnnnnnnnnnnnnnnnnnnnnnnnnnnnnnnnnnnnnnnnnnnnnnnnnnnnnnnnnnnnnnnnnnnnnnnnnnnnnnnnnnnnnnnnnnnnnnnnnnnnnnnnnnnnnnnnnnnnnnnnnnnnnnnnnnnnnnnnnnnnnnnnnnnnnnnnnnnnnnnnnnnnnnnnnnnnnnnnnnnnnnnnnnnnnnnnnnnnnnnnnnnnnnnnnnnnnnnnnnnnnnnnnnnnnnnnnnnnnnnnnnnnnnnnnnnnnnnnnnnnnnnnnnnnnnnnnnnnnnnnnnnnnnnnnnnnnnnnnnnnnnnnnnnnnnnnnnnnnnnnnnnnnnnnnnnnnnnnnnnnnnnnnnnnnnnnnnnnnnnnnnnnnnnnnnnnnnnnnnnnnnnnnnnnnnnnnnnnnnnnnnnnnnnnnnnnnnnnnnnnnnnnnnnnnnnnnnnnnnnnnnnnnnnnnnnnnnnnnnnnnnnnnnnnnnnnnnnnnnnnnnnnnnnnnnnnnnnnnnnnnnnnnnnnnnnnnnnnnnnnnnnnnnnnnnnnnnnnnnnnnnnnnnnnnnnnnnnnnnnnnnnnnnnnnnnnnnnnnnnnnnnnnnnnnnnnnnnnnnnnnnnnnnnnnnnnnnnnnnnnnnnnnnnnnnnnnnnnnnnnnnnnnnnnnnnnnnnnnnnnnnnnnnnnnnnnnnnnnnnnnnnnnnnnnnnnnnnnnnnnnnnnnnnnnnnnnnnnnnnnnnnnnnnnnnnnnnnnnnnnnnnnnnnnnnnnnnnnnnnnnnnnnnnnnnnnnnnnnnnnnnnnnnnnnnnnnnnnnnnnnnnnngcagagtggcgactggcccttgaaaaagagctgcagatttctctgaagcaagttctgacagctttgttgaattctcggactaccagccatttgctacgctaccggcaggnnnnnnnnnnnnnnnnnnnnnnnnnnnnnnnnnnnnnnnnnnnnnnnnnnnnnnnnnnnnnnnnnnnnnnnnnnnnnnnnnnnnnnnnnnnnnnnnnnnnnnnnnnnnnnnnnnnnnnnnnnnnnnnnnnnnnnnnnnnnnnnnnnnnnnnnnnnnnnnnnnnnnnnnnnnnnnnnnnnnnnnnnnnnnnnnnnnnnnnnnnnnnnnnnnnnnnnnnnnnnnnnnnnnnnnnnnnnnnnnnnnnnnnnnnnnnnnnnnnnnnnnnnnnnnnnnnnnnnnnnnnnnnnnnnnnnnnnnnnnnnnnnnnnnnnnnnnnnnnnnnnnnnnnnnnnnnnnnnnnnnnnnnnnnnnnnnnnnnnnnnnnnnnnnnnnnnnnnnnnnnnnnnnnnnnnnnnnnnnnnnnnnnnnnnnnnnnnnnnnnnnnnnnnnnnnnnnnnnnnnnnnnnnnnnnnnnnnnnnnnnnnnnnnnnnnnnnnnnnnnnnnnnnnnnnnnnnnnnnnnnnnnnnnnnnnnnnnnnnnnnnnnnnnnnnnnnnnnnnnnnnnnnnnnnnnnnnnnnnnnnnnnnnnnnnnnnnnnnnnnnnnnnnnnnnnnnnnnnnnnnnnnnnnnnnnnnnnnnnnnnnnnnnnnnnnnnnnnnnnnnnnnnnnnnnnnnnnnnnnnnnnnnnnnnnnnnnnnnnnnnnnnnnnnnnnnnnnnnnnnnnnnnnnnnnnnnnnnnnnnnnnnnnnnnnnnnnnnnnnnnnnnnnnnnnnnnnnnnnnnnnnnnnnnnnnnnnnnnnnnnnnnnnnnnnnnnnnnnnnnnnnnnnnnnnnnnnnnnnnnnnnnnnnnnnnnnnnnnnnnnnnnnnnnnnnnnnnnnnnnnnnnnnnnnnnnnnnnnnnnnnnnnnnnnnnnnnnnnnnnnnnnnnnnnnnnnnnnnnnnnnnnnnnnnnnnnnnnnnnnnnnnnnnnnnnnnnnnnnnnnnnnnnnnnnnnnnnnnnnnnnnnnnnnnnnnnnnnnnnnnnnnnnnnnnnnnnnnnnnnnnnnnnnnnnnnnnnnnnnnnnnnnnnnnnnnnnnnnnnnnnnnnnnnnnnnnnnnnnnnnnnnnnnnnnnnnnnnnnnnnnnnnnnnnnnnnnnnnnnnnnnnnnnnnnnnnnnnnnnnnnnnnnnnnnnnnnnnnnnnnnnnnnnnnnnnnnnnnnnnnnnnnnnnnnnnnnnnnnnnnnnnnnnnnnnnnnnnnnnnnnnnnnnnnnnnnnnnnnnnnnnnnnnnnnnnnnnnnnnnnnnnnnnnnnnnnnnnnnnnnnnnnnnnnnnnnnnnnnnnnnnnnnnnnnnnnnnnnnnnnnnnnnnnnnnnnnnnnnnnnnnnnnnnnnnnnnnnnnnnnnnnnnnnnnnnnnnnnnnnnnnnnnnnnnnnnnnnnnnnnnnnnnnnnnnnnnnnnnnnnnnnnnnnnnnnnnnnnnnnnnnnnnnnnnnnnnnnnnnnnnnnnnnnnnnnnnnnnnnnnnnnnnnnnnnnnnnnnnnnnnnnnnnnnnnnnnnnnnnnnnnnnnnnnnnnnnnnnnnnnnnnnnnnnnnnnnnnnnnnnnnnnnnnnnnnnnnnnnnnnnnnnnnnnnnnnnnnnnnnnnnnnnnnnnnnnnnnnnnnnnnnnnnnnnnnnnnnnnnnnnnnnnnnnnnnnnnnnnnnnnnnnnnnnnnnnnnnnnnnnnnnnnnnnnnnnnnnnnnnnnnnnnnnnnnnnnnnnnnnnnnnnnnnnnnnnnnnnnnnnnnnnnnnnnnnnnnnnnnnnnnnnnnnnnnnnnnnnnnnnnnnnnnnnnnnnnnnnnnnnnnnnnnnnnnnnnnnnnnnnnnnnnnnnnnnnnnnnnnnnnnnnnnnnnnnnnnnnnnnnnnnnnnnnnnnnnnnnnnnnnnnnnnnnnnnnnnnnnnnnnnnnnnnnnnnnnnnnnnnnnnnnnnnnnnnnnnnnnnnnnnnnnnnnnnnnnnnnnnnnnnnnnnnnnnnnnnnnnnnnnnnnnnnnnnnnnnnnnnnnnnnnnnnnnnnnnnnnnnnnnnnnnnnnnnnnnnnnnnnnnnnnnnnnnnnnnnnnnnnnnnnnnnnnnnnnnnnnnnnnnnnnnnnnnnnnnnnnnnnnnnnnnnnnnnnnnnnnnnnnnnnnnnnnnnnnnnnnnnnnnnnnnnnnnnnnnnnnnnnnnnnnnnnnnnnnnnnnnnnnnnnnnnnnnnnnnnnnnnnnnnnnnnnnnnnnnnnnnnnnnnnnnnnnnnnnnnnnnnnnnnnnnnnnnnnnnnnnnnnnnnnnnnnnnnnnnnnnnnnnnnnnnnnnnnnnnnnnnnnnnnnnnnnnnnnnnnnnnnnnnnnnnnnnnnnnnnnnnnnnnnnnnnnnnnnnnnnnnnnnnnnnnnnnnnnnnnnnnnnnnnnnnnnnnnnnnnnnnnnnnnnnnnnnnnnnnnnnnnnnnnnnnnnnnnnnnnnnnnnnnnnnnnnnnnnnnnnnnnnnnnnnnnnnnnnnnnnnnnnnnnnnnnnnnnnnnnnnnnnnnnnnnnnnnnnnnnnnnnnnnnnnnnnnnnnnnnnnnnnnnnnnnnnnnnnnnnnnnnnnnnnnnnnnnnnnnnnnnnnnnnnnnnnnnnnnnnnnnnnnnnnnnnnnnnnnnnnnnnnnnnnnnnnnnnnnnnnnnnnnnnnnnnnnnnnnnnnnnnnnnnnnnnnnnnnnnnnnnnnnnnnnnnnnnnnnnnnnnnnnnnnnnnnnnnnnnnnnnnnnnnnnnnnnnnnnnnnnnnnnnnnnnnnnnnnnnnnnnnnnnnnnnnnnnnnnnnnnnnnnnnnnnnnnnnnnnnnnnnnnnnnnnnnnnnnnnnnnnnnnnnnnnnnnnnnnnnnnnnnnnnnnnnnnnnnnnnnnnnnnnnnnnnnnnnnnnnnnnnnnnnnnnnnnnnnnnnnnnnnnnnnnnnnnnnnnnnnnnnnnnnnnnnnnnnnnnnnnnnnnnnnnnnnnnnnnnnnnnnnnnnnnnnnnnnnnnnnnnnnnnnnnnnnnnnnnnnnnnnnnnnnnnnnnnnnnnnnnnnnnnnnnnnnnnnnnnnnnnnnnnnnnnnnnnnnnnnnnnnnnnnnnnnnnnnnnnnnnnnnnnnnnnnnnnnnnnnnnnnnnnnnnnnnnnnnnnnnnnnnnnnnnnnnnnnnnnnnnnnnnnnnnnnnnnnnnnnnnnnnnnnnnnnnnnnnnnnnnnnnnnnnnnnnnnnnnnnnnnnnnnnnnnnnnnnnnnnnnnnnnnnnnnnnnnnnnnnnnnnnnnnnnnnnnnnnnnnnnnnnnnnnnnnnnnnnnnnnnnnnnnnnnnnnnnnnnnnnnnnnnnnnnnnnnnnnnnnnnnnnnnnnnnnnnnnnnnnnnnnnnnnnnnnnnnnnnnnnnnnnnnnnnnnnnnnnnnnnnnnnnnnnnnnnnnnnnnnnnnnnnnnnnnnnnnnnnnnnnnnnnnnnnnnnnnnnnnnnnnnnnnnnnnnnnnnnnnnnnnnnnnnnnnnnnnnnnnnnnnnnnnnnnnnnnnnnnnnnnnnnnnnnnnnnnnnnnnnnnnnnnnnnnnnnnnnnnnnnnnnnnnnnnnnnnnnnnnnnnnnnnnnnnnnnnnnnnnnnnnnnnnnnnnnnnnnnnnnnnnnnnnnnnnnnnnnnnnnnnnnnnnnnnnnnnnnnnnnnnnnnnnnnnnnnnnnnnnnnnnnnnnnnnnnnnnnnnnnnnnnnnnnnnnnnnnnnnnnnnnnnnnnnnnnnnnnnnnnnnnnnnnnnnnnnnnnnnnnnnnnnnnnnnnnnnnnnnnnnnnnnnnnnnnnnnnnnnnnnnnnnnnnnnnnnnnnnnnnnnnnnnnnnnnnnnnnnnnnnnnnnnnnnnnnnnnnnnnnnnnnnnnnnnnnnnnnnnnnnnnnnnnnnnnnnnnnnnnnnnnnnnnnnnnnnnnnnnnnnnnnnnnnnnnnnnnnnnnnnnnnnnnnnnnnnnnnnnnnnnnnnnnnnnnnnnnnnnnnnnnnnnnnnnnnnnnnnnnnnnnnnnnnnnnnnnnnnnnnnnnnnnnnnnnnnnnnnnnnnnnnnnnnnnnnnnnnnnnnnnnnnnnnnnnnnnnnnnnnnnnnnnnnnnnnnnnnnnnnnnnnnnnnnnnnnnnnnnnnnnnnnnnnnnnnnnnnnnnnnnnnnnnnnnnnnnnnnnnnnnnnnnnnnnnnnnnnnnnnnnnnnnnnnnnnnnnnnnnnnnnnnnnnnnnnnnnnnnnnnnnnnnnnnnnnnnnnnnnnnnnnnnnnnnnnnnnnnnnnnnnnnnnnnnnnnnnnnnnnnnnnnnnnnnnnnnnnnnnnnnnnnnnnnnnnnnnnnnnnnnnnnnnnnnnnnnnnnnnnnnnnnnnnnnnnnnnnnnnnnnnnnnnnnnnnnnnnnnnnnnnnnnnnnnnnnnnnnnnnnnnnnnnnnnnnnnnnnnnnnnnnnnnnnnnnnnnnnnnnnnnnnnnnnnnnnnnnnnnnnnnnnnnnnnnnnnnnnnnnnnnnnnnnnnnnnnnnnnnnnnnnnnnnnnnnnnnnnnnnnnnnnnnnnnnnnnnnnnnnnnnnnnnnnnnnnnnnnnnnnnnnnnnnnnnnnnnnnnnnnnnnnnnnnnnnnnnnnnnnnnnnnnnnnnnnnnnnnnnnnnnnnnnnnnnnnnnnnnnnnnnnnnnnnnnnnnnnnnnnnnnnnnnnnnnnnnnnnnnnnnnnnnnnnnnnnnnnnnnnnnnnnnnnnnnnnnnnnnnnnnnnnnnnnnnnnnnnnnnnnnnnnnnnnnnnnnnnnnnnnnnnnnnnnnnnnnnnnnnnnnnnnnnnnnnnnnnnnnnnnnnnnnnnnnnnnnnnnnnnnnnnnnnnnnnnnnnnnnnnnnnnnnnnnnnnnnnnnnnnnnnnnnnnnnnnnnnnnnnnnnnnnnnnnnnnnnnnnnnnnnnnnnnnnnnnnnnnnnnnnnnnnnnnnnnnnnnnnnnnnnnnnnnnnnnnnnnnnnnnnnnnnnnnnnnnnnnnnnnnnnnnnnnnnnnnnnnnnnnnnnnnnnnnnnnnnnnnnnnnnnnnnnnnnnnnnnnnnnnnnnnnnnnnnnnnnnnnnnnnnnnnnnnnnnnnnnnnnnnnnnnnnnnnnnnnnnnnnnnnnnnnnnnnnnnnnnnnnnnnnnnnnnnnnnnnnnnnnnnnnnnnnnnnnnnnnnnnnnnnnnnnnnnnnnnnnnnnnnnnnnnnnnnnnnnnnnnnnnnnnnnnnnnnnnnnnnnnnnnnnnnnnnnnnnnnnnnnnnnnnnnnnnnnnnnnnnnnnnnnnnnnnnnnnnnnnnnnnnnnnnnnnnnnnnnnnnnnnnnnnnnnnnnnnnnnnnnnnnnnnnnnnnnnnnnnnnnnnnnnnnnnnnnnnnnnnnnnnnnnnnnnnnnnnnnnnnnnnnnnnnnnnnnnnnnnnnnnnnnnnnnnnnnnnnnnnnnnnnnnnnnnnnnnnnnnnnnnnnnnnnnnnnnnnnnnnnnnnnnnnnnnnnnnnnnnnnnnnnnnnnnnnnnnnnnnnnnnnnnnnnnnnnnnnnnnnnnnnnnnnnnnnnnnnnnnnnnnnnnnnnnnnnnnnnnnnnnnnnnnnnnnnnnnnnnnnnnnnnnnnnnnnnnnnnnnnnnnnnnnnnnnnnnnnnnnnnnnnnnnnnnnnnnnnnnnnnnnnnnnnnnnnnnnnnnnnnnnnnnnnnnnnnnnnnnnnnnnnnnnnnnnnnnnnnnnnnnnnnnnnnnnnnnnnnnnnnnnnnnnnnnnnnnnnnnnnnnnnnnnnnnnnnnnnnnnnnnnnnnnnnnnnnnnnnnnnnnnnnnnnnnnnnnnnnnnnnnnnnnnnnnnnnnnnnnnnnnnnnnnnnnnnnnnnnnnnnnnnnnnnnnnnnnnnnnnnnnnnnnnnnnnnnnnnnnnnnnnnnnnnnnnnnnnnnnnnnnnnnnnnnnnnnnnnnnnnnnnngaacctaaaacagtggaagaagaagaaagtaatttcagctctccactgatgctttggcttcagcaagaacaaaagcggaaggaaagcattactgagnnnnnnnnnnnnnnnnnnnnnnnnnnnnnnnnnnnnnnnnnnnnnnnnnnnnnnnnnnnnnnnnnnnnnnnnnnnnnnnnnnnnnnnnnnnnnnnnnnnnnnnnnnnnnnnnnnnnnnnnnnnnnnnnnnnnnnnnnnnnnnnnnnnnnggtgttaatggtttgaggatgctggggattctccatgatgcagttgtgttcctcattgagcagctgtctggtgccaagcactgtcgaaattacaaattccgtttccacaagccagaggaggccaatgaaccccccttgaaccctcatggctcagcccgggctgaagtccacctcaggcaannnnnnnnnnnnnnnnnnnnnnnnnnnnnnnnnnnnnnnnnnnnnnnnnnnnnnnnnnnnnnnnnnnnnnnnnnnnnnnnnnnnnnnnnnnnnnnnnnnnnnnnnnnnnnnnnnnnnnnnnnnnnnnnnnnnnnnnnnnnnnnnnnnnnnnnnnnnnnnnnnnnnnnnnnnnnnnnnnnnnnnnnnnnnnnnnnnnnnnnnnnnnnnnnnnnnnnnnnnnnnnnnnnnnnnnnnnnnnnnnnnnnnnnnnnnnnnnnnnnnnnnnnnnnnnnnnnnnnnnnnnnnnnnnnnnnnnnnnnnnnnnnnnnnnnnnnnnagggcattggttgctatatgttccgaattgatgactcagaggtagtggatgccaccatgcatggaaatgctgcacgcttcatcaatcactcatgtgagcccaactgctattctcgggtcatcaatattgatgggcagaagcacatcgtcatctttgccatgcgtaagatctaccgaggagaggaactcacttatgactataagttccccattgaggatgccagcaacaagctgccctgcaactgtggcgccaagaaatgccggaagttcctaaac

SEQ ID NO: 35632 - DNA, 691 bp, Macaca Mulatta
  misc_feature (1)...(691): n = A,T,C or G
gtgatctttcatttccgcaccatgaaatgtgatgaggagcgcacggtcatcgacgacagccgtcaggtggaccagcccatgcacatcatcatcgggaacatgttcaagctcgaggtctgggagatcctgctcacctccatgagggtgcacgaggtggccgagttctggtgcgacaccatnnnnnnnnnnnnnnnnnnnnnnnnnnnnnnnnnnnnnnnnnnnnnnnnnnnnnnnnnnnnnnnnnnnnnnnnnnnnnnnnnnnnnnnnnnnnnnnnnnnnnnnnnnnnnnnnnnnnnnnnnnnnnnnnnnnnnnnnnnnnnnnnnnnnnnnnnnnnnnnnnnnnnnnnnnnnnnnnnnnnnnnnnnaggttgacgccccgagtgattaccagagggagacctggaacctgagcaatcatgagaagatgaaggtggtgcccgtcctccacggagagggaaatcggctcttcaagctgggccgctacgaggaggcctcttccaagtaccaggaggccatcatctgcctaaggaacctgcagaccaaggnaggagaagccgtgggaggtgcagtggctgaagctggagaagatgatcaacaccctgaccctcaactactgccagtgcctgctgaagaaggaggagtattacgaggtgctggagcacaccagtgacattctccggcaccacccagg

SEQ ID NO: 35633 - DNA, 2824 bp, Macaca Mulatta
  misc_feature (1)...(2824): n = A,T,C or G
cagcctgtttagagcgcaagcagaagcgggagaaggaatgtggagtgactgctacttttgatgctagtcgaaccacttttacaagagaaggatcattccgtgtcacaacagccactgaacaagcagaaagagaggagatcatgaaacaaatgcaagatgccaataaannnnnnnnnnnnnnnnnnnnnnnnnnnnnnnnnnnnnnnnnnnnnnnnnnnnnnnnnnnnnnnnnnnnnnnnnnnnnnnnnnnnnnnnnnnnnnnnnnnnnnnnnnnnnnnnnnnnnnnnnnnnnnnnnnnnnnnnnnnnnnnnnnnnnnnnnnnnnnnnnnnnnnnnnnnnnnnnnnnnnnnnnnnnnnnnnnnnnnnnnnnnnnnnnnnnnnnnnnnnnnnnnnnnnnnnnnnnnnnnnnnnnnnnnnnnnnnnnnnnnnnnnnnnnnnnnnnnnnnnnnnnnnnnntgcagtgccagaggtagaaggggaggcagagagcatcagctccctgtgctcacagatcaccaatgccttcagcacacctgaggaccccttctcatctgctccaatgaccaaaccagtgacagtggtggcaccacaatctcctaccttccaannnnnnnnnnnnnnnnnnnnnnnnnnnnnnnnnnnnnnnnnnnnnnnnnnnnnnnnnnnnnnnnnnnnnnnnnnnnnnnnnnnnnnnnnnnnnnnnnnnnnnnnnnnnnnnnnnnnnnnnnnnnnnnnnnnnnnnnnnnnnnnnnnnnnnnnnnnnnnnnnnnnnnnnnnnnnnnnnnnnnnnnnnnnnnnnnnnnnnnnnnnnnnnnnnnnnnnnngaggccgaccgaaggttagaagaggtgtctaagagcatccgggctcagcagccccaggcatcagctgctcctctgcagccagttctccagcctcctccacccactgccatctcccagccagcaccacctttccaagggaatgcattcctcacctctcagcctgtgccagtgggtgtagtcccagccctgcagccagcctttgtccctgcccagtcttatcctgtggccaatggaatgccctatccagcccctaatgtgcctgtggtgggcatcactccctcccagatggtggccaacgtatttggcactgcaggccaccctcaggctacccacccccatcagtcacccagcctggtcaggcagcagacattccctcattacgaggcaagcagtgctaccaccagtcccttctttaagcctcctgctcagcacctcaacggttctgcagctttcaatggtatagatgatggcaggttggcctcagcagacaagcatacagaggttcctacaggcacctgcccggtggatccttttgaagcccagtgggctgcattagaaaacaagtccaagcagcgtactaatccctcccctaccaaccctttctccagtgacttacagaagacgtttgaaattgaactttaagcaatccctatggctgtgtatcttgtccataccagacagggagcagggggtagaggtcaaaggagcanaacagactttgtctcctgattagtactcttttcactaatcccaaaggtcccaaggaaacagtccaggnnnnnnnnnnnnnnnnnnnnnnnnnnnnnnnnnnnnnnnnnnnnnnnnnnnnnnnnnnnnnnnnnnnnnnnnnnnnnnnnnnnnnnnnnnnnnnnnnnnnnnnnnnnnnnnnnnnnnnnnnnnnnnnnnnnnnnnnnnnnnnnnnnnnnnnnnnnnnnnnnnnnnnnnnnnnnnnnnnnnnnnnnnnnnnnnnnnnnnnnnnnnnnnnnnnnnnnnnnnnnnnnnnnnnnnnnnnnnnnnnnnnnnnnnnnnnnnnnnnnnnnnnnnnnnnnnnnnnnnnnnnnnnnnnnnnnnnnnnnnnnnnnnnnnnnnnnnnnnnnnnnnnnnnnnnnnnnnnnnnnnnnnnnnnnnnnnnnnnnnnnnnnnnnnnnnnnnnnnnnnnnnnnnnnnnnnnnnnnnnnnnnnnnnnnnnnnnnnnnnnnnnnnnnnnnnnnnnnnnnnnnnnnnnnnnnnnnnnnnnnnnnnnnnnnnnnnnnnnnnnnnnnnnnnnnnnnnnnnnnnnnnnnnnnnnnnnnnnnnnnnnnnnnnnnnnnnnnnnnnnnnnnnnnnnnnnnnnnnnnnnnnnnnnnnnnnnnnnnnnnnnnnnnnnnnnnnnnnnnnnnnnnnnnnnnnnnnnnnnnnnnnnnnnnnnnnnnnnnnnnnnnnnnnnnnnnnnnnnnnnnnnnnnnnnnnnnnnnnnnnnnnnnnnnnnnnnnnnnnnnnnnnnnnnnnnnnnnnnnnnnnnnnnnnnnnnnnnnnnnnnnnnnnnnnnnnnnnnnnnnnnnnnnntatgatggaattctaatgtcattattttaatggaatcaatctaaatatgctgtatagagaatgtatctttcatatattgctgcaatttccttatgttaatcctttaacactaaggtaacatgacataatcataccatagaagggaacacaggttaccatattggtttgtaatatgggtcttgatgggttttgttttatcctttaaattttgttcccatgagttttgtggggatggggatggggattctggttttattagctttgtgtgtgtcctcttctcccaaacctcctttcggtgagaacatccccttgacagttgcagcctcttgacctcggataacaataagagagctcatctcatttttacttttgaacgttggccttacaatcaaatgtaagttatatatatttgtactgatgaaaatttataatctgctttaacaaaaataaatgtt

SEQ ID NO: 35634 - DNA, 1464 bp, Macaca Mulatta
  misc_feature (1)...(1464): n = A,T,C or G
ttctcagtgatggagaacatgccagcgctcataaaggtgggcatggtgactgtcattgatggagacaaaccgtagaaggcccgggngcagctctcagtggagcaggacaatggtgactttgttatccagaatggcacaggcactatcctctccagcctgagcttcgatcgagagcaacaaagcacctacaccttccagctgaaggcggtggatggtggcgtcccacctcgctcagcttatgttggcgtcaccatcaatgtgctggatgagaatgacaacgcaccctatatcactgccccttctaacacctctcaccggctgctgaccccccagacacgtcttggtgagacggtcagccaggtggcttctgaggactttgactctggtgtcaatgctgagctgatctacagcatcgcaggtggcaacccttacggactcttccagattgggtcacattcaggtgccatcaccctggagaaggagattgagcggcgccaccatgggctacatcgcctggtggtgaaggtcagtgaccgcggcaagcccccacgctatggcacagccttggtccacctttatgtcaatgagactctggccaaccgcacgctgctggagaccctcctgggccacagcctggacacaccgctggatattgacattgctggggatccagaatacgagcgctccaagcagcgtggcaacattctctttggtgtggtggccggtgtggtggccgtggccnnnnnnnnnnnnnnnnnnnnnnnnnnnnnnnnnnnnnnnnnnnnnnnnnnnnnnnnnnnnnnnnnnnnnnnnnnnnnnnnnnnnnnnnnnnnnnnnnnnnnnnnnnnnnnnnnnnnnnnnnnnnnnnnnnnnnnnnnnnnnnnnnnnnnnnnnnnnnnnnnnnnnnnnnnnnnnnnnnnnnnnnnnnnnnnnnnnnnnnnnnnnnnnnnnnnnnnnnnnnnnnnnnnnnnnnnnnnnnnnnnnnnnnnnnnnnnnnnnnnnnnnnnnnnnnnnnnnnnnnnnnnnnnnnnnnnnnnnnnnnnnnnnnnnnnnnnnnnnnnnnnnnnnnnnnnnnnnnnnnnnnnnnnnnnnnnnnnnnnnnnnnnnnnnnnnnnnnnnnnnnnnnnnnnnnnnnnnnnnnnnnnnnnnnnnnnnnnnnnnnnnnnnnnnnnnnnnnnnnnnnnnnnnnnnnnnnnnnnnnnnnnnnnnnnnnnnnnnnnnnnnnnnnnnnnnnnnnnnnngcagttacctcaccgccgcgtcaccttctcggccaccagccaggcccaggagctgcaggacccatcccagcacagttactatgacagtggcctggaggagtctgagacaccgtccagcaagtcatcctcagggcctcgactcggtccccttgccctgcctgaggatcactatgagcgcaccacccctgacggcagcataggagagatggagcaccccgagaat

SEQ ID NO: 35635 - DNA, 2487 bp, Macaca Mulatta
  misc_feature (1)...(2487): n = A,T,C or G
ctctttcagcaaaccccagaaatttactccgtggagctcagcggaactaaggacatcgtgaaaacagacaagggggatggcaagaagtacaggggtctgaagaacaactgcggagaacgcagaaagaaaaatcactaagagaagtttcnnnnnnnnnnnnnnnggatgacaccaaactcagcaatagggaattggaaaagaaatatggcacagacatcattnnnnnnnnnnnnnnnnnnnnnnnnnnnnnnnnnnnnnnnnnnnnnnnnnnnnnnnnnnnnnnnnnnnnnnnnnnnnnnnnnnnnnnnnnnnnnnnnnnnnnnnnnnnnnnnnnnnnnnnnnnnnnnnnnnnnnnnnnnnnnnnnnnnnnnnnnnnnnnnnnnnnnnnnnnnnnnnnnnnnnnnnnnnnnnnnnnnnnnnnnnnnnnnnnnnnnnnnnnnnnnnnnnnnnnnnnnnnnnnnnnnnnnnnnnnnnnnnnnnnnnnnnnnnnnnnnnnnnnnnnnnnnnnnnnnnnnnnnnnnnnnnnnnnnnnnnnnnnnnnnnnnnnnnnnnnnnnnnnnnnnnnnnnnnnnnnnnnnnnnnnnnnnnnnnnnnnnnnnnnnnnnnnnnnnnnnnnnnnnnnnnnnnnnnnnnnnnnnnnnnnnnnnnnnnnnnnnnnnnnnnnnnnnnnnnnnnnnnnnnnnnnnnnnnnnnnnnnnnnnnnnnnnnnnnnnnnnnnnnnnnnnnnnnnnnnnnnnnnnnnnnnnnnnnnnnnnnnnnnnnnnnnnnnnnnnnnnnnnnnnnnnnnnnnnnnnnnnnnnnnnnnnnnnnnnnnnnnnnnnnnnnnnnnnnnnnnnnnnnnnnnnnnnnnnnnnnnnnnnnnnnnnnnnnnnnnnnnnnnnnnnnnnnnnnnnnnnnnnnnnnnnnnnnnnnnnnnnnnnnnnnnnnnnnnnnnnnnnnnnnnnnnnnnnnnnnnnnnnnnnnnnnnnnnnnnnnnnnnnnnnnnnnnnnnnnnnnnnnnnnnnnnnnnnnnnnnnnnnnnnnnnnnnnnnnnnnnnnnnnnnnnnnnnnnnnnnnnnnnnnnnnnnnnnnnnnnnnnnnnnnnnnnnnnnnnnnnnnnnnnnnnnnnnnnnnnnnnnnnnnnnnnnnnnnnnnnnnnnnnnnnnnnnnnnnnnnnnnnnnnnnnnnnnnnnnnnnnnnnnnnnnnnnnnnnnnnnnnnnnnnnnnnnnnnnnnnnnnnnnnnnnnnnnnnnnnnnnnnnnnnnnnnnnnnnnnnnnnnnnnnnnnnnnnnnnnnnnnnnnnnnnnnnnnnnnnnnnnnnnnnnnnnnnnnnnnnnnnnnnnnnnnnnnnnnnnnnnnnnnnnnnnnnnnnnnnnnnnnnnnnnnnnnnnnnnnnnnnnnnnnnnnnnnnnnnnnnnnnnnnnnnnnnnnnnnnnnnnnnnnnnnnnnnnnnnnnnnnnnnnnnnnnnnnnnnnnnnnnnnnnnnnnnnnnnnnnnnnnnnnnnnnnnnnnnnnnnnnnnnnnnnnnnnnnnnnnnnnnnnnnnnnnnnnnnnnnnnnnnnnnnnnnnnnnnnnnnnnnnnnnnnnnnnnnnnnnnnnnnnnnnnnnnnnnnnnnnnnnnnnnnnnnnnnnnnnnnnnnnnnnnnnnnnnnnnnnnnnnnnnnnnnnnnnnnnnnnnnnnnnnnnnnnnnnnnnnnnnnnnnnnnnnnnnnnnnnnnnnnnnnnnnnnnnnnnnnnnnnnnnnnnnnnnnnnnnnnnnnnnnnnnnnnnnnnnnnnnnnnnnnnnnnnnnnnnnnnnnnnnnnnnnnnnnnnnnnnnnnnnnnnnnnnnnnnnnnnnnnnnnnnnnnnnnnnnnnnnnnnnnnnnnnnnnnnnnnnnnnnnnnnnnnnnnnnnnnnnnnnnnnnnnnnnnnnnnnnnnnnnnnnnnnnnnnnnnnnnnnnnnnnnnnnnnnnnnnnnnnnnnnnnnnnnnnnnnnnnnnnnnnnnnnnnnnnnnnnnnnnnnnnnnnnnnnnnnnnnnnnnnnnnnnnnnnnnnnnnnnnnnnnnnnnnnnnnnnnnnnnnnnnnnnnnnnnnnnnnnnnnnnnnnnnnnnnnnnnnnnnnnnnnnnnnnnnnnnnnnnnnnnnnnnnnnnnnnnnnnnnnnnnnnnnnnnnnnnnnnnnnnnnnnnnnnnnnnnnnnnnnnnnnnnnnnnnnnnnnnnnnnnnnnnnnnnnnnnnnnnnnnnnnnnnnnnnnnnnnnnnnnnnnnnnnnnnnnnnnnnnnnnnnnnnnnnnnnnnnnnnnnnnnnnnnnnnnnnnnnnnnnnnnnnnnnnnnnnnnnnnnnnnnnnnnnnnnnnnnnnnnnnnnnnnnnnnnnnnnnnnnnnnnnnnnnnnnnnnaagaagacgattgcttacaccctgaccaagaacattgctgagctgtgcccctttctgatctacatcatcgtcgggctccctctgcccattggaaccatcaccattctgttcattgacttggggacagacat

SEQ ID NO: 35636 - DNA, 105 bp, Macaca Mulatta
agatttctgagggaaattcctatttgtcaagtgaaaatttatcaagtgccagaatttcagtccagctgtctactaaccagcactttttaggtgcaacatcagtag

SEQ ID NO: 35637 - DNA, 1077 bp, Macaca Mulatta
  misc_feature (1)...(1077): n = A,T,C or G
attagcgaaataatagggtgcacttcaataaaaatgcggtcctgaagtggagtagactcaccggcaaggagcccggaaagtcgacaggggcggcggcaannnnnnnnnnnnnnnnnnnnnnnnnnnnnnnnnnnnnnnnnnnnnnnnnnnnnnnnnnnnnnnnnnnnnnnnnnnnnnnnnnnnnnnnnnnnnnnnnntcataaaaggcacctcgggtatcatttatcaacctctctccagcccactcttccaaaataacactacagtttcctacatgtgtatttttgccaggactccaaagagccttgctaaagtggaacaagnnnnnnnnnnnnnnnnnnnnnnnnnnnnnnnnnnnnnnnnnnnnnnnnnnnnnnnnnnnnnnnnnnnnnnnnnnnnnnnnnnnnnnnnnnnnnnnnnnnnnnnnnnnnnnnnnnnnnnnnnnnnnnnnnnnnnnnnnnnnnnnnnnnnnnnnnnnnnnnnnnnnnnnnnnnnnnnnnnnnnnnnnnnnnnnnnnnnnnnnnnnnnnnnnnnnnnnnnnnnnnnnnnnnnnnnnnnnnnnnnnnnnnnnnnnnnnnnnnnnnnnnnnnnnnnnnnnnnnnnnnnnnnnnnnnnnnnnnnnnnnnnnnnnnnnnnnnnnnnnnnnnnnnnnnnnnnnnnnnnnnnnnnnnnnnnnnnnnnnnnnnnnnnnnnnnnnnnnnnnnnnnnnnnnnnnnnnnnnnnnnnnnnnnnnnnnnnnnnnnnnnnnnnnnnnnnnnnnnnnnnnnnnnnnnnnnnnnnnnnnnnnnnnnnnnnnnnnnnnnnnnnnnnnnnnnnnnnnnnnnnnnnnnnnnnnnnnnnnnnnnnnnnnnnnnnnnnnnnnnnnnnnnnnnnnnnnnnnnnnnnnnnnnnnnnnnnnnnnnnnnnnnnnnnnnnnnnnnnnnnnnnnnnnnnnnnnngaaaagcctaaaagacggcaacaccaacacctcttgacatggaaatacactgatacaataggcaaaaagaaacactcgattgcatcttccgggttccaggtggccttatttggtagagtctatactgaccttattcctg

SEQ ID NO: 35638 - DNA, 639 bp, Macaca Mulatta
  misc_feature (1)...(639): n = A,T,C or G
catgtcaacatgagggagttggtcaagatcatccggnggcgccgcctgcagctgaaccccacgcaggccttcttcctgctggtgaaccagcacagcatggtgagcgtgtccacgcccatcgcggacatctacgagcaggagaaagacgaggacggcttcctctacatggtctacgcctcccaggaaaccttcggcttctgagccagcagtaggggggtcggcctgggagtggggggggcccggtcaggccctgcccagagagctcctggttcctgaactgagctgcctctgccgtggtgggctgggcaggcatgtgcccccctagtcagagggcaacccacctactctgcccctgggtggatcctgggccggttgtgttagggttgtccctctgggtgctggctgggatgggggagggttgggagcagcccccagcaccccgctgtgtggttcatcttttttttaggcccctgcctgactgcccatctgcccctcacccacccaaggctctgcccacgcctggacctgcccacccctgaaagactggcccctggctccccgcccctcggtctccacatggtgtatggatctgtggtcattgtccctctgcagaataaagattgctcaggcctgcctggc

SEQ ID NO: 35639 - DNA, 378 bp, Macaca Mulatta
  misc_feature (1)...(378): n = A,T,C or G
atgggggacgctcccagccctgaagagaaactgcaccttatcacccggaacctgcagnnnnnnnnnnnnnnnnnnnnnnnnnnnnnnnnnnnnnnnnnnnnnnnnnnnnnnnnnnnnnnnnnnnnnnnnnnnnnnnnnnnnnnnnnnnnnnnnnnnnnnnnnnnnnnnnnnnnnnnnnnnnnnnnnnnnnnnnnnnnnnnnaggtaacaattctgtttgcggaccttcacgcatacctggataacatgaaagccccatgggaacttctagaactccgagtcagttactatgagaatgtgatcaaagcaatgctggagagcattggtgtgcccttggagaagctcaagttcatcaaaggcactgattaccagctcagca

SEQ ID NO: 35640 - DNA, 456 bp, Macaca Mulatta
  misc_feature (1)...(456): n = A,T,C or G
cagcccatcctgagcccttctatcctagaccatctcatcaataatgaccgcaaactgcctccagagtacaaccttccccacacttacgttgagatgcannnnnnnnnnnnnnnnnnnnnnnnnnnnnnnnnnnnnnnnnnnnnnnnnnnnnnnnnnnnnnnnnnnnnnnnnnnnnnnnnnnnnnnnnnnnnnnnnnnnnnnnnnnnnnnnnnnnnnnnnnnnnnnnnnnnnnnnnnnnnnnnnnnnnnnnnnnnnnnnnnnnnnnnnnnnnnnnnnnnnnnnnnnnnnnnnnnnnnnnnnnnnnnnnnnnnnnnnnnnnnnnnnnnnnnnnnnnnnnnnnnnnnnngtcttcttgcagaacaaagctcgccgagaggacttctgtcctcggaagctgcggcagatgcatctgatgatcgaccagctcatggcccactcccacctgcgttacaaggg

SEQ ID NO: 35641 - DNA, 770 bp, Macaca Mulatta
  misc_feature (1)...(770): n = A,T,C or G
aaacctgtgacagatctgtagttaaggtttagactgggggaggagtatattactggacttcctttgtaacttgtatcatgactggggcagagattgagcctagcgcccaggccaagcctgaaaagaaggctggggaagaggttatcgctggggctgagagagagaatgatgtccctctggtggtcagacccaaggttaggacccaggcaactactggggcaaggcccaaaactgagaccaagtctgtgcctggggcaaggcccaaaactgatgcccaagcaatgtctggggcaaggcccaaaactgaggcccaagtaatgggtggtgcaagacccaaaacggaggctcaaggaatggcaggagctagacccaaaactgatgccagggcagtaggtggtgctcgtcctaaaactgatgccaaggcaatccctggaacaaggcccaaggatgaagctcaggcatgggcccagagtgaatttgggactgaagctgtgtcacaggcagaaggggtgtcccagactaatgccgttgcctggccactggccactgctgagtctggatcagttaataaatctaagggcctgtctatggatagagaactagttgatgtggatgctgaaacctttcctggcacccagggtcagaaaggaatccagccctggtttggaccaggggaggagactaatatggggtcttggtgctattccaggccnnnnnnnnnnnnnnggcctctnntgngtctgggttctggtctgcaaaggagacctcta

SEQ ID NO: 35642 - DNA, 2444 bp, Macaca Mulatta
  misc_feature (1)...(2444): n = A,T,C or G
tgctgttgaggcggcggcatctttctcgaggggctctcctgggcggctggagaagcagcttcttctctcgagtgcgacggcggcggcgcctgcggacctaactagctccaggttaggctgggctttgcggggaagcagcgnnnnnnnnnnnnnnnnnnnnnnnnnnnnnnnnnnnnnnnnnnnnnnnnnnnnnnnnnnnnnnnnnnnnnnnnnnnnnnnnnnnnnnnnnnnnnnnnnnnnnnnnnnnnnnnnnnnnnnnnnnnnnnnnnnnnnnnnnnnnnnnnnnnnnnnnnnnnnnnnnnnnnnnnnnnnnnnnnnnnnnnnnnnnnnnnnnnnnnnnnnnnnnnnnnnnnnnnnnnnnnnnnnnnnnnnnnnnnnnnnnnnnnnnnnnnnnnnnnnnnnnnnnnnnnnnnnnnnnnnnnnnnnnnnnnnnnnnnnnnnnnnnnnnnnnnnnnnnnnnnnnnnnnnnnnnnnnnnnnnnnnnnnnnnnnnnnnnnnnnnnnnnnnnnnnnnnnnnnnnnnnnnnnnnnnnnnnnnnnnnnnnnnnnnnnnnnnnnnnnnnnnnnnnnnnnnnnnnnnnnnnnnnnnnnnnnnnnnnnnnnnnnnnnnnnnnnnnnnnnnnnnnnnnnnnnnnnnnnnnnnnnnnnnnnnnnnnnnnnnnnnnnnnnnnnnnnnnnnnnnnnnnnnnnnnnnnnnnnnnnnnnnnnnnnngattgtgcagaatggacgtctcatcgtttccacagagtgtggccatgtcttctgtagccagtgcctccgcgattccctgaagaatgctaatacttgcccaacttgtaggaaaaagatcaaccacaaacggtaccaccccatttatatatgaagtattcagagtcgcccaggagacacggatggacagacagacagacaggttctccagtggtatctgcctccattttcctgagctcaaaaagactgtttcagaaccaacgtctgatatgtaaactgctcttttgtttccaaccccttctttttgttatctccagtttgatgctatggcgctggacccagggccctcccaggccatctctgttcgtctggggtggtccagttctagagtgggagaaagggagtcaggcacattgngaatcgtggttctagtctggttgcagaacctgcacatttgccaagaaattnnnnnnnnnnnnnnnnnnnnnnnnnnnnnnnnnnnnnnnnnnnnnnnnnnnnnnnnnnnnnnnnnnnnnnnnnnnnnnnnnnnnnnnnnnnnnnnnnnnnnnnnnnnnnnnnnnnnnnnnnnnnnnnnnnnnnnnnnnnnnnnnnnnnnnnnnnnnnnnnnnnnnnnnnnnnnnnnnnnnnnnnnnnnnnnnnnnnnnnnnnnnnnnnnnnnnnnnnnnnnnnnnnnnnnnnnnnnnnnnnnnnnnnnnnnnnnnnnnnnnnnnnnnnnnnnnnnnnnnnnnnnnnnnnnnnnnnnnnnnnnnnnnnnnnnnnnnnnnnnnnnnnnnnnnnnnnnnnnnnnnnnnnnnnnnnnnnnnnnnnnnnnnnnnnnnnnnnnnnnnnnnnnnnnnnnnnnnnnnnnnnnnnnnnnnnnnnnnnnnnnnnnnnnnnnnnnnnnnnnnnnnnnnnnnnnnnnnnnnnnnnnnnnnnnnnnnnnnnnnnnnnnnnnnnnnnnnnnnnnnnnnnnnnnnnnnnnnnnnnnnnnnnnnnnnnnnnnnnnnnnnnnnnnnnnnnnnnnnnnnnnnncctcggtttccactgcctaacgtctgcccccgcgtagatactgagaggtggtggcagtaattgtggccttatcagccgctcagttccaggcttttgcccaagtcactgttgccccatgtttcggagaacctggcccacctgacttggctttctcatccttcccaacccagtgccatttgtttcagaagctactcctctggccagctgggcttggatcctttgggctttgactgctgcataggttttgatgggtgaaacacgggcccagatgacaacctctccctcactccacaggtatgtgggagcctcaggttctctgaagggcagcagagtggcccacgctgcctctgacagcacagggcctgggggtggctaacaagagaggccttacagtgccagcctgcctcctcttccgctgtcctccttcctcagagggcttcaagccaaacaaacggccttttcgtgtgaaacatcttcagagtgggaaaggggccacttctggctttgttagcaataactgaccttcagtttacccttctgaaggagcagggactcagcacagaattcactttagacggggctgaaggagtgtccctcctctatgtgaaaagaaaattgttttattcttcattctgactttttaactgtttggctcacttccagttagtttgaatgaaaataataattttctacttggagttgaa

SEQ ID NO: 35643 - DNA, 634 bp, Macaca Mulatta
cgcagcacagacacagtattccacatgaagagacggttgcatgcagcagagggagtggaaccaggtagtcagcggtggttcttttctggcagacctctcactgacaaaatgaagtttgaagagctgaagatcccaaaggactatgttgtacaggttatagtgagccaacctgtgcagaacccaacaccagtggagaactaaactgagccctgttggctggctcccacatccgtctgctcctttttattgttattgttgtcatttcctactctacggcgtgaaatttatttcactgctctaaattccctatgaatggatttagttctgaggaattaccagtgaaaaattccatctgtgatggagaccaacaaaaataataaaacacaaagagccaggctttgagactcatgtaattacaatttctaatttgaaaggcagttaagaaatagataaccatttattttaaaacactcaacaactatgtaatggctgtatttcagtgacttggactgtaaatgaaacattgcatccatgaaggacagcaccaagcacctttttgaatacagaatttttttagaaaaatatatcaaattatataatttccagaaaccataaataatggatataaaactta

SEQ ID NO: 35644 - DNA, 406 bp, Macaca Mulatta
  misc_feature (1)...(406): n = A,T,C or G
aagcctgaggagccggtgcgggtgctggctgccgcgcggcggaggtgnnnnnnnnnnnnnnnnnnnnnnnnnnnnnnnnnnnnnnnnnnnnnnnnnnnnnnnnnnnnnnnnnnnnnnnnnnnnnnnnnnnnnnnnnnnnnnnnnnnnnnnnnnnnnnnnnnnnnnnnnnnnnnnnnnnnnnnnnnnnnnnnnnnnnnnnnnnnnnnnnnnnnnnnnnnnnnnnnnnnnnnnnnnnnnnnnnnnnnnnnnnnnnnnnnnnnnnnnnnnnnnnnnnnnnnnnnnnnnnnngattaacagccatgcaacagaatggagtcccagccacccaggagaggatgcagtggcttcttttgctgatgttggatgggtagccaaagaagaaggagaatgttcagcaagactaagg

SEQ ID NO: 35645 - DNA, 2308 bp, Macaca Mulatta
  misc_feature (1)...(2308): n = A,T,C or G
gggactagggttggtggtaacagggaccctccctgttttcaatctgacacaggatggccctggggaaaagaagnagaaccagctgatcttgggcgtgatgggcattgatgtggctctgaatgacatcaagaggctgacccccaactacacgngcttggagccaacggctatgtgtttgccattgacctgaacggctacgtgttgctgcaccccaatctcaagccccagncagaccaccaacttccgggagcctgtgactctggacttcctagatgcggagctggaggatgagaacaaggaagagnnnnnnnnnnnnnnnnnnnnnnnnnnnnnnnnnnnnnnnnnnnnnnnnnnnnnnnnnnnnnnnnnnnnnnnnnnnnnnnnnnnnnnnnnnnnnnnnnnnnnnnnnnnnnnnnnnnnnnnnnnnnnnnnnnnnnnnnnnnnnnnnnnnnnnnnnnnnnnnnnnnnnnnnnnnnnnnnnnnnnnnnnnnnnnnnnnnnnnnnnnnnnnnnnnnnnnnnnnnnnnnnnnnnnnnnnnnnnnnnnnnnnnnnnnnnnnnnnnnnnnnnnnnnnnnnnnnnnnnnnnnnnnnnnnnnnnnnnnnnnnnnnnnnnnnnnnnnnnnnnnnnnnnnnnnnnnnnnnnnnnnnnnnnnnnnnnnnnnnnnnnnnnnnnnnnnnnnnnnnnnnnnnnnnnnnnnnnnnnnnnnnnnnnnnnnnnnnnnnnnnnnnnnnnnnnnnnnnnnnnnnnnnnnnnnnnnnnnnnnnnnnnnnnnnnnnnnnnnnnnnnnnnnnnnnnnnnnnnnnnnnnnnnnnnnnnnnnnnnnnnnnnnnnnnnnnnnnnnnnnnnnnnnnnnnnnnnnnnnnnnnnnnnnnnnnnnnnnnnnnnnnnnnnnnnnnnnnnnnnnnnnnnnnnnnnnnnnnnnnnnnnnnnnnnnnnnnnnnnnnnnnnnnnnnnnnnnnnnnnnnnnnnnnnnnnnnnnnnnnnnnnnnnnnnnnnnnnnnnnnnnnnnnnnnnnnnnnnnnnnnnnnnnnnnnnnnnnnnnnnnnnnnnnnnnnnnnnnnnnnnnnnnnnnnnnnnnnnnnnnnnnnnnnnnnnnnnnnnnnnnnnnnnnnnnnnnnnnnnnnnnnnnnnnnnnnnnnnnnnnnnnnnnnnnnnnnnnnnnnnnaggacttactctgtgtcctcattgatgatggaggattcctggtgctgtccaaccagaaccatcagtgggaccaggtgncaggtgggcaggttcttcagtgaggtggatgccaacctgatgctggcactctacaataactccttctacacccgcaaggagtcctatgactatcaggcagcctgtgcccctcagccccctggcaacctgggtgctgcaccccggggtgtctttgtgngcccaccgttgcagacttccttaacctggcctggtggacctctgctgccgcctggtnggtccctgttccagcagcttctctacggcctcatctaccacagttggttccaagcagngcagaccccgcggaggccgaggggagccccgagacgcgcgagagcagctgcgtcatgaaacagacccagtactacttcggctcggtaacgcctcctacacgccatcatcgactgcggaaactgctccaggnnnnnnnnnnnnnnnnnnnnnnnnnnnnnnnnnnnnnnnnnnnnnnnnnnnnnnnnnnnnnnnnnnnnccagtgcgaggctgcccggctggtgcagaaggagacgcactncggacggcccggagcagtgtgagctagtgcagagaccgcgataccggagaggcccgcacatctgcttcgactacaacgcgacngaagatacctcagactgtggccgcggggcctccttcccgccgtcgctgggcgtcctggtctccctgcagctgctgctcctcctgggcctgccgccccggccgcagcctcaagtcctcgtccacgcctctcgccgcctctgagcgccccgcccccccccaccccaccccacctgacctcttcgcctttcccaccctcctgccctacactccccaccttagggcctaatccctccctcactgaaggacctgagctggccaggccctgagagtctggtctgcgccttgggatggggagtcccaaagcgggatgccgcaggtctttggcacccaaatcacgtctcacctctgaactgttcaagtgtccccagacccttcttccttgctgggctaccccccagtgggatgggacagggaggccacacgcactggtgccaaaaccaggcctctgctgctgccttgcctagaggct

SEQ ID NO: 35646 - DNA, 84 bp, Macaca Mulatta
cagagcgggtatacaggcagagcatcacgcagctggagaaggtccgagctgagtgggagcaggaacaccggaccacctgtgagg

SEQ ID NO: 35647 - DNA, 535 bp, Macaca Mulatta
atggagcgggtcaatgagactgtggtgagagagttcatcttcctcagcttctcgtccgcggccaggctgcagcagctgctttttgttatcttcctgctcctctacctgttcactctgggcatcaatgcaatcatcatttccaccatcgtgctggacagagcccttcatatccccatgtacttcttccttgccatcctctcctgctctgagatttgctacacctttgtcattgtacccaagatgctggttgacctgctggcccagaggaagaccatttctttcctgggctgtgccatccaaatgttttctttcctcttccttggctgctctcactccttcctgctggctgtcatgggttatgatcgttacgtggccatctgtaacccactgcgctactcagtgctcatgggacatgggatgtgtatgggactagtggctgctgcctgtgcctgtggcttcactgttgcacagatcatcacatccttggtatttcaccagcccttttattcctccaatcaactacatcacttcttct

SEQ ID NO: 35648 - DNA, 87 bp, Macaca Mulatta
ggggcccccgccggcgcctcagctcactgagacgctgggcttctacgagagcgaccggcggcgggagaggcgccggggccgcacagg

SEQ ID NO: 35649 - DNA, 763 bp, Macaca Mulatta
gacatccatgggctccacaaggtcattgataacaccaatgtcactcagctgcagctggaagcagagatcgaggctctcaaagaggagctgctcttcatgaagaagaaccatgaagaggaggtaaagagcctataagcccagattgctagctctgggttgaccatggaggtagatgctcccaaatctcacgacctcgccaagatcatggcagacatcgggtccaatatgacgagctggttccaaagaactgagaggagctgggcaagtactgatctcagcagattgaggagagcactgcagtggtcaccacgcagtctgccgaggttggagctgctgagatgacgctcatggagctgagacatacagtctagtccttggagattgacctggactccatgagaaatctgaaggccagcttggagaacagcctgagggagctgctataccctgcagatggaggagctcaacgggatcctgctgcacctggagtcggagctggcacagacctgagcagagggacagcactaggcccaggagtatgaggccctgctgaacatcaaggtcaagctggaggctgagatcaccacctaccgccacctgctggaagacagcgaggacttcaatgtttgcgatgccctggacagcagcaactccatgcaaaccatccaaaagaccaccacctgccggatattggatggcaaagtggtgtctgagacctacaatgccaaagttctgagacattaagccaacagaagcaggggac

SEQ ID NO: 35650 - DNA, 700 bp, Macaca Mulatta
tcaaaagtgatatacctctagatgtggagctgtgttgtaaagacaagagcaacatctacatattaaagtaaaataaagttataactttgaagagaggtccggaagacatgacagaaagctgctagctagaaaattaaaaaactgattaaaagaagcaaggtatgatgaccaaacataaaaagtgttttatagttggtgctgctttaataataataactaatattattgctgtatatgtagttaaactaactcaagattctcagagtttctgcccatatggttggattggtttccaaaacaaatgctattatttttctaaagaagaaggagactggaattcaagtaaatacaactgttccactcaacatgctgacctaactataattgacaacacagaagaaatggaagaatgcttgtactgtctggatgaagaaaaaacactgatcataacatatcctgatatattttgaagatcatggatggccatatgtactacatacactggcaaaatttaagtgacaaacagaatgaagtaaagctgtctgtggagtggagacgacatttgcataagaatttcaatcgatgatctacaatagtctactttaaatgtgaactttaattacaaaatactatgagataacagttgtcttacaaaatattttatatctattccacctattagaattttgccttctaacaa

SEQ ID NO: 35651 - DNA, 829 bp, Macaca Mulatta
  misc_feature (1)...(829): n = A,T,C or G
gggctttgggcctttcctcagctgtcgcgaaggtgctcggtccttccgagaaagctaaggccgcgttggagtgagggcctcacttcatccggcgactagcaccgcgtccggcagcgccagccccacacttgcccgcgctatggcctccgtctccgagctcgcctgcatctactcggccctcattctgcatgacgatgaggtgaccgtcacggaggataagatcaatgccctcattaaagcagccggtgtaaatgttgaacctttttggcctggcttgtttgcaaaggccctggccaatgtcaacattgggagcctcatctgcaatgtaggggctggtggacctgctccagcagctggtgctgcaccagcaggaggtcctgccccctccactgctgctgctccagctgaggagaagaaagtggaagcaaagaaagaagaatccgaggaatctgatgatgacatgggctttggtctttttgactaaatctcttttataacgtgttcaataaaaagctgaacttttaaaaaaagcctgaaaaatgtcagcggaaaaaaaaatggtcgggcccgcccttcgggccccttcgaggaaaccttttctaaaccattccgtttgggcgccgccgggccccccagttagggtaaatgttgaacacaatggtttcataggcttgtgttttccctaagggaaaaatccctggggtccagggaactcaaggtggcctttgggaaatttcttcaccccnnnnnnnnnnnnnnnnnnngcccgcggggggggccaaaacacggaaagcgcgtttttcttggaagacaaaaatccccggagaaa

SEQ ID NO: 35652 - DNA, 242 bp, Macaca Mulatta
ggtgcctgctgccctttgggggtgaaattatataggctgggctctaacggcatccggatctactggcaagcctccaggggctctgccagttacagcactgacctctacggctccaaaggcattttcacgtgcaccccgagtgctggcctcagtttctgtgatgtcactgagataccctgtggggatgtatacactgtgatggtctcaccagttgctgaaacaggattgaagcttactttctg

SEQ ID NO: 35653 - DNA, 166 bp, Macaca Mulatta
acacagtttcccaaaattcttctttatcttattgtcatgaagcaagaggtactcatcattcccagaacccttccccgggaagcagcagccctcggccttctgtggttggacgcacaggccagcgacccagaggagatggccaggattgggatgcagtgtcctctag

SEQ ID NO: 35654 - DNA, 340 bp, Macaca Mulatta
  misc_feature (1)...(340): n = A,T,C or G
tggccaactgtgagcggaccttcattgccatcaaaccagatggggtccagcggggtcttgtcggagagattatcaagcgttttgagcagaaaggattccgccttgttggtctgaaattcatgcaagnnnnnnnnnnnnnnnnnnnnnnnnnnnnnnnnnnnnnnnnnnnnnnnnnnnnnnnnnnnnnnnnnnnnnnnnnnnnnnnnnnnnnnnnnnnnnnnnnnnngtctgggaggggctgaatgtggtgaagacaggccgagtcatgctcggggagaccaaccctgcggactccaagcctgggaccatccgtggcgacttctgcatacaagtcggcagg

SEQ ID NO: 35655 - DNA, 131 bp, Macaca Mulatta
aggttaaaattgcagagttttctcgtactccagaagactttctaaagaaatatgatgaactgaaatctaaaaatgcgaggaaccttgacccgctggtgtacctgttgtcaaagctcacggaagacaaagag

SEQ ID NO: 35656 - DNA, 593 bp, Macaca Mulatta
cagaaattctaaagcagttcctgactcatttcgacactatttttgaagtgttttacaattccttattctctcagcattttgaaaactgccaggatacttctaaaatagtaaacatcctgatatgtttcctggagttgcttgagcttctcatagcctccagaatctacctgaagttacatttcacttgccagaggattttatttttgaaaccatcttgcatgctagaagttattacctggcctattcaggcttttgtcaaaaggaaggtcatcatattcctcaaaaaatgccttctctttaaagtgggtgaagacctttgtcgtggatctgtacctcccctaatgccgccagaccgtcatgtagcaatggacatgctggctttagctaatgccgttttgcaagctgtgaattcgggattgttgaagacattgtctgttgatggaaaacattccttttttggaggtgatgaagttcaacctggatgtgaacatatcgctagtccagatcatgtgatccttagagcagcaagcttagttataatgaaatccttggaaatcaagtttcagaattgttcgtcagcaagtgaaatgaaa

SEQ ID NO: 35657 - DNA, 380 bp, Macaca Mulatta
  misc_feature (1)...(380): n = A,T,C or G
caactgagtacacttnaaagtactcttctacccccagttctannggagcgggactcanccaaatgtggctgactacctngactgaaatgctcttcgcacaaggaaataaagcgtcctctcagtaatgaccatnagcattcagttattgcagaaggaacccaaaccaagtgataaagccacaatctngtgtntgcttcccatncccggaactcaggactggagccgtgtgggttngcagttaaaagccgcaagtcctgtgcctattttataaaactatgactgtatttatcactgtgttgggtttggttccatttntgaggttcgctccatctttatgaaaaggtggtctttgtattctaacctgcttggatggctggtag

SEQ ID NO: 35658 - DNA, 503 bp, Macaca Mulatta
  misc_feature (1)...(503): n = A,T,C or G
ggcccagttgtcaactcaagagaaagaaatggagaagcttgttcagggagatcaagataagacagagcagttagagcacctgaaaaaggaaaatggccacctctttctcagtttaactgaacagncagaggaaggaccagaagaagctcgagcagacnnnnnnnnnnnnnnnnnnnnnnnnnnnnnnnnnnnnnnnnnnnnnnnnnnnnnnnnnnnnnnnnnnnnnnnnnnnnnnnnnnnnnnnnnnnnnnnnnnnnnnnnnnnnnnnnnnnnnnnnnnnnnnnnnnnnnnnnnnnnnnnnnnnnnnnnnnnnnnnnnnnnnnnnnnnnnnnnnncttttgaagagggagaacagcagattgctcagttacatgggtctggattttaattctttgccgtatcaagtacctacttcagatgaaggaggcgcaggacaaaatccaggacttgtctatggaaacccgtattctggtnnngtatccaagaaagttcttcccccagcc

SEQ ID NO: 35659 - DNA, 930 bp, Macaca Mulatta
tgcggttctgtgctcccgggagcctagcccactggtggcagttttcaatagagtaccagagaatgacaggccgggacattgagaagagcatctgccgcgagatgtccggggatctggagcagggcatgctggctgtggtgaaatgtctcaagaacaccccagccttctttgcggagaggctcaacaaagccatgaggggggcaggaacaaaggaccggaccctgattcgcatcatggtgtctcgcagtgagaccgacctcctggacatcagatcggagtataagcggatgtacggcaagtcgctgtaccacgacatctcgggagatacttcaggggattaccggaagattctgctgaagatctgtggtggcaatgactgaacagtgactggtggctcacttctgcccacctgcgggcaacagtggtgccaggaaaaggccaaaagaatgtctgtttctaacaaatccacaaatagccccgagatgcaccgtcctagagcctaggcctgtcctccacccctcctgacctatgtattgtgccacaggacctgggtcagtctagaactctctcaggatgccttttctaccccagccctcacagcctcttgctgctgaagtagatgtttcatttttctgactcatgcaatcattcccctttgcctgtggctaagacttagcttcatttcatcatttaattgtatatttttattttggaggcatattttccttttcttacgaatccattgcccagacagaattgcataccagtctgtttgctgcgtacacatttctgttgagggcgactggttgggtgaagtgccgtgtccccgctgaggcgagaaagggaagcatgcctgggagggtagcctgtgcatctggtgagtgtgtcacaagctttgttactgccaaactcactcctttttagaaaaaa

SEQ ID NO: 35660 - DNA, 278 bp, Macaca Mulatta
gcagagagcggcgggagcccggaagtgctgcagatgctgaagatccaccgcagcgacccgcagctgatcgtgcagctgcgattctgcgggcggcagccctgcggccgcttcctccgcgcctaccgcgagggggcgctgcgcgccgcgctgcagaggaccctggcggccgcactcgcccagcgttccgtggcgctgcaactggagctgcgcgccggcgctgagcggctggacgctttgctggcggacgaggagcgctgtttgagatgtatcctagccca

SEQ ID NO: 35661 - DNA, 783 bp, Macaca Mulatta
  misc_feature (1)...(783): n = A,T,C or G
tcaccaccaccaccatgggcgagacttcctgctccgagcagccagctttgacgtatgcgagagcgtggatgaggctgggggctccggtcctgctggcctccgtgcttccaccagcgacgggatcttacggggcaacggaacagggtacctgccgggcaggggtcgtgtgctctcttcctggagccgagcttttgtgagcatccaggaagagatggcagaagatcctctcacctacaaatcccggctgatggtggtggtgaagatggacaactccatccagccggggcccttccgggcggtcctcaagtacctgtacacgggggagctggacgagaacgagcgtgacctcatgcacattgcccacattgatgagatgctcgaggtcttagatctccgcatgatggtggccaatattatcaacaatgaggccttcatgaaccaggagatcacnnnnnnnnnnnnnnnnnnnnnnnnnnnnnnnnnnnnnnnnnnnnnnnnnnnnnnnnnnnnnnnnnnnnnnnnnnnnnnnnnnnnnnnnnnnnnnnnnnnnnnnnnnnnnnnnnnnnnnnnnnnnnnnnnnnnnnnnnnnnnnnnnnnnnnnnnnnnnnnnnnnnnnnnnnnnnnnnnnnnnaggtggtgtttccctacacaagcaagagctgcatgcgggccgtgctggaatacctctacacgggcatgttcacctccagccccgacctggatgacatgaagctcatcatcctagccaaccgtctctgcctgccacacctggttgccctcaca

SEQ ID NO: 35662 - DNA, 2001 bp, Macaca Mulatta
  misc_feature (1)...(2001): n = A,T,C or G
gtagcacctggagcccacgaccccgcggtcacccggcctgttgagacccacgagctcattcgcaatgcagctgacatctctgtcatcgttatctacttcctggtggtgatggccgtcggactgtgggnggctatgttttccaccaatcgtggaactgttggaggcttcttcctggcaggccgaagtatggtgtggtggccgnnnnnnnnnnnnnnnnnnnnnnnnnnnnnnnnnnnnnnnnnnnnnnnnnnnnnnnnnnnnnnnnnnnnnnnnnnnnnnnnnnnnnnnnnnnnnnnnnnnnnnnnngccctggttttggtggttgtgctgggctggctgtttgtccccatctatattaaggctggggtnggtggtgacgatgccagagtacctgcggaagcggtttggaggccagcggatccagatctacctttccattctgtccctgctgctctacattttcaccaagatctcggnnnnnnnnnnnnnnnnnnnnnnnnnnnnnnnnnnnnnnnnnnnnnnnnnnnnnnnnnnnnnnnnnnnnnnnnnnnnnnnnnnnnnnnnnnnnnnnnnnnnnnnagggggcctggcggcagtgatttacacggacaccttgcagacggtgatcatgctggtggggtctttaatcctgactgggtttgngcttttcatgaagtgggaggctatgatgccttcatggaaaagtacatgaaagccattccagccatggtttctgatggcaacagcacctttgaggaaaaatgctacactccgagggccgactcattccacatcttccgagatcccctcacgggagacctcccatggcctgggctcatctttgggatgtccatccttgccctgtggtactggtgcacagatcaggtncaggtcattgtgcagcgctgcctctcagccaagaatatgtctcacgtgaaggccggctgcaccctgtgtgggtacctaaagctgttgcccatgttcattatggtgatgccaggaatgatcagccgcattctgtacacagnnnnnnnnnnnnnnnnnnnnnnnnnnnnnnnnnnnnnnnnnnnnnnnnnnnnnnnnnnnnnnnnnnnnnnnnnnnnnnnnnnnnnnnnnnnnnnnnnnnnnnnnnnnnnnnnnnnnnnnnnnnnnnnnnnnnnnnnnnnnnnnnnnnnnnnnnnnnnnnnnnnnnnnnnnnnnnacagcgccagcaccctcttcaccatggacatctacaccaaggtccgcaagagagcatctgagaaagagctcatgattgccggaaggtnnnnnnnnnnnnnnnnnnnnnnnnnnnnnnnnnnnnnnnnnnnnnnnnnnnnnnnnnnnnnnnnnnnnnnnnnnnnnnnnnnnnnnnnnnnnnnnnnnnnnnnnnnnnnnnnnnnnnnnnnnnnnnnnnnnnnnnnnnnnnnnnnnnnnnnnnnnnnnnnnnnnnnnggagccttctggggactgatactaggatttctgattgggatttcacgtatgannnnnnnnnnnnnnnnnnnnnnnnnnnnnnnnnnnnnnnnnnnnnnnnnnnnnnnnnnnnnnnnnnnnnnnnnnnnnnnnnnnnnnnnnnnnnnnnnnnnnnnnnnnnnnnnnnnnnnnnnnnnnnnnnnnnnnnnnnnnnnnnnnnnnnnnnnnnnnnnnnnnnnnnnnnnnnnnnnnnnnnnnnnnnnnnnnnnnnnnnnnnnnnnnnnnnnnnnnnnnnnnnnnnnnnnnnnnnnnnnnnnnnnnnnnnnnnnnnnnnnnnnnnnnnnnnnnnaagttcctgagaagaaaaaaggattcttcaggagagcctatgacctattttgtgggctggagcagcagaatgcacccaagatgactgaggaagaggagaaagccatgaagatgaagatgacggacacctctgagaagcctttgtggaggacagtggcgaacgtcaatggcatcatcctggtgaccgtggctgtcttttgccatgcatattttgcctga

SEQ ID NO: 35663 - DNA, 807 bp, Macaca Mulatta
  misc_feature (1)...(807): n = A,T,C or G
ggggccccagacttttaaaacagcactaaataacttgggggaaacggggggagggaagggcccaggactcggggctgttcaacctaatgaaaaccctgttgctgcgtcactgtgttccctttggcctggccaagtttgatactgtggggattcagtttaggcgctggcccgaggacatcccagcggtggtacttcggagaaacctgtctgcatctgactgagcagaataaatcgtcaggtgcctggagcnnnnnnnnnnnnnnnnnnnnnnnncattgagttttaacagaagggnnnnnnnnnnnnnnnnnnntttttgcagaatttctcaaaaatcagtttgtggattccagtagtatttatattgagagaaacaaattttagtccttccaactgtgctaaaacttggatatttgtgaaaactcaccaccatacaagcatcagaagagctctcttgttgttagcacttactgtttgcaagaacagaatgcatccttttatccttttatgaaaaatgacaagtgaaggcaaaagggggaaggttatttgatctggaagatgagtgttctgatgtggtggcttttgcaaaaatctttattggtgttgaaaactggaaaaaaataactcctcccagaattcatactgtcctgacaagaaactatgggttctctgttttttaggatattgtgggaaaaatgtttttggggcattttttctctggaatttaattttcttcctcccccgcccccttttttccttaaaaaaccaaccaaaaaaaccccccctaaaccaaaaccggaaaccaat

SEQ ID NO: 35664 - DNA, 410 bp, Macaca Mulatta
aggggggcatcctctcgccaatcggaagtgcaaagaggcgggcgtgccagtccctggacagctacgacgccatgaatatcttgcccaagaagagctggcacgtccggaacaaggacaatgtcgcccgcgtgcggcgtgacgaggcccaggcccgggaggaggagaaggagcgtgagcggagggcgctgctggctcagcaagaggtaagctcggaggccggccgggctgaccgccggagcccagcgcgcacgcgccgcggttgggggccggaagcggaggcgttgcgcaggctcagtgtgccccgtgtgaaattcgggaccaggcgccgatcccgttttcgaggacgttgctctgcaaaccttgtggccacttccacgaaacctcccttgatctcgccttcgtcttagttt

SEQ ID NO: 35665 - DNA, 1005 bp, Macaca Mulatta
  misc_feature (1)...(1005): n = A,T,C or G
ggggattaccatctttattgctgtaatgtgttaagcattatatgctagtagtatctagtttaattgtttcaggtggaaagtattctttgagtttccatattgaatgtgtttggactaaacaaacaataaactactgatgtctgcagcattaaaaaatttttataagaaacgattcattattttactttctatataatgagataaaaagacataatatcacacaaataaaaatattacctaaagataaaccagatgtgtaaaacactttataaacaaaaaataaaaatactatattctactcttcccactttataataacccagtactaatatcccaataagtgagatctataccgctacatcaggcgctctatgcagatcgacccttactcttttctacttaaataatagtatgcaatcaaaaaaagaatatacatcccacattttactatattctttcatctattgtcttccggaagttagtaaacaagtaaaaagatttatcacctttaaactacaccctaattattcttttttgacaattcataatatgacattcacttacacatttaaaagctggttcccttaaaccatttatattcactataaattattaagacatnacactattaaccacacaaagatacctcagacctgaggagttacttcatatctgtaataatattatatacgtaacacgctccacagattacgaataccttataaactatcctaataataattcaacgatttaccgacatattatattgtctgcttctatcatatttatttgacatgtacggtataaaagttacacaagaaaaaaataanaaatacatcattaagatcttccgcaatatatttagcattatcagagatatactcacagactaaactgacggccgtatgacaacacattaatttataaaatatagttgcttcgatcaataaaaagtgtcaatgatttttactacaacaatctatttaattcatttacaataagaga

SEQ ID NO: 35666 - DNA, 666 bp, Macaca Mulatta
  misc_feature (1)...(666): n = A,T,C or G
gagaccaggaggataaagactgcccatcaaggaagaaacaggaagcccncttaaatgccgcaccctacagcatggaaagcatgagtcaagacactgaagttagaagtcgggtcgtggggggaagtcttcgaggccctctccctcagtaaattcacatttttccttcctcctgttacatcttcccaatatcttttctattccttggaccaatcagagatgctgtagctccttggggctaaggtactaatccctttcagcacccccaccccattcccctttttaatgtaattttttccacaggaggtatttcttttttatgttggtcctgagtattttgcaaatgcacagagaaaataaaactaaactgctnnnnnnnnnnnnnnnnnnnnnnnnnnnnnnnnnnnnnnnnnnnnnnnnnnnnnnnnnnnnnnnnnnnnnnnnnnnnnnnnnnnnnnnnnnnnnnnnnnnnnnnnnnnnnnnnnnnnnnnnnnnnnnnnnnnnnnnnnnnnnnnnnnnnnnnnnnnnnnnnnnnnnnnnnnnnnnnnnnnnnnnnnnnnnnnnnnnnnnnnnnnnnnnnnnnnnnnnnnnnnnnnnnnnnnnnnnnnnnnnnnnnnnnnnnnnnnnnnnnnnnnnnnnnnnnnnnnnnnnnnnnnnnnnnnnnnnnnn

SEQ ID NO: 35667 - DNA, 80 bp, Macaca Mulatta
ccagatcctctccttcatcctgcacacaatcgtgcgaggcttcatccactccgctgtcgggggcctgtacgctgccgtgt

SEQ ID NO: 35668 - DNA, 196 bp, Macaca Mulatta
ctggaagcagagaagctaagtggtactttgggtagtgataaccttacattacaagttaaaatgtacttccgaaggatccatgattacctggaaaaccaggactacagcagctgtgcctgggccattgtccaagtagaaatcaaccgatgtcttttctttgtgttcagtctcacagaaaagctgagcaaacaaggaa

SEQ ID NO: 35669 - DNA, 1500 bp, Macaca Mulatta
  misc_feature (1)...(1500): n = A,T,C or G
gctgctgactctttgtgaccctggaaaacagaacacagatgaacaatttcagggcactcaaggagtcaaggacagtttggaaagaagcaggatccaaaataccagtagnnnnnnnnnnnnnnnnnnnnnnnnnnnnnnnnnnnnnnnnnnnnnnnnnnnnnnnnnnnnnnnnnnnnnnnnnnnnnnnnnnnnnnnnnnnnnnnnnnnnnnnnnnnnnnnnnnnnnnnnnnnnnnnnnnnnnnnnnnnnnnnnnnnnnnnnnnnnnnnnnnnnnnnnnnnnnnnnnnnnnnnnnnnnnnnnnnnnnnnnnnnnnnnnnnnntggaggtgaaagaaatggcagagaaagcagctactggacagctcaccgtacctccttggcatcctcagagtagtttgactttagaaagtgaggctgaaaatgagcccgatgccctgctgcagccacccattgggagccctgaaaacacggattggcagcgagttattgagtatcatagggaaaatgatgagcccagaggaaatgccaagtttgacaacacgggcaacaatgactgtgacagtgatcagcatgacagacagcccaggcctggaagcttcaccagtannnnnnnnnnnnnnnnnnnnnnnnnnnnnnnnnnnnnnnnnnnnnnnnnnnnnnnnnnnnnnnnnnnnnnnnnnnnnnnnnnnnnnnnnnnnnnnnnnnnnnnnnnnnnnnnnnnnnnnnnnnnnnnnnnnnnnnnnnnnnnnnnnnnagtactgaagatgaacaagaagagacatcaaaagagtcactaaaggaactgaaagagaaagacatnnnnnnnnnnnnnnnnnnnnnnnnnnnnnnnnnnnnnnnnnnnnnnnnnnnnnnnnnnnnnnnnnnnnnnnnnnnnnnnnnnnnnnnnnnnnnnnnnnnnnnnnnnnnnnnnnnnnnnnnnnnnncagggtcagtttcttcagctgccagtcagtataaagactgcattgaaagtatcacatttcaggttaagacagagtctgcctcttgctggaacagtcaagaatttattcaaactttgtctgatgaatttataagtgtccgagagagagcaaagaaactggattctctccttactgcctctgaaacttgcccttcaagactgcctggtcttnaaaagattgtcttcatttattggggctggatcctccagccttgttaaggcatgtgactcatcaccaccccatgccacccagagaaggagcctgcctaaagnnnnnnnnnnnnnnnnnnnnnnnnnnnnnnnnnnnnnnnnnnnnnnnnnnnnnnnnnnnnnnnnnnnnnnnnnnnnnnnnnnnnnnnnnnnnnnnnnnnnnnnnnnnnnnnnnnnnnnnnnnnnnnnnnnnnnnnnnnnnnnnnnngatcaaaggcacttagaagaacaagaaactgacagtaaaaaagaagatagtagtatgcttttgtccaaagaaactggagatctgggagaggacacagagag

SEQ ID NO: 35670 - DNA, 633 bp, Macaca Mulatta
cctgatctctgggagctgaggcattgctctggtttgctttcattttggagcctttttcttccagagtgtcaaggcagttccctgccctggagcctcgtggagggtcatgattcattacctactcaagttggatgtgtgatgcccagaaaggtcagctcccagtttcaagggatgaaagataccaggcgaggcccgcagtgaagcctccacacctggcattggcagctccccttcctgcacccctccccacccatcccagcctggctcattctcttcgttttgcttttgtgtagagtcctgcttcctgttcgccctcacgcgccagaagctgccacccttttgccagcaggggtacctgaggatgcagggactcgtgagtaccaagagccttcggcagcacagagtggagagcaggcttctacgggacgatgcccccatgggcagggacctggaggacagcagccagcatcctggcgaccaagagctactaggtgcccccctggctccagggcctctggcccagtccctcgatagcaacaaggaggagctctgactgtcccttcctaggctgtgggcacagtggccaggcctccccacccaggcccatggtcagttcctctttccccgcaaccg

SEQ ID NO: 35671 - DNA, 377 bp, Macaca Mulatta
  misc_feature (1)...(377): n = A,T,C or G
acacgtgacccaccatcctgtctttgactatgaggccaccctgaggtgctgagccctgggcttctaccctgcggagatcagactgacctggcagcgggagagtgaggaccagacccacgacgtggagctcgtggggaccaggcctgcaggggatggaaccttccagaagtgggcatctgtggtggtgccttctggagaggagcagagattcacgtgctatgtgcagcaccaggggctgcctgagcnnnnnnnnnnnnnnnnnnnnnngtctttccagcccactatcctcatcatgggcatcattgctggactggttgtctttgcagctgttgtcactgaagctgtggtcacttttgtgctgtggaggaagaagagct

SEQ ID NO: 35672 - DNA, 693 bp, Macaca Mulatta
  misc_feature (1)...(693): n = A,T,C or G
cggccctccgncccctccccgcggtgcgcggcccgcccaggacgaggggcggcgggcgcgcagtgctgggtccagtggtggagagaaggcgaggattaccccccggaggcgttgtctgcgactcggcggaggctccgacttccagcgggccggtcgggaaagatcagagcctcctaagaaatacccagaagtcaagccatggatccacccgcacgtaaagaaaaaaccaaagttaaagaacctgtcagcagagttgagaaggccaaacagaaatcagcccagcaggagctgaagcagagacaaagagcagagatctatgccctcaacagagtcatgacagaactggagcagcagcagtttgatgagttctgtaaacagatgcagcctcctggagaatgagctccccaggttcagaccagatgggaccctgagatttttgtttgacagggtgttgccagttttaagctgagatggcccatttggagccttacagaactaggccagaagacatttgtggataaatctgaactcacttcctatgtgtaacttctacttcactggttcctccaatctgaattggccgcatgcttgctgaagagacttgttttcttcttctaagacagtggtttacggtccaagtatccagttnnnnnnnnnnnnnnnnnnnncacagaaaaacctttttctatttga

SEQ ID NO: 35673 - DNA, 532 bp, Macaca Mulatta
gagcaaaaaagtaaaggaaggaaaggtcctgtacacctatactgtttcatgggattccacgtggtatctttgccactccagctccctgccttgagcaaatgagccccctgctgcaagtgcatagatgggacctctctcctgatgctgtccctgggacctatctgttctgctccagaaagaacatatgcctgtgtttagaaagactccccaggtggtcagctgctccttgcctgtttattctggtgccttcatttttttctccgtcttgtagccaagacactgggaacttcctaagttgtagcgaagtatataaaacaataggagcaaggacatcaacttccgagccaaccttgatacaaatgcaggtggctacttgcaccctgccctgtctgtgctctgtcatgaggaacaactctgtgcagagtgcctgtcctaggtgccctcccttgtgctgaatggtgtgggttttaaggtacacaccttgtcttggtcagttttgtcttttccagagcctgataatggacaataaaga

SEQ ID NO: 35674 - DNA, 168 bp, Macaca Mulatta
  misc_feature (1)...(168): n = A,T,C or G
agggaaaaacttaaaatggatatgaaaagtgaagaaagtgatcataggagaaaaccatttcannnnnnnnnnnnnnnnnnnnnnnnnnnnnnnnnngagcagccatggtcccagagttgtcccacggatgcagaaaacgtaatggaggagtctgaggtcagaatggga

SEQ ID NO: 35675 - DNA, 903 bp, Macaca Mulatta
  misc_feature (1)...(903): n = A,T,C or G
ttttgaggaatgtctgatcattgttatggagatggtgggtccagtttccagagcaccaccgtgcactgtgtacacatgagggggttaccttacagagccactgagaatgatatttataatttcttctcacctcttcatcccatgagagtacatattgaaattggacccgatggcagagttactggtgaggcagatgttgaatttgctactcatgaagatgctgtggcagctatggcaaaagacaaagctaatatgcaacatagatatgtggaactcttcttaaattctactgcaggaacaagtgggggtgcttacgatcacagctatgtagaacttgttttaaattctacagcagaggcaagtggtagagcttatggtagccaaatgatgggagggatgcgcttatccaaccagtctagttatggaggtcctgctagccagcagttgagtggtggttatggaggtggttatggtggtcagagcagtatgagtggaaatgaccaagttctgcaggaaaactccagtgactatcagtcaaaccttgcttaggtagagaaggagcaccaaacagctactccatatataaaagctgtacatttgtgggagttgaatagaatgcttagggatgtctagtatatccagtattattggtaaatgggaaagataattgattctgatcactcttggtcagnnnnnnnnnnnnnnnnnnnnnnnnnnnnnnnnnnnnnnnnnagttaagtttaacagttttgcattacaggcttatgattcatgcttaatgtaaagtggaagttgagattattgtaaaacttcaagctcagcaattttgaacactgaaacattcatctgggacataataacaaagttcagtattgaccataactgttaaaacaatttttagct

SEQ ID NO: 35676 - DNA, 562 bp, Macaca Mulatta
  misc_feature (1)...(562): n = A,T,C or G
agtggagacggctatttcgaaaacagcccactgatgtcccagccagtgtgggagaagtatcgccctgatagattcctgaattccagctcagnnnnnnnnnnnnnnnnnnnnnnnnnnnnnnnnnnnnnnnnnnnnnnnnnnnnnnnnnnnnnnnnnnnnnnnnnnnnnnnnnnnnnnnnnnnnnnnnnnnnnnnnnnnnnnnnnnnnnnnnnnnnnnnnnnnnnnnnnnnnnnnnnnnnnnnnnnnnnnnnnnnnnnnnnnnnnnnnnnnnnnnnnnnnnnnnnnnnnnnnnnnnnnnnnnnnnnnnnnnnnnnnnnnnnnnnnnnnnnnnnnnnnnnnnnnnnnnnnnnnnnnnnnnnnnnnnnnnnnnnnnnnnnnnnnnnnnnnnnnnnnnnnnnnnnnnnnnnnnnnggcagatcaacgggacaggccttcttggcaagaggaatgaccagctgccttccaacttcacccctgttttctactcacaactgcaaaacagctcctgggctgaagatgtgatctccagctgtaatggagacagctcatgcatctatgacac

SEQ ID NO: 35677 - DNA, 750 bp, Macaca Mulatta
ggatgtgctactcagtttccagatgacatcagatgaacttccaaaagaaaactggctaaagatgctgtgtcgacatgtagccaacaccatttgtaaagcagatgctgagaatcttatttatactgctgatccagaatcctttgaagtaaatacaaaagatatggacagtactttgagtagagcatcaagagcaataaaaaagacttcgaaaaaggttacaagagcattctctttctccaaaactccaaaaagagctcttcgaagggcttttatgacatcccacggctcagtggaaggaagaagtccttccagcaatgataagcatgtaatgagtcgtctttctagcacatcatcattagcaggtatcccttctccctcccttgtcagccttccttccttctttgaaaggagaagtcatacgttaagtagatctacaactcatttgatatgaagcattaccaaaatcttaaattatagaaatgtataaacacctcatactcaaataagaaactgacttaaatggtacttgtaattagcacttggtgaaagctggaaggaagataagtaacactaaagtatgctatttgatttttcttcttgaaagagtaaggtttacctgttacattttcaagttaattcatgttaaaaaatgatagttattttgatgtaatttatctttttgtttgaatctgtcattcaaaggccaataatttaagttgctatcagcctgatattagtagctttgcaacc

SEQ ID NO: 35678 - DNA, 423 bp, Macaca Mulatta
gtattaagtccatctgagaaactagagccttgggacccagggatgaggaaacttaccgtacagacatgcgtgctgaccttcgccctgcgggccacggcctctgccatgcaactgcacaagcttcagcctgaaactctctctggcaccgccctaaacagaccaagtgtgagggagggagcatgtaatgcaaagtccacagagaataagaagccacaagattcagtgctctgaagtcattctagatggtttcagggaagctagcttcccacctctgatagggataccaatggcaaataccacactttgcctaggatgatcattctttgtgcacaatgcatcccatcccaaagacagtccacagcaggacttgctccatctctgaactggtctcacccccttaaacctgcctttatatctaggagt

SEQ ID NO: 35679 - DNA, 979 bp, Macaca Mulatta
  misc_feature (1)...(979): n = A,T,C or G
ttaatgctatcattaaggtcattactctcaaccacctgggcaatgaagaatataccatttcaaatatttacagtacttgtcttcaccaacactgtcccaacatgaaatgaagcaacagagaggaaattgtacataagcacctcagcatttaatccaaacaggggttcttagtctcagcactatgacattttgggctgaatacttatttgttaggcaggagctctcctgtgcattgtaggataattagcagcatccctggtcactacccaatagacgccagtagcaccccaaattgacaacccaaactctccagacatcaccaactgtcccctgtgaggagaaatcactcttggtggagaaccactgacccaactgaattctaaaccaatcaaaagtctgggaagccctccctgtcnnnnnnnnnnnnnnnnnntagaaaagcacttgaagaatattctcaatattcccagtcagcagtatcaagcctgacttgtgttcctgtggaatcattataaattgtataaaatgaattattccccttcagtcttcaaaaatatatttcctcataaacatttgagttttgttgaaaggatggagtttacaaagataccattcttgagtcatggatttctctgctcacagaagggtgtggcatttggaaactggaataaacaaaatggccgcaacaatgcactgagtgaaggaagagagagagaggagccaagggctttagacagtcctccttcaatatgcaattacagagaaagatgcgccttatccaagttaatatctgtaaggtgagagccttggagtcagtttgttgcaaatttcacctactctgttcttttccatctatccccctgagtcagttggttgaagggagttattttttcaagtggaattcaaacaaagctcaaaccagaactgtaaatagtggttgcaggaattcttctctaaactgctttgccctttcctctca

SEQ ID NO: 35680 - DNA, 920 bp, Macaca Mulatta
  misc_feature (1)...(920): n = A,T,C or G
agatttctgacgccctcataaggagagtgcacctgactgaggatcagtggggtaaaggcacactcactccaaggatgaccacggactttgacttgagtctggacaacagccctctgctgcaatccatccaccagctcgacttcgtgcaggtgaaannnnnnnnnnnnnnnnnnnnnnnnnnnnnnnnnnnnnnnnnnnnnnnnnnnnnnnnnnnnnnnnnnnnnnnnnnnnnnnnnnnnnnnnnnnnnnnnnnnnnnnnnnnnnnnnnnnnnnnnnnnnnnnnnnnnnnnnnnnnnnnnnnnnnnnnnnnnnnnnnnnnnnnnnnnnnnnnnnnnnnnnnnnnnnnnnnnnnnnnnnnnnnnnnnnnnnnnnnnnnnnnnnnnnnnnnnnnnnnnnnnnnnnnnnnnnnnnnnnnnnnnnnnnnnnnnnnnnnnnnnnnnnnnnnnnnnnnnnnnnnnnnnnnnnnnnnnnnnnnnnnnnnnnnnnnnnnnnnnnnnnnnnnnnnnnnnnnnnnnnnnnnnnnnnnnnnnnnnnnnnnnnnnnnnnnnnnnnnnnnnnnnnnnnnnnnnnnnnnnnnnnnnnnnnnnnnnnnnnnnnnnnnnnnnnnnnnnnnnnnnnnnnnnnnnnnnnnnnnnnnnnnnnnnnnnnnnnnnnnnnnnnnnnnnnnnnnnnnnnnnnnnnnnnnnnnnnnnnnnnnnnnnnnnnnnnnnnnnnnnnnnnnnnnnnnnnnnnnnnnnnnnnnnnnnnnnnnnacagaactgagggagggatcgcaaaaggggccacaattggggtcctcctcgacttaaatagaaaaaacttgacattttttatcaacgatgaacaacaaggtcccatagcatttgataacgtggagggcctgttcttccctgcggtcagcctgaacaggaacgtgcagg

SEQ ID NO: 35681 - DNA, 359 bp, Macaca Mulatta
  misc_feature (1)...(359): n = A,T,C or G
agccagtggcctctactggatcctgtacaacttcacaagacacccagacaccgggagtgctgccagcnnnnnnnnnnnnnnnnnnnnnnnnnnnnnnnnnnnnnnnnnnnnnnnnnnnnnnnnnnnnnnnnnnnnnnnnnnnnnnnnnnnnnnnnnnnnnnnnnnnnnnnnnnnnnnnnnnnnnnnnnnnnnnnnnnnnnnnnnnnnnnnnnnnnnnnnnnnnnnnnnnnnnnnnnnnnnnnnnnnnnnnnnnnnnnnnnnnnnnnnnnnnnnttcctacaagctttaattgaatgacagatcctagtatatcttacctactaaaaaccacacttctgaagcgacatggccagcagaag

SEQ ID NO: 35682 - DNA, 1051 bp, Macaca Mulatta
  misc_feature (1)...(1051): n = A,T,C or G
cccagcccaatttcccaccaaaaacttgctgccagtttttcatttgaaaaagtggtttgttcaacattaaaaagaatgcaaagcgaaatcctaaagtagatcgggagatgctgaaggaaattatagccagaggaaattttagactgcagaatataattggcagaaaaatgggcctagaatgtgtagatattctcagcgaactctttcgaaggggactcagacatctcttagcaactattttagcacaactcagtgacatggacttaatcannnnnnnnnnnnnnnnnnnnnnnnnnnnnnnnnnnnnnnnnnnnnnnnnnnnnnnnnnnnnnnnnnnnnnnnnnnnnnnnnnnnnnnnnnnnnnnnnnnnnnnnnnnnnnnnnnnnnnnnnnnnnnnnnnnnnnnnnnnnnnnnnnnnnnnnnnnnnnnnnnnnnnnnnnnnnnnnnnnnnnnnnnnnnnnnnnnnnnnnnnnnnnnnnnnnnnnnnnnnnnnnnnnnnnnnnnnnnnnnnnnnnnnnnnnnnnnnnnnnnnnnnnnnnnnnaggttgccaagactttgaaaaagaatgaaagcctcaaagcctgtattcgctgtaattcacctgcaaaatatgattgctatttacaacgggcaacctgcaaacgagaaggctgtggatttgattattgtacgaggtgtctatgtaattaccatactaccaaagactgttcagatggcaagctcctcaaagccagttgtaaaataggtcccctgcctggtacaaagaaaagcaaaaagaatttacgaagattgtgatctcttattaaatcaattgttactgatcatgaatgttagttagaaaatgttaggttttaacttaaaaaaatattgtattgtgattttcaattttatgttgaaatcagtgtagtatcctgaggttttttccccccagaggataaagaggatagacaacctcttaaactatttttacaatttaatgagaaaaagtttaaaattctcaatacaaatcaaacaatttaaatattttaagaaaaaaggaaaagtagatag

SEQ ID NO: 35683 - DNA, 299 bp, Macaca Mulatta
  misc_feature (1)...(299): n = A,T,C or G
gcatgcttgagagttcaaaccggcttgatgaagaacacaggctaatcgccaggtatgcagcaaggctggcagcagagtcctcttnnnnnnnnnnnnnnnnnnnnnnnnnnnnnnnnnnnnnnnnnnnnnnnnnnnnnnnnnnnnnnnnnnnnnnnnnnnnnnnnnnnnnnnnnnnnnnnnnnnngagaaatcttacaggagatccagagacttcgactagagcatgaacaagcttctcagcccacgccagagaaggcacagcaaaaccccaccctgctggcagaactccggctcctcag

SEQ ID NO: 35684 - DNA, 2238 bp, Macaca Mulatta
  misc_feature (1)...(2238): n = A,T,C or G
caggattcttactacagatttaatgaccttaactacagatggatctctttggataactggacctacagcaaggaatttaaaatcccctttgaaattannnnnnnnnnnnnnnnnnnnnnnnnnnnnnnnnnnnnnnnnnnnnnnnnnnnnnnnnnnnnnnnnnnnnnnnnnnnnnnnnnnnnnnnnnnnnnnnnnnnnnnnnnnnnnnnnnnnnnnnnnnnnnnnnnnnnnnnnnnnnnnnnnnnnnnnnnnnnnnnnnnnnnnnnnnnnnnnnnnnnnnnnnnnnnnnnnnnnnnnnnnnnnnnnnnnnnnnnnnnnnnnnnnnnnnnnnnnnnnnnnnnnnnnnnnnnnnnnnnnnnnnnnnnnnnnnnnnnnnnnnnnnnnnnnnnnnnnnnnnnnnnnnnnnnnnnnnnnnnnnnnnnnnnnnnnnnnnnnnnnnnnnnnnnnnnnnnnnnnnnnnnnnnnnnnnnnnnnnnnnnnnnnnnnnnnnnnnnnnnnnnnnnnnnnnnnnnnnnnnnnnnnnnnnnnnnnnnnnnnnnnnnnnnnnnnnnnnnnnnnnnnnnnnnnnnnnnnnnnnnnnnnnnnnnnnnnnnnnnnnnnnnnnnnnnnnnnnnnnnnnnnnnnnnnnnnnnnnnnnnnnnnnnnnnnnnnnnnnnnnnnnnnnnnnnnnnnnnnnnnnnnnnnnnnnnnnnnnnnnnnnnnnnnnnnnnnnnnnnnnnnnnnnnnnnnnnnnnnnnnnnnnnnnnnnnnnnnnnnnnnnnnnnnnnnnnnnnnnnnnnnnnnnnnnnnnnnnnnnnnnnnnnnnnnnnnnnnnnnnnnnnnnnnnnnnnnnnnnnnnnnnnnnnnnnnnnnnnnnnnnnnnnnnnnnnnnnnnnnnnnnnnnnnnnnnnnnnnnnnnnnnnnnnnnnnnnnnnnnnnnnnnnnnnnnnnnnnnnnngttacggctccttttacagtctgttgtggatgctaacatgaatactcttcgggtttggggaggaggaatttatgagcaggatgagttctatgaactctgtgatgaactaggaataatggnnnnnnnnnnnnnnnnnnnnnnnnnnnnnnnnnnnnnnnnnnnnnnnnnnnnnnnnnnnnnnnnnnnnnnnnnnnnnnnnnncagatcaagagactgaaatctcatccttctatcatcatatggagtggcaataatgaaaatgaggaggcgctgatgatgaattggtaccatatcagtatcactgaccggccaatctacatcaaggactatgtgacactctacgtgaaaaacatcagagagctcgtattggcannnnnnnnnnnnnnnnnnnnnnnnnnnnnnnnnnnnnnnnnnnnnnnnnnnnnnnnnnnnnnnnnnnnnnnnnnnnnnnnnnnnnnnnnnnnnnnnnnnnnnnnnnnnnnnnnnnnnnnnnnnnnnnnnnnnnnnnnnnnnnnnnnnnnnnnnnnnnnnnnnnnnnnnnnnnnnnnnnnnnnnnnnnnnnnnnnnnnnnnnnnnnnnnnnnnnnnnnnnnnnnnnnnnnnnnnnnnnnnnnnnnnnnnnnnnnnnnnnnnnnnnnnnnnnnnnnnnnnnnnnnnnnnnnnnnnnnnnnnnnnnnnnnnnnnnnnnnnnnnnnnnnnnnnnnnnnnnnnnnnnnnnnnnnnnnnnnnnnnnnnnnnnnnnnnnnnnnnnnnnnnnnnnnnnnnnnnnnnnnnnnnnnnnnnnnnnnnnnnnnnnnnnnnnnnnnnnnnnnnnnnnnnnnnnnnnnnnnnnnnnnnnnnnnnnnnnnnnnnnnnnnnnnnnnnnnnnnnnnnnnnnnnnnnnnnnnnnnnnnnnnnnnnnnnnnnnnnnnnnnnnnnnnnnnnnnnnnnnnnnnnnnnnnnnnnnnnnnnnnnnnnnnnnnnnnnnnnnnnnnnnnnnnnnnnnnnnnnnnnnnnnnnnnnnnnnnnnnnnnnnnnnnnnnnnnnnnnnnnnnnnnnnnnnnngtgagagtccatacgtggagctccctggagcccgtgtgctcctgtgtgactgaacatttggtgatgaaaggaggagaggctgtccgcctctatgaggagccagtgtctgaattgctgaggagatgtgggaattgcacacgggaaagctgtgtggtttccttttacctttcagcggaccatgaactcctgagcccgaccaactaccacttcctgtcctcactgaaggaggctctggggctctgcaaggcgcagatcact

SEQ ID NO: 35685 - DNA, 1927 bp, Macaca Mulatta
  misc_feature (1)...(1927): n = A,T,C or G
gctcgtgtgggccacctcaagccagctgggctgtgggcggcacctgtgctctgcagaccaggcagcgatagaagcctttgtctgtgcctactcccccnnnnnnnnnnnnnnnnnnnnnnnnnnnnnnnnnnnnnnnnnnnnnnnnnnnnnnnnnnnnnnnnnnnnnnnnnnnnnnnnnnnnnnnnnnnnnnnnnnnnnnnnnnnnnnnnnnnnnnnnnnnnnnnnnnnnnnnnnnnnnnnnnnnnnnnnnnnnnnnnnnnnnnnnnnnnnnnnnnnnnnnnnnnnnnnnnnnnnnnnnnnnnnnnnnnnnnnnnnnnnnnnnnnnnnagggcctcaagtgagggtcttaatggagggaccctggagtgagagatgctttcttcaatgtctctgacgtcaccctgttcatcagcagaaagcaggggtcatggactctgaggctcatagaagccaggaggtcacttattgacctgaggggtcaaggtcaaggccaacctccatctaagggagtttcaggttgccttgcaggagggaatgcaagatcagagtggccagagctcggggctgctcaataaaaccagcagctcagacttccactggcaactctcgaaaccacagttaatttctggggttggcaatcaactcagatatgttgaagacactgtgcaggcgaaacagaacatcctcaggggccagaccttgcccgggcctgtgggctgccggttgggccgctgtgcacagggagaagagaagcagatgtgagcagaggggactcctgctcttggaagggaggctgtgcgggctgggggtgatgacagcctggccagcacacacgtgacatcctcggccatgggcggggtggcaggaaggggcagccttcctaggagccctgcctgtgtaacctggggtgaggttacagaggaaaggtggggtgctggcccagatcgagagccagaaagtgcaggacatcctcgccttctacctgggccgcctggagaccaccaacgaggtgactgacagtgacttcgagaccaggaacttctggatcggtgagtgccaagctgattaggggtgtggcgagtaaggggttgtgatgccccaacctgctgcaggaaccctggnnnnnnnnnnnnnnnnnnnnnnnnnnnnnnnnnnnnnnnnnnnnnnnnnnnnnnnnnnnnnnnnnnnnnnnnnnnnnnnnnnnnnnnnnnnnnnnnnnnnnnnnnnnnnnnnnnnnnnnnnnnnnnnnnnnnnnnnnnnnnnnnnnnnnnnnnnnnnnnnnnnnnnnnnnnnnnnnnnnnnnnnnnnnnnnnnnnnnnnnnnnnnnnnnnnnnnnnnnnnnnnnnnnnnnnnnnnnnnnnnnnnnnnnnnnnnnnnnnnnnnnnnnnnnnnnnnnnnnnnnnnnnnnnnnnnnnnnnnnnnnnnnnnnnnnnnnnnnnnnnnnnnnnnnnnnnnnnnnnnnnnnnnnnnnnnnnnnnnnnnnnnnnnnnnnnnnnnnnnnnnnnnnnnnnnnnnnnnnnnnnnnnnnnnnnnnnnnnnnnnnnnnnnnnnnnnnnnnnnnnnnnnnnnnnnnnnnnnnnnnnnnnnnnnnnnnnnnnnnnnnnnnnnnnnnnnnnnnnnnnnnnnnnnnnnnnnnnnnnnnnnnnnnnnnnnnnnnnnnnnnnnnnnnnnnnnnnnnnnnnnnnnnnnnnnnncagagagaggcatggaggccattgagggccagggagtgagtgttagannnnnnnnnnnnnnnnnnnnnnnnnnnnnnnnnnnnnnnnnnnnnnnnnnnnnnnnnnnnnnnnnnnnnncgccagtgatccaaagaggctgctctcttctacctggcccaggccctgtggggcagcggagcttccctgtggcgtgaacctcacagggtattaaactaagttatgaatcagctgaa

SEQ ID NO: 35686 - DNA, 307 bp, Macaca Mulatta
agaaccacatgccctgggaagaaccagcaagtgagaagcccagttgctctcacattcggaaggctttccacatggagcctgcccggaagccctgcttcaccactgagatggtgacatgggccctcctctgcgtctctgcagaggctgtgcacggggaggctcattcacagcctaggggcatccctcaccgctcacccatcagtgtggatgacctgtggctggagaagacacagagaaagaagttgcagaagcaggcccacgtcgaaaggagtctgcatgtaggggcagtgcacaaagatggagtcaa

SEQ ID NO: 35687 - DNA, 398 bp, Macaca Mulatta
tgcggcctgcccttcggcattcagtggttcctaatattatggatctggaagaattctgttgtgttattttgtcatattcatccaatttcagttgtcctgtcgtcttttaacagcagtgccaaccctatcatttacttcttcgtgggctcctttatgaagcagtggcggctccggcagccgatcctcaagctggctctccagagggctctgcaggacactgctgaggtggatcacagtgaatgatgcttcagtcagggcaccctggagatgtccagaagcagtctggtgtagagatggacagcctctacttccacagatatatgtggctttgagaggcaactttgcccctgtctgtctgatttgctaaactttctcagccctgatcttaaaacagttaa

SEQ ID NO: 35688 - DNA, 112 bp, Macaca Mulatta
gaattcaaacggtgctggaagggccaaggggcctgccgaacttactgcacaaggcaagaaacttacatgcaccagtgcccggatgcgtccctgtgctgtctctcctatgcat

SEQ ID NO: 35689 - DNA, 904 bp, Macaca Mulatta
gtggaacctccaaaagaggaacaaaaaaatgcagagcagaatggaccagtggatggacaaggagacaacccaggtccccaggctgctgagcagggtacagacacagctgtgccttcggagtcagacaagaagcttcctgagatggacattgattgattccaacacttgtttctattaaaacagactattataaagctttaagttgtcaactttgttctaaatatcaactagagcaagtgaatactgaagatttcttagtcagtttttaggggattttcggggaggggaaataggtaatgtatggagcattttgacttctaaatagttagatacagaaattaagtgcattgtatctttttcataatggtactatttagaagcccagttagtcttactgagctaatgcttcactcctttatgtttaaccatgtgtctacaagaataagtttgttttggaaagttgagctatagctacagctctagctatccggcagacttttcattatgacttacatggcaggagctctaattatgctttaaaaatctgttgtggagatagctctaaaggctccctgcctggtgtggggatggggtctccctctttgtgagggttggagcatggcacagcatggattaacacgggagaggaacaaaggtgtgctctgaacgtcttcatatttcaccttcaccctcacctgtgttctgttccctatctcccaataaaagggctcccattataaatgccatgtacttctcttgggaaaatagacccccttgcctagagtaagttgttaactgagggctttaaacctggaggctctttctgaaagtttgttcacgaataccccaatcatcagggtctaaataattttcagaagattagaattgggtagatatactgttt

SEQ ID NO: 35690 - DNA, 4172 bp, Macaca Mulatta
  misc_feature (1)...(4172): n = A,T,C or G
aagagccagaacgagaagtaccggctgaagtacctgcggctgcgcaaagcggccaaggccactgtgtttgnnnnnnnnnnnnnnnnnnnnnnnnnnnnnnnnnnnnnnnnnnnnnnnnnnnnnnnnnnnnnnnnnnnnnnnnnnnnnnnnnnnnnnnnnnnnnnnnnnnnnnnnnnnnnnnnnnnnnnnnncaggctgcagctccttcccacagttccagtttgcccctgacttatggtgtggccagctctgtgggaactatacagggagctgggcctatttcagggcccagcactggggctgaggaaccatttgggaagaaatcgaagaaggagaaaaaagaaaaaggcaaagagaacaacaaactggaagnnnnnnnnnnnnnnnnnnnnnnnnnnnnnnnnnnnnnnnnnnnnnnnnnnnnnnnnnnnnnnnnnnnnnnnnnnnnnnnnnnnnnnnnnnnnnnnnnnnnnnnnnnnnnnnnnnnnnnnnnnnnnnnnnnnnnnnnnnnnnnnnnnnnnnnnnnnnnnnnnnnnnnnnnnnnnnnnnnnnnnnnnnnnnnnnnnnnnnnnnnnnnnnnnnnnnnnnnnnnnnnnnnnnnnnnnnnnnnnnnnnnnnnnnnnnnnnnnnnnnnnnnnnnnnnnnnnnnnnnnnnnnnnnnnnnnnnnnnnnnnnnnnnnnnnnnnnnnnnnnnnnnnnnnnnnnnnnnnnnnnnnnnnnnnnnnnnnnnnnnnnnnnnnnnnnnnnnnnnnnnnnnnnnnnnnnnnnnnnnnnnnnnnnnnnnnnnnnnnnnnnnnnnnnnnnnnnnnnnnnnnnnnnnnnnnnnnnnnnnnnnnnnnnnnnnnnnnnnnnnnnnnnnnnnnnnnnnnnnnnnnnnnnnnnnnnnnnnnnnnnnnnnnnnnnnnnnnnnnnnnnnnnnnnnnnnnnnnnnnnnnnnnnnnnnnnnnnnnnnnnnnnnnnnnnnnnnnnnnnnnnnnnnnnnnnnnnnnnnnnnnnnnnnnnnnnnnnnnnnnnnnnnnnnnnnnnnnnnnnnnnnnnnnnnnnnnnnnnnnnnnnnnnnnnnnnnnnnnnnnnnnnnnnnnnnnnnnnnnnnnnnnnnnnnnnnnnnnnnnnnnnnnnnnnnnnnnnnnnnnnnnnnnnnnnnnnnnnnnnnnnnnnnnnnnnnnnnnnnnnnnnnnnnnnnnnnnnnnnnnnnnnnnnnnnnnnnnnnnnnnnnnnnnnnnnnnnnnnnnnnnnnnnnnnnnnnnnnnnnnnnnnnnnnnnnnnnnnnnnnnnnnnnnnnnnnnnnnnnnnnnnnnnnnnnnnnnnnnnnnnnnnnnnnnnnnnnnnnnnnnnnnnnnnnnnnnnnnnnnnnnnnnnnnnnnnnnnnnnnnnnnnnnnnnnnnnnnnnnnnnnnnnnnnnnnnnnnnnnnnnnnnnnnnnnnnnnnnnnnnnnnnnnnnnnnnnnnnnnnnnnnnnnnnnnnnnnnnnnnnnnnnnnnnnnnnnnnnnnnnnnnnnnnnnnnnnnnnnnnnnnnnnnnnnnnnnnnnnnnnnnnnnnnnnnnnnnnnnnnnnnnnnnnnnnnnnnnnnnnnnnnnnnnnnnnnnnnnnnnnnnnnnnnnnnnnnnnnnnnnnnnnnnnnnnnnnnnnnnnnnnnnnnnnnnnnnnnnnnnnnnnnnnnnnnnnnnnnnnnnnnnnnnnnnnnnnnnnnnnnnnnnnnnnnnnnnnnnnnnnnnnnnnnnnnnnnnnnnnnnnnnnnnnnnnnnnnnnnnnnnnnnnnnnnnnnnnnnnnnnnnnnnnnnnnnnnnnnnnnnnnnnnnnnnnnnnnnnnnnnnnnnnnnnnnnnnnnnnnnnnnnnnnnnnnnnnnnnnnnnnnnnnnnnnnnnnnnnnnnnnnnnnnnnnnnnnnnnnnnnnnnnnnnnnnnnnnnnnnnnnnnnnnnnnnnnnnnnnnnnnnnnnnnnnnnnnnnnnnnnnnnnnnnnnnnnnnnnnnnnnnnnnnnnnnnnnnnnnnnnnnnnnnnnnnnnnnnnnnnnnnnnnnnnnnnnnnnnnnnnnnnnnnnnnnnnnnnnnnnnnnnnnnnnnnnnnnnnnnnnnnnnnnnnnnnnnnnnnnnnnnnnnnnnnnnnnnnnnnnnnnnnnnnnnnnnnnnnnnnnnnnnnnnnnnnnnnnnnnnnnnnnnnnnnnnnnnnnnnnnnnnnnnnnnnnnnnnnnnnnnnnnnnnnnnnnnnnnnnnnnnnnnnnnnnnnnnnnnnnnnnnnnnnnnnnnnnnnnnnnnnnnnnnnnnnnnnnnnnnnnnnnnnnnnnnnnnnnnnnnnnnnnnnnnnnnnnnnnnnnnnnnnnnnnnnnnnnnnnnnnnnnnnnnnnnnnnnnnnnnnnnnnnnnnnnnnnnnnnnnnnnnnnnnnnnnnnnnnnnnnnnnnnnnnnnnnnnnnnnnnnnnnnnnnnnnnnnnnnnnnnnnnnnnnnnnnnnnnnnnnnnnnnnnnnnnnnnnnnnnnnnnnnnnnnnnnnnnnnnnnnnnnnnnnnnnnnnnnnnnnnnnnnnnnnnnnnnnnnnnnnnnnnnnnnnnnnnnnnnnnnnnnnnnnnnnnnnnnnnnnnnnnnnnnnnnnnnnnnnnnnnnnnnnnnnnnnnnnnnnnnnnnnnnnnnnnnnnnnnnnnnnnnnnnnnnnnnnnnnnnnnnnnnnnnnnnnnnnnnnnnnnnnnnnnnnnnnnnnnnnnnnnnnnnnnnnnnnnnnnnnnnnnnnnnnnnnnnnnnnnnnnnnnnnnnnnnnnnnnnnnnnnnnnnnnnnnnnnnnnnnnnnnnnnnnnnnnnnnnnnnnnnnnnnnnnnnnnnnnnnnnnnnnnnnnnnnnnnnnnnnnnnnnnnnnnnnnnnggtggctcaagcctgtaatcccagcactttgggaggccgagaggggtggatcacgaggtcaggagatcgagaccnnnnnnnnnnnnnnnnnnnnnnnnnnnnnnnnnnnnnnnnnnnnnnnnnnnnnnnnnnnnnnnnnnnnnnnnnnnnnnnnnnnnnnnnnnnnnnnnnnnnnnnnnnnnnnnnnnnnnnnnnnnnnnnnnnnnnnnnnnnnnnnnnnnnnnnnnnnnnnnnnnnnnnnnnnnnnnnnnnnnnnnnnnnnnnnnnnnnnnnnnnnnnnnnnnnnnnnnnnnnnnnnnnnnnnnnnnnnnnnnnnnnnnnnnnnnnnnnnnnnnnnnnnnnnnnnnnnnnnnnnnnnnnnnnnnnnnnnnnnnnnnnnnnnnnnnnnnnnnnnnnnnnnnnnnnnnnnnnnnnnnnnnnnnnnnnnnnnnnnnnnnnnnnnnnnnnnnnnnnnnnnnnnnnnnnnnnnnnnnnnnnnnnnnnnnnnnnnnnnnnnnnnnnnnnnnnnntggacgagtgtggtatgatgtttgcatgtgatattcattacagtattattttaatagcagaaaattatttaaaaatccatatgtccattaataggaaattggttaaataaaatgaggcttccacaaactgaaacactctaaatctatatttacataagaaaattattttggtaaagtaagtcaaaaacacagattacaaaataatacgtagtgtataactcaaatcaagtgaacagttcagcaaaatagtttctctgaatgatgaatttgggggtgatttttacttgcttatactttaatgtccagattttctacagtgcctataaatttcattttcaaacagtaaacagttcctaaattgggggaaatagagtgaattcccacataatgttttaaattattctgccactaaaaataaatgtacatgacttcattaacatagtcattgcctaaaccatatttttcacactatgtattctaggttcctggaggtgaaaggaacctggacttagagttcttggctacctctagctgcccctgaattagaacagccaatgggggtatgtgtattgggggtggaggagtggacatgtagattgacttttcctcaggcatcaatctgttacgaggttcatggtttnnnnnnnnnnnnnaggttcatggtttctatggggccagatgcacgagaggtcaaagcatgggcaacaggagttaactgaatgaattgaatgctaggaagtcctcaggggagccaaagttccttgtaaagtgtnnnnnnnnnnnnnnnnnaactaaataaaatcttggcactga

SEQ ID NO: 35691 - DNA, 311 bp, Macaca Mulatta
  misc_feature (1)...(311): n = A,T,C or G
agcttcatttggttcactgaaccccaagtataacnnnnnnnnnnnnnnnnnnnnnnnnnnnnnnnnnnnnnnnnnnnnnnnnnnnnnnnnnnnnnnnnnnnnnnnnnnnnnnnnnnnnnnnnnnnnnnnnnnnnnnnnnnnnnnnnnnnnnnnngggcaaggaggcaccattcacaaagtttgacccatcctgcctgttcccggcatgccgggactactggacctaccaggggtcattcaccacgccaccctgtgaggagtgcattgtgtggctgctgctgaaggagcccatgaccgtgagctctgaccag

SEQ ID NO: 35692 - DNA, 622 bp, Macaca Mulatta
  misc_feature (1)...(622): n = A,T,C or G
attctccactgaggcccaactgttcctctccttgaaaaatcaaggcttggctcaagtcagatagcacctgaggnnnnnnnnnnnnnnnnnnnnnnnnnnnnnnnnnnnnnnnnnnnnnnnnnnnnnnnnnnnnnnnagattctctgctacttattcaaggtgacacaatgcccttcacactccacctgaggtcccgccttcccactgccctaaggagtttgattctacaaaagaaaccaaacatcagaaatacatccagcatggctgnnnnnnnnnnnnnnnnnnnnnnnnnnnnnnnnnnnnnnnnnnnnnnnnnnnnnnnnnnnnnnnnnnnnnnnnnnnnnnnnnnnnnnnnnnnnnnnnnnnnnnnnnnnnnnnnnnnnnnnnnnnnnnnnnnnnnnnnnnnnnnnnnnnnnnnnnnnnnnnnnnnnnnnnnagttctggaaatacgagttcggtgcccgcaccggcagcctggcttcgctggagcggtactcagagcagctgaaggacatggtggccttcctcttgggctgcagcttctccctggaggaggccttggagaaagcagggctccccagaagagacccagcaggtcacagccaggcggctgcatacaagn

SEQ ID NO: 35693 - DNA, 3115 bp, Macaca Mulatta
  misc_feature (1)...(3115): n = A,T,C or G
ggaaaacatgttccttcagtcgtcaatgctgacctgccttttcctgctaatacctggttcctgtgagttatgccctgaagaaaatttttctagaagctatccttggaagagaaaaggcaaaatcacagggtattgcagagtgcagcaatnnnnnnnnnnnnnnnnnnnnnnnnnnnnnnnnnnnnnnnnnnnnnnnnnnnnnnnnnnnnnnnnnnnnnnnnnnnnnnnnnnnnnnnnnnnnnnnnnnnnnnnnnnnnnnnnnnnnnnnnnnnnnnnnnnnnnnnnnnnnnnnnnnnnnnnnnnnnnnnnnnnnnnnnnnnnnnnnnnnnnnnnnnnnnnnnnnnnnnnnnnnnnnnnnnnnnnnnnnnnnnnnnnnnnnnnnnnnnnnnnnnnnnnnnnnnnnnnnnnnnnnnnnnnnnnnnnnnnnnnnnnnnnnnnnnnnnnnnnnnnnnnnnnnnnnnnnnnnnnnnnnnnnnnnnnnnnnnnnnnnnnnnnnnnnnnnnnnnnnnnnnnnnnnnnnnnnnnnnnnnnnnnnnnnnnnnnnnnnnnnnnnnnnnnnnnnnnnnnnnnnnnnnnnnnnnnnnnnnnnnnnctgacaaatttggagttgctatcactatctttcaattctctttcacatgtgccacccaaactgccaagttccctacgcaaactttttctgagcaacacccagatcaaatacattggtgaagaagatttcaagggtttgataaatttaacattactagatttaagcgggaattgtccgaggtgcttcaatgccccatttccatgcgtgccttgtgatgggggtgcttcaattaatatagatcgttttgcttttcaaaacttgacccaacttcaatacctaaacctctctagcacttccctcaggaagattaatgctgcctggtttaaaaatatgcctcatctgaaggtgctggatcttgaattcaactataaaaagggagaaatcgcctctggggaatttttaacgatgctgccccgcttagaaatacttgacttgtcttttaactatataaaggggagttatccacagcatattaatatttccaaaaacttctctaaacttttgtctctacgggcattgcatttaagaggttatgtgttccaggaactcagaaaagacgatttccagcccctgatgcagcttccaaacttaaaaactatcaacttgggtattaattttattaagcaaatcgatttcaaccttttccaaaatttnnnnnnnnnnnnnnnnnnnnnnnnnnnnnnnnnnnnnnnnnnnnnnnnnnnnnnnnnnnnnnnnnnnnnnnnnnnnnnnnnnnnnnnnnnnnnnnnnnnnnnnnnnnnnnnnnnnnnnnnnnnnnnnnnnnnnnnnnnnnnnnnnnnnnnnnnnnnnnnnnnnnnnnnnnnnnnnnnnnnnnnnnnnnnnnnnnnnnnnnnnnnnnnnnnnnnnnnnnnnnnnnnnnnnnnnnnnnnnnnnnnnnnnnnnnnnnnnnnnnnnnnnnnnnnnnnnnnnnnnnnnnnnnnnnnnnnnnnnnnnnnnnnnnnnnnnnnnnnnnnnnnnnnnnnnnnnnnnnnnnnnnnnnnnnnnnnnnnnnnnnnnnnnnnnnnnnnnnnnnnnnnnnnnnnnnnnnnnnnnnnnnnnnnnnnnnnnnnnnnnnnnnnnnnnnnnnnnnnnnnnnnnnnnnnnnnnnnnnnnnnnnnnnnnnnnnnnnnnnnnnnnnnnnnnnnnnnnnnnnnnnnnnnnnnnnnnnnnnnnnnnnnnnnnnnnnnnnnnnnnnnnnnnnnnnnnnnnnnnnnnnnnnnnnnnnnnnnnnnnnnnnnnnnnnnnnnnnnnnnnnnnnnnnnnnnnnnnnnnnnnnnnnnnnnnnnnnnnnnnnnnnnnnnnnnnnnnnnnnnnnnnnnnnnnnnnnnnnnnnnnnnnnnnnnnnnnnnnnnnnnnnnnnnnnnnnnnnnnnnnnnnnnnnnnnnnnnnnnnnnnnnnnnnnnnnnnnnnnnnnnnnnnnnnnnnnnnnnnnnnnnnnnnnnnnnnnnnnnnnnnnnnnnnnnnnnnnnnnnnnnnnnnnnnnnnnnnnnnnnnnnnnnnnnnnnnnnnnnnnnnnnnnnnnnnnnnnnnnnnnnnnnnnnnnnnnnnnnnnnnnnnnnnnnnnnnnnnnnnnnnnnnnnnnnnnnnnnnnnnnnnnnnnnnnnnnnnnnnnnnnnnnnnnnnnnnnnnnnnnnnnnnnnnnnnnnnnnnnnnnnnnnnnnnnnnnnnnnnnnnnnnnnnnnnnnnnnnnnnnnnnnnnnnnnnnnnnnnnnnnnnnnnnnnnnnnnnnnnnnnnnnnnnnnnnnnnnnnnnnnnnnnnnnnnnnnnnnnnnnnnnnnnnnnnnnnnnnnnnnnnnnnnnnnnnnnnnnnnnnnnnnctggggatcaaagagggaagagtattgtgagtctggagctaacttcttgtgtttcagatgtcactgcagtgatattatttttcttcaccttctttatcaccaccatggttatgttgactgccctggctcaccatttgttttactgggatgtttggtttatatataatgtgtgtttagctaaggtaaaaggctacaggtctctttccacatcccaaactttctatgatgcttacatttcttatgacaccaaagatgcctctgttattgactgggtgataaatgagctgcgctaccaccttgaagagagccaagacaaaaacgttctcctttgtctagaggagagggattgggacccgggattggccatcatcgacaacctcatgcagagcatcaaccaaagcaagaaaacagtatttgttttaaccaaaaaatatgcaaaaagctggaactttaaaacagctttttacttggctttgcagaggctaatggatgagaacatggatgtgattatatttatcctgctggagcctgtgttacagcattctcagtatttgaggctacgacagcggatctgtaagagctccatcctccagtggcctgacaatccgaaggcagaaggcttgttttggcaaactctgagaaatgtggtcttaactgaaaatgattcacggtataacaatatgtatgttgattccattaagcaata

SEQ ID NO: 35694 - DNA, 880 bp, Macaca Mulatta
  misc_feature (1)...(880): n = A,T,C or G
gccctggctagaaattagcagacagctattccacgcagcccaagggcggcagaaagtctccccgctatgtgccctgcacggtgaccctgcgcgacgtacggcgctaccagaactccgagctgctgatcagcaagctgtctcctgcgagagctcgttggtgacgccgctgcaggagagcgaggctgcaggacttttgtgacacgatagtccacctccctgcaaaggctctctcagagacacatctttcctgatggatagctgtgaagcattctcttacccaccccactgcatgtttcaaagtattcctttaaaatgaagtgagtaaaacactgggatgacgttatctggagcccaagaaatatttctcatttggaaaggcctaatatcctaagttgcttacccagaagaacttgacaggatagttatttctaataaaccttaaaaccctttcaggaaatttgaggtaaagtgttagcacacagactgttaaaacgtcttcctcacaaatacgggggaagatatatagaggattatcatatggttaacaaatgatgagtattagaaatgcactttagaaatgagtattagaaatgtttatgagtattagaaaagtacagtgttgggcgttcctgacacaaactgaggcctcctagcaagactggcagatttctgtggaggagggttatttagtacgatagtgcaaataacttttggtgttgtagctaaataaggaatattcataccaagattgcacaatcttgcctcctacctctgttcactgaactctgatgtaannnnnnnnnnnnnnnngagacggggtctcgctctgtcgcccaggctgaagtgcagtggcgtgatttcggctcactgcaagctccgc

SEQ ID NO: 35695 - DNA, 355 bp, Macaca Mulatta
  misc_feature (1)...(355): n = A,T,C or G
agatcatgaatcactcaggagatcctgcagaaggagtatataaaacttatctttgtgtagaaaagatattaaacaggnnnnnnnnnnnnnnnnnnnnnnnnnnnnnnnnnnnnnnnnnnnnnnnnnnnnnnnnnnnnnnnnnnnnnnnnnnnnnnnnnnnnnnnnnnnnnnnnnnnnnnnnnnnnnnnnnnnnnnnnnnnnnnnnnnnnnnnnnnnnnnnnnnnnnnnnnnnnnnnnnnnnnnnnnnnnntattaccagcgccttaatgatctagtggcagcaccagccccgatcccacctcttctggtgtctggaggaccaggttctggaaagtctcttcttttatccaagtgg

SEQ ID NO: 35696 - DNA, 3499 bp, Macaca Mulatta
  misc_feature (1)...(3499): n = A,T,C or G
aggctcgatcgcctttttattttactggatactggcactactcctgtaacaagaaaagctgctgcacagctacttggagaagtggtgaagcttcatccccatgaactcaataatctcctgtctaaagtnnnnnnnnnnnnnnnnnnnnnnnnnnnnnnnnnnnnnnnnnnnnnnnnnnnnnnnnnnnnnnnnnnnnnnnnnnnnnnnnnnnnnnnnnnnnnnnnnnnnnnnnnnnnnnnnnnnnnnnnnnnnnnnnnnnnnnnnnnnnnnnnnnnnnnnnnnnnnnnnnnnnnnnnnnnnnnnnnnnnnnnnnnnnnnnnnnnnnnnnnnnnnnnnnnnnnnnnnnnnnnnnnnnnnnnnnnnnnnnnnnnnnnnnnnnnnnnnnnnnnnnnnnnnnnnnnnnnnnnnnnnnnnnnnnnnnnnnnnnnnnnnnnnnnnnnnnnnnnnnnnnnnnnnnnnnnnnnnnnnnnnnnnnnnnnnnnnnnnnnnnnnnnnnnnnnnnnnnnnnnnnnnnnnnnnnnnnnnnnnnnnnnnnnnnnnnnnnnnnnnnnnnnnnnnnnnnnnnnnnnnnnnnnnnnnnnnnnnnnnnnnnnnnnnnnnnnnnnnnnnnnnnnnnnnnnnnnnnnnnnnnnnnnnnnnnnnnnnnnnnnnnnnnnnnnnnnnnnnnnnnnnnnnnnnnnnnnnnnnnnnnnnnnnnnnnnnnnnnnnnnnnnnnnnnnnnnnnnnnnnnnnnnnnnnnnnnnnnnnnnnnnnnnnnnnnnnnnnnnnnnnnnnnnnnnnnnnnnnnnnnnnnnnnnnnnnnnnnnnnnnnnnnnnnnnnnnnnnnnnnnnnnnnnnnnnnnnnnnnnnnnnnnnnnnnnnnnnnnnnnnnnnnnnnnnnnnnnnnnnnnnnnnnnnnnnnnnnnnnnnnnnnnnnnnnnnnnnnnnnnnnnnnnnnnnnnnnnnnnnnnnnnnnnnnnnnnnnnnnnnnnnnnnnnnnnnnnnnnnnnnnnnnnnnnnnnnnnnnnnnnnnnnnnnnnnnnnnnnnnnnnnnnnnnnnnnnnnnnnnnnnnnnnnnnnnnnnnnnnnnnnnnnnnnnnnnnnnnnnnnnnnnnnnnnnnnnnnnnnnnnnnnnnnnnnnnnnnnnnnnnnnnnnnnnnnnnnnnnnnnnnnnnnnnnnnnnnnnnnnnnnnnnnnnnnnnnnnnnnnnnnnnnnnnnnnnnnnnnnnnnnnnnnnnnnnnnnnnnnnnnnnnnnnnnnnnnnnnnnnnnnnnnnnnnnnnnnnnnnnnnnnnnnnnnnnnnnnnnnnnnnnnnnnnnnnnnnnnnnnnnnnnnnnnnnnnnnnnnnnnnnnnnnnnnnnnnnnnnnnnnnnnnnnnnnnnnnnnnnnnnnnnnnnnnnnnnnnnnnnnnnnnnnnnnnnnnnnnnnnnnnnnnnnnnnnnnnnnnnnnnnnnnnnnnnnnnnnnnnnnnnnnnnnnnnnnnnnnnnnnnnnnnnnnnnnnnnnnnnnnnnnnnnnnnnnnnnnnnnnnnnnnnnnnnnnnnnnnnnnnnnnnnnnnnnnnnnnnnnnnnnnnnnnnnnnnnnnnnnnnnnnnnnnnnnnnnnnnnnnnnnnnnnnnnnnnnnnnnnnnnnnnnnnnnnnnnnnnnnnnnnnnnnnnnnnnnnnnnnnnnnnnnnnnnnnnnnnnnnnnnnnnnnnnnnnnnnnnnnnnnnnnnnnnnnnnnnnnnnnnnnnnnnnnnnnnnnnnnnnnnnnnnnnnnnnnnnnnnnnnnnnnnnnnnnnnnnnnnnnnnnnnnnnnnnnnnnnnnnnnnnnnnnnnnnnnnnnnnnnnnnnnnnnnnnnnnnnnnnnnnnnnnnnnnnnnnnnnnnnnnnnnnnnnnnnnnnnnnnnnnnnnnnnnnnnnnnnnnnnnnnnnnnnnnnnnnnnnnnnnnnnnnnnnnnnnnnnnnnnnnnnnnnnnnnnnnnnnnnnnnnnnnnnnnnnnnnnnnnnnnnnnnnnnnnnnnnnnnnnnnnnnnnnnnnnnnnnnnnnnnnnnnnnnnnnnnnnnnnnnnnnnnnnnnnnnnnnnnnnnnnnnnnnnnnnnnnnnnnnnnnnnnnnnnnnnnnnnnnnnnnnnnnnnnnnnnnnnnnnnnnnnnnnnnnnnnnnnnnnnnnnnnnnnnnnnnnnnnnnnnnnnnnnnnnnnnnnnnnnnnnnnnnnnnnnnnnnnnnnnnnnnnnnnnnnnnnnnnnnnnnnnnnnnnnnnnnnnnnnnnnnnnnnnnnnnnnnnnnnnnnnnnnnnnnnnnnnnnnnnnnnnnnnnnnnnnnnnnnnnnnnnnnnnnnnnnnnnnnnnnnnnnnnnnnnnnnnnnnnnnnnnnnnnnnnnnnnnnnnnnnnnnnnnnnnnnnnnnnnnnnnnnnnnnnnnnnnnnnnnnnnnnnnnnnnnnnnnnnnnnnnnnnnnnnnnnnnnnnnnnnnnnnnnnnnnnnnnnnnnnnnnnnnnnnnnnnnnnnnnnnnnnnnnnnnnnnnnnnnnnnnnnnnnnnnnnnnnnnnnnnnnnnnnnnnnnnnnnnnnnnnnnnnnnnnnnnnnnnnnnnnnnnnnnnnnnnnnnnnnnnnnnnnnnnnnnnnnnnnnnnnnnnnnnnnnnnnnnnnnnnnnnnnnnnnnnnnnnnnnnnnnnnnnnnnnnnnnnnnnnnnnnnnnnnnnnnnnnnnnnnnnnnnnnnnnnnnnnnnnnnnnnnnnnnnnnnnnnnnnnnnnnnnnnnnnnnnnnnnnnnnnnnnnnnnnnnnnnnnnnnnnnnnnnnnnnnnnnnnnnnnnnnnnnnnnnnnnnnnnnnnnnnnnnnnnnnnnnnnnnnnnnnnnnnnnnnnnnnnnnnnnnnnnnnnnnnnnnnnnnnnnnnnnnnnnnnnnnnnnnnnnnnnnnnnnnnnnnnnnnnnnnnnnnnnnnnnnnnnnnnnnnnnnnnnnnnnnnnnnnnnnnnnnnnnnnnnnnnnnnnnnnnnnnnnnnnnnnnnnnnnnnnnnnnnnnnnnnnnnnnnnnnnnnnnnnnnnnnnnnnnnnnnnnnnnnnnnnnnnnnggcccagaagccttacctggtacaacggagaggagctgaatttgctttgacaactatagtaaagcattttggtggtgaaatggcagtgaagttgccgcatctctgggatgctatggttggcccattgagaaatacaatcgacataaataattttgnnnnnnnnnnnnnnnnnnnnnnnnnnnnnnnnnnnnnnnnnnnnnnnnnnnnnnnnnnnnnnnnnnnnnnnnnnnnnnnnnnnnnnnnnnnnnnnnnnnnnnnnnnnnngttggtccagcatttgctacatctttatatgtgccttcagtaccccagtactgcagtgaggcacatggctgctcgttgtgtaggagtcatgagcaaaatagctaccatggaaacaatgaatatttttttggagaaggttcttccatggctgggagcaattgatgacagtgtcaaacaagagggtgcaattgaagcacttgcctg

SEQ ID NO: 35697 - DNA, 441 bp, Macaca Mulatta
actcagcttaactatatttcacacatctacttaaacacaagaacattaagaagtccactgacagtatcagtgctgttttgcacatactcagaataatttggcttcattttgaatgggattgtattgttttaactgctgctaaggaaactattacatagttatattatatagaaagtctctcttcctttggatattttaagatgagtagtattgcttggcttttataatgcatgcagctttattttcacatttttcctaaaatttatagccaaatgtttactgttttagagcttaagtcatttatcagtggaaattatgtggaattagaaatacagcaactcttaaccttcttcctactgtaaaattgaactattttgtaacgtctttggtttcatgagccaattctatttttctagatatttaaaaatattcatctggttg

SEQ ID NO: 35698 - DNA, 221 bp, Macaca Mulatta
aggatgccataactatttcaaaaggcaagatcatgatacacagccgtgagagtgaagatgagaaccggtatatccgtaacgacaaggaattggtccttgtacaactgcgaaaacttaaggcccaaaggactcaggcccgggcagcatcccagaagaacttagtcaaactcaccttggaaagtaatgccaccctcaaggccctgagaaagattgttgataag

SEQ ID NO: 35699 - DNA, 600 bp, Macaca Mulatta
  misc_feature (1)...(600): n = A,T,C or G
nnnnnnnnnnnnnnnnnnnnnnnnnnnnnnnnnnnnnnnnnnnnnnnnnnnnnnnnnnnnnnnnnnnnnnnnnnnnnnnnnnnnnnnnnnnnnnnnnnnnnnnnnnnnnnnnnnnnnnnnnnnnnnnnnnnnnnnnnnnnnnnnnnnnnnnnnnnnnnnnnnnnnnnnnnnnnnnnnnnnnnnnnnnnnnnnnnnnnnnnnnnnnnnnnnnnnnnnnnnnnnnnnnnnnnnnnnnnnnnnnnnnnnnnnnnnnnnnnnnnnnnnacgggccccccctgcctaccaccagcaccttgattcttcctccagagtacagctcttggggcttacccatatgaggccccaccgtcctatgagcagacctgcgccggcgtggaccccagcgtgacccctgagagctgaccccgtgctgccttctccagacaggcttggcctctgccctgggactggggcgcccagggcatcgtgccttctctctcggcctggcctgacccactcaggacctgcccagcctctgccagctcatctggcgtccaccctcttctccctggggctgggatgggggtgtcagggagctggacactggagagactcctgtaa

SEQ ID NO: 35700 - DNA, 819 bp, Macaca Mulatta
atcgtcaggtagttcttatcttaaacccaattttggatggacgctatttcagttaacatgcaagtcactgacttagtttataccaaatattgtgctttctttgtaagataacggtttacatagacatcctggatctgggggcatgaagaaagtctaaaaaccatttgttaaactttttcaccacgcttttgcatgcttacaataaaacatcttttactttgtgactccaagctccaaattttaactgttaacacacggtgccagaccaggtggcttttctttggtgaatgtagtgtttcatctgaacacctcgggaagcagagacaaaccaacctgtggtggaactgcccttaacgtcaccactactaacgtctatgttgactgtattgtgttagaagcacattaacgctccgtcaaaatgcccgacccccaccccagtaattatccagacgcatggcccacctggcacacgggaaatggtagagctggaatcatgggactcctctcacaaatgcgttcttcctttcctcctttcctgtccatcctttgctatgtacgtggggggtttctaccaggtccagtaaagcacaacaagacttagctcaggccttgaactgtgtgtggttggttttctttgattgaattattctcagaagggctgtgttgccaggccctgtgggttgatcacgtgtccacctttctgacaaaatgtctcccaccatctttatttgcaggctaatggaagtgctaagaaatctggtggggactttaagcctacttccccctccttacctgcttctaagattccagccctttctc

SEQ ID NO: 35701 - DNA, 1413 bp, Macaca Mulatta
ggggaggcgcgaaaagggtggcaggggcctgagccgggggctggcctgaagacgcgtcgttgggttttggaggccgtgaaagagccgtttgagtttgcctgcgggtggagaacgtttgtcaggggcccggccaagaaagaggtccgcctgttacgatggtgtccatgacttttaaacggagccgcagtgaccggttctacagcacccggtgctgcggctgttgccatgtccgcactgggacaatcatcctggggacctggtacatggtagtaaacctattgatggcaattttgctgactgtggaagtgactcatccaaactccatgccagctgtcaacattcagtatgaagtcatcggtaattactattcatctgagagaatggctgataatgcctgtgttctttttgccgtctctgttcttatgtttataatcagttcaatgctggtttatggagcaatttcttatcaagtgggttggctgattccattcttctgttaccggctttttgactttgtcctcagttgcctggttgctattagttctctcacctatttgccaagaatcaaagaatatctggatcaattacctgattttccctacaaagatgacctcctggccttggactccagctgcctcctgttcattgttctggtgttctttgccttattcatcatttttaaggcttatctaatcaactgtgtttggaactgctataaatacatcaacaaccgaaatgtgccagagattgctgtgtatcctgcctttgaagcacctcctcagtacgttttgccaacctatgaaatggccgtgaaaatgcctgaaaaagagccaccacctccttacttacctgcctgaagaaattctgcctttgacaataaatcctataccagctttttgtcttgtttattttacagaatgctgcaattcagggctcttcaaacttgtttgatataaaatatgttgtcttttgtttaagcatttattttcaaacactaaggagctttttcgacatgtattaaacgtctttttgtttttttgttaagtcttttacattttaatagttttggaagacaatctaggttaagcaagagcaaagtgccattgtttgcctttaattgggggtggggaagggaaagaagggggtacttgcccacatagtttccctttttaactgcactttcctttatataatagtttgcattttggttatttgctaccctggggtatttttcaggaagactgaacttaaatattcaggggtgaataagtagttgggtataagatctgaatttttcatctgccgaaacaagaaaatatttgacattttgacttgactgtggaagatgatggttgcatgtttctaatttgtatgtttccatctttgtgataagatgatttaataaatctcttt

SEQ ID NO: 35702 - DNA, 871 bp, Macaca Mulatta
  misc_feature (1)...(871): n = A,T,C or G
aagctcccctcgccttttatattaaaataattttacttctacatgagacatataagtagtaancctcaangatcttttaatttctttgcttccctgtttgggcatcntgaaaaccgaacagcagctgttctgagataaactgcccagagaagtaactgaagaacatttccgacattagttatctagacagtcatcatcaaaaacggtgatgctcatgtaaccattactgtcatatggcggggggagaagttaaaacacatctaaaagtaaatttaatagttttaagttaaaactataaacaagcttttaagttaaaactgtgtattgaaaattgtctggatattagcatatttactggctgtcatactcatacctgcttgggcatggctatttttctttttaagatttggagtcctgaagccacaacagcagagctgatcaggaagagggaactacggcgagagaggtttacgcatgaggtggacttcgaagattttatgatgccttttcagaagaacatcacagagaaagctcgagcactggaagctgccttgaagacctaagttatagcagttacttcttggggtaaatgctttgaggcccagggaccaatctttggagaaagtagatatttccatcaaagccaaagcaatccatacaccaagaacttcttaccaaatgtttcgttttgctttaacaactataaatattctgagctgtctagagaaaagatgtatgtgattttgaaatgaatggtatgtcattctggataaatccccaagcccctttatgaatgtagtgaagtacatggcatgtgggttataaacattgctgtcaaaagatttaccaggtctgcatcatcatgcttatt

SEQ ID NO: 35703 - DNA, 1088 bp, Macaca Mulatta
  misc_feature (1)...(1088): n = A,T,C or G
gggatctgatctggtctgatggggagtgggaatgtcctgatacttactggaactccacaaattttctttcctggctctacaatgatagccccgtcaaggatgaggtggtagtaaatgaccgatggggtcagaactgttcctgtcaccatggaggatactataactgtgaagataaattcaagccacagagcttgccagatcacaagtgggagatgtgcaccagcattgacaagttttcctggggctatcgtcgtgacatggcaatgtctgatgttacagaagaatctgaaatcatttcggaactggttcagacagtcagtttgggaggcaactatcttctgaacattggaccaaccaaagatggattgattgttcccatcttccaagaaagacttcttgctcttgggaaatggctgagcatcaacggagaggccatctatgcctccaaaccgtggcgggtgcaatgggaaaagaacacaacatctgtatggtatacctcaaagggatcagctgtttatgccatttttctgcattggccagaaaatggagtcttaaaccttgaatctcccataactacctcaactacgaagataatgatgctgggaattcaaggagatctgaagtggtccacagatccagataaaggtcttctcatctctctgccccagttgccaccctctgctgttcctgcagagtttgcttggactataaagctgacgggagtgaagtaatcattttgagtggcaagaagaaagaggcgcctgcctgctgtttttggctgccttcagtttttctcctttaaaatacccttcacctataatccaccggaactttgtctttctccccccccgaagattgggctttttcccaacccctttttaaattcaaagggaaacttgaattaccgtttacccccccaaatgttcttaaaagggggcccaaaagaatttttaaaaaatcccctttgtgcaaatttaaattccctggtatcccannnnnnnnnnnnnnnnnnnnnnnnnnnnncccgggaaacccctttttaaaaaccccctgggaggattctccaccacaattctccaaaaaaaaat

SEQ ID NO: 35704 - DNA, 762 bp, Macaca Mulatta
  misc_feature (1)...(762): n = A,T,C or G
ggggagtgccatagggcattatagaactatgaaagccttactgctcagcatctagtcttcagtcatttttttttgagatggagtttcactctcnnnnnnnnnnnnnnnnnnnnnnnnnatnnnnnnnnnnnnnnnnnnnnnnnnnnnnnnnngtccaagtgattctcctgccccagcctcccaaannnnnnnnnnnnnnnnnnnntgtcatgcctggctaattttgtagtttcagtagagacaaggtttctccatgttggtnnnnnnnnnnnnnnnnnnncannnnnnnnnnnnnngcccaccttggccttnnnnnnnnnnnnnnnnnnnnnnnnnnnnnntcgtgcccggctagccttcagtgtttcatccaggcaggtagcactttgtttcagagaactgtactctgtgatatttacaataatgagattttggttatgatgttaattatagtaccaaactaaaaactccatatttgggtgtattaacccatctctgggaagtagaggtttagtgtctattactcttccagacagtgtggtccacttggttcttgctgctctttttctggagtccagctcccagtctgtccttgcttacctcctgcaagagtggactttaattgggtgaaaacattgttttccatttttgtccctagttttctttcttaatgtgaatatttctacattagttttaaataatgacttgtgggaataccaaggatgttgctgatttacctagtgggccctatagccattttct

SEQ ID NO: 35705 - DNA, 146 bp, Macaca Mulatta
aggttttaaaagactacatcaagccagatggggaatatttggaattgtttgctcgaaatttacagccaggttggactagttggggcaatgaagttctcaaatttcagcatgtggattattttattgctctggagtctggaagctga

SEQ ID NO: 35706 - DNA, 815 bp, Macaca Mulatta
  misc_feature (1)...(815): n = A,T,C or G
agactttaatttgtgatgtacattcaataacaagtgataaccataaatggacccagnnnnnnnnnnnnnnnnnnnnnnnnnnnnnnnnnnnnnnnnnnnnnnnnnnnnnnnnnnnnnnnnnnnnnnnnnnnnnnnnnnnnnnnnnnnnnnnnnnnnnnnnnnnnnnnnnnnnnnnnnnnnnnnnnnnnnnnnnnnnnnnnnnnnnnnnnnnnnnnnnnnnnnnnnnnnnnnnnnnnnnnnnnnnnnnnnnnnnnnnnnnnnnnnnnnnnnnnnnnnnnnnnnnnnnnnnnnnnnnnnnnnnnnnnnnnnnnnnnnnnnnnnnnnnnnnnnnnnnnnnnnnnnnnnnnnnnnnnnnnnnnnnnnnnnnnnnnnnnnnnnnnnnnnnnnnnnnnnnnnnnnnnnnnnnnnnnnnnnnnnnnnnnnnnnnnnnnnnnnnnnnnnnnnnnnnnnnnnnnnnnnnnnnnnnnnnnnnnnnnnnnnnnnnnnnnnnnnnnnnnnnnnnnnnnnnnnnnnnnnnnnnnnnnnnnnnnnnnnnnnnnnnnnnnnnnnnnnnnnnnnnnnnnnnnnnnnnnnnnnnnnnnnnnnnnnnnnnnnnnnnnnnnnnnnnnnnnnnnnnnnnnnnnnnnnnnnnnnnnnnnnnnnnnnnnnnnnnnnnnnnnnnnnnnnnnnnnnnnnnnnnnnnnnnnnnnnnnnnnnnagggtagtcaatcagtaccaagaattagtccagaatgaagccaaatgtccggtcaagatgtcacacagctccagtggctcagccagtctgagtcaggtttctccagggaaagaaacag

SEQ ID NO: 35707 - DNA, 195 bp, Macaca Mulatta
agccattaaccacaatttagtgatcaccagtggttgttaaatctctttttttcacgggttttccattcacattatttggatcttccggatctgccctactggcctctatggacagctgactttgtttaagatgtggcgcaagatgctatggggtcagcaggtggcaaaggtcctgtggatcttaaataaggaaac

SEQ ID NO: 35708 - DNA, 738 bp, Macaca Mulatta
  misc_feature (1)...(738): n = A,T,C or G
ggaaacatttttgacattcaaggaagcctattttctagcaaatttctgtggtcactggaaaagtacatatgatcctgaacttacaatggggttacatcccaataaacccattgtaagttgaaattattgtaagtcgaaaatgcatttaatacacccaacctaccaaacatcatagcttagcctagcctaccttaaacattctcagaacacattctaatgcatcgtctattttatcaaaaggtgttgaatatctgatgtaattattgaatactggaagtgaaaaatagtagttgtatggataccattgtaatgttgagaaactgtaagtcacatcctcttaagtcaggaactatctgtattaggaaacaagatttccattttatcatttgaaacgtatttgactctttccctagttgcattatccccatggaaaacttcacattgagaacttaacattatttaagtatacttccataaaaatgcatgaaccatcccttagctaagtaaggattttgtaatgttctctcaatgttgcttgacaaagttaatatttttttgtatgctgatgaaatttagaaaagtccaatattgagcttgattgcaaacttacaaaaaatcaaaggcttcaccttttatgttcaaattgttgtatcagtatgggtatttttgcaccctttaccatgaacaggnattttcttcttttaaatattgatttttgcaacatttttgggaaagttg

SEQ ID NO: 35709 - DNA, 116 bp, Macaca Mulatta
ggtagatctgtccaccggtctgtggaactgtcagttgtgaagttttgttaaatggtcacccaacttaaaactaggaaattacaaagaagagaaaattgccctgtatctgttaaggt

SEQ ID NO: 35710 - DNA, 255 bp, Macaca Mulatta
agccctgcctggctcccagcatggagcagcaagagcaggagctgacagtagcccttgggcagcctgtgcggctgtgctgtgggcgggctgagcgtggtggccactggtacaaggagggcagtcgcctggcacctgctggccgtgtacggggctggaggggccgcctagagattgccagcttcctacctgaggatgctggccgctacctctgcctggcccgagcctccatgatcgtcctgcaaaatctcaccttga

SEQ ID NO: 35711 - DNA, 612 bp, Macaca Mulatta
cccagactagtggattcggtcctgggagagagtatcatataatgggacccacaggcactggcacccttgggttggcaatagaaggtgacatggaatggagaaaaccaagattccagatggggacagtaactagaaggtgcttcagatgcactgcctgcggatgccagtctgaaaaccagaccgcatggaggcctgaggctgctgatgagcctttgggtgctctccacacacaagattgcaaacatacatgtcccagaatagctctgttgggccctgttgggagaagtggctggagttcattctctcacccccttacattggggtttggggtttggcagcagttctgcagagctccgtgttgggggtcatggatgagtggctctctcggctcttaaaggcaggcctctctccttgcctttaaagaatcctccttcctcacacctggcctcctctggcttcagcttctcagcagcaagcaccagccttccacagcaacactgtatttttatgctactttcctgtttgcactactatttttattaaatgatgttaaataatctctctgtgaccaaagtgactaaaaagagaaccatgattcctcaagaagtaaat

SEQ ID NO: 35712 - DNA, 201 bp, Macaca Mulatta
gagggcctgagcaagctgttcagtacagcccccaggcctaaaattcctgatctcccacttagattgcagaagcctctacaaccccattctccagtaaagtggcttcattgtcagttctcaaatttgttcttcccccacctgacctggcactgggagttacatagtattcatggaagcatattcaatattaggacagctaac

SEQ ID NO: 35713 - DNA, 464 bp, Macaca Mulatta
gaaaaatattcatgaccactaatagatcacattttaccccagctgtaaatgtagacagtgacttgcacactgcactgcgctgtgtgtgtgtgaagtcaacctttgcacttcatcccagaaacatccacaatttggagttggtctcagcaggatcccactgcagcaaagacaaagtaatgtaaaccattgtttctgtgctgttgcctcatcagggaagccctcgacctccatccccatctgcattcatttcctccagtctcacagatcctttctgatattcagaccaggacacccacagataattctattctgtcttgcagagccactctgaaggatgggaggaaaaatctgcctggacccagatgctcccagaatccataaaattgtacagaaaatgttgaaaggtgatgaattcatctggtttatttgttaactttctgctaaaacttttcactggaagggga

SEQ ID NO: 35714 - DNA, 674 bp, Macaca Mulatta
  misc_feature (1)...(674): n = A,T,C or G
tcgccgtgcagccgagggagtcccgcaccacggggcctcactcagggcagccaccgtgggagaatgtccccacctcacggatgtcaggcttggccacaggtccttggccacgggatctgagtagagtgacatatgccacacaggatcagaagcacgctggatggaccaccacgtggtatggcctcctttctttctcccatcataagtacaagataacgttggctgacctgactcctggggtagaaacatcatgtagagaccaggcgcggtggctcacgcctgtaatcccagcactttgggaggccgaggcaggcagattgcctgagctcagtagtttgagaccagcctggacaacatggtaaaacccgtctctactaatttacaaaaaaattagccaggtgtgttggcacatgcctgtagtcccagctacttgggaggctgaggcacgagaattgcctgaaccccagaggtgaaggttgcagtgagctgagatagtacctctgcactgcagcctgggcaacagaatgagactgtgtcttcnnnnnnnnnnnnnnnntcatgcagggcaaggtcccaggccccagccaacctctcgttgatatgtaatgtagatgtcaactcatgcttatagccactgacatttaggaatagtctgttaccacagcataagctgg

SEQ ID NO: 35715 - DNA, 591 bp, Macaca Mulatta
  misc_feature (1)...(591): n = A,T,C or G
atgctgcagctcagcgagagacaggtcaaaacctggtttcagaatagacgcgctaaatggaggagattaaaacaggagaaccctcaaagcaatgaaaaagaagaactggaaagtttggacagttcctgtgatcagaggcaagatttgcccagtgaacagaataaaggtgcttctttggatagctctcaatgttcgccctcccctgcctcccaggaagaccttgaatcagagatttcagaggattctgatcaggaagtggacattgagggcgataaaggctattttaatgctggatgatgaccactggcattggcatgttcagaaaactggatttaggaataatattttgctacagaaaatcttcatagaagaactggaaggctatataagaaagggaatcaattttctggtattctggaaacctaaaaatatttggtgcactgctcagttaacaaacctacatggagaccttgattttgacttaacaaatagtttatgtaccgatcttaggtggttttcataaagtgacattgtagtgattaaattcatccnnnnnnnnnnnnnnnnnngttgttttcactatttataaaa

SEQ ID NO: 35716 - DNA, 471 bp, Macaca Mulatta
  misc_feature (1)...(471): n = A,T,C or G
atggggctgcggaaggggcatggcacgctgggccagggccttagcgccctgcagagcgagcagggccgcctcatccannnnnnnnnnnnnnnnnnnnnnnnnnnnnnnnnnnnnnnnnnnnnnnnnnnnnnnnnnnnnnnnnnnnnnnnnnnnnnnnnnnnnnnnnnnnnnnnnnnnnnnnnnnnnnnnnnnnnnnnnnnnnnnnnnnnnnnnnnnnnnnnnnnnnnnnnnnnnnnnnnnnnnnnnnnnnnnnnnnnnnnnnnnnnnnnnnnnnnnnnnnnnnnnnnnnnnnnnnnnnnnnnnnnnnnnnnnnnnnnnnnnnnnnnnnnnnnnnnnnnnnnnnnnnnnnnnnnnnnnnnnnnnnnnnnnnnnngtgtttcagcgccgggaggacggctccgtgaacttcttccggggctgggacgcctaccgagacggcttcggcaggctcaccggggagcactggctagg

SEQ ID NO: 35717 - DNA, 803 bp, Macaca Mulatta
gggcccttttccccccctctagcgccgctgggcctgcaggtttctgtcgacccgcggacgctggtctctgttccgcaggatggggtttgttaaagttgttaagaataaggcctactttaagagataccaagtgaaatttagaagacgacgagagggtaaaactgattactatgctcggaaacgcttggtgatacaggataaaaataaatacaacacacccaaatacaggatgatagttcgtgtaacaaacagagatatcatttgtcagattgcttatgcccgtatagagggggatatgatagtctgcgcagcatatgcacacgaactgccaaaatacggtgtgaaggttggcctgacaaactatgctgcagcatattgtactggcctgctgctggcccgcaggcttctcaataggtttggcatggacaagatctatgaaggccaagtggaggtaactggcgatgaatacaatgtggaaagcattgatggtcagccaggtgcctttacctgctatttggatggaggccttgccagaactaccactggcaattaagcctttcggccccctgtaaggacctcctggcacggacgcctgtctatcccctcccactacccaacacaattcccccgggtatcattctccaaagctatgggaattttacttgcgaaaagagcacgcggaaagcactcttcattggggcctagaatcggtggcacaatcaccgtgctcccttcttcccgggcgcagactaatttaagattcctcttccgtctatactggtttctcctcacatgtcgtaagt

SEQ ID NO: 35718 - DNA, 758 bp, Macaca Mulatta
tgaaaggctaagattatgataaacacttgattacaattgatgcttatttcaaaaatctctctttttcccctcaaggactctgtcttatcaagaacccttaagaacatagaattgaatggcagaaagaggagtcatatttcaatatatcatgaaattccttataaaacataattttgaggaagtatgttaagttaaaaacttctgagtttttccttgcttaaatatttgaacctaaattgtttgtgctgaacatttctttatttataaataaaaaccaataaatgttgtttaatttttagtttgtataatttgatgtagaacgtaatctcttttgtatgtcttccatctgttacaaattaatctacacatcaaaatattttcatttcctaatgcccattgactagactatatcattgttttcaatatactgtatgtgtaaaaattttacattcacattcattatcacctttattaatattaaggcttttgttacccttaattcaaagtatatgtcagtattaaagggccaaacacactagagataagaaactatatgctgtattagagaatctgctttattaaagacagaagagactgcccttcggactttctaaatgtaaaaatacttttaaaattacctgtaatatttgttaccaggttaataaccaaattgtttatgaggtagtatactaccatatttgaacatgtgctcaaatattgttaaagcgacacagttaaagaaagaatgactcttggaa

SEQ ID NO: 35719 - DNA, 176 bp, Macaca Mulatta
ccggccacagtcccgtttatctgctcctagaatgtcctttctgcgtcatcatatttgaatttgtggaaccagatcttctcttgtactaggaagtttgtagacatttctctgacgccagccaacgacgctgggaccagagaggaggaatcggcaggcacgtgacgcctgaggagagg

SEQ ID NO: 35720 - DNA, 1230 bp, Macaca Mulatta
  misc_feature (1)...(1230): n = A,T,C or G
atgggcacaatatcactttgcattggtgtctgtgcatttgaaggagcaaacacctctaccagttcttataaactggtttatacagnnnnnnnnnnnnnnnnnnnnnnnnnnnnnnnnnnnnnnnnnnnnnnnnnnnnnnnnnnnnnnnnnnnnnnnnnnnnnnnnnnnnnnnnnnnnnnnnnnnnnnnnnnnnnnnnnnnnnnnnnnnnnnnnnnnnnnnnnnnnnnnnnnnnnnnnnnnnnnnnnnnnnnnnnnnnnnnnnnnnnnnnnnnnnnnnnnnnnnnnnnnnnnnnnnnnnnnnnnnnnnnnnnnnnnnnnnnnnnnnnncaacataagagaattcatactggagagaaaccctacaaatgcaaagaatgttgcaaagccttttacaagttctcaaaccttactcaacataagaaaattcatactggagagaaaccctacaagtgtgaagaatgtggcaaccttttcaatgagtgctcacacctaactagacataggagaattcatactggagagaaaccctacaaatgtgaagaatgtggcaaaacctttacacagtttgcaagccttactcgtcataaaagaattcatactggagaaaaaccctaccaatgtgaagaatgtggcaaaacttttaatcggtgttcacatctaagtagccataagagaattcatactggagagaaaccctacaaatgtgaagagtgtggcagaacctttactcaattctcaaacctcactcagcataaaagaattcatactggagagaaaccctacaaatgcaaagaatgtggcaaagcatttaacaagttctcaagccttactcaacataagagaattcatactggaatgaaaccctacaaatgtgaagaatgtggcaaagtttttaaacagtgctcacacctaactagccataagagaattcatactggagagaaaccctacaaatgtaaagaatgtggcaaagctttttaccagtcctcaatccttagtaagcataagagaattcatactgaagagaaaccctacaaatgtgaagaatgtggcaaagcctttaaccagttctcaagccttactcgtcataaaagaattcatactggagagaaaccctacacatgtaaagaatgtggaaaagggttttaccaatcctcaatccatagtaagtataagagaacttatactggagaggaacctgacaaatgtgaaaaatgtggcagtctttaa

SEQ ID NO: 35721 - DNA, 239 bp, Macaca Mulatta
cagggacagccaggtgagggggatggacaataccgtggccaacaccgagaagtacttcgggcagttctgctcactgctggccgcctacacgcgcaagacggcccggctgcggaacaaggcagaccagctggtcaagcagctcatcgactttgccaactccgagaaccccgagctgcgggccaccatgaggggcttcgccgaggacctggccaaagtgcaggattaccggcaggcccagg

SEQ ID NO: 35722 - DNA, 628 bp, Macaca Mulatta
gtttcatttctgcatactagaatgtagcaaatgttctgttacaaagcaaatcataatataaaacttgttataattgaaaatactggattttttgaaatcaagattattttcattacctatcagtctcccagagtttgtgttaatggagcaaattgatctttccttatgctacttttttggtgtcaaacattcatttattattttgaccagatgactcccggtctccatcctggatccactctgattccaatgaatagtgtttctgtgccacaagaagaagattatgggtatcagtgtttggagggcaaagattgtgccagcttcttctgttgctttgaagactgcagaacaggatcttggagggaaggaaggatacatatacgcattgccaaaattgactcttattctagaatatttttcccaacagcttttgccttgttcaacttggtttattgggttggctatctttacttataaaatctacttcataagcaaaagtcaaaagaagtttgactaaattcaatagaatcttttgtccttcagtaacttgaagtttaaatttaaaatgcagagaaaacaatggttaaaatgtgagtagtattgtaactatgttaaggccttcagaagt

SEQ ID NO: 35723 - DNA, 526 bp, Macaca Mulatta
gggttactgaaattcctgacacactgcctgaagatcagatgagagacaaactagagctgagcttttgtaggtcccgaaatggaggtggagaggtggaccacgtggactatgacagacagtccgggagtgcggtcatcacgttcgtggagactggagttgctgacaagattttgaaaaagaaagaatatcctctttatataaatcaaacctgccatagagttactgtttctccatacacagaaatacacttgagaaagtatcagatattttcaggaacatctaagaggacagtgcttctgacaggaatggaaggcattcaaatggatgaagaaattgtggaggattttattacattcactttcacgggcaaagaatgggagtggagaagtagatgtggtcaagtgttctctagatcaacctccactagcatactttgaaaaatagactttaacgaatcatgaaaactatagctttttaacctaaataacggtaaatgtttgaccaaaataataagcctttccttaaa

SEQ ID NO: 35724 - DNA, 289 bp, Macaca Mulatta
caacctataaactaaaacatttaaaaaatttacttatgacagaaaaacatgatttgtgagacaggtatctatcaggtatctaccagagcaattttaattcctaaaaataggcacatagttttttaaataatagaatatcatgagagtcatttccaaaaggcatgattctgtgtcttgaacattaattcttttgcttgtaaaatttcattaaaaatttatttaccttgttatgtttaagactttgcctcaagccaaaatagaatctatcatttaaaatatttttcaaaag

SEQ ID NO: 35725 - DNA, 184 bp, Macaca Mulatta
gtacaagggtcaggtgcctgagaaccaggcgaacttcgtaatcaccacactgaaagtgactgatgctgatgcccccaataccccagcgtgggaggctgtatacactatattgaatgataatgacggacaatttgttgtcaccacaaatccagtgaccaacgatggcattttgaaaacagcaaag

SEQ ID NO: 35726 - DNA, 91 bp, Macaca Mulatta
  misc_feature (1)...(91): n = A,T,C or G
agagtgctgggatgagaaatttacttgcacaaggctctactctgtgcatcggccggttaaacaatgcattcatcagttatgcttcaccagn

SEQ ID NO: 35727 - DNA, 128 bp, Macaca Mulatta
cacatcccctcatgtaggcctggactttccccaagagacatctcccctcactgctgcatccccaccatgccaccttacgctcactttctcttcacagttccattttggctggtccaaagctgttgcat

SEQ ID NO: 35728 - DNA, 5577 bp, Macaca Mulatta
  misc_feature (1)...(5577): n = A,T,C or G
aagcacacatatgtcttcaagctcaaggtcccagatttattctgtttcttctgagaaaacacataataatgattgctacttagactattcttttgttcctgaaaattacttggccttagaaaagagtgattctcagaatttaccaatatatccttctgaagatgatattgagaaatcaattatttttaatcaagatggcactatgacagttgagatganagttcgattcagaataaaagaggaagaaaccataaaatggacaactactgttagtaaaactggtccttctaataatgatgannnnnnnnnnnnnnnnnnnnnnnnnnnnnnnnnnnnnnnnnnnnnnnnnnnnnnnnnnnnnnnnnnnnnnnnnnnnnnnnnnnnnnnnnnnnnnnnnnnnnnnnnnnnnnnnnnnnnnnnnnnnnnnnnnnnnnnnnnnnnnnnnnnnnnnnnnnnnnnnnnnnnnnnnnnnnnnnnnnnnnnnnnnnnnnnnnnnnnnnnnnnnnnnnnnnnnnnnnnnnnnnnnnnnnnnnnnnnnnnnnnnnnnnnnnnnnnnnnnnnnnnnnnnnnnnnnnnnnnnnnnnnnnnnnnnnnnnnnnnnnnnnnnagtgtgaccttagtatctgaaactgaggttcaagagaaaatgattggacagttttcctatagtgaagaaagggaaagtggagaaaacaagtctgagtatcatatgtttacacattcttgcagtaaaatgtcagcagtatttaacaaaccagtacttgttcagatcaataacaatgatcaaatggaggagtcattgttagaaagaaaaaaggaaaacagactgcttaagtcaagtgcaataagtgctggtgttatagaaattacaagtcagaagatgttagagatgtcccataataatggtatgccgtcgactatttcagataactcaattgtggaggaagatgtagttgatagtatggtatcagacaacaaaactggtatcaagaacttcaaaggttatgataacaccaatgataggttcagccctatttcagcagatgcaccccacttttcaagtaccaactctggaactgacaaaaatatttctgaggctacagcttcggaagcatcctctactgtcactgcaagaattgacagactaattaatgaatttgctcagtgtggtttaacaaaacttccaaaaaatgaaaagaagattttgtcatctgtttccagcaaaaagaagaaaaaatctctacagcaagcaataaattccagatatcaagatggacagcttgcaaccaaaggaattcttaataagaatgagagaataaacacaagaggtagaattagaaaggaaatgatattgcaagattcagatagacgccttaaaggaaggatactnnnnnnnnnnnnnnnnnnnnnnnnnnnnnnnnnnnnnnnnnnnnnnnnnnnnnnnnnnnnnnnnnnnnnnnnnnnnnnnnnnnnnnnnnnnnnnnnnnnnnnnnnnnnnnnnnnnnnnnnnnnnnnnnnnnnnnnnnnnnnnnnnnnnnnnnnnnnnnnnnnnnnnnnnnnnnnnnnnnnnnnnnnnnnnnnnnnnnnnnnnnnnnnnnnnnnnnnnnnnnnnnnnnnnnnnnnnnnnnnnnnnnnnnnnnnnnnnnnnnnnnnnnnnnnnnnnnnnnnnnnnnnnnnnnnnnnnnnnnnnnnnnnnnnnnnnnnnnnnnnnnnnnnnnnnnnnnnnnnnnnnnnnnnnnnnnnnnnnnnnnnnnnnnnnnnnnnnnnnnnnnnnnnnnnnnnnnnnnnnnnnnnnnnnnnnnnnnnnnnnnnnnnnnnnnnnnnnnnnnnnnnnnnnnnnnnnnnnnnnnnnnnnnnnnnnnnnnnnnnnnnnnnnnnnnnnnnnnnnnnnnnnnnnnnnnnnnnnnnnnnnnnnnnnnnnnnnnnnnnnnnnnnnnnnnnnnnnnnnnnnnnnnnnnnnnnnnnnnnnnnnnnnnnnnnnnnnnnnnnnnnnnnnnnnnnnnnnnnnnnnnnnnnnnnnnnnnnnnnnnnnnnnnnnnnnnnnnnnnnnnnnnnnnnnnnnnnnnnnnnnnnnnnnnnnnnnnnnnnnnnnnnnnnnnnnnnnnnnnnnnnnnnnnnnnnnnnnnnnnnnnnnnnnnnnnnnnnnnnnnnnnnnnnnnnnnnnnnnnnnnnnnnnnnnnnnnnnnnnnnnnnnnnnnnnnnnnnnnnnnnnnnnnnnnnnnnnnnnnnnnnnnnnnnnnnnnnnnnnnnnnnnnnnnnnnnnnnnnnnnnnnnnnnnnnnnnnnnnnnnnnnnnnnnnnnnnnnnnnnnnnnnnnnnnnnnnnnnnnnnnnnnnnnnnnnnnnnnnnnnnnnnnnnnnnnnnnnnnnnnnnnnnnnnnnnnnnnnnnnnnnnnnnnnnnnnnnnnnnnnnnnnnnnnnnnnnnnnnnnnnnnnnnnnnnnnnnnnnnnnnnnnnnnnnnnnnnnnnnnnnnnnnnnnnnnnnnnnnnnnnnnnnnnnnnnnnnnnnnnnnnnnnnnnnnnnnnnnnnnnnnnnnnnnnnnnnnnnnnnnnnnnnnnnnnnnnnnnnnnnnnnnnnnnnnnnnnnnnnnnnnnnnnnnnnnnnnnnnnnnnnnnnnnnnnnnnnnnnnnnnnnnnnnnnnnnnnnnnnnnnnnnnnnnnnnnnnnnnnnnnnnnnnnnnnnnnnnnnnnnnnnnnnnnnnnnnnnnnnnnnnnnnnnnnnnnnnnnnnnnnnnnnnnnnnnnnnnnnnnnnnnnnnnnnnnnnnnnnnnnnnnnnnnnnnnnnnnnnnnnnnnnnnnnnnnnnnnnnnnnnnnnnnnnnnnnnnnnnnnnnnnnnnnnnnnnnnnnnnnnnnnnnnnnnnnnnnnnnnnnnnnnnnnnnnnnnnnnnnnnnnnnnnnnnnnnnnnnnnnnnnnnnnnnnnnnnnnnnnnnnnnnnnnnnnnnnnnnnnnnnnnnnnnnnnnnnnnnnnnnnnnnnnnnnnnnnnnnnnnnnnnnnnnnnnnnnnnnnnnnnnnnnnnnnnnnnnnnnnnnnnnnnnnnnnnnnnnnnnnnnnnnnnnnnnnnnnnnnnnnnnnnnnnnnnnnnnnnnnnnnnnnnnnnnnnnnnnnnnnnnnnnnnnnnnnnnnnnnnnnnnnnnnnnnnnnnnnnnnnnnnnnnnnnnnnnnnnnnnnnnnnnnnnnnnnnnnnnnnnnnnnnnnnnnnnnnnnnnnnnnnnnnnnnnnnnnnnnnnnnnnnnnnnnnnnnnnnnnnnnnnnnnnnnnnnnnnnnnnnnnnnnnnnnnnnnnnnnnnnnnnnnnnnnnnnnnnnnnnnnnnnnnnnnnnnnnnnnnnnnnnnnnnnnnnnnnnnnnnnnnnnnnnnnnnnnnnnnnnnnnnnnnnnnnnnnnnnnnnnnnnnnnnnnnnnnnnnnnnnnnnnnnnnnnnnnnnnnnnnnnnnnnnnnnnnnnnnnnnnnnnnnnnnnnnnnnnnnnnnnnnnnnnnnnnnnnnnnnnnnnnnnnnnnnnnnnnnnnnnnnnnnnnnnnnnnnnnnnnnnnnnnnnnnnnnnnnnnnnnnnnnnnnnnnnnnnnnnnnnnnnnnnnnnnnnnnnnnnnnnnnnnnnnnnnnnnnnnnnnnnnnnnnnnnnnnnnnnnnnnnnnnnnnnnnnnnnnnnnnnnnnnnnnnnnnnnnnnnnnnnnnnnnnnnnnnnnnnnnnnnnnnnnnnnnnnnnnnnnnnnnnnnnnnnnnnnnnnnnnnnnnnnnnnnnnnnnnnnnnnnnnnnnnnnnnnnnnnnnnnnnnnnnnnnnnnnnnnnnnnnnnnnnnnnnnnnnnnnnnnnnnnnnnnnnnnnnnnnnnnnnnnnnnnnnnnnnnnnnnnnnnnnnnnnnnnnnnnnnnnnnnnnnnnnnnnnnnnnnnnnnnnnnnnnnnnnnnnnnnnnnnnnnnnnnnnnnnnnnnnnnnnnnnnnnnnnnnnnnnnnnnnnnnnnnnnnnnnnnnnnnnnnnnnnnnnnnnnnnnnnnnnnnnnnnnnnnnnnnnnnnnnnnnnnnnnnnnnnnnnnnnnnnnnnnnnnnnnnnnnnnnnnnnnnnnnnnnnnnnnnnnnnnnnnnnnnnnnnnnnnnnnnnnnnnnnnnnnnnnnnnnnnnnnnnnnnnnnnnnnnnnnnnnnnnnnnnnnnnnnnnnnnnnnnnnnnnnnnnnnnnnnnnnnnnnnnnnnnnnnnnnnnnnnnnnnnnnnnnnnnnnnnnnnnnnnnnnnnnnnnnnnnnnnnnnnnnnnnnnnnnnnnnnnnnnnnnnnnnnnnnnnnnnnnnnnnnnnnnnnnnnnnnnnnnnnnnnnnnnnnnnnnnnnnnnnnnnnnnnnnnnnnnnnnnnnnnnnnnnnnnnnnnnnnnnnnnnnnnnnnnnnnnnnnnnnnnnnnnnnnnnnnnnnnnnnnnnnnnnnnnnnnnnnnnnnnnnnnnnnnnnnnnnnnnnnnnnnnnnnnnnnnnnnnnnnnnnnnnnnnnnnnnnnnnnnnnnnnnnnnnnnnnnnnnnnnnnnnnnnnnnnnnnnnnnnnnnnnnnnnnnnnnnnnnnnnnnnnnnnnnnnnnnnnnnnnnnnnnnnnnnnnnnnnnnnnnnnnnnnnnnnnnnnnnnnnnnnnnnnnnnnnnnnnnnnnnnnnnnnnnnnnnnnnnnnnnnnnnnnnnnnnnnnnnnnnnnnnnnnnnnnnnnnnnnnnnnnnnnnnnnnnnnnnnnnnnnnnnnnnnnnnnnnnnnnnnnnnnnnnnnnnnnnnnnnnnnnnnnnnnnnnnnnnnnatacagagaagaagggtaataatcatcagtcagaaagagtatgcacatctgtcactcattcttttacgtctgctagtaacaaagtctaccctgtctctgacgatgctattaaaaaccaaccattgcctggcagtaatatgattcatggtacacttcaggaagctgactctttggataaactgtatgctctttgtggtcaacattgcccaatactaactgttattatccaacccgtgaatgaggaagaccgaggatttgcatatcgcaaagaatctgatattgaaaatttcttgggtttttatttatggatgaaaatacacccatatttacttcagacagacaaaaaggtgttcagggaagagaacaataaagcaagtatgagacaaaatcatattgataatgccattggtgatatatttgatcagttttatttcaataacacattcgacttgatgggtaaaagaagaaaacaaaaaagaattaactttttggagttagaggaagaaggtaatttaaagaaattccaaccagatttgaaggaaaggctttgtatgaatttcttgcacacatcattgttagttgtcagtaatatgaattctgatacacaagacttcagcagtcagacaaatgaaatgtttaaagcagtcgatgagaataacaacttattaaataacggattccagggctcaagaacaaatctcaaccaaatagtaagagaaaataccaactgtcattacttctttgaaatgcttggtcaagcttgcctcttagatatttgccaagttgagacctccttaaatattagcaacagaaata

SEQ ID NO: 35729 - DNA, 199 bp, Macaca Mulatta
gtgcctctagataaccatatccctgggaaggcagggtctgggagccaagtccccactgaaaccaagaaactggaggagaatgaggttattcccaagaggatctcacccattgaaacaagtgaggatgtgtctaacaaggtgtccatgtccagcactatgcagggcagcaatatctttgagagaacgtatttcctggcag

SEQ ID NO: 35730 - DNA, 146 bp, Macaca Mulatta
  misc_feature (1)...(146): n = A,T,C or G
tcctgctgggcctgcgcttccaggagctgtcgtgggaccacacctcccccgaggaggaggagcccatcctgtggctggagttcgacggagacagcgagggcacgcctgtcaacaagctcctcaagatctactccaagcaggncgag

SEQ ID NO: 35731 - DNA, 766 bp, Macaca Mulatta
  misc_feature (1)...(766): n = A,T,C or G
ggttaagaaatctccaaaacagttggctgcttatataaatagnnnnnnnnnnnnnnnnnnnnnnnnnnnnnnnnnnnnnnnnnnnnnnnnnnnnnnnnnnnnnnnnnnnnnnnnnnnnnnnnnnnnnnnnnnnnnnnnnnnnnnnnnnnnnnnnnnnnnnnnnnnnnnnnnnnnnnnnnnnnnnnnnnnnnnnnnnnnnnnnnnnnnnnnnnnnnnnnnnnnnnnnnnnnnnnnnnnnnnnnnnnnnnnnnnnnnnnnnnnnnnnnnnnnnnnnnnnnnnnnnnnnnnnnnnnnnnnnnnnnnnnnnnnnnnnnnnnnnnnnnnnnnnnnnnnnnnnnnnnnnnnnnnnnnnnnnnnnnnnnnnnnnnnnnnnnnnnnnnnnnnnnnnnnnnnnnnnnnnnnnnnnnnnnnnnnnnnnnnnnnnnnnnnnnnnnnnnnnnnnnnnnnnnnnnnnnnnnnnnnnnnnnnnnnnnnnnnnnnnnnnnnnnnnnnnnnnnnnnnnnnnnnnnnnnnnnnnnnnnnnnnnnnnnnnnnnnnnnnnnnnnnnnnnnnnnnnnnnnnnnnnnnnnnnnnnnnnnnnnnnnnnnnnnnnnnnnnnnnnnnnnnnnnncaagcagtcattaaaaggtggtggtcagaactatcatccaaaacagaaattataagtgatggaaatataaaaattttaaaacaacaattaagtggattatgggaacaggaaaaccatcttactttggttccaggatatactggtaatatagctaag

SEQ ID NO: 35732 - DNA, 837 bp, Macaca Mulatta
ctaaggaaatagggccctagagccagggacttgggccctgacacattaaaataaactttaggcctcctgggtgtgtttaattggttccccgatattaaagttcagggaactacccaagatgggaaataccaaattcacctaagaattgagctgggtcccagaagcaagccaagtgataaacagcaccaaaacgagttgttgggacttcatctgtttgctgtggatccctgatccttgatgctaatctgcctctttgtatctttcccactaaccctgaaaagaagccacatttctcaggctgaagtgtctggctgtcttttattattcctgctgccacctattcctttttttcctcttcctttctcccaatttgctatctagattgatgctagtccttctcacctagagtatccttactttttcatgcagataattatcaccgtttctgctctgttctggatctgccccctttactcctcggggaacccaacgccccactctcgctctggattccatttgggtcagcctggctggtccccaaggcattaggatggggggacacaaagcaacttatgtattttcttccacccccaccccagattaaaatgttaagctgctggaaacctcatgccaccctgcatttgtgtcattgacaaagctgctgctgtccctaagaaggagccttgggggtgtgatgtggggaagagctatcgtaggctccccctcctctgacttacataatcaaagccacttttgtgtgtgtctattttttcttgacatttaaactcagctgatctgattctaccagagtgatggatttagtacaggttcctcagg

SEQ ID NO: 35733 - DNA, 1880 bp, Macaca Mulatta
  misc_feature (1)...(1880): n = A,T,C or G
ggcgtctttggcaatggcgggcgtgcttgtgggtccaggatggcctctctcccgtgaccgcggaccacgatgagagcgtgaagaccttcttgaaaggaagggctctgctctacacactggtgtctcctgaggaagggcagctgggcacgccttccggaccganagcaaaagttgaaaaataaataacccaagatgactaatcaaatcaatatgctgggcaggatgtgacatcagtgtctgcctcaaacagaagagcatacacaaaacatgacctctcactccaagcccaggtaaaggaagannnnnnnnnnnnnnnnnnnnnnnnnnnnnnnnnnnnnnnnnnnnnnnnnnnnnnnnnnnnnnnnnnnnnnnnnnnnnnnnnnnnnnnnnnnnnnnnnnnnnnnnnnnnnnnnnnnnnnnnnnnnnnnnnnnnnnnnnnnnnnnnnnnnnnnnnnnnnnnnnnnnnnnnnntctccacacacccatgtatttcctacttagtcagctctccctcatcgacctaaattacatctccaccnnnnnnnnnnnacatctccaccaccgtgcccaagatggnnnnnnnnnnnnnnnnnnnnnnnnnnnnnnnnnnnnnnnnnnnnnnnnnnnnnnnnnnnnnnnnnnnnnnnnnnnnnnnnnnnnnnnnnnnnnnnnnnnnnnnnnnnnnnnnnnnnnnnnnnnnnnnnnnnnnnnnnnnnnnnnnnnnnnnnnnnnnnnnnnnnnnnnnnnnnnnnnnnnnnnnnnnnnnnnnnnnnnnnnnnnnnnnnnnnnnnnnnnnnnnnnnnnnnnnnnnnnnnnnnnnnnnnnnnnnnnnnnnnnnnnnnnnnnnnnnnnnnnntccatcaactcccttgcnacacacagtctgtgccctccatattccctactgcaggtctagggccattgatcatttcttctgcgatgtcccagccatgttgcttattgcctctatggatacttaggtctatgaatatatggtttttgtaagtacaagcttctttctcctttccttttgttggtgtcactgcttcgaaaggccgagtcctatttgctgtctatcgtacgcacnnnnnnnnnnnnnnnnnnnnnnnnnnnnnnnnnnnnnnnnnnnnnnnactgtagtgactttctactatgcaccttttgtctacacctatctacgtccaagatccctgcgatctccaacagaggacaaggttctggctgttttctacaccatcctcaccccaatgctcaaccccatcatctacagcctgagaaacaaggnnnnnnnnnnnnnnnnnnnnnnnnnnnnnnnnnnnnnnnnnnnnnnnnnnnnnnnnnnnnnnnnnnnnnnnnnnnnnnnnnnnnnnnnnnnnnnnnnnnnnnnnnnnnnnnnnnnnnnnnnnnnnnnnnnnnnnnnnnnnnnnnnnnnnnnnnnnctagtaggtacatttaagcagtcaaannnnnnnnnnnnnnnnnnnnnnnnnnnnnnnnnnnnnnnnnnnnnnnnnnnnnnnnnnnnnngatgttaattacatagcatactatttcaataaattatatgcaatgtgttatactgtatgtttgtacctatattactattactgtgataatatttatactcatatattgacatagaatttcttcaggtaataacacaaatttgttaatgttgccttttactctgtttgcattctaagtcttcaaagtcttgtgtttgttttatgctagagtgcagtgcagcttggacaaagcatatctcaagtgcctagtcagtgtctacagtgttggacagcacagccttagagcatccccaatcagtagttttcagaagttatatatgcgtatgtgtgtgcatgtatggtgtatgcaaacat

SEQ ID NO: 35734 - DNA, 144 bp, Macaca Mulatta
gggcagcgcctgacatgcctgatcctctcttttctgcagttcaagggaaagacaagatcttgcacaaggcactctgcatctgcccttggccagggaagggtggcatggagcctctccggctgctcatcttactctttgccacag

SEQ ID NO: 35735 - DNA, 659 bp, Macaca Mulatta
  misc_feature (1)...(659): n = A,T,C or G
agcttcccaaagggatgcagctgcccagaagttgctctgaagccagtttctgtcattcagctctttgatttgatgcacagtttcttgaactgggcctccaaccatgttcccttcttctcagtgccataaataatcaaaannnnnnnnnnnnnnnnnnnnnnnnnnnnnnnnnnnnnnnnnnnnnnnnnnnnnnnnnnnnnnnnnnnnnnnnnnnnnnnnnnnnnnnnnnnnnnnnnnnnnnnnnnnnnnnnnnnnnnnnnnnnnnnnnnnnnnnnnnnnnnnnnnnnnnnnnnnnnnnnnnnnnnnnnnnnnnnnnnnnnnnnnnnnnnnnnnnnnnnnnnnnnnnnnnnnnnnnnnnnnnnnnnnnnnnnnnnnnnnnnnnnnnnnnnnnnnnnnnnnnnnnnnnnnnnnnnnnnnnnnnnnnnnnnnnnnnnnnnnnnnnnnnnnnnnnnnnnnnnnnnnnnnnnnnnnnnnnnnnnnnnnnnnnnnnnnnnnnnnnnnnnnnnnnnnnnnnnnnnnnnnnnnnnnnnnnnnnnnnnnnnnnnnnnnnnnnnnnnnnnnnnnnnnnnnnnnnnnnnnnnnnnnnnnnnnnnnnnnnnnnnnnnnnnnnnnnnnnnnnnnnnnnnnnnnnnnnnnnnnnnnnnnnnnnnnnnnngaac

SEQ ID NO: 35736 - DNA, 1056 bp, Macaca Mulatta
  misc_feature (1)...(1056): n = A,T,C or G
gatttgaagggattttgaaaagaatcatgtcttcagcctggaagactccccgtggatcagatgcaatgcctgagatcatggtgaaaatcattggaagtaaatactttcgatacctcgtggagaagccaaagatnnnnnnnnnnnnnnnnnnnnnnnnnnnnnnnnnnnnnnnnnnnnnnnnnnnnnnnnnnnnnnnnnnnnnnnnnnnnnnnnnnnnnnnnnnnnnnnnnnnnnnnnnnnnnnnnnnnnnnnnnnnnnnnnnnnnnnnnnnnnnnnnnnnnnnnnnnnnnnnnnnnnnnnnnnnnnnnnnnnnnnnnnnnnnnnnnnnnnnnnnnnnnnnnnnnnnnnnnnnnnnnnnnnnnnnnnnnnnnnnnnnnnnnnnnnnnnnnnnnnnnnnnnnnnnnnnnnnnnnnnnnnnnnnnnnnnnnnnnnnnnnnnnnnnnnnnnnnnnnnnnnnnnnnnnnnnnnnnnnnnnnnnnnnnnnnnnnnnnnnnnnnnnnnnnnnnnnnnnnnnnnnnnnnnnnnnnnnnnnnnnnnnnnnnnnnnnnnnnnnnnnnnnnnnnnnnnnnnnnnnnnnnnnnnnnnnnnnnnnnnnnnnnnnnnnnnnnnnnnnnnnnnnnnnnnnnnnnnnnnnnnnnnnnnnnnnnnnnnnnnnnnnnnnnnnnnnnnnnnnnnnnnnnnnnnnnnnnnnnnnnnnnnnnnnnnnnnnnnnnnnnnnnnnnnnnnnnnnnnnnnnnnnnnnnnnnnnnnnnnnnnnnnnnnnnnnnnnnnnnnnnnnnnnnnnnnnnnnnnnnnnnnnnnnnnnnnnnnnnnnnnnnnnnnnnnnnnnnnnnnnnnnnnnnnnnnnnnnnnnnnnnnnnnnnnnnnnnnnnnnnnnnnnnnnnnnnagcactccacctcaacactccagctcacagccagaagtgaacaggagtctgttggagattttgaagatggcactaaggacaaccaatggcagactcaacatagaaaatctcaatctgagttttcgaaaagaagatcgctcattctctggctgccttcctccacctaagg

SEQ ID NO: 35737 - DNA, 601 bp, Macaca Mulatta
ctcacaccttgctgtacataagataattcatactggagagaaactctacaaatgtgaagaacgtggcaaagcttttaacttatcctcaaaccttactgcacataagaaaaatcatactggagtgaaaccctacaaatgtgaagaatgtggcaaagctaacctatcctcaacccttactccacgtaagacaattcatacttgagagaaaccctgcaaatgtgaacaatgtggcaatgcttttaactaaatctcaaactttactaaacgtaagaaaattaatactggaaactttacaaacctaaaagatgagacaatgattttgaaaacaccttcaaacttttctaaccataaaagcaatcatactggtgagaaatcctaaaaatgtgaagaatgttacaaagtctttaaatggttgtcacacttgattataagtaagataatttatactggagaaaactcccagaagtgcgaagaatgtggtaaaaattttaattaattttcacaccttattgcacaggaaagcccttcagaaaaattgtaccaatataaatgtggaaaagccattaatacctggttacatcttactcaacattagagagtt

SEQ ID NO: 35738 - DNA, 828 bp, Macaca Mulatta
aagcagcaggcagcggcatccaaggagactaggacgaattcttgggaagggccagcgttagaaatcactgtggtgctagagccgttcttcaccacacccatgttagggtctgcatagtgatcccatttcagctcgtgctctgcctcgattgttgtgttggacattccggtggcatttccttctgagacaagggagtatgtgtgccttggtgtagttgctgtgcactaggagctgtgatctccctctctgcagggagaccccagcccctgctgcttgctttctgccaaacctgtgccattcatcagctgtgccctctgtggactgttaacaggcaggacagttggatgtggcctgggctcgtgccggtggtgtcacaccccaaggcagcgagcgcgcagatgccgatggcagggctgctgcggagtcctggggacctcggctggtgcctcccctccctagaggttttgttcggactcttactagggagtgggggcaggaagagtcctgtactatgcaggttgtgtggactttacatgggaccctgctaagctggttgaaaacgtttttcttgtgttttaaggattaggagacatggaagaggaagaacgaagtcccctctgtagttggtttccttcctgtgtccctttgcaagctcccaggtgatctgaggtgtcatttctccctcctgggttgacccttaagcgccaatatgatcacagcgaagagtttctcgataagcccttaaattcgatgtgtgactgtttggcacttgagacaaatctgcctttgcagggagagtgtctctcacgggcattggtgtgggcatgc

SEQ ID NO: 35739 - DNA, 2168 bp, Macaca Mulatta
  misc_feature (1)...(2168): n = A,T,C or G
ggccgaagatcaagctcgcgactctccaagagggaggtgtccagtctgctaagctacacgcaggnnnnnnnnnnnnnnnnnnnnnnnnnnnnnnnnnnnnnnnnnnnnnnnnnnnnnnnnnnnnnnnnnnnnnnnnnnnnnnnnnnnnnnnnnnnnnnnnnnnnnnnnnnnnnnnnnnnnnnnnnnnnnnnnnnnnnnnnnnnnnnnnnnnnnnnnnnnnnnnnnnnnnnnnnnnnnnnnnnnnnnnnnnnnnnnnnnnnnnnnnnnnnnnnnnnnnnnnnnnnnnnnnnnnnnnnnnnnnnnnnnnnnnnnnnnnnnnnnnnnnnnnnnnnnnnnnnnnnnnnnnnnnnnnnnnnnnnnnnnnnnnnnnnnnnnnnnnnnnnnnnnnnnnnnnnnnnnnnnnnnnnnnnnnnnnnnnnnnnnnnnnnnnnnnnnnnnnnnnnnnnnnnnnnnnnnnnnnnnnnnnnnnnnnnnnnnnnnnnnnnnnnnnnnnnnnnnnnnnnnnnnnnnnnnnnnnnnnnnnnnnnnnnnnnnnnnnnnnnnnnnnnnnnnnnnnnnnnnnnnnnnnnnnnnnnnnnnnnnnnnnnnnnnnnnnnnnnnnnnnnnnnnnnnnnnnnnnnnnnnnnnnnnnnnnnnnnnnnnnnnnnnnnnnnnnnnnnnnnnnnnnnnnggtctctgcagacaaactggtggcactggggctgttcagccagcactttaatttggccaccttcaataagctcgtctcctatcgaaaagccatgtaccatgctctggagaagctagggtgcgagctggcaagaccttccccagcagccctgtagactcattgcaggaccagctgaagcccatgttggagtgggcccacggcggcttcaagcccactgggatcgagggcctcagacccaacaacacgcagccagnnnnnnnnnnnnnnnnnnnnnnnnnnnnnnnnnnnnnnnnnnnnnnnnnnnnnnnnnnnnnnnnnnnnnnnnnnnnnnnnnnnnnnnnnnnnnnnnnnnnnnnnnnnnnnnnnnnnnnnnnnnnnnnnnnnnnnnnnnnnnnnnnnnnnnnnnnnnnnnnnnnnnnnnnnnnnnnnnnnnnnnnnnnnnnnnnnnnnnnnnnnnnnnnnnnnnnnnnnnnnnnnnnnnnnnnnnnnnnnnnnnnnnnnnnnnnnnnnnnnnnnnnnnnnnnnnnnnnnnnnnnnnnnnnnnnnnnnnnnnnnnnnnnnnnnnnnnnnnnnnnnnnnnnnnnnnnnnnnnnnnnnnnnnnnnnnnnnnnnnnnnnnnnnnnnnnnnnnnnnnnnnnnnnnnnnnnnnnnnnnnnnnnnnnnnnnnnnnnnnnnnnnnnnnnnnnnnnnnnnnnnnnnnnnnnnnnnnnnnnnnnnnnnnnnnnnnnnnnnnnnnnnnnnnnnnnnnnnnnnnnnnnnnnnnnnnnnnnnnnnnnnnnnnnnnnnnnnnnnnnnnnnnnnaagcccccaagctgtaccctgccattcccgcagcccgaaggcggcccattcgagtcctgtcattgtttgatggcatcgcaacaggnnnnnnnnnnnnnnnnnnnnnnnnnnnnnnnnnnnnnnnnnnnnnnnnnnnnnnnnnnnnnnnnnnnnnnnnnnnnnnnnnnnnnnnnnnnnnnnnnnnnnnnnnnnnnnnnnnnnnnnnnnnnnnnnnnnnnnnnnnnnnnnnnattgaagaatggggcccatttgacttggtgattggcggaagcccatgcaacgatctctcaaatgtgaatccagccaggaaaggcctgtatgagggtacaggccggctcttctttgaattttaccacctgctgaattactcacgccccaaggagggtgatgaccggccgttcttctggatgtttgagaatgttgtagccatgaaggttggcgacaagagggacatctcacggttcctggannnnnnnnnnnnnnnnnnnnnnnnnnnnnnnnnnnnnnnnnnnnnnnnnnnnnnnnnnnnnnnnnnnnnnnnnnnnnnnnnnnnnnnnnnncttggctttcctgtgcactacacagacgtgtccaacatgggccgcggtgcccgccagaagctgctgggaaggtcctggagcgtgcctgtcatccgacacctcttcgcccctctgaaggactactttgcatgtgaata

SEQ ID NO: 35740 - DNA, 574 bp, Macaca Mulatta
tgcccagcagaacctggccctgcagctggccgagaagctgggcagcctggtggagaacaatgagcgagtgtttgaccacaaacaaggcacctacgggggctacttccgaggtgagtgcttccggctcctctcctcgcccggcttctggtaccctcacagcctctcccctggcactccctccacatccttcccatctctctcctgcagaccagaaggacggctaccgcaaaaacgagggctacatgcgccgcggtggctaccgccagcagccatctcaaacggcctactgagctctccactctgtctcacgcctagactatctaaccttgaagtcctaagccacaccccaggcattaaaagtctatttaaagttgttatggttgattgcttgttgccacaaaggtgtgttgagtccattcatttgctgattatatttctgagcttctacccacatgacagacacgaggctcggatgcagaggtgaattgaacacattcctgaccttgaagagcttgttgctttttgacatttaacagaaaattgtaataacataagttataatgggtattttaaa

SEQ ID NO: 35741 - DNA, 506 bp, Macaca Mulatta
ggctccgcccacgctgtgcgcctctccccaaccccaggcgaaggcactagaatttcccaaattaagaacgcagaggaagtttggaccttttcggccaccgctcgcttcaatatggccgcccccggggagcgactaggcaaccgtgaaggagcagagcgcggaccccgagtccctcacacatggatcgcagcgcggagttcaggaaatggaaggcgcagtgtttgagcaaagcggacctcagccggaagggcagtgtggacaaggatgtggtagagcttgtgcagtttctgaacacgcgagatcagtttttcaccactagctcctgcgctggccgcatcctactccttgacggggtgagggcccttttgctcccgtccatcgcctgccttctagtgcgaaactttaggagccctgtgcccacccagtgacgaccggatccagcatgtctgtgtttgttcctccgcagggtggtctgtttctttatatgtgtaatttaggggattaga

SEQ ID NO: 35742 - DNA, 158 bp, Macaca Mulatta
agttcccccttctgccccacactgccaaatccaaggatcccaggatattggcagcgatgtcatcctgctctgtagctcagaggaaggcattcctcgaccaacttacctttgggagaagttagacaataccctcaaactacctccaacagctactcagg

SEQ ID NO: 35743 - DNA, 779 bp, Macaca Mulatta
  misc_feature (1)...(779): n = A,T,C or G
gggatagctattcagaagaatggagctataattgtggatagaatctacaagaccaaggaatgtaaaatgagaataactgcagaagaaatgagtgcaataatagaagaacgggatgctgccttgtctaannnnnnnnnnnnnnnnnnnnnnnnnnnnnnnnnnnnnnnnnnnnnnnnnnnnnnnnnnnnnnnnnnnnnnnnnnnnnnnnnnnnnnnnnnnnnnnnnnnnnnnnnnnnnnnnnnnnnnnnnnnnnnnnnnnnnnnnnnnnnnnnnnnnnnnnnnnnnnnnnnnnnnnnnnnnnnnnnnnnnnnnnnnnnnnnnnnnnnnncagtttacacaaatctttatctcaagaagaaaatctgaaggatcagtttaactatgccctgagtacatatgaagaagctttaaaaaacagagagaacattgtttccatcactcaacaacaaaatgaggaactggctactcaactgcaacaagctctgacagagcgagcaaatatggaattacaacttcaacatgccatagaggcctcccaagtaaccaatgaaaaagttcaaaagttggaaaggctggtggatgtactgagaaagaaggttggaaccgggaccatgaggacagtgatctgattgaaaaaaaacgacagtctggggaagcgatcacatctggtgaccaggctgcttcattcaacactgtgtaaacactaaagccttaacttagcaaacagttgttagaagtgaggacactccaaccacattccaagctgagataaaatcaaa

SEQ ID NO: 35744 - DNA, 264 bp, Macaca Mulatta
  misc_feature (1)...(264): n = A,T,C or G
ttccattggncgtgacatccccaaaatgcttgaattcttcaaaaatggacatgaaattaaggtagatgatttttgggagaattttctgcagaccaaaatagcaannnnnnnnnnnnnnnnnnnnnnnnnnnnnnnnnnnnnnnnnnnnnnnnnnnnnnnnnnnnnnnnnnnnnnnnnnnnnnnnnnnggtccctttgtgatacgtgctttccttcgtagttcaacaagtgaaggtttattactgaagattgatccattgttgcc

SEQ ID NO: 35745 - DNA, 818 bp, Macaca Mulatta
ggggtcaggaggttggccagccatggcgtcctatttcgatgaacacgactgcgagccgtctgaccccgagcaggagacgcgaaccaacatgctgctggagctcgcaaggtcacttttcaataggatggactttgaagacttggggttggtagtagattgggaccaccacctgcctccaccagctgccaagaatgtggttgagaacctccccaggacagtcatcagaggctctcaggctgagctcaagtgccccgtgtgtcttttggaatttgaggaggaggagactgccattgagatgccttgccatcaccttttccattccagctgcattctgccctggctaagcaagacaaattcctgtcccttgtgccgccatgagctgcccactgatgacgacacttatgaggagcacagacgagataaggctcgaaaacagcagcagcaacaccgactggagaacctccatggagccatgtacacgtgaggaggctagggctgagtgctggccctctgcgtcttccttactaaccttgaatcctcattaaaggtttctttacccacccctgaggctgtattgatcacagacctggccaggggctctgcatcctccatcaggtctctacttctgttgggggaagtgatccctaaaccccagaaagcacccgggctgtgggtttttcctccctggctgggcccatctgggactcatggcaagtgggtaaaagaaactggaattactggcattcggcccaggggcttgggggccctagtgtggtttcctgggcctggggaaaggccaaaaaggtgggtcacggggt

SEQ ID NO: 35746 - DNA, 1380 bp, Macaca Mulatta
  misc_feature (1)...(1380): n = A,T,C or G
ggtatgtctcatcggggactgtgtagggggcctcctggccttcgatgccatctgctacagtgcagggccctcaggggacagccctgccagcagcagccggaaggggagcatcagcagcacccaggnnnnnnnnnnnnnnnnnnnnnnnnnnnnnnnnnnnnnnnnnnnnnnnnnnnnnnnnnnnnnnnnnnnnnnnnnnnnnnnnnnnnnnnnnnnnnnnnnnnnnnnnnnnnnnnnnnnnnnnnnnnnnnnnnnnnnnnnnnnnnnnnnnnnnnnnnnnnnnnnnnnnnnnnnnnnnnnnnnnnnnnnnnnnnnnnnnnnnnnnnnnnnnnnnnnnnnnnnnnnnnnnnnnnnnnnnnnnnnnnnnnnnnnnnnnnnnnnnnnnnnnnnnnnnnnnnnnnnnnnnnnnnnnnnnnnnnnnnnnnnnnnnnnnnnnnnnnnnnnnnnnnnnnnnnnnnnnnnnnnnnnnnnnnnnnnnnnnnnnnnnnnnnnnnnnnnnnnnnnnnnnnnnnnnnnnnnnnnnnnnnnnnnnnnnnnnnnnnnnnnnnnnnnnnnnnnnnnnnnnnnnnnnnnnnnnnnnnnnnnnnnnnnnnnnnnnnnnnnnnnnnnnnnnnnnnnnnnnnnnnnnnnnnnnnnnnnnnnnnnnnnnnnnnnnnnnnnnnnnnnnnnnnnnnnnnnnnnnnnnnnnnnnnnnnnnnnnnnnnnnnnnnnnnnnnnnnnnnnnnnnnnnnnnnnnnnnnnnnnnnnnnnnnnnnnnnnnnnnnnnnnnnnnnnnnnnnnnnnnnnnnnnnnnnnnnnnnnnnnnnnnnnnnnnnnnnnnnnnnnnnnnnnnnnnnnnnnnnnnnnnnnnnnnnnnnnnnnnnnnnnnnnnnnnnnnnnnnnnnnnnnnnnnnnnnnnnnnnnnnnnnnnnnnnnnnnnnnnnnnnnnnnnnnnnnnnnnnnnnnnnnnnnnnnnnnnnnnnnnnnnnnnnnnnnnnnnnnnnnnnnnnnnnnnnnnnnnnnnnnnnnnnnnnnnnnnnnnnnnnnnnnnnnnnnnnnnnnnnnnnnnnnnnnnnnnnnnnnnnnnnnnnnnnnnnnnnnnnnnnnnnnnnnnnnnnnnnnnnnnnnnnnnnnnnnnnnnnnnnnnnnnnnnnnnnnnnnnnnnnnnnnnnnnnnnnnnnnnnnnnnnnnnnnnnnnnnnnnnnnnnnnnnnnnnnnnnnnnnnnnnnnnnnnnnnnnnnnnnnnnnnnaggtggacatcctggtaatggcagagccgtcctcaggccgctgggtacacctggacacagagatcaccaacagtagcggtcgaatcacatacaacgtgccacggccccggcgcctgggggtcggcgtctatcctgtgaagatggtcgtcag

SEQ ID NO: 35747 - DNA, 256 bp, Macaca Mulatta
aataaaagaaagtacagaagacacttggcattcaaagatttcacatgtatggtcttgattatttgcacacaactccaaaagattaagtcagacctgtgataatttcagattctcctgaggcacaaatttgaatcataggcattgacaggctggcacatgcaggccaataaatgaacctaattgaattcctagcatccgttccccaatacagcttttttatgtaattgttgcacgaattatctttttacatttttaa

SEQ ID NO: 35748 - DNA, 777 bp, Macaca Mulatta
  misc_feature (1)...(777): n = A,T,C or G
cttttgtacagaatacgctataaattatacctttccgaatgtggggccttttttatgattttctacgttcccgtaagttgtgtgcacgaggttctgaacgtgcccgcgggctgctgcgtcctggcccctctgtagcggctgcgggcgtcttggttgaatcttttgctacaaaccatgtttgtgttcgagctctccaggattttacatttttgggtaacctcagtgattcccgttggtgtgggaagtgagaccctccctgaagctgaggagagcgcgttggtcggaactttaaatcagtcagtgctgttggtacatgagaggtggaattgcacttcctgttgagctcccagttgtgcggaatttggtcctcattcctgtatttgctgtactaagttggtttctgttagtctgaacaatctgttttcttttcaaagcatggtggggcttgattgccatagttctgtgggtgttcggcaggttaccgatgggaagattcttgtcacagaatcagcaataccatagtttttctacatgtgctncagctgggggtgctggacaggtaggggtgaagaaagaagaggctctgtgttcggggggctttttcttctcctccccgctaccgggtttccctcactgttttcctacctctacggcaagcacaaagtgtcttctcgggaggccagcgcagcccccagctcttacccaggaccccgccccgtgctgagccctctgctgaagtcctcgcgtggatcacactcattcctccaacccttgcgt

SEQ ID NO: 35749 - DNA, 222 bp, Macaca Mulatta
atataagagggaccgcgctgggcctccagcagtccactttctgctgggttctgagccagaatctgctgcgcgcgccctccctccctcccgcccccccgcctgcaggaggacgacctcagagccacagccctgaacctgtggacaactccagctcctttggcctctcttcatcgaagagtctccaaattttcagatctctggagcgagctgtaggaagatcag

SEQ ID NO: 35750 - DNA, 1363 bp, Macaca Mulatta
  misc_feature (1)...(1363): n = A,T,C or G
tgtactgaatgtgggaaatccttcatccagaagtcacacttaaatagacacaggagaattcatactggagagaaaccctatgaatgcagtgactgtgggaagtctttcattaagaaatcacaactccatgagcatcatcgaattcacacaggagagaaaccatatatatgtgctgagtgtggaaaggccttcaccatcagatcaaatcttattaaacaccagaaaattcatacnnnnnnnnnnnnnnnnnnnnnnnnnnnnnnnnnnnnnnnnnnnnnntcatacaggagagaaacactatgaatgaagtgagtgtgagaaagcattcatccagaagtcnnnnnnnnnnnnnnnnnnnnnnnnnnnnnnnnnnnnnnnnnnnnnnnnnnnnnnnnnnnnnnnnnnnnnnnnnnnnnnnnnnnnnnnnnnnnnnnnnnnnnngagaattcatactggagagaaaccctatgaatgcagtgactgtgggaagtctttcattaagaaatcacaactccatgagcatcatcgaattcacacaggagagaaaccatatatatgtgctgagtgtggaaaggccttcaccatcagatcaaatcttattaaacaccagaaaattcatactaaacagaaaccctataagtgcagtgacttgaggaaagccttnnnnnnnnnnnnnnnnnnnnnnnnnnnnnnnnnnnnnnnnnnnnnnnnnnnnnnnnnnnnnnnnnnnnnnnnnnnnnnnnnnnnnnnnnnnnnnnnnnnnnnnnnnnnnnnnnnnnnnnnnnnnnnnnnnnnnnaaccctatatttgtactgaatgtgggaaatccttcatccagaagtcacacttaaatagacacaggagaattcatactggagagaaaccctatgaatgcagtgactgtgggaagtctttcattaagaaatcacaactccatgagcatcatcgaattcacacaggagagaaaccatatatatgtgctgagtgtggaaaggccttcaccatcagatcaaatcttattaaacaccagaaaattcatactaaacagaaaccctataagtgcagtgacttgaggaaagccttaaactggaagccacaactcagtatgcctcagaaatctgacactggcgaggtagagtgctcaatgctacaattatggtgtggggactcaggaggtgaccaaggtcaactttcttctgtctagttagaattatgaacatctggatcatacagccgatgtgcagttatgcatatggggagacacttttgagagtgtttaagcattgtatagtggccatctttggttatttgatattggtattgtcaagctcctgcaaataatagtaaatgtgcaaggagatga

SEQ ID NO: 35751 - DNA, 618 bp, Macaca Mulatta
tgtaatatcgtgtgtacctttacactgtggttaacataataatatatgttcttcatatttggccaatatattaatttccattttcactaaatttttactatacaaaattttttgtgtttgtttattctttaagataaaatgcaaagcctgactgtacaacctgacttaaaaatagatgatttaattaagtttcctatcataattctattcaagttataggaaaatacaaaattccataccaggttatatgttgccttcaggatataaacatgaacataaaaactacagttcctgttctcttgtatatttgacttttgtccagaaagaaatctaaaaataataataatactgaattaatatcagttatgctaactgctgtatagtgaggaagtcaaaaagcaatgaatttttcttagcagaaggtagattgagacatgtctggaattaaaagaagagatattctctataaactgactttcaaacatgtaattgaaaatgcagcattgctagtcagatatatgagtttgcagtttccaaggaataccatatctggaagttcctaactggcaatggagaggccaaaaatgaaggctgtcatttggggagcaagtggagagg

SEQ ID NO: 35752 - DNA, 1740 bp, Macaca Mulatta
  misc_feature (1)...(1740): n = A,T,C or G
aggcagtagcagaatcccatggtagccaggtgggtgaaggggagcgcggacgttctacctgccttgaagaagacacctgacctgcggagtgagtgaccannnnnnnnnnnnnnnnnnnnnnnnnnnnnnnnnnnnnnnnnnnnnnnnnnnnnnnnnnnnnnnnnnnnnnnnnnnnnnnnnnnnnnnnnnnnnnnnnnnnnnnnnnnnnnnnnnnnnnnnnnnnnnnnnnnnnnnnnnnnnnnnnnnnnnnnnnnnnnnnnnnnnnnnnnnnnnnnnnnnnnnnnnnnnnnnnnnnnnnnnnnnnnnnnnnnnnnnnnnnnnnnnnnnnnnnnnnnnnnnnnnnnnnnnnnnnnnnnnnnnnnnnnnnnnnnnnnnnnnnnnnnnnnnnnnnnnnnnnnnnnnnnnnnnnnnnnnnnnnnnnnnnnnnnnnnnnnnnnnnnnnnnnnnnnnnnnnnnnnnnnnnnnnnnnnnnnnnnnnnnnnnnnnnnnnnnnnnnnnnnnnnnnnnnnnnnnnnnnnnnnnnnnnnnnnnnnnnnnnnnnnnnnnnnnnnnnnnnnnnnnnnnnnnnnnnnnnnnnnnnnnnnnnnnnnnnnnnnnnnnnnnnnnnnnnnnnnnnnnnnnnnnnnnnnnnnnnnnnnnnnnnnnnnnnnnnnnnnnnnnnnnnnnnnnnnnnnnnnnnnnnnnnnnnnnnnnnnnnnnnnnnnnnnnnnnnnnnnnnnnnnnnnnnnnnnnnnnnnnnnnnnnnnnnnnnnnnnnnnnnnnnnnnnnnnnnnnnnnnnnnnnnnnnnnnnnnnnnnnnnnnnnnnnnnnnnnnnnnnnnnnnnnnnnnngtggactcctcctctgagagccccttcctcattctgcccatgaccttctaccatgtgctggatgagacgagccccctgagagacctcacaccccaaaacctaaaggagaaggaatttgagcttgtggtcctcctcaatgccactgtggaatccaccagcgctgtctgccagagccgaacatcttatattccagaggaaatctactggggttttgagtttgtgcctgtggtatctctctccaaaaatggaaaatatgtggctgatttcagtcagtttgaacagattcggaagagcccagattgcaccttttactgtgcagattctgagaaacagaaacttgaggagaagtacaggcaggaggatcagagggaaagagaactgaggacacttttattacaacagagcaatgtctgatcataggagtgccatccaggtttaaccctgcaagctgtttccacatcagaactcccatcaaacacaaagattgctgtgaaaacgaaaatgtgtagatgcactctcaaaaactgcatggacatacaaaaccaatctttccctttgatcttgtggctaaaccagcatttctgtgtttgagagatttccttttaagtgcttcgaatgaaagtgaactctcataattcaaattgtataaaataaatctacatttctaagagcttggtgtagggcaattggaatagtgtcctgttagataaacagacatttagcaatgctgacattaaaaggaaatgtatttctatacaagattattagctctaatataagatatttatttaaccaataaccttatggccgagagttgaattgtggttcagtattcattgatctactgctttaaaacatgctgtttttgttcaagcaggaaaaatattatatctaatgatgtctatttggt

SEQ ID NO: 35753 - DNA, 204 bp, Macaca Mulatta
ggtgaaaaagtgtttgtatctctctatggaggtgccatagacatgaatataaggctggataagaattccttgaccatcgagaaaacctacatatctctggccaatcagcgaactgtaaccattcacaaccgcagtaatatcattgcccatttcctgtggaaggtatttgctacccagcaagaagaggacagagaaaagtatagg

SEQ ID NO: 35754 - DNA, 289 bp, Macaca Mulatta
tccatcggaatgggacagacctacttgacatgcagatgcatgctctgctacaccagccccactgtggggtgcctgatgggtccgacacctccatctcaccaggaagatgcaagtggaataagtacactctaacttacaggattatcaattacccacatgatatgaagccatccacagtgaaagacagtatatataatgcagtttccatctggagcaatgtgacccctttgatattccagcaagtgcagaatgaagatgcagacatcaaggtttctttctggcagtgggc

SEQ ID NO: 35755 - DNA, 330 bp, Macaca Mulatta
tgggaatgcttttgaaaacagactctgaaagccaatgagatgtgctcctcctgcccacagttggacccaggctccaaatttgatcagtgaatagccatgtccgcacatgtaccatgaggcacttgtctgcaaattcatccggagaccttgacagatgcctggaggccagaaatcagcctcttctatgctaccatgtggccccaggagcctgaaaaaacaccaagtacatctagaagttgatggttgaccgatgggagaaagggcaagatggcaatcactcagtcagtcaccctttcctgaaattgttggaggctccaagtgaaataggga

SEQ ID NO: 35756 - DNA, 177 bp, Macaca Mulatta
agggcagtggccggatcacggcccaggtgatcgagcacctggagcgtctagcgcttgtggacttcggcagctgcgaggcagtggcgcgactggagaaagctatcgccttcgccgaccggctacgtgcggtggacactgacggggtggagcccatggagtcggtcctggaggacaggt

SEQ ID NO: 35757 - DNA, 452 bp, Macaca Mulatta
  misc_feature (1)...(452): n = A,T,C or G
cagaactattccttggtgtcagaatttgcgttgcatggactctgcacttcacgacatcttcaaaannnnnnnnnnnnnnnnnnnnnnnnnnnnnnnnnnnnnnnnnnnnnnnnnnnnnnnnnnnnnnnnnnnnnnnnnnnnnnnnnnnnnnnnnnnnnnnnnnnnctgatctcctacgctgtgatcctcctcactgtcagacagcgtgctgcaggtagcacatccaaagcactctccacttgctctgcacatatcatggtagtgacgctgtctttagcccctgcatttttatttatgtgtgccctttcagtaggttttctgttgacaagctgctgtctgtgttttataccatttttactccactcctgaaccccattatctacacactgagaaatgaggagatgaaagcagctatgaagaaactgcaaaaccgactcatgacttttcaatga

SEQ ID NO: 35758 - DNA, 2609 bp, Macaca Mulatta
  misc_feature (1)...(2609): n = A,T,C or G
gaatctttgcctacatgaactacagagtctcccggaccaggaaggagatctttgaaaccctcatcaagggcctgcagcggctggagtacagaggctatgactcggcaggtgnnnnnnnnnnnnnnnnnnnnnnnnnnnnnnnnnnnnnnnnnnnnnnnnnnnnnnnnnnnnnnnnnnnnnnnnnnnnnnnnnnnnnnnnnnnnnnnnnnnnnnnnnnnnnnnnnnnnnnnnnnnnnnnnnnnnnnnnnnnnnnnnnnnnnnnnnnnnnnnnnnnnnnnnnnnnnnnnnnnnnnnnnnnnnnnnnnnnnnnnnnnnnnnnnnnnnnnnnnnnnnnnnnnnnnnnnnnnnnnnnnnnnnnnnnnnnnnnnnnnnnnnnnnnnnnnnnnnnnnnnnnnnnnnnnnnnnnnnnnnnnnnnnnnnnnnnnnnnnnnnnnnnnnnnnnnnnnnnnnnnnnnnnnnnnnnnnnnnnnnnnnnnnnnnnnnnnnnnnnnnnnnnnnnnnnnnnnnnnnnnnnnnnnnnnnnnnnnnnnnnnnnnnnnnnnnnnnnnnnnnnnnnnnnnnnnnnnnnnnnnnnnnnnnnnnnnnnnnnnnnnnnnnnnnnnnnnnnnnnnnnnnnnnnnnnnnnnnnnnnnnnnnnnnnnnnnnnnnnnnnnnnnnnnnnnnnnnnnnnnnnnnnnnnnnnnnnnnnnnnnnnnnnnnnnnnnnnnnnnnnnnnnnnnnnnnnnnnnnnnnnnnnnnnnnnnnnnnnnnnnnnnnnnnnnnnnnnnnnnnnnnnnnnnnnnnnnnnnnnnnnnnnnnnnnnnnnnnnnnnnnnnnnnnnnnnnnnnnnnnnnnnnnnnnnnnnnnnnnnnnnnnnnnnnnnnnnnnnnnnnnnnnnnnnnnnnnnnnnnnnnnnnnnnnnnnnnnnnnnnnnnnnnnnnnnnnnnnnnnnnnnnnnnnnnnnnnnnnnnnnnnnnnnnnnnnnnnnnnnnnnnnnnnnnnnnnnnnnnnnnnnnnnnnnnnnnnnnnnnnnnnnnnnnnnnnnnnnnnnnnnnnnnnnnnnnnnnnnnnnnnnnnnnnnnnnnnnnnnnnnnnnnnnnnnnnnnnnnnnnnnnnnnnnnnnnnnnnnnnnnnnnnnnnnnnnnnnnnnnnnnnnnnnnnnnnnnnnnnnnnnnnnnnnnnnnnnnnnnnnnnnnnnnnnnnnnnnnnnnnnnnnnnnnnnnnnnnnnnnnnnnnnnnnnnnnnnnnnnnnnnnnnnnnnnnnnnnnnnnnnnnnnnnnnnnnnnnnnnnnnnnnnnnnnnnnnnnnnnnnnnnnnnnnnnnnnnnnnnnnnnnnnnnnnnnnnnnnnnnnnnnnnnnnnnnnnnnnnnnnnnnnnnnnnnnnnnnnnnnnnnnnnnnnnnnnnnnnnnnnnnnnnnnnnnnnnnnnnnnnnnnnnnnnnnnnnnnnnaggcttataccagtcagttcatctctctggtgatgtttggtttgatgatgtctgaagaccgaatttcactacaaaacaggaggcaagagatcatccgtggcttgagatctttacctnnnnnnnnnnnnnnnnnnnnnnnnnnnnnnnnnnnnnnnnnnnnnnnnnnnnnnnnnnnnnnnnnnnnnnnnnnnnnnnnnnnnnnnnnnnnnnnnnnnnnnnnnnnnnnnnnnnnnnnnnnnnnnnnnnnnnnnnnnnnnnnnnnnnnnnnnnnnnnnnnnnnnnnnnnnnnnnnnnnnnnnnnnnnnnnnnnnnnnnnnnnnnnnnnnnnnnnnnnnnnnnnnnnnnnnnnnnnnnnnnnnnnnnnnnnnnnnnnnnnnnnnnnnnnnnnnnnnnnnnnnnnnnnnnnnnnnnnnnnnnnnnnnnnnnnnnnnnnnnnnnnnnnnnnnnnnnnnnnnnnnnnnnnnnnnnnnnnnnnnnnnnnnnnnnnnnnnnnnnnnnnnnnnnnnnnnnnnnnnnnnnnnnnnnnnnnnnnnnnnnnnnnnnnnnnnnnnnnnnnnnnnnnnnnnnnnnnnnnttgacttccccagaaatctggccaagtctgtaactgtggaatgaggatgagactgtgacaagaccatcaccacctttcctctgattccagacctgtcccaacagcagggatgcgacatgggaggagaagtgggcatcccacatgttctgcctgctcctgtattttttgacagctgccacgtgccttctacccaagtgcttttgcttacagcagatactgtttctctgtgtcctgaagtcgccagcggagaagggaatcattgtttacacatggggaccagagcagacttctccactactgtgcaatagagatacagctctcttcagagtaactgtgaaccttttataaccaacactagagttagttttagaagacaaaatatttataatgacgattgtatagcttttaagttatttttctagtatgtggtacggctttccgtagccgtggtaacgcccaaactgttcatcttggctacccgtgcgctgtctccaggcttgcccctggcaggtggcattcatctcagatgtgagcacaaggcatggccctctggactcctttctccttttccttcctgtctaagctgctcctgaatcctgttccctga

SEQ ID NO: 35759 - DNA, 1602 bp, Macaca Mulatta
  misc_feature (1)...(1602): n = A,T,C or G
gcgggagaacctgcttcggggtcagcaggaggaggaggaacggctactcaaagctatccccttgttctgcttcccagacgggaatgagtgggcatcactcaccgagtatcccaggnagggagaccttctccttcgttctgaccaatgtggatgggagcagaaagattggatactgcaggcgcctcttgnnnnnnnnnnnnnnnnnnnnnnnnnnnnnnnnnnnnnnnnnnnnnnnnnnnnnnnnnnnnnnnnnnnnnnnnnnnnagatcctggatgaagtggagaagagacatcagatctccatggctgtcatctacccgttcatgcagggcctccgagaggcagccttccctgctcctgggaagactgtcactctcaagagcttcatccccgactcaggcactgannnnnnnnnnnnnnnnnnnnnnnnnnnnnnnnnnnnnnnnnnnnnnnnnnnnnnnnnnnnnnnnnnnnnnnnnnnnnnnnnnnnnnnnnnnnnnnnnnnnnnnnnnnnnnnnnnnnnnnnnnnnnnnnnnnnnnnnnnnnnnnnnncagcaccctatctcagtgcatccatgctgctgccgcgctgctctaccccttcagctgggcgcacacctacatccctgttgtccctgagagccttctggccaccgtctgctgccccacccccttcatggttggagtacaaatgcgcttccagcaggaggtcatggacagccctatggaagaggnnnnnnnnnnnnnnnnnnnnnnnnnnnnnnnnnnnnnnnnnnnnnnnnnnnnnnnnnnnnnnnnnnnnnnnnnnnnnnnnnnnnnnnnnnnnnnnnnnnnnnnnnnnnnnnnnnnnnnnnnnnnnnnnnnnnnnnnnnnnnnnnnnnnnnnnnnnnnnnnnnnnnnnnnnnnnnnnnnnnnnnnnnnnnnnnnnnnnnnnnnnnnnnnnnnnnnnnnnnnnnnnnnnnnnnnnnnnnnnnnnnnnnnnnnnnnnnnnnnnnnnnnnnnnnnnnnnnnnnnnnnnnnnnnnnnnnnnnnnnnnnnnnnnnnnnnnnnnnnnnnnnnnnnnnnnnnnnnnnnnnnnnnnnnnnnnnnnnnnnnnaggctatttccaacagaaaatacttgaatatgaggaacagaagaaacagaagaagccaagggaaaaaactgtgaaataagagctgtggtgaacaagaatgactacagctacacaccatttctggacttcagcccctgccagtgtggcaggatcagcaaagctatcagccccccaaatccataacctcactctgagtcttggtatccaggtattgcttcaaattggtgtctgacatttggatccctggtatcgatttctcaggactttggagggctctgacaccatgctcacagaactgggctcagagctgcattttttgcagaggtgacaggtaggaaacagtagtacatgtgttgtagacacttggttagaagctgctgcaactgccctctcccatcattataacatcttcaacagagaacacactttgtatttgaaaggctcagcctctccacatgaagaagtctatggacgtgtaaggatgagagtaaagaggaaaatcttat

SEQ ID NO: 35760 - DNA, 247 bp, Macaca Mulatta
  misc_feature (1)...(247): n = A,T,C or G
gtggcttccagcttcttaaagtctgacaagaaccggatagggggaatctacaagaagaccatctataaggaatacaaggatgactcatacacagatgaagtggcccagcctgcctggttgggcttcctggggccagtgttgcaggctgaagtgggggatgtcattcttatccacctgaagaattttgccactcgtccctataccatccaccctcatggtgtcttctatgagaaggactctgaaggtn

SEQ ID NO: 35761 - DNA, 930 bp, Macaca Mulatta
  misc_feature (1)...(930): n = A,T,C or G
cggggaggcagaaacttgaagcacaactaacagaaaataatatcgtgaaagaggaactggccctgctggatgggggccaacgtggtctttaaacttctgggtccggtgctagtcaaacaggagctgggggaggctcgggccacagtagggaagaggctggactatatcacagctgaaattaagcgatatgaatcccagctccgggatcttgagcggcagtcagagcaacagagggagacccttgctcagctgcagcaggagttccagcggggccaggcggcaaaggcaggggctcctggcaaggcctgacgccttggtggggggaggggaggggagggaatgangcanctcnagcatctatactggatctcataaaatgtacaaacccctcgtataannnnnnnnnnnnnnnnnngcataaaaatgtttagccgaattcggctcctctaaaaactttctaaaccaattcgatttggctacgcagggacccaatattgtgacataaggaaatcgaacaaggaccctagttttccctaggtaaactccttgacgatatactaattacgaggcttggttattccctcaccataataaccataaaaccgccccgatacattgccacatcttatcgcgctttccacggaaaccacaaatccatggaacggnaaaatttccacacaagatctttcccaagtgtggatttttatgtcacctatttgttattacattttgtgtagnaggattcaagagattgtcagtatatgtaagaatatccccgcgacctcgtgggttcgtacatacagaataggtataatatacgtgagatgggtacaaaaaaacacagagtgataagagatattttgtgtgaggggcgagacaactntatataanctcctcaaataagaatataagnaacggtacaaattaaaa

SEQ ID NO: 35762 - DNA, 1796 bp, Macaca Mulatta
  misc_feature (1)...(1796): n = A,T,C or G
aatccacatatgtcgaagcaagagagaaaccaaagaccgtccagcatggtcagtgaaacatccacggctgggaccgcctccaccctggaggccaagcctggacccaagnnnnnnnnnnnnnnnnnnnnnnnnnnnnnnnnnnnnnnnnnnnnnnnnnnnnnnnnnnnnnnnnnnnnnnnnnnnnnnnnnnnnnnnnnnnnnnnnnnnnnnnnnnnnnnnnnnnnnnnnnnnnnnnnnnnnnnnnnnnnnnnnnnnnnnnnnnnnnnnnnnnnnnnnnnnnnnnnnnnnnnnnnnnnnnnnnnnnnnnnnnnnnnnnnnnnnnnnnnnnnnnnnnnnnnnnnnnnnnnnnnnnnnnnnnnnnnnnnnnnnnnnnnnnnnnnnnnnnnnnnnnnnnnnnnnnnnnnnnnnnnnnnnnnnnnnnnnnnnnnnnnnnnnnnnnnnnnnnnnnnnnnnnnnnnnnnnnnnnnnnnnnnnnnnnnnnnnnnnnnnnnnnnnnnnnnnnnnagggatatggagaaggtggagcggcaggctgtcccccaggccaaccacacagagtcctgtcacgaatgtggccgggtgggacccggacatacgagagattgttctcatcgtggccatgatgacactgtcaacttcgagaggcaggagcaggagggagagcagtaccgttcccagagggacccgctggagggcaagcgggaccggagcaaggccaggtctccatactcgccggctgaggaggatgccttgtttatggatttacccagtggcccaagaggccagcaggcacagccccaacgggcagagaagaatggaatgttgcctgcctcatatggcccaggagaacagaatgggactggcgggtaccagcgggcctttcctcccaggaccaaccctgaaaaacacagccaaaggaagagcaatctggcccaggtggagcactgggcaagggcccagaagggggacagcaggagnagtcttcccttggaccagacgcttcctcgccagggtcctggccaatccctgtccttcccagaaaactaccagactcttcccaggagcacccgacacccctcggggggctcctcgccacctcccccgaaacctgccaagtgactacaagtacgcgcaggaccgagccagccacctgaagatgtcgagtgaagagcgccgggcgnnnnnnnnnnnnnnnnnnnnnnnnnnnnnnnnnnnnnnnnnnnnnnnnnnnnnnnnnnnnnnnnnnnnnnnnnnnnnnnnnnnnnnnnnnnnnnnnnnnnnnnnnnnnnnnnnnnnnnnnnnnnnnnnnnnnnnnnnnnnnnnnnnnnnnnnnnnnnnnnnnnnnnnnnnnnnnnnnnnnnnnnnnnnnnnnnnnnnnnnnnnnnnnnnnnnnnnnnnnnnnnnnnnnnnnnnnnnnnnnnnnnnnnnnnnnnnnnnnnnnnnnnnnnnnnnnnnnnnnnnnnnnnnnnnnnnnnnnnnnnnnnnnnnnnnnnnnnnnnnnnagaactcgtctcacgtggaccgacgctccatgccctccatgggttacatgacccacaccgtcagtgctcccagtttacatggaaaatcggnnnnnnnnnnnnnnnnnnnnnnnnnnnnnnnnnnnnnnnnnnnnnnnnnnnnnnnnnnnnnnnnnnnnnnnnnnnnnnnnnnnnnnnnnnnnnnnnnnnnnnnnnnnnnnnnnnnnnnnnnngtcaaactgagcatcttctgcgaacaggacaggatcctccaggacttggaagacaagatacgagcccttaaagagaacaaag

SEQ ID NO: 35763 - DNA, 4512 bp, Macaca Mulatta
  misc_feature (1)...(4512): n = A,T,C or G
atcacatccacgggagccttgtatattaaagatgtacagaatgaagatggattgtataactaccgctgcatcacgcggcatcgatacaccggagagacgaggcagagcaacagcgccagactttttgtatcagncagacccatcgcactcggccccatccatactggatggatttgaccatcgcaaagccatggctgggcagcgtgtggagctgccttgcaaagcacttgggcaccctgagccagattaccgctggctgaaggacaacatgcccctggaactttcagggaggttccagaagaccgtgacggggctgctcattgagaacattcgcccctcggactcaggcagctatgtgtgtgaagtgtccaacagatacggaacggctaaggtgataggccgcctgtacgtgaaacnnnnnnnnnnnnnnnnnnnnnnnnnnnnnnnnnnnnnnnnnnnnnnnnnnnnnnnnnnnnnnnnnnnnnnnnnnnnnnnnnnnnnnnnnnnnnnnnnnnnnnnnnnnnnnnnnnnnnnnnnnnnnnnnnnnnnnnnnnnnnnnnnnnnnnnnnnnnnnnnnnnnnnnnnnnnnnnnnnnnnnnnnnnnnnnnnnnnnnnnnnnnnnnnnnnnnnnnnnnnnnnnnnnnnnnnnnnnnnnnnnnnnnnnnnnnnnnnnnnnnnnnnnnnnnnnnnnnnnnnnnnnnnnnnnnnnnnnnnnnnnnnnnnnnnnnnnnnnnnnnnnnnnnnnnnnnnnnnnnnnnnnnnnnnnnnnnnnnnnnnnnnnnnnnnnnnnnnnnnnnnnnnnnnnnnnnnnnnnnnnnnnnnnnnnnnnnnnnnnnnnnnnnnnnnnnnnnnnnnnnnnnnnnnnnnnnnnnnnnnnnnnnnnnnnnnnnnnnnnnnnnnnnnnnnnnnnnnnnnnnnnnnnnnnnnnnnnnnnnnnnnnnnnnnnnnnnnnnnnnnnnnnnnnnnnnnnnnnnnnnnnnnnnnnnnnnnnnnnnnnnnnnnnnnnnnnnnnnnnnnnnnnnnnnnnnnnnnnnnnnnnnnnnnnnnnnnnnnnnnnnnnnnnnnnnnnnnnnnnnnnnnnnnnnnnnnnnnnnnnnnnnnnnnnnnnnnnnnnnnnnnnnnnnnnnnnnnnnnnnnnnnnnnnnnnnnnnnnnnnnnnnnnnnnnnnnnnnnnnnnnnnnnnnnnnnnnnnnnnnnnnnnnnnnnnnnnnnnnnnnnnnnnnnnnnnnnnnnnnnnnnnnnnnnnnnnnnnnnnnnnnnnnnnnnnnnnnnnnnnnnnnnnnnnnnnnnnnnnnnnnnnnnnnnnnnnnnnnnnnnnnnnnnnnnnnnnnnnnnnnnnnnnnnnnnnnnnnnnnnnnnnnnnnnnnnnnnnnnnnnnnnnnnnnnnnnnnnnnnnnnnnnnnnnnnnnnnnnnnnnnnnnnnnnnnnnnnnnnnnnnnnnnnnnnnnnnnnnnnnnnnnnnnnnnnnnnnnnnnnnnnnnnnnnnnnnnnnnnnnnnnnnnnnnnnnnnnnnnnnnnnnnnnnnnnnnnnnnnnnnnnnnnnnnnnnnnnnnnnnnnnnnnnnnnnnnnnnnnnnnnnnnnnnnnnnnnnnnnnnnnnnnnnnnnnnnnnnnnnnnnnnnnnnnnnnnnnnnnnnnnnnnnnnnnnnnnnnnnnnnnnnnnnnnnnnnnnnnnnnnnnnnnnnnnnnnnnnnnnnnnnnnnnnnnnnnnnnnnnnnnnnnnnnnnnnnnnnnnnnnnnnnnnnnnnnnnnnnnnnnnnnnnnnnnnnnnnnnnnnnnnnnnnnnnnnnnnnnnnnnnnnnnnnnnnnnnnnnnnnnnnnnnnnnnnnnnnnnnnnnnnnnnnnnnnnnnnnnnnnnnnnnnnnnnnnnnnnnnnnnnnnnnnnnnnnnnnnnnnnnnnnnnnnnnnnnnnnnnnnnnnnnnnnnnnnnnnnnnnnnnnnnnnnnnnnnnnnnnnnnnnnnnnnnnnnnnnnnnnnnnnnnnnnnnnnnnnnnnnnnnnnnnnnnnnnnnnnnnnnnnnnnnnnnnnnnnnnnnnnnnnnnnnnnnnnnnnnnnnnnnnnnnnnnnnnnnnnnnnnnnnnnnnnnnnnnnnnnnnnnnnnnnnnnnnnnnnnnnnnnnnnnnnnnnnnnnnnnnnnnnnnnnnnnnnnnnnnnnnnnnnnnnnnnnnnnnnnnnnnnnnnnnnnnnnnnnnnnnnnnnnnnnnnnnnnnnnnnnnnnnnnnnnnnnnnnnnnnnnnnnnnnnnnnnnnnnnnnnnnnnnnnnnnnnnnnnnnnnnnnnnnnnnnnnnnnnnnnnnnnnnnnnnnnnnnnnnnnnnnnnnnnnnnnnnnnnnnnnnnnnnnnnnnnnnnnnnnnnnnnnnnnnnnnnnnnnnnnnnnnnnnnnnnnnnnnnnnnnnnnnnnnnnnnnnnnnnnnnnnnnnnnnnnnnnnnnnnnnnnnnnnnnnnnnnnnnnnnnnnnnnnnnnnnnnnnnnnnnnnnnnnnnnnnnnnnnnnnnnnnnnnnnnnnnnnnnnnnnnnnnnnnnnnnnnnnnnnnnnnnnnnnnnnnnnnnnnnnnnnnnnnnnnnnnnnnnnnnnnnnnnnnnnnnnnnnnnnnnnnnnnnnnnnnnnnnnnnnnnnnnnnnnnnnnnnnnnnnnnnnnnnnnnnnnnnnnnnnnnnnnnnnnnnnnnnnnnnnnnnnnnnnnnnnnnnnnnnnnnnnnnnnnnnnnnnnnnnnnnnnnnnnnnnnnnnnnnnnnnnnnnnnnnnnnnnnnnnnnnnnnnnnnnnnnnnnnnnnnnnnnnnnnnnnnnnnnnnnnnnnnnnnnnnnnnnnnnnnnnnnnnnnnnnnnnnnnnnnnnnnnnnnnnnnnnnnnnnnnnnnnnnnnnnnnnnnnnnnnnnnnnnnnnnnnnnnnnnnnnnnnnnnnnnnnnnnnnnnnnnnnnnnnnnnnnnnnnnnnnnnnnnnnnnnnnnnnnnnnnnnnnnnnnnnnnnnnnnnnnnnnnnnnnnnnnnnnnnnnnnnnnnnnnnnnnnnnnnnnnnnnnnnnnnnnnnnnnnnnnnnnnnnnnttccaggtcctcccgcgggcgtgaaggcagcggcggcctcagcctccatggtctttgtgtcctggcttccccctctcaagctgaacggcatcatccgaaagtacactgtattctgctcccacccctatcccacagtnnnnnnnnnnnnnnnnnnnnnnnnnnnnnnnnnnnnnnnnnnnnnnnnnnnnnnnnnnnnnnnnnnnnnnnnnnnnnnnnnnnnnnnnnnnnnnnnnnnnnnnnnnnnnnnnnnnnnnnnnnnnnnnnnnnnnnnnnnnnnnnnnnnnnnnnnnnnnnnnnnnnnnnnnnnnnnnnnnnnnnnnnnnnnnnnnnnnnnnnnnnnnnnnnnnnnnnnnnnnnnnnnnnnnnnnnnnnnnnnnnnnnnnnnnnnnnnnnnnnnnnnnnncagtaacgggacacccagtctagtaacgattgatgggcggaggagcatctttagcaacggaagcttcattattcgcacggtgaaagcagaagactctggctattacagctgcattgccaacaacaactggggatctgatgaaattattttaaacctacaagtacaannnnnnnnnnnnnnnnnnnnnnnnnnnnnnnnnnnnnnnnnnnnnnnnnnnnnnnnnnnnnnnnnnnnnnnnnnnnnnnnnnnnnnnnnnnnnnnnnnnnnnnnnnnnnnnnnnnnnnnnnnnnnnnnnnnnnnnnnnnnnnnnnnnnnnnnnnnnnnnnnnnnnnnnnnnnnnnnnnnnnnnnnnnnnnnnnnnnnnnnnnnnnnnnnnnnnnnnnnnnnnnnnnnnnnnnnnnnnnnnnnnnnnnnnnnnnnnnnnnnnnnnnnnnnnnnnnnnnnnnnnnnnnnnnnnnnnnnnnnnnnnnnnnnnnnnnnnnnnnnnnnnnnnnnnnnnnnnnnnnnnnnnnnnnnnnnnnnnnnnnnnnnnnnnnnnnnnnnnnnnnnnnnnnnnnnnnnnnnnnnnnnnnnnnnnnnnnnnnnnnnnnnnnnnnnnnnnnnnnnnnnnnnnnnnnnnnnnnnnnnnnnnnnnnnnnnnnnnnnnnnnnnnnnnnnnnnnnnnnnnnnnnnnnnnnnnnnnnnnnnnnnnnnnnnnnnnnnnnnnnnnnnnnnnnnnnnnnnnnnnnnnnnnnnnnnnnnnnnnnnnnnnnnnnnnnnnnnnnnnnnnnnnnnnnnnnnnnnnnnnnnnnnnnnnnnnnnnnnnnnnnnnnnnnnnnnnnnnnnnnnnnnnnnnnnnnnnnnnnnnnnnnnnnnnnnnnnnnnnnnnnnnnnnnnnnnnnnnnnnnnnnnnnnnnnnnnnnnnnnnnnnnnnnnnnnnnnnnnnnnnnnnnnnnnnnnnnnnnnnnnnnnagtaagaatacccggacttcagataccttaagcaagcagcagcaaaccctgcgaatgcacatcgacattcccagggctcagcttttgattgaagagagagacacaatggagacca

SEQ ID NO: 35764 - DNA, 241 bp, Macaca Mulatta
  misc_feature (1)...(241): n = A,T,C or G
cctccatcgtggctgcaggtccatacaacatcttcaaacatgtacaaaatcgattggctttaaacaccctccctccaaatgatccccaatgatgcccacacataaaaaatcaaaactttaaactaacccccttcccccccaccacaacaaccctcttaaaaataattggctttttagaaacaccagaaaaactcagaaattggcnnnnnnnnnnnnnnnnnnnnnnnnnnnnnnnnttggc

SEQ ID NO: 35765 - DNA, 212 bp, Macaca Mulatta
gcaggtatttttaaacacacactgtccatttcgagggctctactttctgatgtggttccagagaaggaacggccgcttgtaatcggacacttcaacacagcctccggtgtgggcttcatcctgggccccatggtcggtggctatctcactgaattagaggatgggttttatctcacagccttcatctgctttttggtcttcattctcaatgc

SEQ ID NO: 35766 - DNA, 698 bp, Macaca Mulatta
  misc_feature (1)...(698): n = A,T,C or G
gcctctgggcatatttgtatgcgtttgcgactctgtgaaggcaagtcagnctttaaacatagtaacaaactatatctctaaaggctttttgagtaactttgaaagggaatgttaactttccaactagtgtcctgcaggtggctgttttgatactggacttgagcagtgtgttatgaggtaagaaaattgttatttcccttaattttctcttgggaacatgggaagttagagtggctgcatgttgtttcattacagtatttcagggctttcagtggtactgtttttcctttcactgttggcacaggtgagtgagtcaagaattatattttcctttactgttttagcagtaacttgaaactacaggagtttattagatatatgaatctaaaactccaaaaacctttaactttgaaaattttcttttggttaagtaaagcctgtttttatttcttcttccaacagtgctttatattgtttggatatcttgtttaggattgatttatttttcaggataaattcaattactgagagaggaattgaaccaatctcagcattgcattctaaaatgaggcagtaggtggcactcaaccttttattagcgaaaattgttagtttcaaattagagtgttcaacactacttccctctcattcatacacgtcttcattaagaagaggcactctttgtctacggccctagt

SEQ ID NO: 35767 - DNA, 550 bp, Macaca Mulatta
tgtccggggagccagaggcaggtaatgaggagagcagaggccccaaagaggctttgggaaaccctaaccctagacagctcatctaacccttcccatctctgtgtcctcgcaggccttcagcccctaacctgagctatcttcaggcagcgggtccccaaacctcccccttccctggtgtgcctactgttaccacaactgtgcagcctccctggcccatcccacctccttcctcagttcttcctgcatacaaccaccccaggagcctatggttgccccctcctgcttatggctcgtgggctttctaggatccaatttcacctacccagtgcttctattggtttccaggttcaacctgcatgatgttactagcagtgcccctaattttccttgctcacctcttgttttcctcgtgaggagtaaggaagggcctgctccccatgtcttacgcagcaaaccctgcacacccaccttgccatgtcatcaagtctgtgtcctcatagcctttttgcagttcagcaaacacaggccctgccagggcctgagggccagg

SEQ ID NO: 35768 - DNA, 851 bp, Macaca Mulatta
  misc_feature (1)...(851): n = A,T,C or G
gggagaaacagcagctgcccaagggcaggcctggaccagttggccaccaccagatgccgagagttcaaactcaacaatattatccccatggagaaaatcctccacctccaggtttcataatgcatggaaatgttaatccaaatgctgccggtcagcttcccacatctccaggtcatatgcacacccaggtaccaccttatccacagccacagcgtcctcagaatggttggaatgaccctccagctttgaacagagtccccaaaaagaagaagatgcctganaacttcatgcctcctgttcccatcacatcaccaatcatgaacccgttgggtgacccccagtcacagatgctgcagcaacagccttcagctccaataccactgtcaagccagtcttcattcccacagccacatctttcaggtggccagccattccatggcatacagcaacctcttggtcaaacaggcatgccaccatctttctcaaagccaatattgaaaggtgcccccatggggctcctaacgggaaaaaccttccaccatgggcagtcttttccaaacaaaaaaaatttaccaaaaaaccctaattccgaatgaacaccctcatttcgaaataccacctttgaggattcttaattcagcggctgccttttcttcaaccaacaggaaccctcaaacccaagaagtaaccttaggatgaaggccagacaaaccgttttgggaggtttctggtaatggaaaaacccttaggggaaaagaaacccttttcatccaaaaaatcacccgtgggtttacccagccattgcaccggaacaatttgaacctctgaacatctccgaaaggattggaccc

SEQ ID NO: 35769 - DNA, 703 bp, Macaca Mulatta
  misc_feature (1)...(703): n = A,T,C or G
gggcttttgtgatatcttagcattttgaaagagacttttacagtgagagtagaaggtagatttggaatcatgcattttagcaagtggacctgtttaaacaggaagcaagggccttcagtgtagcccattcttcatccagagatgttgactgacagcggcttctctggatgtccaaggcagctgcccggtgcccagcttgcttttcgactggcggcccctgtgtgtgggtgtgggatggaaatgtgttcctgcctgagtctgaggcaccagggtgtcctcaaaggcacctatgcagggtgccgtgtgcttgtggtgcaccatctgaagcaagagtccagcattctgccgtgtctgtcctccaccacaccccccacaggtggtactgannnnnnnnnnnnnnnnnnnnnnnnnnnnnnnncaggagaacaatgttggcccatgggccgcccacaacatatccctccctcaccacctgtgtgaccaaggttggcttctgttgacctttaaaaaggaaaccctcaactcaagttgctgtaattagatacttgcttctgtcttgcctcctgtctgcagctgtgaatagtcatttgactgtgactgttgcccttagccagccagatgcgcctgtgaacccaaagcttcgtgcacatgtgtttccccctaaaggttgggggaaccctccctgtggtccttgcctgttcca

SEQ ID NO: 35770 - DNA, 1261 bp, Macaca Mulatta
  misc_feature (1)...(1261): n = A,T,C or G
agaagttgcttgatagatttgactatgatgatgagccagaagctgtggaagaatcaaagaaagaggataccactgccgnnnnnnnnnnnnnnnnnnnnnnnnnnnnnnnnnnnnnnnnnnnnnnnnnnnnnnnnnnnnnnnnnnnnnnnnnnnnnnnnnnnnnnnnnnnnnnnnnnnnnnnnnggctttcctggagatggcatgcagcagccagcatacacacaaaatatggatcagtttcagccacgaatgatgggaatacaacaggatccaatgcaccatcaggtnnnnnnnnnnnnnnnnnnnnnnnnnnnnnnnnnnnnnnnnnnnnnnnnnnnnnnnnnnnnnnnnnnnnnnnnnnnnnnnnnnnnnnnnnnnnnnnnnnnnnnnnnnnnnnnnnnnnnnnnnnnnnnnnnnnnnnnnnnnnnnnnnnnnnnnnnnnnnnnnnnnnnggaaatggaagtagaacaaccttgtattcaagacgttaagcgacatatgtctgataacagaaagtcaagatctaggtcagcatccaggnnnnnnnnnnnnnnnnnnnnnnnnnnnnnnnnnnnnnnnnnnnnnnnnnnnnnnnnnnnnnnnnnnnnnnnnnnnnnnnnnnnnnnnnnnnnnnnnnnnnnnnnnnnnnnnnnnnnnnnnnnnnnnnnnnnnnnnnnnnnnnnnnnnnnnnnnnnnnnnnnnnnnnnnnnnnnnnnnnnnnnnnnnnnnnnnnnnnnnnnnnnnnnnnnnnnnnnnnnnnnnnnnnnnnnnnnnnnnnnnnnnnnnnnnnnnnnnnnnnnnnnnnnnnnnnnnnnnnnnnnnnnnnnnnnnnnnnnnnnnnnnnnnnnnnnnnnnnnnnnnnnnnnnnnnnnnnnnnnnnnnnnnnnnnnnnnnnnnnnnnnnnnnnnnnnnnnnnnnnnnnnnnnnnnnnnnnnnnnnnnnnnnnnnnnnnnnnnnnnnnnnnnnnnnnnnnnnnnnnnnnnnnnnnnnnnnnnnnnnnnnnnnnnnnnnnnnnnnnnnnnnnnnnnnnnnnnnnnnnnnnnnnnnnnnnnnnnnnnnnnnnnnnnnnnnnnnnnnnnnnnnnnnnnnnnnnnnnnnagattggaaaaggaattcctaagaagcctgaaaatgaagttgctcanaatggaggtgctgaaacctcacacacagaaccagtatcacccatacctaaaccgttacctgtgcctgtccctcctattcctgttcctgcacctataacagtgccccctccacaggt

SEQ ID NO: 35771 - DNA, 157 bp, Macaca Mulatta
ttgctgccccctttgacgatgatgacaagatcgttgggggctacacctgtgaagagaattctgtcccctaccaggtgtctctgaattctggctaccacttctgtggtggctccttcataaacgaacagtgggtggtgtcagcagctcactgctacaa

SEQ ID NO: 35772 - DNA, 755 bp, Macaca Mulatta
  misc_feature (1)...(755): n = A,T,C or G
ggattctttatgaaagcattagctgcttttgttacatttttaatatgcaaccacttcttcacctgaggaaaactagaatgaaatgcagtctaaaatattttgcactgaattgtaatttcttcattagtttagtctggaaactggtctgttttaatgtgttttttaaatgctgtatgtagaggaaaatctgcagaccactggaatacatttgttaaactcatctgcagggacactgggcgatacttggcagtgactgttctaccttgaggctttgtttggtttatttattaaagtgtacagtatttaaaaatcaaacatagctttagttaaaacactaagctgaattagtcatgtccattcagacataacctgaactactgaaaagatcaatttccagaaggtttattctgtataaactacatgttagtcttcagtagagtnnnnnnnnnnnnnnnnnnnnnnnnnnnnnnnncggttgtttgatgtgcaatatgtttttgtatgcaggtagtaaataaactttgatcttccaaannnnnnnnnnanannnaaaaaannnnacatgtcgggccgcctcggcccttgaagaaacttttctaaaaccattccttttgggcgccccgggcccagttagggtaagttgaacatggggtcataagctggtttccctaaggaagaaccctggggtcaaggaactagggggcttgggaaattctccaccaannnnnnnnnnnnnnnnnnnnnnnaaaaacccg

SEQ ID NO: 35773 - DNA, 113 bp, Macaca Mulatta
agaaggcatgccctaactgtcattctgctttggagttgattccttgtcgagggcacagcggataccctgtaaccaacttttggcggcttgacggcaacgcgatcttttttcag

SEQ ID NO: 35774 - DNA, 122 bp, Macaca Mulatta
agagggctttaaggaagcagcggagaagtttcgaatggaatctgggatcgaacctagtgtggatctggaaacacttgatgaacgaatcaagatccgggagatgatactgaaaggtcagattc

SEQ ID NO: 35775 - DNA, 280 bp, Macaca Mulatta
  misc_feature (1)...(280): n = A,T,C or G
ggccatcccacgaactgtgctcaaaagaggaaaagagtgcaacacttccaaaactgatcagtctcgtggtgagcagcgaaactacagacttccgcaacaaaaccatggattctaggagggacagggaaagaagaaaacgggttctggaaggcaaactacaactcccaagggcgcttgcgcggactcagcgcgcacgggacgaggggcggnnnnnnnnnnnnnnnnnnnnnnnnnnnnnnnnnnnnnntccccggagacgtgtgaagcgcccctgtccgcg

SEQ ID NO: 35776 - DNA, 741 bp, Macaca Mulatta
  misc_feature (1)...(741): n = A,T,C or G
ggggctgcacggacgtcatatgctgtgtattcctgctcctggccattgtgggctacgtggctgtgggcattatagnagcctggactcatggagaccctcgaaaggtgatctaccctactgatagccggggcgagttctgtgggcagaatggcacaaaaaacgagnnnnnnnnnnnnnnnnnnnnnnnnnnnnnnnnnnnnnnnnnnnnnnnnnnnnnnnnnnnnnnnnnnnnnnnnnnnnnnnnnnnnnnnnnnnnnnnnnnnnnnnnnnnnnnnnnnnnnnnnnnnnnnnnnnnnnnnnnnnnnnnnnnnnnnnnnnnnnnnnnnnnnnnnnnnnnnnnnnnnnnnnnnnnnnnnnnnnnnnnnnnnnnnnnnnnnnnnnnnnnnnnnnnnnnnnnnnnnnnnnnnnnnnnnnnnnnnntggcccggagatgcttccccgccatccacgcccacaagggtgtcctgatggtgggcaatgagacgacttatgaggatgggcatggctcccggaaaaacatcacggacctggtggagggcgnnngaaagccaatggagtcctagaggcgcggcaactcgccatgcgcatatttgaagattacaccgtctcttggtattggattatcatnnnnntggtcattgctatggcaatgagcctcctattcatcatcctgctccgcttcctggctggcattatggtctgggtgatgatcattatggtgattctggtgctgggctacgg

SEQ ID NO: 35777 - DNA, 1558 bp, Macaca Mulatta
  misc_feature (1)...(1558): n = A,T,C or G
ggaatttacaagctcaggctcagccaacactgagaccaccaaagtgacgggcagtctggaaaccaagtacagatggactgagtacggcctgacgtttacagagaaatggaacaccgacaatacactaggcaccgagattactgtggaagatcannnnnnnnnnnnnnnnnnnnnnnnnnnnnnnnnnnnnnnnnnnnnnnnnnnnnnnnnnnnnntgctaaaatcaagacagggtacaagcgggagcacattaacctgggctgtgacgtggatttcgacattgctggaccttccatccggggtgctctagtgctgggttacgagggctggctggctggctaccagatgaattttgagactgcaaaatcccgagtgacccagagcaactttgcagttggctacaagactgatgaattccagcttcacactaatgtnnnnnnnnnnnnnnnnnnnnnnnnnnnnnnnnnnnnnnnnnnnnnnnnnnnnnnnnnnnnnnnnnnnnnnnnnnnnnnnnnnnnnnnnnnnnnnnnnnnnnnnnnnnnnnnnnnnnnnnnnnnnnnnnnnnnnnnnnnnnnnnnnnnnnnnnnnnnnnnnnnnnnnnnnnnnnnnnnnnnnnnnnnnnnnnnnnnnnnnnnnnnnnnnnnnnnnnnnnnnnnnnnnnnnnnnnnnnnnnnnnnnnnnnnnnnnnnnnnnnnnnnnnnnnnnnnnntctaagactggaatttcaagcataaatgaatactgtatgattgtttaattttaaactgttttgcagcaccttcagaatttagtgtatctcttagtgttgtatgtctgggttgcaagtattgctaaatatgttagacctccaggttaaaggtgattcagctttaagatgttaccctgtcagaggtgcagaagacactcatgtccaaaacagatcctctcagtggtagacctgggggcaacttggtggcctctttgagatgccaggtttcatttttatctagaaattacttctagtggaagctgataatatgtaggcactttgtaaattcatatagagtaaatgaatgaaatagtgatttcctgaaaatcgaaccttggtttcctaaccctaattgatgagaggctcgctgcttgatggtgtgtacaagctcacctgaatgggactttttgagacagatcatcgtgacctgttcccattccaagaacaggtcatcgtcaccatttttacaccaaaaggtctgcagggtgtggtcactgtttcttttgtgccattttggggtggagagggtggatgtgatgaagccaacaattcaggacttattccttcttgtgttgtgttttttttgcccttgcaccagagtatgaaatagcttccaggagctccagctataagcttggaagtgtctgtgtgatcgtaatcacatggtgacaacactcagaatctaaattggacttctgttgtattctcaccactcaatttgttttttagcagtttaatgggtacattttagagtcttccattttgtgtggaattagatcctccccttcaaatgctgtaattaacatcact

SEQ ID NO: 35778 - DNA, 313 bp, Macaca Mulatta
aggcacagacatcaatggggccctgcagagggccatcaggctcctcaacaagtacgtggcccacaatgacattggagaccggagcgtgtccctcatcattttcctgacggatgggaagcccacagtcggggagacgcacaccctcaagatcctcaacaacacccgagaggccgcccgaggccaagtctgcatcttcaccattggcatcggcaacgatgtggacttcaggctgctggagaaactgtcgctggagaactgcggcctcacacggcgtgtgcacgaggaggaggatgcgggctcgcagctcatcggg

SEQ ID NO: 35779 - DNA, 465 bp, Macaca Mulatta
agttgggacccaaatatgttagaaggcttagcatcagaagaaaagaaccctctccatgttcaaagccatgtgggtcctgcagaatagctttgcctgtggcctgcattctgtaggtacatgagagtcagatatgacaaattgcatgtatgctgtgaacacgcagcccaggaaacgtacagggtggggaagcgtggctttctctgcctggcatgttatgtctctagtctccatcctgttcacttgttttttttccaacaaggacttgcaagtgtcacatcaacatttccctggatctaggctttttgtgtttttctttgttctccactaaagtgtatgggagcgacttgggtaaggagcctgggacagacatcttgcagagcctaccttattgtaacagttaggatgtatttgggcaacaggaagcccaccacagagtgccttgaacagcaaaggacagaatcatgc

SEQ ID NO: 35780 - DNA, 489 bp, Macaca Mulatta
aaaaaaccctatatgcttacagtgcacctggagcttttttataacaacctctttttgtttgtttattttggattctttaaatatatattattctcatttagtgccctgtttagccagaatctcattactgcttcatttttgtaataacatttaatttagatattttccatatattgaccctgctaaaatagaatataacatctttcatgtggtaggaaccaacagggaaactttcctttaactccctttttacactttatgataagtagcagggggaaaatgcatttatagatcatttctaagcaaaattgtgaagctaataacctacctgtttctacgtatatgcagtctctttattttactagaaatgggaatcatggcctcttgaagagaaaaaaagtcaccattctgcgtttagctgtattcatatattgcatttctgtattttttgtttgtattgtaaaaaactcacataaaaaaccatgttgt

SEQ ID NO: 35781 - DNA, 1535 bp, Macaca Mulatta
  misc_feature (1)...(1535): n = A,T,C or G
tagagacagtatccacattggattccgggactcctacagacttggcacagcttcctacagtcttgaaccagccctgctgttctgtcacggccagtgggtagtttgtgaacaaactgcaagaggaagtgatctgccccatctgcctggacattctgcagaagcctgtcaccatcgactgtgggcacaatttctgcctcaaatgcatcactcagagtggggaaacatcatgtggannnnnnnnnnnnncctctgcaaaacttccgtaaggaataacactatcaggctcaaccggctgttggcgaatctagtggagaaaatccaagctctacaagcctctgaggtgcagtccaaaaggaaagagcctacatgcccaaagcaccaggagatgttctattatttctgcaaggatgatgggaagttcctctgttttgtgtgtcgtgaatccaaggaccacaaatcccataatgtcagcttgattgaagaagctgcgcagaattatcaggnnnnnnnnnnnnnnnnnnnnnnnnnnnnnnnnnnnnnnnnnnnnnnnnnnnnnnnnnnnnnnnnnnnnnnnnnnnnnnnnnnnnnnnnnnnnnngaccaggtagaacatgagaagcaaaggatccttacagaatttgaacgcctgcatcaagtcctagaggagaagaattccctgctgtcacggatttactggctggggtctgagggagccgaagcggggaaacactnnnnnnnnnnnnnnnnnnnnnnnnnnnnnnnnnnnnnnnnnnnnnnnnnnnnnnnnnnnnnnnnnnnnnnnnnnnnnnnnnnnnnnnnnnnnnnnnnnnnnnnnnnnnnnnnnnnnnnnnnnnnnnnnnnnnnnnnnnnnnnnnnnnnnnnnnnnnnnnnnnnnnnnnnnnnnnnnnnnnnnnnnnnnnnnnnnnnnnnnnnnnnnnnnnnnnnnnnnnnnnnnnnnnnnnnnnnnnnnnnnnnnnnnnnnnnnnnnnnnnnnnnnnnnnnnnnnnnnnnnnnnnnnnnnnnnnnnnnnnnnnnnnnnnnnnnnnnnnnnnnnnnnnnnnnnnnnnnnnnnnnnnnnnnnnnnnnnnnnnnnnnnnnnnnnnnnnnnnnnnnaactacatcggggccaccaaatcgccactgctcagccatcccactccctgtttcgggcctcctctgctgggaaagtcactcttccagtgtctcctggcctcttatgctgagatttctggtcaaggagccagctctcaggacacaaagacagttggcgctgcgctgtccgaggagctccatgcggcactgagtgagtgactgacagcgatccgggcttgttttgtgaggttccttcaagtcaaaccagctcagagaacacggggagcggtggtgctacacggacttcggagcataagagtagcgctgaatgagtaactgagagcgaccagggttcttgacttagtggaattgggtcgaaggagtggagaaggggagaggtcgggctactgagagtggagatgggggtgggggtggtggtgaaga

SEQ ID NO: 35782 - DNA, 1250 bp, Macaca Mulatta
  misc_feature (1)...(1250): n = A,T,C or G
gactgtacagtttgttcaaggaatttttgtagaaaaatatgatcctacgatagaagattcttatagaaannnnnnnnnnnnnnnnnnnnnnnnnnnnnnnnnnnnnnnnnnnnnnnnnnnnnnnnnnnnnnnnnnnnnnnnnnnnnnnnnnnnnnnnnnnnnnnnnnnnnnnnnnnnnnnnnnnnnnnnnnnnnnnnnnnnnnnnnnnnnnnnnnnnnnnnnnnnnnnnnnnnnnnnnnnnnnnnnnnnnnnnnnnnnnnnnnnnnnnnnnnnnnnnnnnnnnnnnnnnnnnnnnnnnnnnnnnnnnnnnnnnnnnnnnnnnnnnnnnnnnnnnnnnnnnnnnnnnnnnnnnnnnnnnnnnnnnnnnnnnnnnnnnnnnnnnnnnnnnnnnnnnnnnnnnnnnnnnnnnnnnnnnnnnnnnnnnnnnnnnnnnnnnnnnnnnnnnnnnnnnnnnnnnnnnnnnnnnnnnnnnnnnnnnnnnnnnnnnnnnnnnnnnnnnnnnnnnnnnnnnnnnnnnnnnnnnnncaggtctgaagaactgttgcccaattcaacagtgccagcattccaactttgttaaacctaccaacatcttaaatggactttcctgtggtggtaccctttaagaggcggatgaaagctactatatcagtttgcacattctaatcactttccagtatcacaagagagatttttacttatataataatcctagagtacgcagctggtaaaaccagaggctacatccagtattactgctaagagacattcttcatccaccaatgttgtacatgtatgaaaatggtgtacggtatactttaacatgccccatacttnnnnnnnnnnnnnnnnnnnnnnnnnnnnnnnnnnnnnnnnnnnnnnnnnnnnnnnnnnnnnnnnnnnnnnnnnnnnnnnnnnnnnnnnnnnnnnnnnnnnnnnnnnnnnnnnnnnnnnnnnnnnnnnnnnnnnnnnnnnnnnnnnnnnnnnnnnnnnnnnnnnnnnnnnnnnnnnnnnnnnnnnnnnnnnnnnnnnnnnnnnnnnnnnnnnnnnnnnncctatggaaacagtgatctctgtctttaaaatacgatagtcctttcagtataatgtcttaaagacactgccttcaatatctgttgggaaggaaatgtccagacttttcaaatttcttattatgtttccttttttgtttatataaggaataatgtttatagttatatgtacagtgggtgtctacgacaagaagtgta

SEQ ID NO: 35783 - DNA, 170 bp, Macaca Mulatta
actccctttccccttcccctccctcccagctcacctccccatggggctgagagtcctctcttggagagatggaaggaaacgtcacaccttgtactgctcagtctccatccatcaagccaaagctgctggcaccgccctcccccagccccagatagcagaaccggggagga

SEQ ID NO: 35784 - DNA, 2478 bp, Macaca Mulatta
  misc_feature (1)...(2478): n = A,T,C or G
aatccttttttctacagtgccattgggcacggcgtgaggattaccaaaagttagaacagatcactggtttacctcggcctgagatcattcagtggtttggtgacacacgttatgccttgaagcatgggcaactaaaatggtttcgggacaacgcagtacctggtgcccctagtttccaagacctagcaattcctacaccaccaccatcaacccgctccttgaatgaaagggctgagacatcacctctgccgatccctccacccccaccggatatacaacccttggagaggtactgggcagcccaccaacagctacgggaaactgatatccctcaattgagtcaggcatcaaggcttagcacccagcaggtactggattggtttgactctcgattacctcagccagctgaggtggtagtttgtctagatgaagaagaggaagaggannnnnnnnnnnnnnnnnnnnnnnnnnnnnnnnnnnnnnnnnnnnnnnnnnnnnnnnnnnnnnnnnnnnnnnnnnnnngatcatacaagactgagtggggagctgggggaggggaggtctgttatgaaaagatgaaacaacttagtaactgtttaaacaaagaaaccacatttttaaaattaccttgtggcagagaactaaaaagctttgtgttcttcagggtgggtggcaggggaatatagtgagggtggaccagggagaatgaccatagggcactaagtaaggctgggattggatnnnnnnnnnnnnnnnnnnnnnnnnnnnnnnnnnnnnnnnnnnnnnnnnnnnnnnnnnnnnnnnnnnnnnnnnnnnnnnnnnnnnnnnnnnnnnnnnnnnnnnnnnnnnnnnnnnnnnnnnnnnnnnnnnnnnnnnnnnnnnnnnnnnnnnnnnnnnnnnnnnnnnnnnnnnnnnnnnnnnnnnnnnnnnnnnnnnnnnnnnnnnnnnnnnnnnnnnnnnnnnnnnnnnnnnnnnnnnnnnnnnnnnnnnnnnnnnnnnnnnnnnnnnnnnnnnnnnnnnnnnnnnnnnnnnnnnnnnnnnnnnnnnnnnnnnnnnnnnnnnnnnnnnnnnnnnnnnnnnnnnnnnnnnnnnnnnnnnnnnnnnnnnnnnnnnnnnnnnnnnnnnnnnnnnnnnnnnnnnnnnnnnnnnnnnnnnnnnnnnnnnnnnnnnnnnnnnnnnnnnnnnnnnnnnnnnnnnnnnnnnnnnnnnnnnnnnnnnnnnnnnnnnnnnnnnnnnnnnnnnnnnnnnnnnnnnnnnnnnnnnnnnnnnnnnnnnnnnnnnnnnnnnnnnnnnnnnnnnnnnnnnnnnnnnnnnnnnnnnnnnnnnnnnnnnnnnnnnnnnnnnnnnnnnnnnnnnnnnnnnnnnnnnnnnnnnnnnnnnnnnnnnnnnnnnnnnnnnnnnnnnnnnnnnnnnnnnnnnnnnnnnnnnnnnnnnnnnnnnnnctcccaaagtgctgggattacaggcgtgagccactgtaccccgctattttcagttcttatgctgggaccactttgctttgtagttttttctgtctttccaaaatcctcactctgttcactgtttgtctcagggtaaatcttcccccaccgagcttgtgaaaaactttaataattgggtagagaataatttagaatggatatttattggaggtggtaattagggaagatgtcgttttaaaaagtagaactgtgttacaaaggggtgaaagagggaatagtttccccttgttgaaggacagtggaggtaggttccaggtttggttttacaaacctgataactacctcctgtccaacttgacagagactaaattttcatctttttgctgtcaatttgtttctgaaaaagagacattttccctctctttataggatctgtcttagggacagagggaccatcgtctttaagtgaattaattattgatgttttagaatggttttcatcagttgggatcagctatatggcaaataggtatcatcaatgagttaaccatctaaaaataaaagagtggaagccctagaatgctagaacaataataaaaaggccaaaaataaaattgtttctctctcatccactttgccactcctatggtttagggattaatggaaccaaatccattaacattctaactcagcatacttttaatttattgttttgaagggcaggacttattgaggtaaattaaaagaagaataaaaactataaaaggaagtagttcagcatctgtcaccagccaggttgtttctcagccatcaaatgataatgactgaaatttctgaggcttcaggagtaacagagatacaacaatcttggaggtaactccatttgctacaggacaggctcttgcctaaaagagaaggtgtctagaaatgcctttaanataaattcagagtaccagaaagggtatagggctcctaattcagatacaaggtcattcccaagagctaatttatttctggcagatgcctgctattttct

SEQ ID NO: 35785 - DNA, 662 bp, Macaca Mulatta
  misc_feature (1)...(662): n = A,T,C or G
gggggacgtccggcctcttgcactcctaggggcggagaagggtgcaggctcttcgccctctgtgtccttctttcacgaacttctggattttccacctcttccaaagttcgttcttgcgcagagcccaaaggccggaaaaccgtccacgatgaacagcgtgactctgaatctgcgggaggtgataaaggccatgacaaagagtcgcggttttgacagaattttgggaaaggttactcttgtctctgctgctcctgggaaagtgatttgtgaaatgaaagtagaagaagagcataccaatacgctaggcactctccatggtggtttgacagccacattagtagataacatatcaacaatggctctgctatgcacggaaaggggagcacccggagtcagtgtcgatatgaacataacgtacatgtcacctgcaaaattaggagaagatattgtgattaccgcacatgttctgaaacaaggaaaaaacttgcatttgcctctgtggatctgaccaacaggcccaggaaatttttagcccaggaaaaccccaaacccctgggaaactgaaagctaacaccgatgaccttaaaaacccaacaggggttcagttaaattggccaaaagnnnnnnnnnnnnnnnnnnnnnnnnnnnnnnnnnnnnnnnnn

SEQ ID NO: 35786 - DNA, 977 bp, Macaca Mulatta
  misc_feature (1)...(977): n = A,T,C or G
tgatcatgtccgatgcggccgtagaggagaggcgggccttgatcaagaggaagaaaaaagaacggatcgggactcagccacccggagtgcaggggctgacggaggagcagcggatgatgatcagggagctgatggacgctcagatgaaaacctttgacactaccttctcccatttcaagaatttccggnnnnnnnnnnnnnnnnnnnnnnnnnnnnnnnnnnnnnnnnnnnnnnnnnnnnnnnnnnnnnnnnnnnnnnnnaagtggaaccaggtcaggaaagatctgtggtctgtgaaggtctccgtgcagctgcggggggaggatggcagtgtctggaactacaaacccccagccgacaatggcgggaaagagatcttctccctgctgccccacatggctgacatgtcaacctacatgttcaaaggcatcatcaactttgccaaagtcatctcctacttcagnnncagggacctgcccatcgaggaccagatctccctactgaagggggccacttttgagctgtgccagctgagattcaacacagtattcaacgcggagactggaacttgggagtgtggccggctgtcctactgcttggaagaccctgcaggtnnnnnnnnnnnnnnnnnnnnnnnnnnnnnnnnnnnnnnnnnnnnnnnnnnnnnnnnnnnnnnnnnnnnnnnnnnnnnnnnnnnnnnnnnnnnnnnnnnnnnnnnnnnnnnnnnnnnnnnnnnnnnnnnnnnnnnnnnnnnnnnnnnnnnnnnnnnnnnnnnnnnnnnnnnnnnnnnnnnnnnnnnnnnnnnnnnnnnnnnnnnnnnnnnnnnnnnnnnggttcctgttcctgaagatcatggctatgctcaccgagctccgcagcatcaacgcccagcacacccagcggctgctgcgcatccaggacatacacccctttgctacgcccctcatgcaggagttgttcggcatcacgggtagctg

SEQ ID NO: 35787 - DNA, 594 bp, Macaca Mulatta
  misc_feature (1)...(594): n = A,T,C or G
gctgttgctgtgccatctaatattcaaggaattcggannnnnnnnnnnnnnnnnnnnnnnnnnnnnnnnnnnnnnnnnnnnnnnnnnnnnnnnnnnnnnnnnnnnnnnnnnnnnnnnnnnnnnnnnnnnnnnnnnnnnnnnnnnnnnnnnnnnnnnnnnnnnnnnnnnnnnnnnnnnnnnnnnnnnnnnnnnnnnnnnnnnnnnnnnnnnnnnnnnnnnnnnnnnnnnnnnnnnnnnnnnnnnnnnnnnnnnnnnnnnnnnnnnnnnnnnnnnnnnnnnnnnnnnnnnnnnnnnnnnnnnnnnnnnnnnnnnnnnnnnnnnnnnnnnnnnnnnnnnnnnnnnnnnnnnnnnnnnnnnnnnnnnnnnnnnnnnnnnnnnnnnnnnnnnnnnnnnnnnnnnnnnnnnnnnnnnnnnnnnnnnnnnnnnnnnnnnnnnnnnnnnnnnnnnnnnnnnnnnnnnnnnnnnnnnnnnnnnatggaaataatggcagactctaaaatgaaggcagaaattcaagctttgactttcctatcatcagattatctttccagaagtgtacttacccaacaaattaaaatttggaggatggatata

SEQ ID NO: 35788 - DNA, 615 bp, Macaca Mulatta
ggccgcagagtggggctgggcctgcagccgggactccgggcgtcccatccccttcctgcgcggcgactgcggccctcgcgccctctctgggcaactctgagcccgcagccccgcgtctccccagattgtgcggctgtaaccaacagaggtttgcggcccgagtcactgcaccgagacgctgagggctgtagcagaaacagttaaatcgccggagagcggaggacacccccagatccgcctccctgagggatttggggtctggtcaggggctgctgggatgtagggtcgctaattggtggggacgtgacgggcgaatcctgggacaggaggtgaagaaaacgtattctcctgctgagtgggctccctcgtgaggtcttcagcctggttggcgccagcctttccactggaattcaggatctgagctagaactccggcgactcctgagcaactctcagagatcttatccccaggcacaatggggaggccggtggtcagcgtctgctgtgacttgactctcagggaggcggccccgagaggcagcggggctgagggcacctggttaatatctaactgcaatctcgcctccagcctggctcgcagttcctgtaaacccgg

SEQ ID NO: 35789 - DNA, 411 bp, Macaca Mulatta
  misc_feature (1)...(411): n = A,T,C or G
aatcgccaacatctgctgagaactcattcctgttcatgtgctatggcttctgccagcaggtggtgcggaaagtggctggactggacaagcaggcaaagctgagnnnnnnnnnnnnnnnnnnnnnnnnnnnnnnnnnnnnnnnnnnnnnnnnnnnnnnnnnnnnnnnnnnnnnnnnnnnnnnnnnnnnnnnnnnnnnnnnnnnnnnnnnnnnnnnnnnnnnnnnnnnnnnnnnnnnnnnnnnacagtgtggtctgtcatcaaaagtatccttaggaaggatggccccttgggcttctaccatggactctcaagcactttacttcgagaagtaccgggctatttcttcttctttggtggctatgaactgagccggtccttttttgcatcagggagatcaaaagatgaactagg

SEQ ID NO: 35790 - DNA, 1574 bp, Macaca Mulatta
agcccgtccagctcccgtcctgcgcctccacacagctctcctccagtttcagctccggagacacggagaggctcttctgggtgtagtggttgtgcagagcctcatgcatcacggagcatgagaagacgttcccctgctgccacctgctcttgtccacggtgagcttgctgtagaggaagtaggagccgtcggagtccagcacgggcggggtggtcttgtaggtgttctccggctgcccgctgctctcccactccacgacgatgtcgctggggtagaagcctttgaccaggcaggtcaggctgacctggttcttggtcagctcctcccgggacgggggcagggtgtacacctgaggctctcggggctgccctttgtctttggagatggttttctggatgggggccgggagggctttgttggagaccttgcacgtgtactccttgccgttcagccagtcctggtgcgtgacggtgaggacgctgaccacacgatatgtgctgttgtactgcgtctcccgtggcttcgtctgggcatgatgcacctccgcgccgtttacgtaccagttgaacttgacatcggggtcttcctggctcacgtctaccaccacgcatgtgacctcaggggtccgggagatcatgagggtgtccttgggttttggggggaagaggaagactgacggtccccccaggagttcaggtgctgggcacggtgggcacgtgggaggtttgctgccaccaccacatgtttttatctcaactctcttgtccaccttggtgttgctgggcttgtggtttacgttgcagacgtaggtctgggtgcccaagctgctggagggcacggtcaccacgctgctgagggagtagagccctgaggactgtaggacagccgggaaggtgtgcacgccgctggtcagggagcctgagttccacgacacggtcacgggttcagggaagtagtccttgaccaggcagcccagggccgctgtgctctcggaggtgctcctggaggagggcgccagggggaagaccgatgggcccttggtggaggctgaggagacggcgacccggattcccgcgccccagacatcgaaccggtacaatggtccagctgccgaagccactgaccgtccctcactgcatctctcgcacagtaatacacggccgtgtccgcggcggtcacagagctcagcttcagggagaactggttcttggacgtgtcttttgaaatggtgactcgactcttgagggaggggttgtagtaggtgctcccactactaccatagatatacccaatccactccagtcccttccctgggggctggcggatccagctccaccagtaactgctgatggagccaccagagacagcgcaggtgagggacagggtctccgaaggcttcaccagtcctgggcccgactcctgcagctgcacctgggacaggacccctgtgaacagagagacccacagtgagccctgggatcagagacagcctcccatatcgtcatatctgcatccccgagacactcacatctgggagctgccaccaggaggaggaagaaccacaggtgtttcat

SEQ ID NO: 35791 - DNA, 1430 bp, Macaca Mulatta
  misc_feature (1)...(1430): n = A,T,C or G
aggtatacggaaactggacttttggaaccattgtttttacagtcttagtattcactgtaaccctgaagnagcttgctttggatacccgattctggacgtggataaatcactttgtgatttggggttctttagccttctatgtatttttctcattcttctggggaggaattatttggnnnnnnnnnnnnnnnnnnnnnnnnnnnnnnnnnnnnnnnnnnnnnnnnnnnnnnnnnnnnnnnnnnnnnnnnnnnnnnnnnnnnnnnnnnnnnnnnnnnnnnnnnnnnnnnnnnnnnnnnnnnnnnnnnnnnnnnnnnnnnnnnnnnnnnnnnnnnnnnnnnnnnnnnnnnnnnnnnnnnnnnnnnnnnnnnnnnnnnnnnnnnnnnnnnnnnnnnnnnnnntccgaatcttgaactgcctatgttattgtcttacaagcatactgacagtggttacagctaaaaaagaaagcatgaagaaacaactacaaaaagttatcatctcaggatacttgatatgcaacacactaaaccactctcatgtctagagttcacaataaatgttcattaaaataccaaatgattctcttaagcatttacaattattgtaagtagcctttatggccaaagctgtaagttaagaattatatgaaagttgaaagcaagaatacttagaattctggctttagatagaataatataactcaaatgggtgctcttttaacccatgaactctgtgaatggatttaaatacaatagtataaagtagaagttatgcaatgagaatgaatagattttgctaatattactttttttgcctggcagaagaaatagactatttggatcacatttcttgttcctcctaaatgatcatcttaannnnnnnnnnnaagtacataaggaatacttgaaaatacagaaggactaaatagtatcaatgcatcagacaaagtagttaatcccttctgtttacccatgtgctacttatgtcttggtagaatattcttgccaaaaaaaataccttgaacacttatgtggaaagtgttaacttacgggtatttttgtgggaatagaaaaaaattgtttattttttattcttctgaattaaaccccacttatgggtgtaagcctactagacttgaaaataaagcataaaacatttccaatcacttagtagcccctcaaagtagttaggaagtaaacagatttttccagtgttgattttactgggatctgcagtaaagtggtttaaaccatagttatataaaaataaaggtcattctgaacattagccttttataattttatgtgaagaggaagaaaaatagcttattttaaactgttgatggtttttatttgaaagagattgcatttgtgcatatatgcagtgctttttcttaaacatggccaattggaaagggggaaggatccacc

SEQ ID NO: 35792 - DNA, 3133 bp, Macaca Mulatta
  misc_feature (1)...(3133): n = A,T,C or G
caccatgtcggtcagcgtccatgagacccgcaagtcgcggagcagcacggggtccatgaacgtcaccctcttccacaaggcctcccacccggactgcgtgctggcccacctcaacacgcttcgcaagcactgcatgttcactgacgtcacgctctgggcgggcgatcgtgccttcccctgtcaccgtgccgtgctggccgcctctagccgctactttgaggccatgttcaggcagcggcctgcgggagagccgggnnnnnnnnnnnnnnnnnnnnnnnnnnnnnnnnnnnnnnnnnnnnnnnnnnnnnnnnnnnnnnnnnnnnnnnnnnnnnnnnnnnnnnnnnnnnnnnnnnnnnnnnnnnnnnnnnnnnnnnnnnnnnnnnnnnnnnnnnnnnnnnnnnnnnnnnnnnnnnnnnnnnnnnnnnnnnnnnnnnnnnnnnnnnnnnnnnnnnnnnnnnnnnnnnnnnnnnnnnnnnnnnnnnnnnnnnnnnnnnnnnnnnnnnnnnnnnnnnnnnnnnnnnnnnnnnnnnnnnnnnnnnnnnnnnnnnnnnnnnnnnnnnnnnnnnnnnnnnnnnnnnnnnnnnnnnnnnnnnnnnnnnnnnnnnnnnnnnnnnnnnnnnnnnnnnnnnnnnnnnnnnnnnnnnnnnnnnnnnnnnnnnnnnnnnnnnnnnnnnnnnnnnnnnnnnnnnnnnnnnnnnnnnnnnnnnnnnnnnnnnnnnnnnnnnnnnnnnnnnnnnnnnnnnnnnnnnnnnnnnnnnnnnnnnnnnnnnnnnnnnnnnnnnnnnnnnnnnnnnnnnnnnnnnnnnnnnnnnnnnnnnnnnnnnnnnnnnnnnnnnnnnnnnnnnnnnnnnnnnnnnnnnnnnnnnnnnnnnnnnnnnnnnnnnnnnnnnnnnnnnncatcctggggggtcagaccttcatgtgtgacaagatctaccaggtggacctcaaggccaaggagatcatccccaaggccgacctgcccagcccccggaaggagttcagcgcctcagcgatcggctgcaaggtctatgtgacagggggcaggggctccgagaacggggtctccaaggacgtctgggtgtatgacaccgtacatgaggaatggtccaaggcggcgcccatgctgattgcccgctttggccatgnnnnnnnnnnnnnnnnnnnnnnnnnnnnnnnnnnnnnnnnnnnnnnnnnnnnnnnnnnnnnnnnnnnnnnnnnnnnnnnnnnnnnnctgaaacaagtggagaaatacgaccctggggccaacaagtggatgatggtggcccccttgagggatggcgtcagcaatgccgcagtagtgagtgccaagctgaagctctttgtgtttggaggaaccagcatccaccgggacatggtgtccaaggtccagtgctatgaccccgcggagaacaggtggacgatcaaggctgagtgcccccagccgtggcggtacacagccgctgccgtcctgggcagccagatcttcatcatgggaggtgacacggaattcacggccgcctcggcctaccgctttgactgtgagaccaaccagtggacacggattggggacatgaccgccaagcgcatgtcctgccatgccctggcgtccggcaacaagctctatgtggttgggggctactttgggacccagaggtgtaagactctggactgctatgaccccacttcagatacatggaactgcatcaccacagtgccctactcacttatccccacggcctttgtcagcacctggaagcacctgcccgcgtgaggagcacctgccgagcccagccancgcggccctcagtgtcacagcgtggccttggcttatgtgccacagcaggagctaagcgggtcctggaccagctctccgagaggtggaaggggccccgccagctctggggagcagcagccttgggcggttcggagctttaggcacaagaagagaagcatctcttgcatctgtgcccctgggggcctcttcagctttgcagtggtttataggaagacatacctcccagaggggcatggactgccaccaggactgaccccggcgtcgggaggacacctgcagagccttgagatcacctgtttggcaggtcctggactggggccgggcaggcagggacagggaggagccccgggtggctttcggggctgcagcactgccacacatccttttcctcccagcccaccctgctggggcactactgccgtctatagatggtgtcccaggcctgggaaaccaggttcccaggggttgagaccagaannnnnnnnnngacagattttataaggtgcagaaactacaggggggcctcagtgacatccacgaggcnnnnnnagcaaaggacacccagacctccaaggtttgtgggcccctgccacaaagctgtaagtcccagcccacccactgagggccttgcccagtgctgtggcctggtggggacacagatgctctggccactcagtggagctgggcctgcagcagactcaggactccgagtgccctgggggtcacccctcacatcccctcctcagagcccaccctgagaggcagcagtgacgcccgtggtacacacgtgccaacagcactgggggcttctccccgggagaccatgctgccctccaagacaaggggcagctgtgagctggcgatagcagagggaccccagggagtcccctgcagaccccaccagggccgcatctgtctcagtttgggggacagtgatggggccctcaccatcctcttgaatcttggcccccatttgcgccctgagctccaagataagaatggccgtgagagaactgctgaacatttgttcattgctgtcacctcctgaatcactggggtccctcagcagaacctccctgacacctgggctgtggagaggttggtgcgtgtcagtgaccatcctaatgcctctcactcactcctaaccccctgtttgagggggaggggtgttggtgccttgacggggctgggtagggtgtccaaacttgtggcttcccaggcacctgcagtgtgaacactgcttgactggctcagggttagggctgcatagggggctgtgccacaaaccagttacttaagcagccctgagtgtccccatgccttggtgcgggtcct

SEQ ID NO: 35793 - DNA, 1015 bp, Macaca Mulatta
  misc_feature (1)...(1015): n = A,T,C or G
gtggacaacatcctcatcccagagaaccgggcccatttgtccccagaggtgcagctgaaggagctgctggagaaactggacctggtgagcgccatgcggtccagtggggcccgcacccgccgtgtccgcctgctacgccgggagatcaatgcnnnnnnnnnnnnnnnnnnnnnnnnnnnnnnnnnnnnnnnnnnnnnnnnnnnnnnnnnnnnnnnnnnnnnnnnnnnnnnnnnnnnnnnnnnnnnnnnnnnnnnnnnnnnnnnnnnnnnnnnnnnnnnnnnnnnnnnnnnnnnnnnnnnnngatgactccaaactgcctcctccaccaaccctggagcccactgggcctgcaccttccttgtctgagcaagaatccccgccggagcccccaactctgaaacccatcaatgatagcaaacctccaagccggttcctaaagcccagaaaggtggaagaagatgagctcttggaaaaatcaccgctgcagctagggagtgagcctttgcaacgcttgctcagtgacaatggcatcaacagactatccctcatggcccctgacaccccgggcggtaccccacttagtggtgtgggtcgccgcacatcagtcctcttcaagaaggccaagaatggggttaagctacagagaagcccagacagggccctggagaatggcgaggaccatggtgtggcaggctctcctgcctctccagccagcatcgaggatgagcgccactcccggaagcggccaaggagcgggagctgtagtgagagcgaaagggagaggtccccccagcaggaggaagagacaggncaggcatgaccaacggctttggaaaacacaccgaaagcgggtctgactcggaatgtagtttgggtctcagtggtggactggcatttgaagcttgcagnnnngcagtggtctgacgccccccaaacgcagccgtgggaagccagccctgtctcgagtgcccttcctggaaggtgtgaacggagactctgactacaatggctcagg

SEQ ID NO: 35794 - DNA, 276 bp, Macaca Mulatta
  misc_feature (1)...(276): n = A,T,C or G
agagccatctacagggaagacctgcctgcccaaggccttgctgaacctgagcagcggccgcaatgacaccatccctgtgctgctggacatcgcggagcgcaccggcaacatgcgggagttcatcaactcgcccttccgcgacatctactatcgaggtnnnnnnnnnnnnnnnnnnnnnnnnnnnnnnnnnnnnnnnnnnnnnnnnnnnnnnctcgtggcccaaggagctgacgtccacgcccaggcccggggcgcttctcccacccaaggatgagg

SEQ ID NO: 35795 - DNA, 116 bp, Macaca Mulatta
agtttggaatctgtgagtgcaacatgtaaacagctgagtcaagaactaatggaaaaatacgaagaattaaagaggatggaagcacataacaatgaatacagagcagagattaagaa

SEQ ID NO: 35796 - DNA, 547 bp, Macaca Mulatta
tggccaccgcccagccttcgcaggtccgccagaaatacgacaccaactgcgaggccgccatcaacagccacatcaggctggagctctacacctcctacctgtacctgtccatggctttctacttcaaccgggacgacgtggccctggagaacttcttccgctacttcctgcgcctgtcggacgacaagatggagcatgcccagaagctgatgaagtttcagaacctgcgcggtggccgcatccgccttcacgatatcaggaagccagagcgccaaggctgggagagcgggctagtggctatggagtccgccttccacctggagaagaacgtcaaccagagcctgctggagctgtaccagctggccgtggagaagggcgacccccagctgtgccacttcctggagagccactacctgcacgagcaagtcaagaccatcaaagagctgggtggctacgtgagcaacctgcgcaagatatgttccccggaagccggcctggctgagtacctgttcgacaagctcaccctgggcagccgcgtcaaagagac

SEQ ID NO: 35797 - DNA, 1539 bp, Macaca Mulatta
  misc_feature (1)...(1539): n = A,T,C or G
gcaattaaagtcaagagctaaggagggagggagagggtttagaaataccagcataataagtagtatgactgggtcctctgtaaattaactcaattagacaaagcctgatttaacggaggaagatggagagaagcgctaccctcattaaatttggttgttagaggcgcttctaaggaaattaaatctgttagttgtttgaatcacataaaatagtgtgtgcatattcatgtacacacgtgcacacatgtaacctctgattcttgtggnnnnnnnnnnnnnnnnnnnnnnnnnnnnnnnnnnnnnnnnnnnnnnnnnnnnnnnnnnnnnnnnnnnnnnnnnnnnnnnnnnnnnnnnnnnnnnnnnnnnnnnnnnnnnnnnnnnnnnnnnnnnnnnctctcccaattataaagccatgagccccctttggtgggggcttctgctcagttgcttggactgtaaaatcctgccaggagcccaggctcagttcccccgagtctgcatgacagtggacagcctggtgaacaaggagtgctgcccacgcctgggtgcagagttggccgatgtctgtggctctcagcaaggccggggacagtgcacagaggtgcaagccgacacaaggccctggagtggtccctacatcctacgaaaccaggatgaccgtgagcagtggccaagaaaattcttccaccggacctgcaagtgcacaggnnnnnnnnnnnnnnnnnnnnnnnnnnnnnnnnnnnnnnnnnnnnnnnnnnnnnnnnnnnnnnnnnnnnnnnnnnnnaggaaactttgccggctataattgtggagactgcaagttcggctggaccggccccaactgcgatcggaagaaaccgccagtgattcggcagaacatccattccttgagtcctcaggagagagagcagttcttgggcgccttagatctcgcgaagaagagcgtacaccccgactacgtgatcaccacgcaacactggctgggcctgcttgggcccgatgggacccagccgcagtttgccaactgcagtgtttatgatttttttgtgtggctgcattattattctgttagagatacattattaggnnnnnnnnnnnnnnnnnnnnnnnnnnnnnnnnnnnnnnnnnnnnnnnnnnnnnnnnnnnnnnnnnnnnnnnnnnnnnnnnnnnnnnnnnnnnnnnnnnagcgactcattggcaatgagtcttttgctttgccctactggaactttgccactgggaggaacgagtgcgatgtgtgtacagaccagctgtttggagcagcgagaccagacgatccgactctgattagtcagaactcaagattctccagctgggaaactgtctgtgatagntagcttggatgactacaaccaccgggtcaccttgtgcaatggaacctatgaaggtttgctgagaagaaatcaaatgggaagaaatagtgtgaaattgccaaccttcaaaaacatacgagattgcctgtctctccggaagtttgacaatcctcccttcttccagaactctaccttcagtttcagg

SEQ ID NO: 35798 - DNA, 341 bp, Macaca Mulatta
ttcacattcaacaaccagggtatagccagataacagaaacaaactatttttttggtggattgcagtaaacgattactgaagattccttggctttcaacctacaagacttactatttaaataaggaggaatgttatgtgaatatacatatcaagaactttgggggttttgaaaaaaatgaattgtgtatatacaaatcaactttaaaaacaaatttcaattgcttgaagcaattgtgccgaatgatactttttcattcacattcaagaattaattttttgaagatttaagttacataatggaattaggcatgtggaacaccaaacaggaaagaactatgtct

SEQ ID NO: 35799 - DNA, 149 bp, Macaca Mulatta
gaatcagtgacatttaaggatgtggctatagacttcacattggaggagtggagattgatggaccctacacagaggaacctgcacaaggatgtgatgctagagaattacaggaatctggtctccctgggtaaggataacttctcttctgt

SEQ ID NO: 35800 - DNA, 1927 bp, Macaca Mulatta
  misc_feature (1)...(1927): n = A,T,C or G
tcgtcgcgacccgcccgggccgcaggacgccgcgctcggggagctgagccacctctccgccaggcccgtgcgagcgnnnnnnnnnnnnnnnnnnnnnnnnnnnnnnnnnnnnnnnnnnnnnnnnnnnnnnnnnnnnnnnnnnnnnnnnnnnnnnnnnnnnnnnnnnnnnnnnnnnnnnnnnnnnnnnnnnnnnnnnnnnnnnnnnnnnnnnnnnnnnnnnnnnnnnnnnnnnnnnnnnnnnnnnnnnnnnnnnnnnnnnnnnnnnnnnnnnnnnnnnnatgccccaggccctggagcgtgcagatggcagctgggcctgggtggtgctgctggccaccatggtgacccagggcctcaccctgggcttccccacgtgtatcggcatcttcttcactgatctgcaatgggagttccagaccagcaacagccagacctcttggatcccctccatccttatggctgtgctccacatggcagnnnagggcccctgtgcagtatcctggtgggacgcttcggctgccgagtgaccacgatgctgggaggtgtgctggccagcctgggcatggtggccagctccttctctcgcaacctcagccagctctacttcacagcaggattcatcacaggnnnnnnnnnnnnnnnnnnnnnnnnnnnnnnnnnnnnnnnnnnnnnnnnnnnnnnnnnnnnnnnnnnnnnnnnnnnnnnnnnnnnnnnnnnnnnnnnnnnnnnnnnnnnnnnnnnnnnnnnnnnnnnnnnnnnnnnnnnnnnnnnnnnnnnnnnnnnnnnnnnnnnnnnnnnnnnnnnnnnnnnnnnnnnnnnnnnnnnnnnnnnnnnnnnnnnnnnnnnnnnnnnnnnnnnnnnnnnnnnnnnnnnnnnnnnnnnnnnnnnnnnnnnnnnnnnnnnnnnnnnnnnnnnnnnnnnnnnnnnnnnnnnnnnnnnnnnnnnnnnnnnnnnnnnnnnnnnnnnnnnnnnnnnnnnnnnnnnnnnnnnnnnnnnnnnnnnnnnnnnnnnnnnnnnnnnnnnnnnnnnnnnnnnnnnnnnnnnnnnnnnnnnnnnnnnnnnnnnnnnnnnnnnnnnnnnnnnnnnnnnnnnnnnnnnnnnnnnnnnnnnnnnnnnnnnnnnnnnnnnnnnnnnnnnnnnnnnnnnnnnnnnnnnnnnnnnnnnnnnnnnnnnnnnnnnnnnnnnnnnnnnnnnnnnnnnnnnnnnnnnnnnnnnnnnnnnnnnnnnnnnnnnnnnnnnnnnnnnnnnnnnnnnnnnnnnnnnnnnnnnnnnnnnnnnnnnnnnnnnnnnnnnnnnnnnnnnnnnnnnnnnnnnnnnnnnnnnnnnnnnnnnnnnnnnnnnnnnnnnnnnnnnnnnnnnnnnnnnnnnnnnnnnnnnnnnnnnnnnnnnnnnnnnnnnnnnnnnnnnnnnnnnnnnnnnnnnnnnnnnnnnnnnnnnnnnnnnnnnnnnnnnnnnnnnnnnnnnnnnnnnnnnnnnnnnnnnnnnnnnnnnnnnnnnnnnnnnnnnnnnnnnnnnnnnnnnnnnnnnnnnnnnnnnnnnnnnnnnnnnnnnnnnnnnnnnnnnnnnnnnnnnnnnnnnnnnnnnnnnnnnnnnnnnnnnnnnnnnnnnnnnnnnnnnnnnnnnnnnnnnnnnnnnnnnnnnnnnnnntgccagttttcctgcctgccatgtctagctggcgtcaataagcatctttggggatgtcctgcctcctccaggaccagccatgagtgcctcttatagccaaaggcagtactgcaggccaagcaaagggctctgggctggaatagccctccctgagtgccttggactccgccactatctgccatgtgactttgggcaaattgttgaccacctctgagccttgaaaaagtagcaggttactttgttagagcgaaataataaaatttaattttaaaaaagaaaa

SEQ ID NO: 35801 - DNA, 1123 bp, Macaca Mulatta
  misc_feature (1)...(1123): n = A,T,C or G
ggcggaggacagtagcatggagggcggcctggggcgtgctgagtgcgtgctgactggggcctcccgcggcttcggccggacgctggccccgctcctggcctcgctgctgtcgcccggctccgtgctggtccttaacgcccgcaacaacgaggcactgcggcagctggaggccgagctgggcgccgagcggtctggcctgcgcgtggtgcgggtgcccgccgacctgggcgccgaggccggcttgcagcagctgctcggagccctgcgcgacctccccaggcccgaggggctgcannnnnnnnnnnnnnnnnnnnnnnnnnnnnnnnnnnnnnnnnnnnnnnnnnnnnnnnnnnnnnnnnnnnnnnnnnnnnnnnnnnnnnnnnnnnnnnnnnnnnnnnnnnnnnnnnnnnnnnnnnnnnnnnnnnnnnnnnnnnnnnnnnnnnnnnnnnnnnnnnnnnnnnnnnnnnnnnnnnnnnnnnnnnnnnnnnnnnnnnnnnnnnnnnnnnnnnnnnnnnnnnnnnnnnnnnnnnnnnnnnnnnnnnnnnnnnnnnnnnnnnnnnnnnnnnnnnnnnnnnnnnnnnnnnnnnnnnnnnnnnnnnnnnnnnnnnggtcctttggacacagacatgcagcagttggcccgggagacctccatggacccagacatgcgaaaagggctgcaggagctgaaggcaaaggggaagctggtggattgcaaggtgtcagcccagaaactgctgagcttgctgcaaaaggacgagttcaagtctggagcccacgtcgacttctatgacaaataagcccatgtttttggcttcctgaaccttttcgtccccactttcagacataccccagagccctgtggctccccacaccctgccataggggcagtcctgccttacacatagaaacactcatgcctgctgccctgccgtcaggcacagccagctgtgagctcccagatcttggccttacctgttgtcaggagtctgtgctgtgcaccctggattatgaggatggtaggagagaggttatgggtattggtgtctctatccccagaaatagaacttaaggagtgggaagagcaggaaaagaagctgggacacagaagagaggaggttgt

SEQ ID NO: 35802 - DNA, 1455 bp, Macaca Mulatta
  misc_feature (1)...(1455): n = A,T,C or G
gttttgacagatagacccccacctataattctacaaggcccagccaaccaaacactggcagtggatggcacagcattactgaaatgtaaagccactggcgatcctcttcctgtaattagctggttaaaggagggattnnnnnnnnnnnnnnnnnnnnnnnnnnnnnnnnnnnnnnnnnnnnnnnnnnnnnnnnnnnnnnnnnnnnnnnnnnnnnnnnnnnnnnnnnnnnnnnnnnnnnnnnnnnnnnnnnnnnnnnnnnnnnnnnnnnnnnnnnnnnnnnnnnnnnnnnnnnnnnnnnnnnnnnnnnnnnnnnnnnnnnnnnnnnnnnnnnnnnnnnnnnnnnnnnnnnnnnnnnnnnnnnnnnnnnnnnnnnnnnnnnnnnnnnnnnnnnnnnnnnnnnnnnnnnnnnnnnnnnnnnnnnnnnnnnnnnnnnnnnnnnnnnnnnnnnnnnnnnnnnnnnnnnnnnnnnnnnnnnnnnnnnnnnnnnnnnnnnnnnnnnnnnnnnnnnnnnnnnnnnnnnnnnnnnnnnnnnnnnnnnnnnnnnnnnnnnnnnnnnnnnnnnnnnnnnnnnnnnnnnnnnnnnnnnnnnnnnnnnnnnnnnnnnnnnnnnnnnnnnnnnnnnnnnnnnnnnnnnnnnnnnnnnnnnnnnnnnnnnnnnnnnnnnnnnnnnnnnnnnnnnnnnnnnnnnnnnnnnnnnnnnnnnnnnnnnnnnnnnnnnnnnnnnnnnnnnnnnnnnnnnnnnnnnnnnnnnnnnnnnnnnnnnnnnnnnnnnnnnnnnnnnnnnnnnnnnnnnnnnnnnnnnnnnnnnnnnnnnnnnnnnnnnnnnnnnnnnnnnnnnnnnnnnnnnnnnnnnnnnnnnnnnnnnnnnnnnnnnnnnnnnnnnnnnnnnnnnnnnnnnnnnnnnnnnnnnnnnnnnnnnnnnnnnnnnnnnnnnnnnnnnnnnnnnnnnnnnnnnnnnnnnnnnnnnnnnnnnnnnnnnnnnnnnnnnnnnnnnnnnnnnnnnnnnnnnnnnnnnnnnnnnnnnnnnnnnnnnnnnnnnnnnnnnnnnnnnnnnnnnnnnnnnnnnnnnnnnnnnnnnnnnnnnnnnnnnnnnnnnnnnnnnnnnnnnnnnnnnnnnnnnnnnnnnnnnnnnnnnnnnnnnnnnnnnnnnnnnnnnnnnnnnnnnnnnnnnnnnnnnnnnnnnnnnnnnnnnnnnnnnnnnnnnnnnnnnnnnnnnnnnnnnnnnnnnnnnnnnnnnnnnnnnnnnnnnnnnnnnnnnnnnnnnnnnnggagacgtaatgaagttgtcattactgaaaacaataacagcataactgagcaaatcactgacgtggtgaagcaaccggcctttattgctggtattggtggtgcctgctgggtaattttgatgggttttagcatatggttgtattggagaagaaagaagaggaagggactcagtaactatgctggtaa

SEQ ID NO: 35803 - DNA, 2422 bp, Macaca Mulatta
  misc_feature (1)...(2422): n = A,T,C or G
ggccttccagtatccaaaccatatgtgatctgccagttggaggaggggggcgagcccttcatcgtggagagagaaatctcaacaggggcctactcannnnnnnnnnnnnnnnnnnnnnnnnnnnnnnnnnnnnnnnnnnnnnnnnnnnnnnnnnnnnnnnnnnnnnnnnnnnnnnnnnnnnnnnnnnnnnnnnnnnnnnnnnnnnnnnnnnnnnnnnnnnnnnnnnnnnnnnnnnnnnnnnnnnnnnnnnnnnnnnnnnnnnnnnnnnnnnnnnnnnnnnnnnnnnnnnnnnnnnnnnnnnnnnnnnnnnnnnnnnnnnnnnnnnnnnnnnnnnnnnnnnnnnnnnnnnnnnnnnnnnnnnnnnnnnnnnnnnnnnnnnnnnnnnnnnnnnnnnnnnnnnnnnnnnnnnnnnnnnnnnnnnnnnnnnnnnnnnnnnnnnnnnnnnnnnnnnnnnnnnnnnnnnnnnnnnnnnnnnnnnnnnnnnnnnnnnnnnnnnnnnnnnnnnnnnnnnnnnnnnnnnnnnnnnnnnnnnnnnnnnnnnnnnnnnnnnnnnnnnnnnnnnnnnnnnnnnnnnnnnnnnnnnnnnnnnnnnnnnnnnnnnnnnnnnnnnnnnnnnnnnnnnnnnnnnnnnnnnnnnnnnnnnnnnnnnnnnnnnnnnnnnnnnnnnnnnnnnnnnnnnnnnnnnnnnnnnnnnnnnnnnnnnnnnnnnnnnnnnnnnnnnnnnnnnnnnnnnnnnnnnnnnnnnnnnnnnnnnnnnnnnnnnnnnnnnnnnnnnnnnnnnnnnnnnnnnnnnnnnnnnnnnnnnnnnnnnnnnnnnnnnnnnnnnnnnnnnnnnnnnnnnnnnnnnnnnnnnnnnnnnnnnnnnnnnnnnnnnnnnnnnnnnnnnnnnnnnnnnnnnnnnnnnnnnnnnnnnnnnnnnnnnnnnnnnnnnnnnnnnnnnnnnnnnnnnnnnnnnnnnnnnnnnnnnnnnnnnnnnnnnnnnnnnnnnnnnnnnnnnnnnnnnnnnnnnnnnnnnnnnnnnnnnnnnnnnnnnnnnnnnnnnnnnnnnnnnnnnnnnnnnnnnnnnnnnnnnnnnnnnnnnnnnnnnnnnnnnnnnnnnnnnnnnnnnnnnnnnnnnnnnnnnnnnnnnnnnnnnnnnnnnnnnnnnnnnnnnnnnnnnnnnnnnnnnnnnnnnnnnnnnnnnnnnnnnnnnnnnnnnnnnnnnnnnnnnnnnnnnnnnnnnnnnnnnnnnnnnnnnnnnnnnnnnnnnnnnnnnnnnnnnnnnnnnnnnnnnnnnnnnnnnnnnnnnnnnnnnnnnnnnnnnnnnnnnnnnnnnnnnnnnnnnnnnnnnnnnnnnnnnnnnnnnnnnnnnnnnnnnnnnnnnnnnnnnnnnnnnnnnnnnnnnnnnnnnnnnnnnnnnnnnnnnnnnnnnnnnnnnnnnnnnnnnnnnnnnnnnnnnnnnnnnnnnnnnnnnnnnnnnnnnnnnnnnnnnnnnnnnnnnnnnnnnnnnnnnnnnnnnnnnnnnnnnnnnnnnnnnnnnnnnnnnnnnnnnnnnnnnnnnnnnnnnnnnnnnnnnnnnnnnnnnnnnnnnnnnnnnnnnnnnnnnnnnnnnnnnnnnnnnnnnnnnnnnnnnnnnnnnnnnnnnnnnnnnnnnnnnnnnnnnnnnnnnnnnnnnnnnnnnnnnnnnnnnnnnnnnnnnnnnnnnnnnnnnnnnnnnnnnnnnnnnnnnnnnnnnnnnnnnnnnnnnnnnnnnnnnnnnnnnnnnnnnnnnnnnnnnnnnnnnnnnnnnnnnnnnnnnnnnnnnnnnnnnnnnnnnnnnnnnnnnnnnnnnnnnnnnnnnnnnnnnnnnnnnnnnnnnnnnnnnnnnnnnnnnnnnnnnnnnnnnnnnnnnnnnnnnnnnnnnnnnnnnnnnnnnnnnnnnnnnnnnnnnnnnnnnnnnnnnnnnnnntgagatgtatgaaactagagctgaaaagaagctgagaaatgaccttgtctggtgattttttgcctggtggggccatttgtataaccacacttgtgcattgcctcctcatgctgttactgacggggcagggtgccatgcatggtgcagaggatggaggctgagaaaggtagacggctacccgtgatctagcccagtcgtagtttagagctaatgaaactgatgttcaaaaagcgacannnnnnnnnnnnnnnnnnnnnnnngctgggcctctttcctgtggttcacagctgtagcgtggagattagtagactggacctttccagcacaacacctccatgcactgctttctctgtagcacatgttacctttctttgtgaggcaatggagcggtctaggattgaacaaaaagcaattttcattacatctttatgctaatagatttggaatttttgaagtgaaatgaaaccttgtttaaacattaaaattactaaaata

SEQ ID NO: 35804 - DNA, 656 bp, Macaca Mulatta
gctagggccactgtcagcatcttcattggaatacttgccagggtggctctgacatagtagccctggtgtagtttctgcatttcaggaagactggcaggtatgatggcctttcctcttgtcctgtttcctgcagcgttgactgccatgtttgggagagagacctgtatcctgggactggatctcctcctcctcccaataaactcctgcttctcagcactaattcctgcaggtctcttcttccctggtctgcatgcttcctgtaccccactgtctcttagacataattatccccaacctctgctcatttgtttcccagattcaatacactatgaaagtcttctgatcctttcttaacatctctcacttgcgtcattctctccattcccacagacctcaacgaactgttcaaagtcctggcttgactccttgtctccagtcttcaaaatcttccttgcatatgactgcctcattaccttactaaaatctagttcactcacctactgaagaatctaaagggtcctattctggcctattttataagttcacatttcttctctttactaatccttctcacttcctttatctctacttcctagtataattcctccatcctaattagaactgtcttcctacacatccctgcccctctaccccaa

SEQ ID NO: 35805 - DNA, 2549 bp, Macaca Mulatta
  misc_feature (1)...(2549): n = A,T,C or G
caggttccgtcagccctggcgcccaggcgcatctgactcggcaccccctgcaggcaccatggcccagagccggnnnnnnnnnnnnnnnnnnnnnnnncgccacagctgcacctgggacctgtgcttgccatgagagccccaggatttggtcgaagcggcggccacagcctgagccctgaagagaacgaatttgcggaggaggagcctgtgctggtcctgagccctgaggagcctgggcctggcccagccgcgatcagctgtccccgagactgtgcctgttcccaggagggcgtcgtggactgtggtggcatcgacctgcgtgagttcccgggggacctgcctgaacacaccagccacctgtctctgcangaacaaccagctggaaaagatctaccctgaggagctctcccggctgcaccggctggagacgctgaacctgcagaacaaccgcctgacttcccgaggnnagggctcccagagaaggcgtttgagcatctgaccaacctcaattacctgtacttggccaataacaannnnnnnnnnnnnnnnnnnnnnnnnnnnnnnnnnnnnnnnnnnnnnnnnnnnnnnnnnnnnnnnnnnnnnnnnnnnnnnnnnnnnnnnnnnnnnnnnnnnnnnnnnnnnnnnnnnnnnnnnnnnnnnnnnnnnnnnnnnnnnnnnnnnnnnnnnnnnnnnnnnnnnnnnnnnnnnnnnnnnnnnnnnnnnnnnnnnnnnnnnnnnnnnnnnnnnnnnnnnnnnnnnnnnnnnnnnnnnnnnnnnnnnnnnnnnnnnnnnnnnnnnnnnnnnnnnnnnnnnnnnnnnnnnnnnnnnnnnnnnnnnnnnnnnnnnnnnnnnnnnnnnnnnnnnnnnnnnnnnnnnnnnnnnnnnnnnnnnnnnnnnnnnnnnnnnnnnnnnnnnnnnnnnnnnnnnnnnnnnnnnnnnnnnnnnnnnnnnnnnnnnnnnnnnnnnnnnnnnnnnnnnnnnnnnnnnnnnnnnnnnnnnnnnnnnnnnnnnnnnnnnnnnnnnnnnnnnnnnnnnnnnnnnnnnnnnnnnnnnnnnnnnnnnnnnnnnnnnnnnnnnnnnnnnnnnnnnnnnnnnnnnnnnnnnnnnnnnnnnnnnnnnnnnnnnnnnnnnnnnnnnnnnnnnnnnnnnnnnnnnnnnnnnnnnnnnnnnnnnnnnnnnnnnnnnnnnnnnnnnnnnnnnnnnnnnnnnnnnnnnnnnnnnnnnnnnnnnnnnnnnnnnnnnnnnnnnnnnnnnnnnnnnnnnnnnnnnnnnnnnnnnnnnnnnnnnnnnnnnnnnnnnnnnnnnnnnnnnnnnnnnnnnnnnnnnnnnnnnnnnnnnnnnnnnnnnnnnnnnnnnnnnnnnnnnnnnnnnnnnnnnnnnnnnnnnnnnnnnnnnnnnnnnnnnnnnnnnnnnnnnnnnnnnnnnnnnnnnnnnnnnnnnnnnnnnnnnnnnnnnnnnnnnnnnnnnnnnnnnnnnnnnnnnnnnnnnnnnnnnnnnnnnnnnnnnnnnnnnnnnnnnnnnnnnnnnnnnnnnnnnnnnnnnnnnnnnnnnnnnnnnnnnnnnnnnnnnnnnnnnnnnnnnnnnnnnnnnnnnnnnnnnnnnnnnnnnnnnnnnnnnnnnnnnnnnnnnnnnnnnnnnnnnnnnnnnnnnnnnnnnnnnnnnnnnnnnnnnnnnnnnnnnnnnnnnnnnnnnnnnnnnnnnnnnnnnnnnnnnnnnnnnnnnnnnnnnnnnnnnnnnnnnnnnnnnnnnnnnnnnnnnnnnnnnnnnnnnnnnnnnnnnnnnnnnnnnnnnnnnnnnnnnnnnnnnnnnnnnnnnnnnnnnnnnnnnnnnnnnnnnnnnnnnnnnnnnnnnnnnnnnnnnnnnnnnnnnnnnnnnnnnnnnnnnnnnnnnnnnnnnnnnnnnnnnnnnnnnnnnnnnnnnnnnnnnnnnnnacgatgaactgccggactcctttctgcagcacacgccggtgcgctgnnnnnnnnnnnnnnnnnnnnnnnnnnnnnnnnnnnnnnnnnnnnnnnnnnnnnnnnnnnnnnnnnnnnnnnnnnnnnnnnnnnnnnnnnnnnnnnnnnnnnnnnnnnnnnnnnnnnnnnnnnnnnnnnnnnnnnnnnnnnnnnnnnnnnnnnnnnnnnnnnnnnnnnnnnnnnnnnccctccaaaccaccacagtctctgccacacacccactaccactgccacaccctctgaatcatgcagggaagggtctgcccctgccctagcacacacaggcacccactccctccccctgctgacatgtgtatgtgtgtgtacacaccacgcacacacatgcacaagtcatatgcaaacagccctccaaagcctatgccacagacagctcttgccccagccagaatcagccacagcagctcgccgtctgccctgtccatctgtccgtccgttccctggagaagacacaagggtatctccatgctctgtggccaggtgcctgccaccctcatggaactcacaagagctggcttttattcctttcgcaccctttggggacaggagcgtacaggactgctg

SEQ ID NO: 35806 - DNA, 129 bp, Macaca Mulatta
tgtgagcgacggctccggggctcctctggaagcggctcctgcaagccccgagttcgcctgtgcggagctgggggagcctccgacttccctgtttgctttgtaaatggtttccgtccctagaggaaggcg

SEQ ID NO: 35807 - DNA, 868 bp, Macaca Mulatta
gggcctttcccccccctctagcgccgctgggcctgcaggtctctgtcgacccgcggacgctggtctctgttccgcaggatggggtttgttaaagttgttaagaataaggcctactttaagagataccaagtgaaatttagaagacgacgagagggtaaaactgattactatgctcggaaacgcttggtgatacaggataaaaataaatacaacacacccaaatacaggatgatagttcgtgtaacaaacagagatatcatttgtcagattgcttatgcccgtatagagggggatatgatagtctgcgcagcatatgcacacgaactggccaaaatatggtgtgaaggttggcctgacaaactatgctgcagcaaattgtactggcctgcggctgggccacaggccttctcaataggtttggcatggaacaaaaatctatgaaggccaattgtgaagtaactgggctatgaaaacaaaggtggaaaaacctatgatgggtcacccaagatgcccttatacctggctaatttggaatgacaggccttgtccataactaaccacctggccaattaaagttattttggcggcccggtaaaagaaacttgtgggaatggaaaactttgtctataccccccctcgataataaaaccataattcccccggtttgtagaattccttgaaaagcacagggaaaactttatggcacaaaaagttacacacctgggatagcccaatccagttggcgcccagaaactcgtttgactaaaaatatcatattgcagacaaagtggtattagaggaagaataaaatgttattgtactcatttaataaacaaatatcaaatttacctcccacaataacaaaata

SEQ ID NO: 35808 - DNA, 616 bp, Macaca Mulatta
aaattatactatctcagtgatctctgtctagtttccctacttcacccagttaaggtgatacttgatgaccaacactgagactgggatgactctcactagagagtgaccctgtatttcctgttttaattgtgcctgtgttttggtctctacattctaagttgacaccaagactgaagactggacccgaagaagtttccatattagacggtgtccagagtgacctcaaagaagtgatggtgctgaacgcaacagaatcatttgtgtatgagcccatagagcagaagaaaatgtttcatgccacagtggcaactgagaatgaagtcttccgagtgaaggtttttaatattgacctaaaggagaagttcaccccaaagaagatcattgccatctcaaattatgtttgccgcagtgggttcctggaggtatatcctttaacagttgtggttgatgtgaatgccgaccgaaaaatggagatcccacaaggattgattagaagtgccaacacaactcctaaaatcagttatctttgctcacaaactaaaggaagttttgtgaatggggtgtttgaggtacataagaaccatgtaaggggtgaattcacttattatgaaataca

SEQ ID NO: 35809 - DNA, 1057 bp, Macaca Mulatta
  misc_feature (1)...(1057): n = A,T,C or G
gtatgagattatattcagacagcaggtgggaactgaagatatatttttagggttgtcaagaaaggactcctcaacaagttgttgcagtgaactagtgnnnnnnnnnnnnnnnnnnnnnnnnnnnnnnnnnnnnnnnnnnnnnnnnnnnnnnnnnnnnnnnnnnnnnnnnnnnnnnnnnnnnngaagcttttgataactcttcctgagctggtggaatgtgccaaaggcaaggcattctatatcccagagactgaaactcttgaaannnnnnnnnnnnnnnnnnnnnnnnnnnnnnnnnnnnnnnnnnnnnnnnnnnnnnnnnnnnnnnnnnnnnnnnnnnnnnnnnnnnnnnnnnnnnnnnnnnnnnnnnnnnnnnnnnnnnnnnnnnnnnnnnnnnnnnnnnnnnnnnnnnnnnnnnnnnnnnnnnnnnnnnnnnnnnnnnnnnnnnnnnnnnnnnnnnnnnnnnnnnnnnnnnnnnnnnnnnnnnnnnnnnnnnnnnnnnnnnnnnnnnntggctcctgcctgtaatcccagcactttggggggccgaggtgggcagatcacttgaggtcaggagttcaagaccagcctgggcaatatggcgaaacctggtctccactaaaaatataaaaattnnnnnnnnnnnnnnnnnnnnnnnnnnnnnnnnnnnnnnnnnnnnnnnnnnnnnnnnnnnnnnnnnnnnnnnnnnnnnnnnnnnnnnnnnnnnnnnnnnnnnnnnnnnnnnnnnnnnnnnnnnnnnnnnnnnnnnnnnnnnnnnnnnnnnnnnnnnnnnnnnnnnnnnnnnnnnnnnnnnnnnnnnnnnnnnnnnnnnnnnnnnnntcagtagtctgaaaaacgtatgctaattatttacacttacactgtgatacaatcagttgcgtagcaattggtcattattattaccagagaagtttatttggttgcttttccattgatttgatcaaatgatttacagtgttctctgtttaggctctcactatcgttctggaatatgcaggtaataaatagtttgatgtactgtactatcaacatattt

SEQ ID NO: 35810 - DNA, 170 bp, Macaca Mulatta
cgtgcttctctatcccagtatgcaccattgctgaatgtatgcaccataagtgcttgggctacatgggatcaagggaagaagcaaaacttaccaaaaacaaaccgattgttttttaatgtgtgtgtgagtgttgtggggagggctgggtccttgtatgattattcatccat

SEQ ID NO: 35811 - DNA, 78 bp, Macaca Mulatta
caggaataactcaagtcacccgtacggaaaatcagtttgctgaaattattcaatcaacgattcttgaagttgaagaaa

SEQ ID NO: 35812 - DNA, 254 bp, Macaca Mulatta
  misc_feature (1)...(254): n = A,T,C or G
tgatttgtggaattctgtatgtggtcaaatctgtatatgaggatgatgacaatgaggccactggaaataagattgactacatttacaacactgaccaaagcaaggatagtttggtggatgtaccctttcccaattcataccagtacattgcagctgtggattacaaccccagggacaacctgctttatgtatggaataactatcatgtcgtgaaatattctttggattttggaccgctggatagtagatcaggn

SEQ ID NO: 35813 - DNA, 285 bp, Macaca Mulatta
atggccccactgaagatgctggccctggtcatcctcctcctgggggcttctctgcagcacatccatgcagctcgagggaccaacgtgggccgggagtgctgcctgaagtacttcaagggagccattccccttagaaagctgaagacgtggtaccagacatccgaggactgttccagggatgccattgtttttgtaactgtccagaacaaggccatctgttcggaccccaacgacaagaaagtgaagaaggcacttaaatacctgcaaagccttgagaggtcttga

SEQ ID NO: 35814 - DNA, 452 bp, Macaca Mulatta
  misc_feature (1)...(452): n = A,T,C or G
ctggcgcgggagggagttgcggtggatgcgctagcgctctggggagcccctgccctcttcgcggagagtggctgctagcggggactgaaggccgggagcccannnnnncccggggctagcgtgcagccctagagtcgagtggggcaagggagccggtggccgccgaggcgggaccgggaaacttttctgggctcctgggcgcgccctgtagccgcgctccatgctccggccgcggcccgaacctcagccccgccgctgacggcgcccgccgctccgggcagggcccatgccctgcgcgctccgggggtagtaggctgccgccgagcccgggctccgggagccggcgggggcgccgcggctgtgcggggcgtcaatggatcgccactccagctacatcttcatctggctgcagctggagctctgcgccatggccgtgctgctcaccaaaggtg

SEQ ID NO: 35815 - DNA, 1003 bp, Macaca Mulatta
  misc_feature (1)...(1003): n = A,T,C or G
tcgctgaagaacgtggacaaggtcctcgaggtgcctcctgttgtnnnnnnnnnnnnnnnnnnnnnnnnnnnnnnnnnnnnnnnnnnnnnnnnnnnnnnnnnnnnnnnnnnnnnnnnnnnnnnnnnnnnnnnnnnnnnnnnnnnnnnnnnnnnnnnccagagccgaacactgtcagctacagccagtccagcttgatccacctggtggggccttcagactgcaccctgcacggctttgtgcacggaggnnnnnnnnnnnnnnnnnnnnnnnnnnnnnnnnnnnnnnnnnnnnnnnnnnnnnnnnnnnnnnnnnnnnnnnnnnnnnnnnnnnnnnnnnnnnnnnnnnnnnnnnnnnnnnnnnagctccttagctggggcctggcccatggcctgccctcctcccggggtgtgtcttgtgactgcaggcgctttgcacaggactctataccttacagctcacgtaatgcctgctggcgctgaccacacagctccttcctccgctaccagcactggcacgaagcactccctgnnnnnnnnnnnnnnnnnnnnnnnnnnnnnnnnnnnnnnnnnnnnnnnnnnnnnnnnnnnnnnnnnnnnnnnnnnnnnnnnnnnnnnnnnnnnnnnnnnnnnnnnnnnnnnnnnnnnnnnnnnnnnnnnnnnnnnnnnnnnnnnnnnnnnnnnnnnnnnnnnnnnnnnnnnnnnnnnnnnnnnncccgagaccgaggacgagaagaagcgctttgaggaaggcaaagggcggtacctgcagatgaaggcgaagcgacagggccacacggagcctcagccctagactccctcctcctgccgctggggcctcgagtagccatggcaacgggcccagtgtccactcacttagaagttccccccttggccaaaaacccgattcacattgagagctggtattgtctgaagttttcgtatcacagtgttaacctgtactctctcctgcaaaccaacacaccaaagctttatttatatcattc

SEQ ID NO: 35816 - DNA, 2136 bp, Macaca Mulatta
  misc_feature (1)...(2136): n = A,T,C or G
taaaaccaagaaggcggcagagagcctgcggcgctcagtggaaaaatacaacacagcccgagctgactttgagcagaagatgctggactcggccctnnnnnnnnnnnnnnnnnnnnnnnnnnnnnnnnnnnnnnnnnnnnnnnnnnnnnnnnnnnnnnnnnnnnnnnnnnnnnnnnnnnnnnnnnnnnnnnnnnnnnnnnnnnnnnnnnnnnnnnnnnnnnnnnnnnnnnnnnnnnnnnnnnnnnnnnnnnnnnnnnnnnnnnnnnnnnnnnnnnnnnnnnnnnnnnnnnntgctcagttgccccccaatctatcctcagcgatgaaacgtttgcggggagccaagacctttcgccttccgggattaagccggcgggagcgggagccagagccacctgcagctgtnnnnnnnnnnnnnnnnnnnnnnnnnnnnnnnnnnnnnnnnnnnnnnnnnnnnnnnnnnnnnnnnnnnnnnnnnnnnnnnnnnnnnnnnnnnnnnnnnnnnnnnnnnnnnnnnnnnnnnnnnnnnnnnnnnnnnnnnnnnnnnnnnnnnnnnnnnnnnnnnnnnnnnnnnnnnnnnnnnnnnnnnnnnnnnnnnnnnnnnnnnnnnnnnnnnnnnnnnnnnnnnnnnnnnnnnnnnnnnnnnnnnnnnnnnnnnnnnnnnnnnnnnnnnnnnnnnnnnnnnnnnnnnnnnnnnnnnnnnnnnnnnnnnnnnnnnnnnnnnnnnnnnnnnnnnnnnnnnnnnnnnnnnnnnnnnnnnnnnnnnnnnnnnnnnnnnnnnnnnnnnnnnnnnnnnnnnnnnnnnnnnnnnnnnnnnnnnnnnnnnnnnnnnnnnnnnnnnnnnnnnnnnnnnnnnnnnnnnnnnnnnnnnnnnnnnnnnnnnnnnnnnnnnnnnnnnnnnnnnnnnnnnnnnnnnnnnnnnnnnnnnnnnnnnnnnnnnnnnnnnnnnnnnnnnnnnnnnnnnnnnnnnnnnnnnnnnnnnnnnnnnnnnnnnnnnnnnnnnnnnnnnnnnnnnnnnnnnnnnnnnnnnnnnnnnnnnnnnnnnnnnnnnnnnnnnnnnnnnnnnnnnnnnnnnnnnnnnnnnnnnnnnnnnnnnnnnnnnnnnnnnnnnnnnnnnnnnnnnnnnnnnnnnnnnnnnnnnnnnnnnnnnnnnnnnnnnnnnnnnncccacccaggagactccgctctaggaaggtgtcctgccctctcacacgtagcaacggggacctgnnngttccctgagcccctccccactgggctctttagcccccagcactaccttggaacggcccagcttctcatcccagacaggacanggagtctcccggggtccgagccctgtggtcctgggctcccaggatgccctgcccgtagccacagccttcacggagtacgtccatgcctacttccgtggccacagccccagnnnnnnnnnnnnnnnnnnnnnnnnnnnnnnnnnnnnnnnnnnnnnnnnnnnnnnnnnnnnnnnnnnnnnnnnnnnnnnnnnnnnnnnnnnnnnnnnnnnnnnnnnnnnnnnnnnnnnnnnnnnnnnnnnnnnnnnnnnnnnnnnnnnnnnnnnnnnnnnnnnnnnnnnnnnnnnnnnnnnnnnnnnnnnnnnnnnnnnnnnnnnnnnnnnnnnnnnnnnnnnnnnnnnnnnnnnnnnnnnnnnnnnnnnnnnnnnnnnnnnnnnnnnnnnnnnnnnnnnnnnnnnnnnnnnnnnnnnnnnnnnnnnnnnnnnnnnnnnnnnnnnnnnnnnnnnnnnnnnnnnnnnnnnnnnnnnnnnnnnnnnnnnnnnnnnnnnnnnnnnnnnnnnnnnnnnnnnnnnnnnnnnnnnnnnnnnnnnnnnnnnnnnnnnnnnnnnnnnnnnnnnnnnnnnnnnnnnnnnnnnnnnnnnnnnnnnnnnnnnnnnnnnnnnnnnnnnnnnnnnnnnnnnnnnnnnnnnnnnnnnnnnnnnnnnnnnnnnnnnnnnnnnnctggccgcctctctgccagctgggagccgctctcagggcccagcacacctagccccgtggccgcacagttcaccagcgagggggccactctgtcgggcgtggacttggaactggtgggcagcggttaccgcatgtcactggtgaagaggaggtttgccacagg

SEQ ID NO: 35817 - DNA, 1142 bp, Macaca Mulatta
  misc_feature (1)...(1142): n = A,T,C or G
cgcnnnnnnnnnnnnnnnnnnnnnnngtgtaaatnnnnnnnnnnnnnnnnnnnnnnnnnnnnnnnnnnnnnnnnnnnnnnnnnnnnnnnnacccttnnnnnnnnnnnnnnnnnnnnnnnnaaattgatttttgttttggttgttgtcgttttaaagccaatttctgagtttttctggtgtttctaaaaagccaattatttttaagagggttgttgtggtgggggggaagggggttagtttaaagttttgattttttatgtgtggggataattggggataatttggagggagggtgtttaaagccaatcgattttgtacatgtttgaagatgttgctgtggacctcagcccgatggaggggtccgaggagagtagcctgtttcggggaggcggggcacgggggctggggtcaggagaagccccgggggggaagtggaaccaagagattttggagatggaacctgatggaaacgtcgctggtcaggaggaggctggagggtggtggtgccggctgcagacttgcggcagttttgctcacttccaattgctggacatctctggggacgcgcccccgtgggtgggttcttgggtgggcagagcaatcaggggacggtgacgcttggcctccctgaatgcctcgagctccttggcgagcatgcgaccccggcgggcacgcaggagggcaggcaggcccctgcgcagacgctgggtggactgcttccaggtgtcatatcggaagaacttgcccacggggtatctggggaagttgtccggaagcacggtcggaggggtcgacacgtccctctcggacttggcgggggtagcacagtacgtctccaggagggccaggtcacagctgcggaaacagcactcctcaacgatgccacggctgcgacggctcacacggcttgcgggcctgctgaagtagaagccgcggtccccacagacgaactggagggtgtccacgagctccccgccgcacagggtctcactggggcggtaagcagcaatgcagcacgaggcgaaggccaagaaggtgagaagcaccagcatcgacttccccattgggattcccattggtatctacagctcagctaggaggctcgctggggcaggaggatacagcggnaggaagaggaggag

SEQ ID NO: 35818 - DNA, 184 bp, Macaca Mulatta
gatggcccgcatgctgctgaaacggggctgcaacgtgaacagcaccagctccgcggggaacacggccctgcacgtggcagtgatgcgcaaccgcttcgactgcgccatagtgctgctgacccacggggccaacgcggatgcccatggagagcatggcaacaccccgctacacctggccatgtcg

SEQ ID NO: 35819 - DNA, 145 bp, Macaca Mulatta
gggttttacagatgaccagttagttctggtggagcagaacacactgatggtggaagagcgggaacgagagattcgccagattgtacaatccatttctgacctgaatgaaatattcagggacttaggagcgatgattgtagaacag

SEQ ID NO: 35820 - DNA, 506 bp, Macaca Mulatta
  misc_feature (1)...(506): n = A,T,C or G
taacaaagatggctcccaggtggttgcttgctggttgatctgataatgtaccatgtgcctgctgatntggcctgtgctgtttctgctttttgcccctgacttcctgtgctagagaaagccttattggtgttggtggtggtgatgggaaggaaaagggtggtcctttgggactcttgataaaaatgttatcatttgaacttgctaagccttccagcctcttttatgaagatattatgccaataaactctctactagatattagtgccaagctggtgataaaaagggtctgtggcaagtagaactgattggaatgctgaattaggagcagcccttccaccatgggatgctttgaaagcagatcataacacaaagcaggtatcaccctcaggcaccagcagtggctggttgtgtacaacactgttcacatttgggggaccagggtttgggccaagtgaaggatgtgtgatgagtaaggggcagaaatggagtatgtactctgggccttt

SEQ ID NO: 35821 - DNA, 747 bp, Macaca Mulatta
ggaagaatgtgatagcagggattagggaaactgaagagaaattctactacatcgtgcaggaagagaagaactacagggaatccctaacccactgcaggattcggggtggaatgctagccatgcccaaggatgaagctgccaacacactcatagctgactatgttgccaagagtggcttctttcgggtgttcattggcgtgaatgaccttgaaagggagggacagtacgtgttcacagacaacactccactgcagaactatagcaactggaatgagggggaacccagcgacccctatggtcatgaggactgtgtggagatgctgagctctggccgatggaatgacacagagtgccatcttaccatgtactttgtctgtgagtttatcaagaagaaaaagtaacttccctcatcctacgtatttgctcttttcctgtgaccatcattacagttactattatccatccttttttttcctaattatactacatttgatctgagtcaacacagctaggaaatgctaaactaaggattccaaaaggaccgatgatatcaacagccaagaaatgttataaaaggtctttccaagaagttggatgcattaacaaaaacaatctttaaacacagtttttccctctggtcaccccaagcctgggaaagacaaatggggggcaaattccccacagtcctttgggcaacatttcttgcccctccccgggggtttcaaaaggggaaaatttccctcccct

SEQ ID NO: 35822 - DNA, 805 bp, Macaca Mulatta
  misc_feature (1)...(805): n = A,T,C or G
tacagctaagaaggcctaagttctcagtggctcacttctctcccacttctccatttgtagcaggtggaaggggtatatgtgtcccagttgcatgcacatttatttccatgtttcttttggaacattgggattgttccaaatgtgagtagatcctgtttcctttaggaaaagaagctgtgaggtagaggaatgagccccttttgcttctctttttgccatcctccctgagattgtttgccagaatcctggccctgtgcacacatgtgcttaatcgaccagcacacaagctctggatagaacaggaaaaaaaccgtggccagatttccttggaggagaaaacaaccttctgagctctctgttcctaaccggaaactaaaaattcattcagggccattctcacaaaccagactcctgggtctaatctagtttcccaacagttccagaagaaggaggagggaagaaaatttttcaaggaacttcttgctcatgtgttgctgtttcccaacacatcagccttatggaagatgtcatgaggctgcttccctgggaggctacacttctcctttccagaagacttcanagctgactgccaaagcttctggtaaatccaccccacccttcacaccctttcctgaaaggcatttgtaccacacatttcatttattggcttttctccccaacccctgccctagagctatggagtttttgaattggtgaccctctctatatcttcagcaaaatttgcatgancagctgcatattcagcctcagtttttcccaagagaaagtaaagcacttgcctccc

SEQ ID NO: 35823 - DNA, 114 bp, Macaca Mulatta
cggagtagaattgaacgtgatatagataacaatttgatcacgtcaacaccaagagcaggagaaaaacctaacaaacagatatctcgagtaagacggaaaagtcaagtaaatgga

SEQ ID NO: 35824 - DNA, 260 bp, Macaca Mulatta
caggaagctcagcccggagccagaaacgggaggcccgcctggacaaagtgctgtcggacatgaagagacacaagaagctggaggagcagatccttcgtactgggagagacctcttcagcctggactcggaagaccccagccctgccagccccccactccgatcctccgggagtagtctcttccctcggcagcggaagtactgactcccactgctcctgcctctaggctgcagtgtctgtacctgctggggcctgggccct

SEQ ID NO: 35825 - DNA, 771 bp, Macaca Mulatta
  misc_feature (1)...(771): n = A,T,C or G
ggcattctgttgggaggtcaagttaccaatgccaagggctgttgannnnnnnnnnnnnnnnnnnnnnncttctagcttttcagaagatggaaatgagacagttaagtccaaaccccaatgttgacagccatatgcatttgcaaatctatctagattacagatgggcatttattactggcagtggaaacataccagatagaagatcttgggagaggcccagaaatgcagcaccttgtcatgacaaaagaggaggcagcagaggaaggatagttacaaatgcatccaccttaatttttttcaataggcttgtacatcttattaatggaaggagaaaggagacaggaaaggataaatgtcaagatgcagaagaattgacatgtatcccatcataaaatggtagaagttgagttttcaatgagtagtcatagttgaatttttacaaccaaagctcccatttgattgtaatcttgcccaaaatgtaatggacgtataaatgaacttggggtataagcaataatatccactagtgtttgtttatcagctgctgtaaccaagtggctggttcatttggttgatgctgatttatggcctttaaccatggtggtttcttgtggtgttttttatttcacaaaaagccaataaaattgtttagcttcnccaaaaatgattaaaaactagaatttatccttgttcggccgccctcggcccctcaagaaaaccttttttaaacccattcctttttgggccccgcggggccccgtaaggttaagt

SEQ ID NO: 35826 - DNA, 557 bp, Macaca Mulatta
  misc_feature (1)...(557): n = A,T,C or G
ggttcgcgcagctgcggcgcctcggtccccatggcgctgtggcgcggctccgcgtacgcgggcttcctggcgctggccgtgggctgcgtcttcctgctggagccagagctgccaggctcggcgctgcgctctctgtggagctcgctgtgtctggggcccgcgcctgcgcccccaggacctgtctcccctgagggccggttggcggcagcctgggacgcgcttatcgtgcggccagtccggcgctggcgccgcgtggcagtggagtcaatgcatgtgttgatgtggtgctctcaggggtgaagctcttgcaggcacttggccttagtcctgggaatgggaaagatcacagcgttctgcattcaaggaatgatctggaagaagccttcattcacttcatggggaagggagcagctgctgagcgcttcttcagtgataaggaaacttttcacgacattgcccaggttgcatcagagttcccaggagcccagnncagcactatgtaggaggaaatgcagctttaattggacagaaatttgcagccaactcagatttaaagg

SEQ ID NO: 35827 - DNA, 1248 bp, Macaca Mulatta
  misc_feature (1)...(1248): n = A,T,C or G
agttaaaagaagatggatgcacagtgttcttttctaggtcaatgcaaggaagaggaggaaagaggcgcctggacccaacggggcaacagaggaagatggggttcctttcaaagtgcagcgctgtgcagtggnnnnnnnnnnnnnnnnnnnnnnnnnnnnnnnnnnnnnnnnnnnnnnnnnnnnnnnnnnnnnnnnnnnnnnnnnnnnnnnnnnnnnnnnnnnnnnnnnnnnnnnnnnnnnnnnnnnnnnnnnnnnnnnnnnnnnnnnnnnnnnnnnnnnnnnnnnnnnnnnnnnnnnnnnnnnnnnnnnnnnnnnnnnnnnnnnnnnnnnnnnnnnnnnnnnnnnnnnnnnnnnnnnnnnnnnnnnnnnnnnnnnnnnnnnnnnnnnnnnnnnnnnnnnnnnnnnnnnnnnnnnnnnnnnnnnnnnnnnnnnnnnnnnnnnnnnnnnnnnnnnnnnnnnnnnnnnnnnnnnnnnnnnnnnnnnnnnnnnnnnnnnnnnnnnnnnnnnnnnnnnnnnnnnnnnnnnnnnnnnnnnnnnnnnnnnnnnnnnnnnnnnnnnnnnnnnnnnnnnnnnnnnnnnnnnnnnnnnnnnnnnnnnnnnnnnnnnnnnnnnnnnnnnnnnnnnnnnnnnnnnnnnnnnnnnnnnnnnnnnnnnnnnnnnnnnnnnnnnnnnnnnnnnnnnnnnnnnnnnnnnnnnnnnnnnnnnnnnnnnnnnnnnnnnnnnnnnnnnnnnnnnnnnnnnnnnnnnnnnnnnnnnnnnnnnnnnnnnnnnnnnnnnnnnnnnnnnnnnnnnnnnnnnnnnnnnnnnnnnnnnnnnnnnnnnnnnnnnnnnnnnnnnnnnnnnnnnnnnnnnnnnnnnnnnnnnnnnnnnnnnnnnnnnnnnnnnnnnnnnnnnnnnnnnnnnnnnnnngaaacacatgctgaaagaggggaagggccggatgctgcaggccatcagtccaaagcagagccccagcagcagccccactcgcgagcgctccccctccccctcttttcgatggcccttctctggcaagacttccccaccttgttccccagcaaatctccccaggcacaaggctgcagcctatgatatcagtgaggatgaagaagactaannnnnnnnnnnnnnnnnnnnnnnnnnnnnnnngtcccatgaccttcgaagctctctgttgaattccagactgtgaccccaacactaaacctaaggacagctacaaaggaaagacaactggggcaagaggac

SEQ ID NO: 35828 - DNA, 881 bp, Macaca Mulatta
  misc_feature (1)...(881): n = A,T,C or G
agattatttttacaagtagccataacatttgcactttattaatgcctgtatataaatatgaatagctatgnnnnnnnnnnnnnnnnnnnnnnctatatatgtctatatctctctctatatagccataccttgaaaagagacaaggaaaaagatcaagtattcccaggaaattggttttattggagagctccagaaccaagtagagaaggaagggacccatgacagcattagcatttgacaatcacacatgcagtggttctccgactgtgtaacagggaactttgcatgaggcaagaggctgcacgtctcacagccagctatgaccacattgcagttgcttttgcaaaataatcattccctgcctagcagttctcttctggccatggaactaagtacagtggcactgtttgggaaccagtgttcccggggttcctgtgtgcccttgtttctcctggacttttcatttaagctgcaagcagcacatctgcgggggctagtttagaaatttccctcaacctagtttagaaactctaccctgtctttactaccttgaatgttttgagccccactttttaccctcatgagttgcacaaaaatcagaacagatttccccatccgtgcgattgccccgccatctactaatgaaaagttgttcttttttttttcatctttcccctgcacttacgttactattatctgctcccagccttcatccttttctaaaaaggagcaaatccccactctacgctttatcatgtttactttttcattacacttgacttggttctctagttttctatacaaacaccaatgggttccatctttctgggctcctgattgctcaaggcacaggtttggccctaatgaaggggaatttcaac

SEQ ID NO: 35829 - DNA, 2518 bp, Macaca Mulatta
  misc_feature (1)...(2518): n = A,T,C or G
gtggcagcgagaccccgccttctcgggtctgcggagggtcgggggcgtagacgtgtccttcgtgaaaggggacagtgtccgcgcttgtgcctccctggtggtgctcagctaccctgagctcgaggtnnnnnnnnnnnnnnnnnnnnnnnnnnnnnnnnnnnnnnnnnnnnnnnnnnnnnnnnnnnnnnnnnnnnnnnnnnnnnnnnnnnnnnnnnnnnnnnnnnnnnnnnnnnnnnnnnnnnnnnnnnnnnnnnnnnnnnnnnnnnnnnnnnnnnnnnnnnnnnnnnnnnnnnnnnnnnnnnnnnnntttggggtggcctgccaccttggcgtccttacagacctgccttgcgttggggtggccaagaaacttctgcaggtggatgggctggagaacaacgccctgcacaaggagaagnnnnnnnnnnnnnnnnnnnnnnnnnnnnnnnnncctctgctgggagactctgggactgtcctgggaatggnggccctgaggagccacgaccgcagcaccaggcccctctacatctccgtgggccacaagatgagcctggaggcagctgtgcgcctgacttgctgctgctgcaggttccggatcccagagcccgtgcgccaggnnnnnnnnnnnnnnnnnnnnnnnnnnnnnnnnnnnnnnnnnnnnnnnnnnnnnnnnnnnnnnnnnnnnnnnnnnnnnnnnnnnnnnnnnnnnnnnnnnnnnnnnnnnnnnnnnnnnnnnnnnnnnnnnnnnnnnnnnnnnnnnnnnnnnnnnnnnnnnnnnnnnnnnnnnnnnnnnnnnnnnnnnnnnnnnnnnnnnnnnnnnnnnnnnnnnnnnnnnnnnnnnnnnnnnnnnnnnnnnnnnnnnnnnnnnnnnnnnnnnnnnnnnnnnnnnnnnnnnnnnnnnnnnnnnnnnnnnnnnnnnnnnnnnnnnnnnnnnnnnnnnnnnnnnnnnnnnnnnnnnnnnnnnnnnnnnnnnnnnnnnnnnnnnnnnnnnnnnnnnnnnnnnnnnnnnnnnnnnnnnnnnnnnnnnnnnnnnnnnnnnnnnnnnnnnnnnnnnnnnnnnnnnnnnnnnnnnnnnnnnnnnnnnnnnnnnnnnnnnnnnnnnnnnnnnnnnnnnnnnnnnnnnnnnnnnnnnnnnnnnnnnnnnnnnnnnnnnnnnnnnnnnnnnnnnnnnnnnnnnnnnnnnnnnnnnnnnnnnnnnnnnnnnnnnnnnnnnnnnnnnnnnnnnnnnnnnnnnnnnnnnnnnnnnnnnnnnnnnnnnnnnnnnnnnnnnnnnnnnnnnnnnnnnnnnnnnnnnnnnnnnnnnnnnnnnnnnnnnnnnnnnnnnnnnnnnnnnnnnnnnnnnnnnnnnnnnnnnnnnnnnnnnnnnnnnnnnnnnnnnnnnnnnnnnnnnnnnnnnnnnnnnnnnnnnnnnnnnnnnnnnnnnnnnnnnnnnnnnnnnnnnnnnnnnnnnnnnnnnnnnnnnnnnnnnnnnnnnnnnnnnnnnnnnnnnnnnnnnnnnnnnnnnnnnnnnnnnnnnnnnnnnnnnnnnnnnnnnnnnnnnnnnnnnnnnnnnnnnnnnnnnnnnnnnnnnnnnnnnnnnnnnnnnnnnnntttttccatttcatccatgttatctaatctgttggcatactgttgttcacgggattttcttgatgtgtgtgaggtctctgagaacgtccccgacttcactcctgcttttagtcactggcatcttcttttagcttgggccgtctggctgtgcatggttttgggggagtcctccttgaccatgcagatgctgagcagtgacctggctgggaaaggggaccgggagtgcagggcacctgctgaggactcacctaggcccaagattcagagagtcagggctccaaccacatccgcctgcatgcctttcccaggctctccccacacagacagccagcaccgcctccccaaagactgggcagttcctgaccagcaccccaccaagtcctcagtaaggcctgtctttgggggagcagggtctcaggaggatggcagaggtggtgtggaactcacgtctggcagttcccggcctctcaggaagctttgccactggcttggggttaagtgggtgtggagctctgaaccctaaaggggtgagagttgaaatggaagcggcatctgtagtccatttggggtacaggtgcgtgccaggggtcctcagccccggctgatggccacatgaaccgtgtgaggagaggcagggcgtgtcagcagcaaccctaagtgtgtgctcatttccgtgggccctgactcggtgacactgcggctctccagagggacgctttgaaaacaaaacaggaaagaacacgtggccccgcgtcttttgcctgagtcactgtattccttaaaagatgaagggccctggtccttggctcttcctgcacgtgagaaaatgttggccgaggttagcgattatgcttctgtaatctgtaaccagaagtgctcttacacccaagcctttggtgtgattctgctgtcatgtaacttcgga

SEQ ID NO: 35830 - DNA, 489 bp, Macaca Mulatta
  misc_feature (1)...(489): n = A,T,C or G
aggcaagtaaagcttgagatggatcagtacaaagaagagctgtctaaaatggaaaaggaaataatgcacctcaaacgagatggagaaaataaagcaatgcacctctctcaattagatatgatcttagatcagacaaagacagagctagaaaagaaaacaaatgctgngtaaaggagttagaaaagttacagcacagtactgaaactgaactaacagaagccttgcaaaaacgggaagcacttgagactgaactacaaaatgctcatggagaattaaaaagtactttaagacaactccaggaattgagagatgtactacagaaggctcagttatcattagaggaaaaatacactactataaaggatctcacagctgaacttagntagagaatgcaagatggagattgaagacaaaaagcaggagctccttgaaatggatcaggcacttaaggagagaaattgggaactaaagcaaagagcagctcaggtt

SEQ ID NO: 35831 - DNA, 85 bp, Macaca Mulatta
  misc_feature (1)...(85): n = A,T,C or G
ncaggacagagcatggctcgcctacagactgtgttcctgggtgtcctcatcctccttgctgtgacgcttcaagcaactgaggcag

SEQ ID NO: 35832 - DNA, 109 bp, Macaca Mulatta
agttgagcatcatgaaagatgagccagaagaggctgagttaattttgcatgacgctcttcgcctcgcctatcagactgataacaagaaggccatcacttacacttatga

SEQ ID NO: 35833 - DNA, 239 bp, Macaca Mulatta
  misc_feature (1)...(239): n = A,T,C or G
cccctccatncgggctgaggtcatagcaacatcttcaaacatgtacaaaatcgattggctttaaacaccctccctccaaattatccccaattatgcccacacataaaaaatcaaaactttaaactaacccccttcccccccaccacaacaaccctcttaaaaataattggctttttagaaacaccagaaaaactcagaaattggcnnnnnnnnnnnnnnnnnnnnnnnnnnnnnnnntt

SEQ ID NO: 35834 - DNA, 1299 bp, Macaca Mulatta
  misc_feature (1)...(1299): n = A,T,C or G
tgggactggagacggagaaggcggacgtgcagctcttcatggacgacgactcctacagccaccacagcggcctcgagtatgccgaccgccgagaagttcgcggactcggccccggaacggggatccccaccggctcaactcnnnnnnnnnagctgggcttcgaggatgtgatcgcagagccggtgactacgcactcctttgacaaagtgtggatctgcagccatgccctctttgaaatcagcaaatacgtaatgtacaagttcctgacggtgttcctggccattcccctggccttcattgcgggaattctctttgccaccctcagctgtctgcacatctgnnnnnnnnnnnnnnnnnnnnnnnnnnnnnnnnnnnnnnnnnnnnnnnnnnnnnnnnnnnnnnnnnnnnnnnnnnnnnnnnnnnnnnnnnnnnnnnnnnnnnnnnnnnnnnnnnnnnnnnnnnnnnnnnnnnnnnnnnnnnnnnnnnnnnnnnnnnnnnnnnnnnnnnnnnnnnnnnnnnnnnnnnnnnnnnnnnnnnnnnnnnnnnnnnnnnnnnnnnnnnnnnnnnnnnnnnnnnnnnnnnnnnnnnnnnnnnnnnnnnnnnnnnnnnnnnnnnnnnnnnnnnnnnnnnnnnnnnnnnnnnnnnnnnnnnnnnnnnnnnnnnnnnnnnnnnnnnnnnnnnnnnnnnnnnnnnnnnnnnnnnnnnnnnnnnnnnnnnnnnnnnnnnnnnnnnnnnnnnnnnnnnnnnnnnnnnnnnnnnnnnnnnnnnnnnnnnnnnnnnnnnnnnnnnnnnnnnnnnnnnnnnnnnnnnnnnnnnnnnnnnnnnnnnnnnnnnnnnnnnnnnnnnnnnnnnnnnnnnnnnnnnnnnnnnnnnnnnnnnnnnnnnnnnnnnnnnnnnnnnnnnnnnnnnnnnnnnnnnnnnnnnnnnnnnnnnnnnnnnnnnnnnnnnnnnnnnnnnnnnnnnnnnnnnnnnnnnnnnnnnnnnnnnnnnnnnnnnnnnnnnnnnnnnnnnnnnnnnnnnnnnnnnnnnnnnnnnnnnnnnnnnnnnnnnnnnnnnnnnnnnnnnnnnnnnnnnnnnnnnnnnnnnnnnnnnnnnnnnnnnnnnnnnnnnnnnnnnnnnnnnnnnnnnnnnnnnnnnnnnnnnnnnnnnnnnnnnnnnnnnnnnnnnnnnnnnnnnnnnnnnnnnnnnnnnnnnaataagtaaatgtagctcccacaaggtaaacttcattggtaagattgcactgttttgattatgtaaacatttatacatcttctttgaaaataaaatataaaagag

SEQ ID NO: 35835 - DNA, 788 bp, Macaca Mulatta
gggattccattgccaactcgtccccattggtttcttctttttggtactacggaagaggaaatccaggaaatctgcatagaaacgcttaggctttataccagaaaaaagccaaactatgaattactggaaaaagaagtagaaaaaagaaaagtagccttacaagaagccaaattaaaagcaaagggattgaatcctgatggaactccagccctttcaaccctcggtggattttctccagcctccaagccatcatcgccaagagaagtaaaagctgaagagaaatcaccaatctccattaatgtgaagacagtaaaaaaagaacctgaggatagacaacaggcttccaaaagcccttacaatggtgtaagaaaagacagcaagagaagtagaaatagcagaagtgcaagtcgatcaaggtcaagaacacgatcacgttctagatcacatactccaagaagacactataataataggcggagtcgatctggaacatacagctcgagatcaagaagcaggtcccgcagtcacagtgaaagccctcgaagacatcataatcatggttctcctcaccttaaggccaagcataccagagatgatttaaaaagttcaaacagacatggtcataaaaggaaaaaatctcgttctcgatctcagagcaagtctcgggatcactcagatgcagccaagaagcacaggcatgaaaggggacatcatagagacaagcgtgaacgatctcgctcctttgagaggtcccataaagcaagcaccatggtggcagtcgctcagga

SEQ ID NO: 35836 - DNA, 163 bp, Macaca Mulatta
gatcataaaggaatttatcaataaaagtctgacggagaaggcaaatatccctccctctgaggtgctgctcacgtctctctggtccttgtctgtggccatattctccgtcgggggtatgatcggctccttttctgtcggactcttcgtcaaccgctttggcagg

SEQ ID NO: 35837 - DNA, 526 bp, Macaca Mulatta
tgtatagagtctcaaacacggatcacaaataaactgctttgttgtaacacagagtactgcctggttcctgatgcagtcactgattcttagttgattgatatgtatttgccccagggcactttaatttgggctgtagttattttttttaatacaatagagacttttcatttaaactttaactttgtaaatattgaagtgtgtaataaagccaataaaatatgggtttgaatattgttttagcttattatttttgatatgttttggtatcaaattacaaggaattgaaaactaataacttagccctagaagcccattcacttgtaagcaaactgctaaaacaaagcaaaggtgattgttagtttgagccagtctacttactttgtaagccctttgtcctcctgttgtacaagggcatccccatgataaaggttccattttgttattcgagcatcgcttattaaaatgatggcactacccagagatggggaaggagaatgtgattatcctagtttatgaatttccaagt

SEQ ID NO: 35838 - DNA, 6178 bp, Macaca Mulatta
  misc_feature (1)...(6178): n = A,T,C or G
ttgcaacttcagcaacttcaaatattgaatatgcccacattcctcatctcagcccagctgtgattcctactctgcaaaatgaatcgtttttattatccccaaacaatgggaatctggaagcgcttacaggatctggtattccacacattaatgggaaacctgcttgtgatgaatttgatcagcttatcaaaaatatggcccaggnnnnnnnnnnnnnnnnnnnnnnnnnnnnnnnnnnnnnnnnnnnnnnnnnnnnnnnnnnnnnnnnnnnnnnnnnnnnnnnnnnnnnnnnnnnnnnnnnnnnnnnnnnnnnnnnnnnnnnnnnnnnnnnnnnnnnnntagagatggaagattgaaagaaactgatcaaattcttgctatcaatggacaggctcttgatcagacaattacacatcagcaggctgtcagcatcctgcagaaagccaaggatactgtccagctagttatcgccagaggctctttgcctcagctcgtcagccccatagtttcccgttctccatctgcagccagcaccatttcagctcactctaatccnnnnnnnnnnnnnnnnnnnnnnnnnnnnnnnnnnnnnnnnnnnnnnnnnnnnnnnnnnnnnnnnnnnnnnnnnnnnnnnnnnnnnnnnnnnnnnnnnnnnnnnnnnnnnnnnnnnnnnnnnnnnnnnnnnnnnnnnnnnnnnnnnnnnnnnnnnnnnnnnnnnnnnnnnnnnnnnnnnnnnnnnnnnnnnnnnnnnnnnnnnnnnnnnnnnnnnnnnnnnnnnnnnnnnnnnnnnnnnnnnnnnnnnnnnnnnnnnnnnnnnnnnnnnnnnnnnnnnnnnnnnnnnnnnnnnnnnnnnnnnnnnnnnnnnnnnnnnnnnnnnnnnnnnnnnnnnnnnnnnnnnnnnnnnnnnnnnnnnnnnnnnnnnnnnnnnnnnnnnnnnnnnnnnnnnnnnnnnnnnnnnnnnnnnnnnnnnnnnnnnnnnnnnnnnnnnnnnnnnnnnnnnnnnnnnnnnnnnnnnnnnnnnnnnnnnnnnnnnnnnnnnnnnnnnnnnnnnnnnnnnnnnnnnnnnnnnnnnnnnnnnnnnnnnnnnnnnnnnnnnnnnnnnnnnnnnnnnnnnnnnnnnnnnnnnnnnnnnnnnnnnnnnnnnnnnnnnnnnnnnnnnnnnnnnnnnnnnnnnnnnnnnnnnnnnnnnnnnnnnnnnnnnnnnnnnnnnnnnnnnnnnnnnnnnnnnnnnnnnnnnnnnnnnnnnnnnnnnnnnnnnnnnnnnnnnnnnnnnnnnnnnnnagaaaattatgaaaaagatgaggattctttatcttcgaggagaaacaccaacatattaccaattgaagaagaaggnnnnnnnnnnnnnnnnnnnnnnnnnnnnnnnnnnnnnnnnnnnnnnnnnnnnnnnnnnnnnnnnnnnnnnnnnnnnnnnnnnnnnnnnnnnnnnnnnnnnnnnnnnnnnnnnnnnnnnnnnnnnnnnnnnnnnnnnnnnnnnnnnnnnnnnnnnnnnnnnnnnnnnnnnnnnnnnnnnnnnnnnnnnnnnnnnnnnnnnnnnnnnnnnnnnnnnnnnnnnnnnnnnnnnnnnnnnnnnnnnnnnnnnnnnnnnnnnnnnnnnnnnnnnnnnnnnnnnnnnnnnnnnnnnnnnnnnnnnnnnnnnnnnnnnnnnnnnnnnnnnnnnnnnnnnnnnnnnnnnnnnnnnnnnnnnnnnnnnnnnnnnnnnnnnnnnnnnnnnnnnnnnnnnnnnnnnnnnnnnnnnnnnnnnnnnnnnnnnnnnnnnnnnnnnnnnnnnnnnnnnnnnnnnnnnnnnnnnnnnnnnnnnnnnnnnnnnnnnnnnnnnnnnnnnnnnnnnnnnnnnnnnnnnnnnnnnnnnnnnnnnnnnnnnnnnnnnnnnnnnnnnnnnnnnnnnnnnnnnnnnnnnnnnnnnnnnnnnnnnnnnnnnnnnnnnnnnnnnnnnnnnnnnnnnnnnnnnnnnnnnnnnnnnnnnnnnnnnnnnnnnnnnnnnnnnnnnnnnnnnnnnnnnnnnnnnnnnnnnnnnnnnnnnnnnnnnnnnnnnnnnnnnnnnnnnnnnnnnnnnnnnnnnnnnnnnnnnnnnnnnnnnnnnnnnnnnnnnnnnnnnnnnnnnnnnnnnnnnnnnnnnnnnnnnnnnnnnnnnnnnnnnnnnnnnnnnnnnnnnnnnnnnnnnnnnnnnnnnnnnnnnnnnnnnnnnnnnnnnnnnnnnnnnnnnnnnnnnnnnnnnnnnnnnnnnnnnnnnnnnnnnnnnnnnnnnnnnnnnnnnnnnnnnnnnnnnnnnnnnnnnnnnnnnnnnnnnnnnnnnnnnnnnnnnnnnnnnnnnnnnnnnnnnnnnnnnnnnnnnnnnnnnnnnnnnnnnnnnnnnnnnnnnnnnnnnnnnnnnnnnnnnnnnnnnnnnnnnnnnnnnnnnnnnnnnnnnnnnnnnnnnnnnnnnnnnnnnnnnnnnnnnnnnnnnnnnnnnnnnnnnnnnnnnnnnnnnnnnnnnnnnnnnnnnnnnnnnnnnnnnnnnnnnnnnnnnnnnnnnnnnnnnnnnnnnnnnnnnnnnnnnnnnnnnnnnnnnnnnnnnnnnnnnnnnnnnnnnnnnnnnnnnnnnnnnnnnnnnnnnnnnnnnnnnnnnnnnnnnnnnnnnnnnnnnnnnnnnnnnnnnnnnnnnnnnnnnnnnnnnnnnnnnnnnnnnnnnnnnnnnnnnnnnnnnnnnnnnnnnnnnnnnnnnnnnnnnnnnnnnnnnnnnnnnnnnnnnnnnnnnnnnnnnnnnnnnnnnnnnnnnnnnnnnnnnnnnnnnnnnnnnnnnnnnnnnnnnnnnnnnnnnnnnnnnnnnnnnnnnnnnnnnnnnnnnnnnnnnnnnnnnnnnnnnnnnnnnnnnnnnnnnnnnnnnnnnnnnnnnnnnnnnnnnnnnnnnnnnnnnnnnnnnnnnnnnnnnnnnnnnnnnnnnnnnnnnnnnnnnnnnnnnnnnnnnnnnnnnnnnnnnnnnnnnnnnnnnnnnnnnnnnnnnnnnnnnnnnnnnnnnnnnnnnnnnnnnnnnnnnnnnnnnnnnnnnnnnnnnnnnnnnnnnnnnnnnnnnnnnnnnnnnnnnnnnnnnnnnnnnnnnnnnnnnnnnnnnnnnnnnnnnnnnnnnnnnnnnnnnnnnnnnnnnnnnnnnnnnnnnnnnnnnnnnnnnnnnnnnnnnnnnnnnnnnnnnnnnnnnnnnnnnnnnnnnnnnnnnnnnnnnnnnnnnnnnnnnnnnnnnnnnnnnnnnnnnnnnnnnnnnnggtggaactctggagagaaccaagcaaatccttaggcatcagcattgttggtggacgagggatggggagtcgtctaagcaacggagaagtgatgaggggcattttcatcaaacatgttctggaagatagtccagctggcaaaaatggaaccttgaaacctggagatagaatcgtagaggtnnnnnnnnnnnnnnnnnnnnnnnnnnnnnnnnnnnnnnnnnnnnnnnnnnnnnnnnnnnnnnnnnnnnnnnnnnnnnnnnnnnnnnnnnnnnnnnnnnnnnnnnnnnnaaatcccctttgccttccttgccgcacaacctttaccctaagtacaacttcagcagcactaacccatttgctgactctctacaaatcaacgccgacaaggnnnnnnnnnnnnnnnnnnnnnnnnnnnnnnnnnnnnnnnnnnnnnnnnnnnnnnnnnnnnnnnnnnnnnnnnnnnnnnnnnnnnnnnnnnnnnnnnnnnnnnnnnnnnnnnnnnnnnnnnnnnnnnnnnnnnnnnnnnnnnnnnnnnnnnnnnnnnnnnnnnnnnnnnnnnnnnnnnnnnnnnnnnnnnnnnnnnnnnnnnnnnnnnnnnnnnnnnnnnnnnnnnnnnnnnnnnnnnnnnnnnnnnnnnnnnnnnnnnnnnnnnnnnnnnnnnnnnnnnnnnnnnnnnnnnnnnnnnnnnnnnnnnnnnnnnnnnnnnnnnnnnnnnnnnnnnnnnnnnnnnnnnnnnnnnnnnnnnnnnnnnnnnnnnnnnnnnnnnnnnnnnnnnnnnnnnnnnnnnnnnnnnnnnnnnnnnnnnnnnnnnnnnnnnnnnnnnnnnnnnnnnnnnnnnnnnnnnnnnnnnnnnnnnnnnnnnnnnnnnnnnnnnnnnnnnnnnnnnnnnnnnnnnnnnnnnnnnnnnnnnnnnnnnnnnnnnnnnnnnagacagagccaactgttactacttctgatgcagctgtggacctcagttcatttaaaaatgtgcaacatctggagcttcccaagnnnnnnnnnnnnnnnnnnnnnnnnnnnnnnnnnnnnnnnnnnnnnnnnnnnnnnnnnnnnnnnnnnnnnnnnnnnnnnnnnnnnnnnnnnnnnnnnnnnnnnnnnnnnnnnnnnnnnnnnnnnnnnnnnnnnnnnnnnnnnnnnnnnnnnnnnnnnnnnnnnnnnnnnnnnnnnnnnnnnnnnnnnnnnnnnnnnnnnnnnnnnnnnnnnnnnnnnnnnnnnnnnnnnnnnnnnnnnnnnnnnnnnnnnnnnnnnnnnnnnnnnnnnnnnnnnnnnnnnnnnnnnnnnnnnnnnnnnnnnnnnnnnnnnnnnnnnnnnnnnnnnnnnnnnnnnnnnnnnnnnnnnnnnnnnnnnnnnnnnnnnnnnnnnnnnnnnnnnnnnnnnnnnnnnnnnnnnnnnnnnnnnnnnnnnnnnnnnnnnnnnnnnnnnnnnnnnnnnnnnnnnnnnnnnnnnnnnnnnnnnnnnnnnnnnnnnnnnnnnnnnnnnnnnnnnnnnnnnnnnnnnnnnnnnnnnnnnnnnnnnnnnnnnnnnnnnnnnnnnnnnnnnnnnnnnnnnnnnnnnnnnnnnnnnaggtgaatggaattgacttgagaaaggccacacatgatgaagcaatcaatgtcctgagacagacgccacagagggtgcgcctgacactctacagagatgaggccccatacaaagaggaggaagtgtgtgacaccctcactattgagctgcagaagaagccgggaaaaggcctaggattaagtattgttggtaaaanagaaacgatactggagtatttgtgtcagacattgtcaaaggaggaattgcagatgccgatggaagactgatgcagggagaccagatattaatggtgaatggggaagatgttcgtaatgccacccaggaagcggttgccgctttgctaaannnnnnnnnnnnnnnnnnnnnnnnnnnnnnnnnnnnnnnnnnnnnnnnnnnnnnnnnnnnnnnnnnnnnnnnnnnnnnnnnnnnnnnnnnnnnnnnnnnnnnnnnnnnnnnnnnnnnnnnnnnnnnnnnnnnnnnnnnnnnnnnnnnnnnnnnnnnnnnnnnnnnnnnnnnnnnnnnnnnnnnnnnnnnnnnnnnnnnnnnnnnnnnnnnnnnnnnnnnnnnnnnnnnnnnnnnnnnnnnnnnnnnnnnnnnnnnnnnnnnnnnnnnnnnnnnnnnnnnnnnnnnnnnnnnnnngttggggataggattgtcactatctgtggcacatccactgagggcatgactcacacccaagcagttaacctactgaaaaatgcatctggctccattgaaatgcaggnnnnnnnnnnnnnnnnnnnnnnnnnnnnnnnnnnnnnnnnnnnnnnnnnnnnnnnnnnnnnnnnnnnnnnnnnnnnnnnnnnnnnnnnnnnnnnnnnnnnnnnnnnnnnnnnnnnnnnnnnnnnnnnnnnnnnnnnnnnnnnnnnnnnnnnnnnnnnnnnnnnnnnnnnnnnnnnnnnnnnnnnnnnnnnnnnnnnnnnnnnnnnnnnnnnnnnnnnnnnnnnnnnnnnnnnngggagcagcctctgaagatggacgtctgaaaaggggcgatcagatcattgctgtcaatgggcagagtctagaaggagtcacccatgaagaagctgttgccatccttaaacggacaaaaggcactgtcactttgatggttctgtcttgaattggctgccagaattgagccaaccccacccctagctcacctcctactgtgaggagaatggactggtcctgacttcttttatgctgtgttcagcgggtcttcaaaactataggggggaaataacacttaagtgtgtttttctcatatcgaaatgctttccttactgacaacctcacatcatttttcttttcttcttgcattttgcgaactt

SEQ ID NO: 35839 - DNA, 323 bp, Macaca Mulatta
tgccagaccccagtccaccatgatccatccgggtcacatcctcttcctgcttttgctcccagtggctgcagctcagacgaccccaggctcctgttccggatgtgggtccctctctctgccgctcctggcaggcctcgtggcagcggatgcggtggcgtcgccgctcatcgtgggggcggtgttcctgtgcgcacgcccacgccgcagccccgcccaaggagatggcaaagtctacatcaacatgccgggcaggggctgaccctcctgcaccttggacctttgacttccgaccctctcatcctggatggtgtgtggtggcaatc

SEQ ID NO: 35840 - DNA, 2568 bp, Macaca Mulatta
  misc_feature (1)...(2568): n = A,T,C or G
cagtcccttccagtgtgagtggagtaacggtgaacaattccggtcgtaatgactacctcagcgtttcctggctgccggcgcccggagatgtggataactatgaggtgacgttgtctcatgacggcagggtggttcagtcccttgtcattgccaagtctgtcagagaatgttccttcagctccctcaccccaggccgcctttacactgtgaccataactacaaggagtggcaagtatgaaaatcactcattcagccaagagcggacagnnnnnnnnnnnnnnnnnnnnnnnnnnnnnnnnnnnnnnnnnnnnnnnnnnnnnnnnnnnnnnnnnnnnnnnnnnnnnnnnnnnnnnnnnnnnnnnnnnnnnnnnnnnnnnnnnnnnnnnnnnnnnnnnnnnnnnnnnnnnnnnnnnnnnnnnnnnnnnnnnnnnnnnnnnnnnnnnnnnnnnnnnnnnnnnnnnnnnnnnnnnnnnnnnnnnnnnnnnnnnnnnnnnnnnnnnnnnnnnnnnnnnnnnnnnnnnnnnnnnnnnnnnnnnnnnnnnnnnnnnnnnnnnnnnnnnnnnnnnnnnnnnnnnnnnnnnnnnnnnnnnnnnnnnnnnnnnnnnnnnnnnnnnnnnnnnnnnnnnnnnnnnnnnnnnnnnnnnnnnnnnnnnnnnnnnnnnnnnnnnnnnnnnnnnnnnnnnnnnnnnnnnnnnnnnnnnnnnnnnnnnnnnnnnnnnnnnnnnnnnnnnnnnnnnnnnnnnnnnnnnnnnnnnnnnnnnnnnnnnnnnnnnnnnnnnnnnnnnnnnnnnnnnnnnnnnnnnnnnnnnnnnnnnnnnnnnnnnnnnnnnnnnnnnnnnnnnnnnnnnnnnnnnnnnnnnnnnnnnnnnnnnnnnnnnnnnnnnnnnnnnnnnnnnnnnnnnnnnnnnnnnnnnnnnnnnnnnnnnnnnnnnnnnnnnnnnnnnnnnnnnnnnnnnnnnnnnnnnnnnnnnnnnnnnnnnnnnnnnnnnnnnnnnnnnnnnnnnnnnnnnnnnnnnnnnnnnnnnnnnnnnnnnnnnnnnnnnnnnnnnnnnnnnnnnnnnnnnnnnnnnnnnnnnnnnnnnnnnnnnnnnnnnnnnnnnnnnnnnnnnnnnnnnnnnnnnnnnnnnnnnnnnnnnnnnnnnnnnnnnnnnnnnnnnnnnnnnnnnnnnnnnnnnnnnnnnnnnnnnnnnnnnnnnnnnnnnnnnnnnnnnnnnnnnnnnnnnnnnnnnnnnnnnnnnnnnnnnnnnnnnnnnnnnnnnnnnnnnnnnnnnnnnnnnnnnnnnnnnnnnnnnnnnnnnnnnnnnnnnnnnnnnnnnnnnnnnnnnnnnnnnnnnnnnnnnnnnnnnnnnnnnnnnnnnnnnnnnnnnnnnnnnnnnnnnnnnnnnnnnnnnnnnnnnnnnnnnnnnnnnnnnnnnnnnnnnnnnnnnnnnnnnnnnnnnnnnnnnnnnnnnnnnnnnnnnnnnnnnnnnnnnnnnnnnnnnnnnnnnnnnnnnnnnnnnnnnnnnnnnnnnnnnnnnnnnnnnnnnnnnnnnnnnnnnnnnnnnnnnnnnnnnnnnnnnnnnnnnnnnnnnnnnnnnnnnnnnnnnnnnnnnnnnnnnnnnnnnnnnnnnnnnnnnnnnnnnnnnnnnnnnnnnnnnnnnnnnnnnnnnnnnnnnnnnnnnnnnnnnnnnnnnnnnnnnnnnnnnnnnnnnnnnnnnnnnnnnnnnnnnnnnnnnnnnnnnnnnnnnnnnnnnnnnnnnnnnnnnnnnnnnnnnnnnnnnnnnnnnnnnnnnnnnnnnnnnnnnnnnnnnnnnnnnnnnnnnnnnnnnnnnnnnnnnnnnnnnnnnnnnnnnnnnnnnnnnnnnnnnnnnnnnnnnnnnnnnnnnnnnnnnnnnnnnnnnnnnnnnnnnnnnnnnnnnnnnnnnnnnnnnnnnnnnnnnnnnnnnnnnnnnnnnnnnnnnnnnnnnnnnnnnnnnnnnnnnnnnnnnnnnnnnnnnnnnnnnnnnnnnnnnnnnnnnnnnnnnnnnnnnnnnnnnnnnnnnnnnnnnnnnnnnnnnnnnnnnnnnnnnnnnnnnnnnnnnnnnnnnnnnnnnnnnnnnnnnnnnnnnnnnnnnnnnnnnnnnnnnnnnnnnnnnnnnnnnnnnnnnnnnnnnnnnnnnnnnnnnnnnnnnnnnnnnnnnnnnnnnnnnnnnnnnnnnnnnnnnnnnnnnnnnnnnnnnnnnnnnnnnnnnnnnnnnnnnnnnnnnnnnnnnnnnnnnnnnnnnnnnnnnnnnnnnnnnnnnnnnnnnnnnnnnnnnnnnnnnnnnnnnnnnnnnnnnnnnnnnnnnnnnnnnnnnnnnnnnnnnnnnnnnnnnnnnnnnnnnnnnnnnnnnnnnnnnnnnnnnnnnnnnnnnnnnnnnnnnnnnnnnnnnnnnnnnnnnnnnnnnnnnnnnnnnnnnncccccctcctccacccccacacattcgtgtgaatgaaaaggatgtgctaattagcaaatcttccatcaactttactgtcaactgcagctggttcagcgacaccaatggagctgtgaaatacttcacagtggtggtgagagaggctgatgg

SEQ ID NO: 35841 - DNA, 25 bp, Macaca Mulatta
gaaagcatattaccttataagcaga

SEQ ID NO: 35842 - DNA, 25 bp, Macaca Mulatta
tatatttttccaaagtcattcactg

SEQ ID NO: 35843 - DNA, 25 bp, Macaca Mulatta
gtcattcactgatttgtatttttca

SEQ ID NO: 35844 - DNA, 25 bp, Macaca Mulatta
gtatttttcattgttccatgttcta

SEQ ID NO: 35845 - DNA, 25 bp, Macaca Mulatta
tcattgttccatgttctaactccat

SEQ ID NO: 35846 - DNA, 25 bp, Macaca Mulatta
catgttctaactccatggtggaaat

SEQ ID NO: 35847 - DNA, 25 bp, Macaca Mulatta
ggtggaaattccaagacatttttca

SEQ ID NO: 35848 - DNA, 25 bp, Macaca Mulatta
ttctagtcttagttcagtgttccta

SEQ ID NO: 35849 - DNA, 25 bp, Macaca Mulatta
accttccttaaattacagtgccttg

SEQ ID NO: 35850 - DNA, 25 bp, Macaca Mulatta
gaggaggcacttataattagagtca

SEQ ID NO: 35851 - DNA, 25 bp, Macaca Mulatta
gacttagaattactgtatctgcaaa

SEQ ID NO: 35852 - DNA, 25 bp, Macaca Mulatta
aaatgtacctatctgcttcactgtg

SEQ ID NO: 35853 - DNA, 25 bp, Macaca Mulatta
gtacctatctgcttcactgtgtata

SEQ ID NO: 35854 - DNA, 25 bp, Macaca Mulatta
aggacagttaggacagacctctgat

SEQ ID NO: 35855 - DNA, 25 bp, Macaca Mulatta
gctggaaatcactacataacaactt

SEQ ID NO: 35856 - DNA, 25 bp, Macaca Mulatta
acaacttttattaatgcctccaaat

SEQ ID NO: 35857 - DNA, 25 bp, Macaca Mulatta
atgtatcttttcagatccccaaagg

SEQ ID NO: 35858 - DNA, 25 bp, Macaca Mulatta
aaacatgccaacctattttccaact

SEQ ID NO: 35859 - DNA, 25 bp, Macaca Mulatta
ctattttccaactctccaaagctga

SEQ ID NO: 35860 - DNA, 25 bp, Macaca Mulatta
aatttgtcttttctggatgctcaag

SEQ ID NO: 35861 - DNA, 25 bp, Macaca Mulatta
gtactcagagttacaaacccacttt

SEQ ID NO: 35862 - DNA, 25 bp, Macaca Mulatta
gatgctgtatccctaataagtctaa

SEQ ID NO: 35863 - DNA, 25 bp, Macaca Mulatta
ttcaattcgattgcccaaatgaggg

SEQ ID NO: 35864 - DNA, 25 bp, Macaca Mulatta
gaacctggagatatattttctgagc

SEQ ID NO: 35865 - DNA, 25 bp, Macaca Mulatta
attttctgagctcaagattctgtaa

SEQ ID NO: 35866 - DNA, 25 bp, Macaca Mulatta
ggaaaagttagtcaaccctatcata

SEQ ID NO: 35867 - DNA, 25 bp, Macaca Mulatta
aactggagcaaagtgcactaaaaca

SEQ ID NO: 35868 - DNA, 25 bp, Macaca Mulatta
aagtgcactaaaacaatttcctgaa

SEQ ID NO: 35869 - DNA, 25 bp, Macaca Mulatta
gtgcactaaaacaatttcctgaact

SEQ ID NO: 35870 - DNA, 25 bp, Macaca Mulatta
taaaacaatttcctgaactcagctg

SEQ ID NO: 35871 - DNA, 25 bp, Macaca Mulatta
aacaatttcctgaactcagctgttg

SEQ ID NO: 35872 - DNA, 25 bp, Macaca Mulatta
aatttcctgaactcagctgttgtac

SEQ ID NO: 35873 - DNA, 25 bp, Macaca Mulatta
ttcctgaactcagctgttgtactat

SEQ ID NO: 35874 - DNA, 25 bp, Macaca Mulatta
tcctgaactcagctgttgtactatt

SEQ ID NO: 35875 - DNA, 25 bp, Macaca Mulatta
cctgaactcagctgttgtactattc

SEQ ID NO: 35876 - DNA, 25 bp, Macaca Mulatta
gaactcagctgttgtactattcacc

SEQ ID NO: 35877 - DNA, 25 bp, Macaca Mulatta
aactcagctgttgtactattcacct

SEQ ID NO: 35878 - DNA, 25 bp, Macaca Mulatta
ctcagctgttgtactattcaccttt

SEQ ID NO: 35879 - DNA, 25 bp, Macaca Mulatta
tcagctgttgtactattcacctttt

SEQ ID NO: 35880 - DNA, 25 bp, Macaca Mulatta
aatatcaacaattgcagtgcactca

SEQ ID NO: 35881 - DNA, 25 bp, Macaca Mulatta
cagtgcactcaaaatgttataaaat

SEQ ID NO: 35882 - DNA, 25 bp, Macaca Mulatta
gtagcacaaatcctaaagtgtatga

SEQ ID NO: 35883 - DNA, 25 bp, Macaca Mulatta
ctacataacatgtctaggttgagat

SEQ ID NO: 35884 - DNA, 25 bp, Macaca Mulatta
ggttgagatatttaatccctgatag

SEQ ID NO: 35885 - DNA, 25 bp, Macaca Mulatta
aatccctgatagagctatatttgac

SEQ ID NO: 35886 - DNA, 25 bp, Macaca Mulatta
atatttgactaaaatgtgacagcta

SEQ ID NO: 35887 - DNA, 25 bp, Macaca Mulatta
aatgtgacagctaaaaattgtttcc

SEQ ID NO: 35888 - DNA, 25 bp, Macaca Mulatta
ggaagtatagcactgttttatgttt

SEQ ID NO: 35889 - DNA, 25 bp, Macaca Mulatta
aaggtgttaaccatttgaactgcaa

SEQ ID NO: 35890 - DNA, 25 bp, Macaca Mulatta
atttgaactgcaatcccagcctatt

SEQ ID NO: 35891 - DNA, 25 bp, Macaca Mulatta
atcccagcctatttatctactttac

SEQ ID NO: 35892 - DNA, 25 bp, Macaca Mulatta
atctactttactataaccaatggaa

SEQ ID NO: 35893 - DNA, 25 bp, Macaca Mulatta
tgtttccctccctataagtacgaat

SEQ ID NO: 35894 - DNA, 25 bp, Macaca Mulatta
ccctccctataagtacgaatatgat

SEQ ID NO: 35895 - DNA, 25 bp, Macaca Mulatta
aaggatttaactctctacccatctg

SEQ ID NO: 35896 - DNA, 25 bp, Macaca Mulatta
ctacccatctgctcttacaaaagga

SEQ ID NO: 35897 - DNA, 25 bp, Macaca Mulatta
ccatctgctcttacaaaaggagaaa

SEQ ID NO: 35898 - DNA, 25 bp, Macaca Mulatta
tgttttttctctttagtattctatc

SEQ ID NO: 35899 - DNA, 25 bp, Macaca Mulatta
gtattctatcaccatttaaaacttc

SEQ ID NO: 35900 - DNA, 25 bp, Macaca Mulatta
aacttcaatatatgccttccactca

SEQ ID NO: 35901 - DNA, 25 bp, Macaca Mulatta
tcaatatatgccttccactcaggtt

SEQ ID NO: 35902 - DNA, 25 bp, Macaca Mulatta
atatgccttccactcaggttcctga

SEQ ID NO: 35903 - DNA, 25 bp, Macaca Mulatta
tcaggttcctgacacagcctacgtt

SEQ ID NO: 35904 - DNA, 25 bp, Macaca Mulatta
tgacacagcctacgttctcttttct

SEQ ID NO: 35905 - DNA, 25 bp, Macaca Mulatta
gcctacgttctcttttctgcttgta

SEQ ID NO: 35906 - DNA, 25 bp, Macaca Mulatta
atctgtctgtggttgtatgaaatga

SEQ ID NO: 35907 - DNA, 25 bp, Macaca Mulatta
agagtgcaaagacccacactcacgc

SEQ ID NO: 35908 - DNA, 25 bp, Macaca Mulatta
catacgcaccccttcaaactttatt

SEQ ID NO: 35909 - DNA, 25 bp, Macaca Mulatta
tacgcaccccttcaaactttattcg

SEQ ID NO: 35910 - DNA, 25 bp, Macaca Mulatta
actttattcggaaccttcctctgct

SEQ ID NO: 35911 - DNA, 25 bp, Macaca Mulatta
tattcggaaccttcctctgctgttc

SEQ ID NO: 35912 - DNA, 25 bp, Macaca Mulatta
gggccgccattgtaaaagcttgggc

SEQ ID NO: 35913 - DNA, 25 bp, Macaca Mulatta
gccattgtaaaagcttgggctccct

SEQ ID NO: 35914 - DNA, 25 bp, Macaca Mulatta
attgtaaaagcttgggctccctcta

SEQ ID NO: 35915 - DNA, 25 bp, Macaca Mulatta
ttgtaaaagcttgggctccctctaa

SEQ ID NO: 35916 - DNA, 25 bp, Macaca Mulatta
aaaagcttgggctccctctaatagc

SEQ ID NO: 35917 - DNA, 25 bp, Macaca Mulatta
agcttgggctccctctaatagcttg

SEQ ID NO: 35918 - DNA, 25 bp, Macaca Mulatta
ttgggctccctctaatagcttgccc

SEQ ID NO: 35919 - DNA, 25 bp, Macaca Mulatta
atctgtctgtggttgtatgaaatga

SEQ ID NO: 35920 - DNA, 25 bp, Macaca Mulatta
agagtgcaaagacccacactcacgc

SEQ ID NO: 35921 - DNA, 25 bp, Macaca Mulatta
catacgcaccccttcaaactttatt

SEQ ID NO: 35922 - DNA, 25 bp, Macaca Mulatta
tacgcaccccttcaaactttattcg

SEQ ID NO: 35923 - DNA, 25 bp, Macaca Mulatta
actttattcggaaccttcctctgct

SEQ ID NO: 35924 - DNA, 25 bp, Macaca Mulatta
ttattcggaaccttcctctgctgtt

SEQ ID NO: 35925 - DNA, 25 bp, Macaca Mulatta
cggaaccttcctctgctgttctggg

SEQ ID NO: 35926 - DNA, 25 bp, Macaca Mulatta
gggccgccattgtaaaagcttgggc

SEQ ID NO: 35927 - DNA, 25 bp, Macaca Mulatta
gccattgtaaaagcttgggctccct

SEQ ID NO: 35928 - DNA, 25 bp, Macaca Mulatta
attgtaaaagcttgggctccctcta

SEQ ID NO: 35929 - DNA, 25 bp, Macaca Mulatta
aaaagcttgggctccctctaatagc

SEQ ID NO: 35930 - DNA, 25 bp, Macaca Mulatta
agcttgggctccctctaatagcttg

SEQ ID NO: 35931 - DNA, 25 bp, Macaca Mulatta
ttgggctccctctaatagcttgccc

SEQ ID NO: 35932 - DNA, 25 bp, Macaca Mulatta
acgctgggagagtcgttctggcctt

SEQ ID NO: 35933 - DNA, 25 bp, Macaca Mulatta
tagtaattccggaaggtctccatta

SEQ ID NO: 35934 - DNA, 25 bp, Macaca Mulatta
tccattaaaactccactcctggtgt

SEQ ID NO: 35935 - DNA, 25 bp, Macaca Mulatta
cactcctggtgtagtcactgcctaa

SEQ ID NO: 35936 - DNA, 25 bp, Macaca Mulatta
tagtcactgcctaaccctagtttat

SEQ ID NO: 35937 - DNA, 25 bp, Macaca Mulatta
ctagtttataaaatggtgacccttg

SEQ ID NO: 35938 - DNA, 25 bp, Macaca Mulatta
gtgacccttgtgactaaaaccattg

SEQ ID NO: 35939 - DNA, 25 bp, Macaca Mulatta
gactaaaaccattgtaaagcccatg

SEQ ID NO: 35940 - DNA, 25 bp, Macaca Mulatta
aaagtcgtataatttggaggctgaa

SEQ ID NO: 35941 - DNA, 25 bp, Macaca Mulatta
ggaggctgaaacactattgccctat

SEQ ID NO: 35942 - DNA, 25 bp, Macaca Mulatta
agcttcccccgtgtaatatgtatta

SEQ ID NO: 35943 - DNA, 25 bp, Macaca Mulatta
ggtcttgcaaggcattcaccctccg

SEQ ID NO: 35944 - DNA, 25 bp, Macaca Mulatta
tcaccctccggcgaaagcaatatga

SEQ ID NO: 35945 - DNA, 25 bp, Macaca Mulatta
ctcactttaatcctctatccagaca

SEQ ID NO: 35946 - DNA, 25 bp, Macaca Mulatta
aatcctctatccagacaacacggtg

SEQ ID NO: 35947 - DNA, 25 bp, Macaca Mulatta
agacctgggcaatgtgactgctggc

SEQ ID NO: 35948 - DNA, 25 bp, Macaca Mulatta
cctgggcaatgtgactgctggcaaa

SEQ ID NO: 35949 - DNA, 25 bp, Macaca Mulatta
caatgtgactgctggcaaagatggt

SEQ ID NO: 35950 - DNA, 25 bp, Macaca Mulatta
tggtgtggccaaggtgtctttcgaa

SEQ ID NO: 35951 - DNA, 25 bp, Macaca Mulatta
gtggccaaggtgtctttcgaagatt

SEQ ID NO: 35952 - DNA, 25 bp, Macaca Mulatta
tgtctttcgaagattctgtgatctc

SEQ ID NO: 35953 - DNA, 25 bp, Macaca Mulatta
ctctcaggagaccattccatcattg

SEQ ID NO: 35954 - DNA, 25 bp, Macaca Mulatta
cattccatcattggccgcacattgg

SEQ ID NO: 35955 - DNA, 25 bp, Macaca Mulatta
atcattggccgcacattggtggtcc

SEQ ID NO: 35956 - DNA, 25 bp, Macaca Mulatta
tggccgcacattggtggtccatgaa

SEQ ID NO: 35957 - DNA, 25 bp, Macaca Mulatta
ccgcacattggtggtccatgaaaaa

SEQ ID NO: 35958 - DNA, 25 bp, Macaca Mulatta
catattctttctataatgtgtacat

SEQ ID NO: 35959 - DNA, 25 bp, Macaca Mulatta
taatgtgtacattgaccgggtggca

SEQ ID NO: 35960 - DNA, 25 bp, Macaca Mulatta
atgtgtacattgaccgggtggcaca

SEQ ID NO: 35961 - DNA, 25 bp, Macaca Mulatta
ttgaccgggtggcacaggcgggcct

SEQ ID NO: 35962 - DNA, 25 bp, Macaca Mulatta
aggcgggcctcttagggcctgggtg

SEQ ID NO: 35963 - DNA, 25 bp, Macaca Mulatta
ggtgggcctgagtggtcctcctcaa

SEQ ID NO: 35964 - DNA, 25 bp, Macaca Mulatta
tgagtggtcctcctcaacctttcag

SEQ ID NO: 35965 - DNA, 25 bp, Macaca Mulatta
ctcctcaacctttcagacgacaagg

SEQ ID NO: 35966 - DNA, 25 bp, Macaca Mulatta
aacctttcagacgacaaggacaaga

SEQ ID NO: 35967 - DNA, 25 bp, Macaca Mulatta
ccccatgcccagatatgagagctgc

SEQ ID NO: 35968 - DNA, 25 bp, Macaca Mulatta
catgcccagatatgagagctgcgtt

SEQ ID NO: 35969 - DNA, 25 bp, Macaca Mulatta
agatatgagagctgcgttgcccagg

SEQ ID NO: 35970 - DNA, 25 bp, Macaca Mulatta
tgagagctgcgttgcccagggtggt

SEQ ID NO: 35971 - DNA, 25 bp, Macaca Mulatta
acgacaaggacaagatgagcagcaa

SEQ ID NO: 35972 - DNA, 25 bp, Macaca Mulatta
gacaaggacaagatgagcagcaaac

SEQ ID NO: 35973 - DNA, 25 bp, Macaca Mulatta
ggacaagatgagcagcaaacaccag

SEQ ID NO: 35974 - DNA, 25 bp, Macaca Mulatta
agatgagcagcaaacaccagctcct

SEQ ID NO: 35975 - DNA, 25 bp, Macaca Mulatta
gatgagcagcaaacaccagctcctc

SEQ ID NO: 35976 - DNA, 25 bp, Macaca Mulatta
tgagcagcaaacaccagctcctcag

SEQ ID NO: 35977 - DNA, 25 bp, Macaca Mulatta
aaacaccagctcctcagcttcgtgt

SEQ ID NO: 35978 - DNA, 25 bp, Macaca Mulatta
tcgtgtccctgctggagaccaacaa

SEQ ID NO: 35979 - DNA, 25 bp, Macaca Mulatta
cgtgtccctgctggagaccaacaag

SEQ ID NO: 35980 - DNA, 25 bp, Macaca Mulatta
gtgtccctgctggagaccaacaagc

SEQ ID NO: 35981 - DNA, 25 bp, Macaca Mulatta
tgtccctgctggagaccaacaagcc

SEQ ID NO: 35982 - DNA, 25 bp, Macaca Mulatta
tacctggtgaactgcgtccgcatcc

SEQ ID NO: 35983 - DNA, 25 bp, Macaca Mulatta
tggtgaactgcgtccgcatccctgc

SEQ ID NO: 35984 - DNA, 25 bp, Macaca Mulatta
catattctttctataatgtgtacat

SEQ ID NO: 35985 - DNA, 25 bp, Macaca Mulatta
taatgtgtacattgaccgggtggca

SEQ ID NO: 35986 - DNA, 25 bp, Macaca Mulatta
atgtgtacattgaccgggtggcaca

SEQ ID NO: 35987 - DNA, 25 bp, Macaca Mulatta
ttgaccgggtggcacaggcgggcct

SEQ ID NO: 35988 - DNA, 25 bp, Macaca Mulatta
aggcgggcctcttagggcctgggtg

SEQ ID NO: 35989 - DNA, 25 bp, Macaca Mulatta
ggtgggcctgagtggtcctcctcaa

SEQ ID NO: 35990 - DNA, 25 bp, Macaca Mulatta
tgagtggtcctcctcaacctttcag

SEQ ID NO: 35991 - DNA, 25 bp, Macaca Mulatta
ctcctcaacctttcagacgacaagg

SEQ ID NO: 35992 - DNA, 25 bp, Macaca Mulatta
aacctttcagacgacaaggacaaga

SEQ ID NO: 35993 - DNA, 25 bp, Macaca Mulatta
ggagaccaacaagccatacctggtg

SEQ ID NO: 35994 - DNA, 25 bp, Macaca Mulatta
atacctggtgaactgcgtccgcatc

SEQ ID NO: 35995 - DNA, 25 bp, Macaca Mulatta
ccccatgcccagatatgagagctgc

SEQ ID NO: 35996 - DNA, 25 bp, Macaca Mulatta
agatatgagagctgcgttgcccagg

SEQ ID NO: 35997 - DNA, 25 bp, Macaca Mulatta
gaatctactcctgctttaagatcat

SEQ ID NO: 35998 - DNA, 25 bp, Macaca Mulatta
actcctgctttaagatcatatttct

SEQ ID NO: 35999 - DNA, 25 bp, Macaca Mulatta
tggaatccagatcaagacaagacat

SEQ ID NO: 36000 - DNA, 25 bp, Macaca Mulatta
gattgcagactgaaacccaggaaga

SEQ ID NO: 36001 - DNA, 25 bp, Macaca Mulatta
cagactgaaacccaggaagatggtt

SEQ ID NO: 36002 - DNA, 25 bp, Macaca Mulatta
gaagatggttggtatgactgtcata

SEQ ID NO: 36003 - DNA, 25 bp, Macaca Mulatta
atgactgtcatagggaaacacatct

SEQ ID NO: 36004 - DNA, 25 bp, Macaca Mulatta
gagagcttactacagggcatggcaa

SEQ ID NO: 36005 - DNA, 25 bp, Macaca Mulatta
gagcttactacagggcatggcaaga

SEQ ID NO: 36006 - DNA, 25 bp, Macaca Mulatta
actacagggcatggcaagaatatta

SEQ ID NO: 36007 - DNA, 25 bp, Macaca Mulatta
gtaaccagtgattgtaggatatacc

SEQ ID NO: 36008 - DNA, 25 bp, Macaca Mulatta
ttgtaggatatacctgagaccatca

SEQ ID NO: 36009 - DNA, 25 bp, Macaca Mulatta
aggatatacctgagaccatcaggaa

SEQ ID NO: 36010 - DNA, 25 bp, Macaca Mulatta
agccagagagctaagcagagccgga

SEQ ID NO: 36011 - DNA, 25 bp, Macaca Mulatta
gcagagccggagaaacctacctagg

SEQ ID NO: 36012 - DNA, 25 bp, Macaca Mulatta
ctacctaggcggtcttcctttagat

SEQ ID NO: 36013 - DNA, 25 bp, Macaca Mulatta
aggcggtcttcctttagattgcaga

SEQ ID NO: 36014 - DNA, 25 bp, Macaca Mulatta
acacatctgagtttttctgatacct

SEQ ID NO: 36015 - DNA, 25 bp, Macaca Mulatta
gaggagtactggagagcttactaca

SEQ ID NO: 36016 - DNA, 25 bp, Macaca Mulatta
agaatattatgctgccgcttctcat

SEQ ID NO: 36017 - DNA, 25 bp, Macaca Mulatta
gccgcttctcattcatattattgga

SEQ ID NO: 36018 - DNA, 25 bp, Macaca Mulatta
gaatgctcagagacatccaagttgg

SEQ ID NO: 36019 - DNA, 25 bp, Macaca Mulatta
ggatggcagcttatcacatgaatac

SEQ ID NO: 36020 - DNA, 25 bp, Macaca Mulatta
ggaactgtcaacaaatgataccttt

SEQ ID NO: 36021 - DNA, 25 bp, Macaca Mulatta
tgatacctttggatatccatcctcc

SEQ ID NO: 36022 - DNA, 25 bp, Macaca Mulatta
ttggatatccatcctccttgactta

SEQ ID NO: 36023 - DNA, 25 bp, Macaca Mulatta
aagtcatacttggaaggcccttctg

SEQ ID NO: 36024 - DNA, 25 bp, Macaca Mulatta
gaatctactcctgctttaagatcat

SEQ ID NO: 36025 - DNA, 25 bp, Macaca Mulatta
actcctgctttaagatcatatttct

SEQ ID NO: 36026 - DNA, 25 bp, Macaca Mulatta
tggaatccagatcaagacaagacat

SEQ ID NO: 36027 - DNA, 25 bp, Macaca Mulatta
gattgcagactgaaacccaggaaga

SEQ ID NO: 36028 - DNA, 25 bp, Macaca Mulatta
cagactgaaacccaggaagatggtt

SEQ ID NO: 36029 - DNA, 25 bp, Macaca Mulatta
gaagatggttggtatgactgtcata

SEQ ID NO: 36030 - DNA, 25 bp, Macaca Mulatta
atgactgtcatagggaaacacatct

SEQ ID NO: 36031 - DNA, 25 bp, Macaca Mulatta
gagagcttactacagggcatggcaa

SEQ ID NO: 36032 - DNA, 25 bp, Macaca Mulatta
actacagggcatggcaagaatatta

SEQ ID NO: 36033 - DNA, 25 bp, Macaca Mulatta
gtaaccagtgattgtaggatatacc

SEQ ID NO: 36034 - DNA, 25 bp, Macaca Mulatta
ttgtaggatatacctgagaccatca

SEQ ID NO: 36035 - DNA, 25 bp, Macaca Mulatta
aggatatacctgagaccatcaggaa

SEQ ID NO: 36036 - DNA, 25 bp, Macaca Mulatta
gtgtagtcaataaaatgaatctgat

SEQ ID NO: 36037 - DNA, 25 bp, Macaca Mulatta
atgaatctgatcattgttcaacaag

SEQ ID NO: 36038 - DNA, 25 bp, Macaca Mulatta
tcattgttcaacaagatgcgctgct

SEQ ID NO: 36039 - DNA, 25 bp, Macaca Mulatta
attgttcaacaagatgcgctgctgt

SEQ ID NO: 36040 - DNA, 25 bp, Macaca Mulatta
gttcaacaagatgcgctgctgttct

SEQ ID NO: 36041 - DNA, 25 bp, Macaca Mulatta
caacaagatgcgctgctgttctgtg

SEQ ID NO: 36042 - DNA, 25 bp, Macaca Mulatta
aacaagatgcgctgctgttctgtga

SEQ ID NO: 36043 - DNA, 25 bp, Macaca Mulatta
acaagatgcgctgctgttctgtgag

SEQ ID NO: 36044 - DNA, 25 bp, Macaca Mulatta
aagatgcgctgctgttctgtgagca

SEQ ID NO: 36045 - DNA, 25 bp, Macaca Mulatta
agatgcgctgctgttctgtgagcaa

SEQ ID NO: 36046 - DNA, 25 bp, Macaca Mulatta
atgcgctgctgttctgtgagcaagt

SEQ ID NO: 36047 - DNA, 25 bp, Macaca Mulatta
cgctgctgttctgtgagcaagtgga

SEQ ID NO: 36048 - DNA, 25 bp, Macaca Mulatta
ctgctgttctgtgagcaagtggaag

SEQ ID NO: 36049 - DNA, 25 bp, Macaca Mulatta
aaattcatcctcttaccagatcctt

SEQ ID NO: 36050 - DNA, 25 bp, Macaca Mulatta
ctcttaccagatccttttccagaaa

SEQ ID NO: 36051 - DNA, 25 bp, Macaca Mulatta
ttaccagatccttttccagaaatac

SEQ ID NO: 36052 - DNA, 25 bp, Macaca Mulatta
gatccttttccagaaatacctgtct

SEQ ID NO: 36053 - DNA, 25 bp, Macaca Mulatta
cttttccagaaatacctgtctagga

SEQ ID NO: 36054 - DNA, 25 bp, Macaca Mulatta
cctgtctaggaaggtgtaatgcaga

SEQ ID NO: 36055 - DNA, 25 bp, Macaca Mulatta
gtaatgcagaaacaatgacatccag

SEQ ID NO: 36056 - DNA, 25 bp, Macaca Mulatta
aaacaatgacatccagaaagctgag

SEQ ID NO: 36057 - DNA, 25 bp, Macaca Mulatta
aggttcctgtggagacactgagtca

SEQ ID NO: 36058 - DNA, 25 bp, Macaca Mulatta
gacactgagtcagaattcttcatcc

SEQ ID NO: 36059 - DNA, 25 bp, Macaca Mulatta
ctgagtcagaattcttcatcctaaa

SEQ ID NO: 36060 - DNA, 25 bp, Macaca Mulatta
aatggaattgcttctgtgtagtcaa

SEQ ID NO: 36061 - DNA, 25 bp, Macaca Mulatta
gaattgcttctgtgtagtcaataaa

SEQ ID NO: 36062 - DNA, 25 bp, Macaca Mulatta
ggcaaattcatcctcttaccagatc

SEQ ID NO: 36063 - DNA, 25 bp, Macaca Mulatta
gtgtagtcaataaaatgaatctgat

SEQ ID NO: 36064 - DNA, 25 bp, Macaca Mulatta
atgaatctgatcattgttcaacaag

SEQ ID NO: 36065 - DNA, 25 bp, Macaca Mulatta
tcattgttcaacaagatgcgctgct

SEQ ID NO: 36066 - DNA, 25 bp, Macaca Mulatta
attgttcaacaagatgcgctgctgt

SEQ ID NO: 36067 - DNA, 25 bp, Macaca Mulatta
gttcaacaagatgcgctgctgttct

SEQ ID NO: 36068 - DNA, 25 bp, Macaca Mulatta
caacaagatgcgctgctgttctgtg

SEQ ID NO: 36069 - DNA, 25 bp, Macaca Mulatta
acaagatgcgctgctgttctgtgag

SEQ ID NO: 36070 - DNA, 25 bp, Macaca Mulatta
aagatgcgctgctgttctgtgagca

SEQ ID NO: 36071 - DNA, 25 bp, Macaca Mulatta
agatgcgctgctgttctgtgagcaa

SEQ ID NO: 36072 - DNA, 25 bp, Macaca Mulatta
atgcgctgctgttctgtgagcaagt

SEQ ID NO: 36073 - DNA, 25 bp, Macaca Mulatta
cgctgctgttctgtgagcaagtgga

SEQ ID NO: 36074 - DNA, 25 bp, Macaca Mulatta
ctgctgttctgtgagcaagtggaag

SEQ ID NO: 36075 - DNA, 884 bp, Macaca Mulatta
  misc_feature (1)...(884): n = A,T,C or G
ggtttttaaactaataagtgtagtgataactcttaagagagagcagattctagttgttgtgctgatattttgggaattattgttaatggaggaaagatcattggcaaagattagctttcaccataatttaatggtagagagaagatgggatctgatatttgagagcattanacttttttgttagtttagaatggcttagacagagtttgttgacagagtttgttgatggttttggtanaaagcaggatcatcntacaggtaattagaagacccanngtattcacaaggctttcaggaagtttgcttttcatagggtgnggttagcttaatttaaatgtagctgatggggatcttaaagtttaaaaatgaaaatggggataaggccccccctcaagggctcctgccctataatccccaccacttttgggaaggatgaaaccaggccaaatcccctttgaggggccggaaattttggaaacccaaccctgggcccaccattggggaaaaacccccttttctttctccaaaaatatannnnnnnnnnnnnnnnnnnnnnnnnnnnnnnnnnnnntgcccccaaatttggccccccttactttggggaggggcttaagggcccggaaaaaaaccctcttttgaacccccgtggggggggcaaaaggggtttccacataaaacccccacaatttgtggggccccgttgtgatatcctcccaccccgggggggaaaaacgaaaagaaaaaaaactctcccctttctcctcaaaagggcgcggccgagaacaaagtgacgtgagttgnnggccgtttattgtggggggggcgccgctctttggcgccctcctaagagaaaaacttttcttttcaaaaaaaacatcttttga

SEQ ID NO: 36076 - DNA, 1796 bp, Macaca Mulatta
  misc_feature (1)...(1796): n = A,T,C or G
atggatgatagcaagcaagaatctactgccagtaaagaacaggaaacaaacataagttccatagttcctgcaacacaagatatttatcagtggcggaactcttcagacgttcataaatctctgttcgttaccgtggatgaaactacnnnnnnnnnnnnnnnnnnnnnnnnnnnnnnnnnnnnnnnnnnnnnnnnnnnnnnnnnnnnnnnnnnnnnnnnnnnnnnnnnnnnnnnnnnnnnnnnnnnnnnnnnnnnnnnnnnnnnnnnnnnnnnnnnnnnnnnnnnnnnnnnnnnnnnnnnnnnnnnnnnnnnnnnnnnnnnnnnnnnnnnnnnnnnnnnnnnnnnnnccagagatcagattcttcatctgaaagccactgtgctactggatcatccaaaagtacagtttatttcacagcgctgaggaggaccagcatgcattcttctcttaacacaagcccgaatcagcaacctgacactaacttggctcatgttggagcacacagttttgctacagaaaatatnnnnnngatctgaacaatgtattgaacagcttctgccagaatattcttcacaggaggagagccagcatgctgatctaccaagtatttttagcattgaagcaagggattcttcccaaggcatgaaaaatcagaactactcctctgaagaacatactgaaatactacaaaacaagaaaaaaagtgttcatttccagctttctgtaggaaacttaagttcagtctacagttcatctgatgaagctaatgtatttgatcagttaaatatacagcatagcactccatgtggttctaactctagtgagtgctcaataaaacaccaactagaaagcagaaagttaaggatgggctttgaagaactatcaaaaagaggggttgttacaattttacaaagtcaaggactcactgaagataataaaaatgaaacctgtagggttttagacataaatccacagatagaggaaattgactctcgattatgtgtaagaacagtggagatggggacttcaattcaggcaccatattccttaactactcaaaatgaaaaatgttttgagaatttagctgaaacagacattccaaaaatcaccaaaaaactatctcaactaggtcaatcagagctttttacaagttctggatcattatcattacagagctctataccagtctgggnnnnnnnnnnnnnnnnnnnnnnnnnnnnnnnnnnnnnnnnnnnnnnnnnnnnnnnnnnnnnnnnnnnnnnnnnnnnnnnnnnnnnnnnnnnnnnnnnnnnnnnnnnnnnnnnnnnnnnnnnnnnnnnnnnnnnnnnnnnnnnnnnnnnnnnnnnnnnnnnnnnnnnnnnnnnnnnnnnnnnnnnnnnnnnnnnnnnnnnnnnnnnnnnnnnnnnnnnnnnnnnnnnnnnnnnnncagacacccctcaaaggtttacacctataccagggagcttacaagaagcatttataaagagaaaaaaatcatttatggagagatcccaccagagggagaaagaaataaggaataaaattcgtctctctgaaaattctcatatcaaaacagttaaagagaaaccatctataagtnnnnnnnnnnnnnnnnnnnnnnnnnnnnnnnnnnnnnnnnnnnnnnnnnnnnnnnnnnnnnnnnnnnnnnnnnnnnnnnnnnnnnnnnnnnnnnnnaggttatacaatcaactagctgaagtgaaacaacaaaaggaagaaaaagcaaaacaagaggcttatgcccaaaacagagcaagggcaaaagaattccataa

SEQ ID NO: 36077 - DNA, 799 bp, Macaca Mulatta
  misc_feature (1)...(799): n = A,T,C or G
nnnnnnnnnnnnnnnnnnnnnnnnnnnncgggttttccatgttcaccagactggtcttgaactctcgacttcatgattcgcccannnnnnnnnnnnnnnnnnnnnnnnnannnnnnnnnnnnnnnnnnnnnnagcctctaaaacagtatttttacacgaggggctacctcacttcacctccccctcacttcacctctgcataatctttaacctagtctctgaaactggagatggatgggaaaaacataaattcgcaacatacttaaaatctgaaaagataaagattttaaatattttaagggtttattcatttgctcattccaattcaaggagtcgcctttgcacacacctctccctctcataactaaaagacaggaatcaattgttgtataactcctcccttcccccttcaacccagctaacgtacaaaggaaagggctttctctattgtgcccctgtaatgaatctttgttaactaanacccgattcagaaatagttctcatttaatttttttaaatcagcaaactgaaaactgtaaaaataacaacagatttattattattgcaagaaaagaaagccaatttttgtaaacgttctgattatgttttaaggatttggtctttctttggcactggtggggagccaaatcaccatcctcctctcaatctaccgtttcatttaaaaanccaacaaaacaccttaatcaggaatgttnnnnnnnnnnnnnnnnnnnnnnnnnnnnnnnnnnnnnnntgaactggacctcctttttttctggttaaaacgttctcttaagca

SEQ ID NO: 36078 - DNA, 442 bp, Macaca Mulatta
aaaaatcaaaacacaaggaatattaaccacctgcttccaggaatggcctgtacctacccaaccgcttgctatacctctcttccacccaaaagtcttaatacaggaatatccctcaccccgatcctaatactgtcagtagctgtcctgctgtctgcagcatcccctcccagctgccgtgagtgttatcagtctttccactacagaggaaagattcaacaatcctttacttaccatactcacatagaaagatcctgttatggaaccttaattgaagaatgtgctgaatcaggaaagagttattataaagtaaagaatctaggagtatctggcagtcgtaatggggctatatgcccccaagggaagcagtggcttttaagggccaaaattggacaatggggagtaaacactcaagtttagaggacataaagagagaacagattat

SEQ ID NO: 36079 - DNA, 718 bp, Macaca Mulatta
  misc_feature (1)...(718): n = A,T,C or G
gnnnnnnnnnnnnnnnnnnnnnnnnnnnnnnnnnnnnnnnnnnnnnnnnnnnnnnnnnnnnnnnnnnnnnnnnnnnnnnnnnnnnnnnnnnnnnnnnnnnnnnnnnnnnnnnnnnnnnnnnnnnnnnnnnnnnnnnnnnnnnnnnnnnnnnnnnnnnnnnnnnnnnnnnnnnnnnnnnnnnnnnnnnnnnnnnnnnnnnnnnnnnnnnnnnnnnnnnnnnnnnnnnnnnnnnnnnnnnnnnnnnnnnnnnnnnnnnnnnnnnnnnnnnnnnnnnnnnnnnnnnnnnnnnnnnnnnnnnnnnnnnnnnnnnnnnnnnnnnnnnnnnnnnnnnnnnnnnnnnnnnnnnnnnnnnnnnnnnnnnnnnnnnnnnnnnnnnnnnnnnnnnnnnnnnnnnnnnnnnnnnnnnnnnnnnnnnnnnnnnnnnnnnnnnnnnnnnnnnnnnnnnnnnnnnnnnnnnnnnnnnnnnnnnnnnnnnnnnnnnnnnnnnnnnnnnnnnnnnnnnnnnnnnnnnnnnnnnnnnnnnnnnnnnnnnnnnnnnnnnnnnnnnnnnnnnnnnnnnnnnnnnnnnnnnnnnnnnnnnnnnnnnnnnnnctcctttggtctggcttcatccggccaaacgtactagcacccacgtttcacattcggaaaacattccactgtttcgggttttcgaaaaagcccccccgccgtttggaatagttggaacacccttttc

SEQ ID NO: 36080 - DNA, 629 bp, Macaca Mulatta
  misc_feature (1)...(629): n = A,T,C or G
gggggtttcataatttggtaacatgtaccttcatgttgtaaagttaatagagataaatatttttatcaaaaattttataaacacagtctttctttagcattgatttaatttcagaacatcttcatattgatttttagccataaagtttctaacatggaacatttgtctataaattttgtgattatagtagtggaatatataaaaaaatatgctttcaactttgcgagtgaatttcgtgttgtgtaagttatgtgtcaaatctttgaattttaattttactcttttatatatgtgataatttcataaagtgagggatctcaaaaaaagagttgcatccaacgttcttgttctctaggatgcttttataaagaaggtgaactattttcatgtaatgctaagagttaaacttatctttcccaaatataactttattattagcttgggaaaaatgaaattgtatttgcatttttaaaataaatacatatgtttatttcagaagggcagttttgattatatgtgaatgcacaaattttactggatttatcttaataaanagactctgacgatgattgtgttttgttatatctttcaaaatgtagctagtgaaatattatcgctaatttttttat

SEQ ID NO: 36081 - DNA, 796 bp, Macaca Mulatta
  misc_feature (1)...(796): n = A,T,C or G
ggattataagagaaaattgtttaaaaatgaaagaaaaatagaaaaaaattgtttaatgaaaaacactttggaaatcttaaaacacacagaaattattgaggtctaaccaaaaggggagagactgactctatgtttgccaagttcaccaaaaagtgatagttcttcctcatatccccaccagttgcagtgctctaagcacattaaagaagcggcatgagcctccagattcacatctggaaacagcagcatataaagagctggttgtcttcccccatcccccgtccacgcctcagatacagctgagaaagaaagaagatacaaaaaatttaaattataccttacatgaaggatagggtatggatttatgccttatatttccattatagcaaataagaggcatttggattggccaagcagaggagcattcgtggtggacatgaccactctacttatcaaaaagacttccctttataaacaaagtaagaaggaatggttgtgtcttacctactactacacacattttttttttaatggccactcttaatagtttaggcatagtaaaaagaaactggaaaaaggatgtgttaggattagatttagttgcatattacagaaaggtcaaataaagtggctttaacaagttagggtttttatttttctttaatgtaaaatagcccagaagagatgtccagagcagaaattatatcangaatatcccctggcatatcatttaaatttttgccggntcttggaatgtgtnttgcttttcacccttgnctgggtacaaagggaagac

SEQ ID NO: 36082 - DNA, 650 bp, Macaca Mulatta
gggggttttgttttctacttcttttccaagatcatgactgagagattgttaataaaagcattgagtggtggtaaaaacacgaagatcattactttgaatgggaagaagatgacaaagatgccctcagcattaggaaaactgcccggcctgaagactctagtccttcagaataacctaatccctaaagtgtgcccagagttacgcaccttgacccagttgacaacactaaatctgggaaacaaccttttagaagaagttccggaagagattaaatatcttacatctctgaagactctccatttatctggaaataggatctgcagatttgctcctggagcctgtgatggcttacaaaatttaatactgcttaatctgaacaaacatcatcttatgcagcttcctcagaagtcagcagattaaaagtcttactacatgagtataaattatacccactagtcagcatcctaaagaccttgttttcttagaatcttgttgaactccacttacttcaatcgctgaatgcctactgaaaaaataagttcttgaaaacttccaaaattttgctaccaaaaaacatggatttttccaatttccggtcaaacctaagaattcctgtagggaacccgttcctaaccccggttttccaagga

SEQ ID NO: 36083 - DNA, 1441 bp, Macaca Mulatta
  misc_feature (1)...(1441): n = A,T,C or G
ccagctgtgtcttctcattgcactgaagactttttgccagaacagggcatgaaagattcattccaaaaggtgatactgagaagatatggaagctgtggacttgaggatttacacttaaggaaagatggggaaaatgtgggtgagtgtaaggatcaaaaagaaatttataatggacttaaccagtgtttgtcaactctacctagcaaaattttcccatataataaatgtgtgaaagtctttagtaaatcgtcaagtctaaagagacaaagcataagacatactacagagaaacttttcaaatgtgtacaatgtggcaaagtctttaaatctcactcaggcctttcttatcataagataattcatactgaagagaaactctacatatgtgaggaatgtggtaaaacctttaaatggttctcataccttactaaacataagaggattcacactggagagaaaccatacaaatgtgaagaatgtggcaaagcttttaactggtgctcgacccttactaaacataagagaatccatactggtgagaaaccctacaaatgtgaagaatgtggaaaagcctttcactggtgttcgccctttgttagacataagaaaattcatactggagaaaaaccctatacatgtgaagaatgtggcagagcgtttaaccggcactcacatctcaccaaacataagacgattcacactggaaagaaaccctacaaatgtaaagaatgtgggaaagccttcaaccactgctcnnnnnnnnnnnnnnnnnnnncataagataattcatactgaagagaaactctacatatgtgaggaatgtggtaaaacctttaaatggttctcataccttactaaacataagaggattcacactggagagaaaccatacaaatgtgaagaatgtggcaaagcttttaactggtgctcgacccttactaaacataagagaatccatactggtgagaaaccctacaaatgtgaagaatgtggaaaagcctttcactggtgttcgccctttgttagacataagaaaattcatactggagaaaaaccctatacatgtgaagaatgtggcagagcgtttaaccggcactcacatctcaccaaacataagacgattcacactggaaagaaaccctacaaatgtaaagaatgtgggaaagccttnnnnnnnnnnnnnnnnnnnnnnnnnnnnnnnnnnnnnnnnnnnnnnnnnnnnnnnnnnnnnnnnnnnnnnnnnnnnnnnnnnnnnnnnnnnnnnnnnnnnnnnnnnnnnnnnnnnnnnnnnnnnnnnnnnnnnnnnnnnnnnnnnnnnnnnnnnnnnnnnnnnnnnnnnnnnnnnnnnnnnnnnnnnnnnnnnnnnnnnnnnnnnnnnnnnnnnnnnnnnnnnnnnnnnnnnnnnnnnnnnnnnnnnnnnnnnnnnnnnnnnnnnnnnnnn

SEQ ID NO: 36084 - DNA, 852 bp, Macaca Mulatta
  misc_feature (1)...(852): n = A,T,C or G
ggnnnnnnnnnnnnnnnnnnnnnnnnnnnnnnnnnnnnnnnnnnnnnnnnnnnnnnnnnnnnnnnnnnnnnnnnnnnnnnnnnnnnnnnnnnnnnnnnnnnnnnnnnnnnnnnnnnnnnnnnnnnnnnnnnnnnnnnnnnnnnnnnnnnnnnnnnnnnnnnnnnnnnnnnnnnnnnnnnnnnnnnnnnnnnnnnnnnnnnnnnnnnnnnnnnnnnnnnnnnnnnnnnnnnnnnnnnnnnnnnnnnnnnnnnnnnnnnnnnnnnnnnnnnnnnnnnnnnnnnnnnnnnnnnnnnnnnnnnnnnnnnnnnnnnnnnnnnnnnnnnnnnnnnnnnnnnnnnnnnnnnnnnnnnnnnnnnnnnnnnnnnnnnnnnnnnnnnnnnnnnnnnnnnnnnnnnnnnnnnnnnnnnnnnnnnnnnnnnnnnnnnnnnnnnnnnnnnnnnnnnnnnnnnnnnnnnnnnnnnnnnnnnnnnnnnnnnnnnnnnnnnnnnnnnnnnnnnnnnnnnnnnnnnnnnnnnnnnnnnnnnnnnnnnnnnnnnnnnnnnnnnnnnnnnnnnnnnnnnnnnnnnnnnnnnnnnnnngtaaggaaggccgtatttcaaaaccataacccccttcccctcaaacttccaataagtcaatggggcggaacctaggcgactgcacgggaaatacccctttccttccaggggttttccaatctcctaagacctttatttatccgaaggccaggaaacaccggtccgtgagcacgactgcccccgaagacccttagtgctttccccccgtccgtgccgtgaccgtgcccgctaaaaagccccgcctgtattccacgtccgaaaacatatccccttc

SEQ ID NO: 36085 - DNA, 594 bp, Macaca Mulatta
  misc_feature (1)...(594): n = A,T,C or G
gggaggcgaggctgtgcgctcaggccaacctaggcaaaatttggaacataaaaaaatcagtattagaaataatgcttcacataggattcagtgttacactctttggcactttggagtagcctgttctctcatttgaaataaggtctttgttagccctacctttactcagaaatgtagtcctactataaaaaattaggaggattttaaaatataatactgcctgtcatggtgtatttctaaattgttctctttgggagaaacacattattattgaattgagcatataacttgataatatttgtnnnnnnnnnnnnnnnnnnnnnnnnnnnnnnnnnnnnngcccccaagaggtagtcttannnnnnnnnnnnnnnnnnnnnnnnngtggcacgatccnnnnnnnnnnnnnannnnnnnnnnnnnnnnnnnnnnnnnnnnnnnnnnnnnnnnnnnnnnnnnncaccaaacctggctgatttcagttannnnnnnnnnnnnnnnnnnnnnnnnnnnnnnnnnnnnnnnnnnngaagtcctgactgcaagtgatctgcccttcttgggnnnnnnnnnnnnnnncnnnnnnnnnnnnnn

SEQ ID NO: 36086 - DNA, 71 bp, Macaca Mulatta
cattcctgctgtgatcctgccatggatacctggctcctatgctgggcaatttttagtctcttgaaagcagg

SEQ ID NO: 36087 - DNA, 759 bp, Macaca Mulatta
gggagctgactggggtggggaagactgggtagtgaaaaataaatacctcaattcaccataaaagatatggctatgtgattaaagcagcacacattcattttggtgaacatagtattttactatacctagcctataagaaaaagcttgttatgagtagtggaggtgactgtatgtgtacagcacatatgtgcatctgcatgtttgtgttgtttgtgtagcagcatgacttgagcaccagctctgagccgcactacctgtgttcatattctggctctgtcacttactagcaatgtgaccttgggcaagttacttaatatttccatgcattaattctacatctatgcaatgaggataatggtattgtctgctgtagaatagtatcagacatacaagttctgagaaaaagtttgggacttaatgagtactaattaaatgttagtgttactctaggcatatgtaataatttcttttccagtgcgtatataatattgtagtctacccatagctagtcatttataattaagattgttttgatggaaggatttgctgacaatgactatatcagtgacaaaacagatttaaaagtcatcttttcatttttgtatggtctatttggactgattgtctaatggattatcttgaaattggccttgaaataagctgaaatctagtttaaatcacatctacttgaattgttgtgctcttagatatgttccttcccagcagcacatctggaattcatccgggtacctttaagaa

SEQ ID NO: 36088 - DNA, 758 bp, Macaca Mulatta
  misc_feature (1)...(758): n = A,T,C or G
ggatgtgtttgtgagagagaaattttgtctgtccttatgtttagaaacgtcttaggctgggcacagtggctcatgcttgtaattccaannnnnnnnnnnnnnnnnnnaggaagatcacttgaggccaggagttcaagattagtctgggcaacatagtgagacccttctgtacattaaaagaagagagaaaaggaaaaataaattaaaatgtcttagatcatttattttctacccccacgcaaccctgaattgactaatggataagcaggttgattttcagcttttaggacaggtatacatttaatacagtaaatttccttctaagttgcatctcatagattttatatttaagtatatcttttgcaaacagcatataattggatcttgttttagnnnnnnnnnnnnnnnnnnnnntctagtctgaaaatctttgactttgcggtgtttagtctgcttattgatatgcttgggtttaagtctaccatctttctatttgtcctgtgtgtccttttctttgttactccttttctgcttttttttattaatcaaataatttttagattctgttttatctccagtttttgcctgcatgtactctctcttcctctcttcctttctcccttcccttttccctccctccttttcctcttccttcccttccttcttttctcccctccttttcatctccccaaattttcccccttttttattaaaggataaccgggtccggattataaatttagggggccccttccttg

SEQ ID NO: 36089 - DNA, 419 bp, Macaca Mulatta
catgatgttcatctgcaacaattgcaaagtgttcagattttgtaaatctaaatgtcataaacactttaaaaagaagtgcaatcctcacaaaagttaggtggaccaaagcattccagaaagcagctggtaaagagcttacagtggataattcatttgaatttaacaaacatagaaatgaacctatcaaacaccagcgagagctatggaattaaactattgatgcaatgaagagagttgaagagatctaacagaaatgccaagctaaatttataatgaacaaattgaagaaaaataaagagctacagaagttcaggatatcaaagaagtcaagcaaaacatccatcttatccaagcccctcttgcaggcaaagggaaggagttggaagagaaaatgatacagcagttacaacaggatgtgg

SEQ ID NO: 36090 - DNA, 704 bp, Macaca Mulatta
ccgggagagcgaagatggcggccgagagggaacctcctccgctgggggacgggaagcccaccgactttgaggatctggaggacggagaggacctgttcaccagcactgtttccaccctagagtcaagtccatcatctccagaaccagctagtcttcctgcagaagatattagtgcaaactccaatggcccaaaacccacagaagttggattagatgatgacagagaagatctttttgcagaagccacagaagaagtttctttggacagccctgaaagggaacctatcctatcctcggaaccttctcctgcagtcacacctgtcactcctacgacactaattgctcctagaattgaatcaaagagtatgtctgctcccgtgatctttgatagatccagggaagagattgaagaagaagcaaatggggatatttttgacatagaaattggtgtatcagatccagagaaagttggtgatggcatgaatgcctatatggcatatagagtaacaacaaagacatctctttccatgttcagtaagagtgaattttcagtgaaaagaagattcagtgactttcttggtttgcacagcaaattagcaagcaagtatttacatgtcggttatattgtgccaccagctccagaaaagagtatagtagggatgaccaaggtcaaagtgggtaaagaagactcatcatccactgag

SEQ ID NO: 36091 - DNA, 446 bp, Macaca Mulatta
ttgtatgaatgcgggtctgaggcgctttctgcagagcctggtcctttcccttcaatggtgatgtggtcttgctgagccaggcaactaggggggccccttcactgtggagaaagtggtgctgcgggaaaggcaagactcactcccttgctggaaacaaagaccccttaggagagagaaatgttcgtggaatgaatgaacaaacaagtttgacctactgctctcttccttatggggacgtgggagaaactgggcagggcacaaagcaaagggctgggtgtgatcacaatttttgctttcaatattttactgaggaaatctgtacaactgcctatttccgccgcacatgaggcttcgggtgccctcgcctgcaccagtgtttatgattgacaagcgagggcccgatttcccccatcacactcctgtgttccctaccccaaaccttctaa

SEQ ID NO: 36092 - DNA, 792 bp, Macaca Mulatta
ggggacctggggaaatcactatgtcacatgaaaagagcttgcttctgtgaatgtgcatttgggatgtgggccttgttctaaccttgggtgaccctcagctgttttggcctcaattttctcatccataatgtaaggggtttggaaagtgatctttgagcttcttccagtgatttttgtggtccaatatgagttatctggagatcttctcaactttccaagagaaggaaccaagccttattctgccagtagcccttgagttaacatgtttctccttgtataagtaagacttccacaaacggtggttgggtgcctgaataagcagagtcacctcatgaggacctttttttagatgttgcaagaggttttaatagctccacaaatagttggaggtcaaaataaggatatttacaacatgcactatggtaaattaaatgccatgccttgttactattcatcctcacagaggtcctgggaggtgggtatatcattatacccatcttatggagctctaaaagaggtgaagaattcttggaaagtcacttcactagtaagtgttagaaccaaaagaagagtccagctctagtgaactctaaaatctgtggattgaaaccgccatctatattctttctttcctacggttttcctaccagaaatcaatgaaattcccaaaattaccccaagcctccgttaaactcaagcaatgggtatcaaaatgggccagttaccagacaaaaattacttcctggcaagtgtggttttgttttaaccccttggaaattttcctttataaaa

SEQ ID NO: 36093 - DNA, 803 bp, Macaca Mulatta
ggggaagggaaagtggtgaggatgaataaggatgggcgcacgtcagccaactttccatcaactccttcaaacttgccccccagtggccaaaaagattactttctctagaattgtggttcctaacctttgttaaggtaacaagctctttgagaatctggtagaagccatggaccatctttcacacatgaatagtgagaatggaatgctgtgtagcgggggtcaaagacccaagcatcctagttgaagactcttgatattttgcaaccagcttctttctgtaactacttctacatactcacaggaagatcttagtttccactgcttcattttcatctgagaaagcagacgaaaaagaatttgtgtagcagcataatgtccataactttgacttttcttaacactgtacctgactttttcgcctccttccacttttgaaattacttctaggtttctgtttgacaaccgaggggatcttctaaggctctttcctttagctccctgcttttgtttattttttaatcaactgcttttcattcagtttattctaatatttattgagtgtggactatgtttgatgcacttactcattctcacaacgtaaaaatcctctcttcatggggatttatccctcccacttatgcctcaagctttgacatggtacaactacacaattcccagagcagccaatcatgtccccttgagatacacgggttctcttttcctctgactcttaacattttgatttctttccattacaaatcctagggtctcatttccatttttcaaattttccccaagcctgg

SEQ ID NO: 36094 - DNA, 1340 bp, Macaca Mulatta
  misc_feature (1)...(1340): n = A,T,C or G
ttcaataatgggtaagagtagaaccaaggccgggtatcaattattgcttgctgtttgcaaccaggcataaaatcactttctcaaagcatccaccgttcctcttaaatttatgttggaagctctccttctgtgagtgtaactcctgcagttcctctagcagataagatataagaaagtgcctcctagtgctcctccgcccgcttgtttgctaaaattccctttctctctaggtccaccattttcaggatttgtagatagtgtattaattaagacagctttgtcgatctggccagatgttttttctcctttgtccaaaggccagagaccatcccaggaagagtggtgggtggtttatacactggaaatgttgcgtttatgctttttaaaaacacatgttaacttcagaggaaggatgggcaaatctggtctagctgggtgaaacccttattttcccagagatgccttagcctttgtcggttttggctttagggttcagagtcacttttgttcccttcttcattctggggagggacttccctacatagagccctgattttgtggctgtggggatcggaggtagcattcaaagatcagatgtgcttttcctcactttggagatgaacactctgggttttagagcattaacctgcctaaccttcatggtgagaaatacaccttctctcttctagtcatgctgtgcatgccgcttactctgttggggtctatataaatttgttgaactcttacctacattccaaagaagtttcaaggaaccataaatatatgtatacatatgcatatataaaatgtatatattaaaataaaattatcaggaatactgcctcagttattgaacactttnnnnnnnnnnnnnnnnnnnnnnnctgagaagtatagggatgaccaagatgtcatatcgtgtctgactatattccaacttgtattttcatataatctatattttttaaaagctggaaaatttaaaagcaaatgaaaaaaggaaagccggtgcttgtaaaatcagactgagtagnttaaaagtacgagtaatgtcagttctttttttaaagcaaacattttgggatttgtggtttaacgagcggccttgggaatttacggggcctggtcaaggcacaaattccnaatagggctccgtggccgtttcgcctcactcactgtccctcccatctcaatcaagacaacatacagcaagaagtagtacaacaaacaaaatcgaacaacacaacacaacacgagaacaaacacaaacaaacaagaaaggacacaagcacaaacaagaacaaacacaagaacaacaacaagaacacacagacaaagca

SEQ ID NO: 36095 - DNA, 710 bp, Macaca Mulatta
tggaaggagagcttaaaaaagataagattttaagagttccaagttattttagtgtaattgtcacttgagaaaggcaaatgagtttatcattcttcttaaagagcatctcttttaactgtttgacaaaaccataactttgtcattttacaagcaagaacctcttaagaagtcctcagaactagcagcagtgtgaactctcagccttggtcctggtgggtttgctgaccatgactgggcaagccattctttttgctgccatcttcctcttcataaaatgtggaacataggcactcgctttgagatttttagatagaagaagacattctgcacctgcccccttttttaaatctttgagaaaagatgagtaattttccccgctactctgccttcctgttcagtaactcttacttttgcctgaagtaatagcatcttctacttctccatctagagatttttgtgtgtgtgccatcaaggttagcaaaccttatacttcgcctaacacttaaaaaatgcactcattatcttaaacctaataaattccagagtttattttggttctcttctgttgcccttcctaaaaaatgagttcaagatgacagtatttttctttacatgcttggttgtgagttttaaagttttatttaaatatatgttgaagctccagtttaaagaaagcattgcagaggcccacggtctcctgggtcccggcc

SEQ ID NO: 36096 - DNA, 894 bp, Macaca Mulatta
  misc_feature (1)...(894): n = A,T,C or G
gggagagggttctgtgggtagaaccctgggctccatgtcacagctgtgtgactggcatggtcacagcagcgattattctgcatgtacactctggtaggctcggtgctttaaatcttctttaaaggtttacattgccacttcactaacaagggacctgaggctcagagaggttaagtcacttgtccnaggtcacacagctggtgatgacccaccagaaccacgcttatcacaatagtaaaccccgtcccctggccgctgaacaggaactcctgtcagctttccttaataacatctgggcttagtcctggggaatttcactttctacctccaaccaacctaataaataactagggcccttccttaacccaaataccccttaacccttttttaccccaattgaatgtagccccccccccctttttgtccccgaaaaaaagacccccattttctcccaggggggcgcccccccacaagaaaaaacccccgcggtnnnnnnnnnnnnnnnnnnccttttgggggtcggcggagaataaaaacccccttnttttcnnnnnnnnnnnnnnnnnnnnnnnnnnnnnnnnnngttttcttcttttggggcggggctctttcttttcttgggagnnnnnnnnnnnnnnnnnnngggaaagagccgttgttgtttcttctcaaaaaaacactttttttttattatgaagggggggcctttttttttcacccccccacaaggaggggggggnnnnnnnnnnnnnnnnnnnnnnnnnnnnnnnnnnnnnnnnnnnnnnnnnnnnnnnnnnnnnnnncnnnnnnnnnnnnnnnaccctttcttttttgnnnnnnnnnnnnnnnnnnnnnnncctccccgcgggggaaatannnnnnnnnnnnnnnnnn

SEQ ID NO: 36097 - DNA, 736 bp, Macaca Mulatta
tatttactgaaagcagtaagatattgctgggcctttgggtgcaagatggagagtgctcagagataaggacaggggcctggtcctgcagggccttacataggaagtcgaggaatttattctctgagcaattgaaaatcatcccgaaagatttgcgttttagaaataccatgttgaatagttgcataaaaaaccagttaggaggcccctttttattggaggtagagaataaggagagactgaactacagaagtagggaaggaaaagcgctgtagatccaagaaatagtgggtatccagaagagtggcttgagaagtgatcaaggagaattccacagttatcagagaccctgtcttccttgttcaccactatgttaccagaacataatacaaataatgctattgttattgggtggcattatttagttagtaggtactttttaaaatttttaaatttaatattagtattaaaatacatgtaaagatcaggaaaatgaacttttaaaattaagggctttcactgggcatgataacacatccctgtagtcccagctactcccagctattcaggaggctaaggcgggaggatcacttgaaccaaggagttcaagtttagcctgggcaatatagtgaaaccctttctcaaaaaccaagggctactgaaattgaaatcatgataatttatattcagctcgtaggtacctaattgctagttatacatacatggctttgatgggaaa

SEQ ID NO: 36098 - DNA, 373 bp, Macaca Mulatta
  misc_feature (1)...(373): n = A,T,C or G
ggaggctggcaagaagcatgaatgtgactgaactcgcagtgcagnagatttggtttgagaatagaagagccaagtggaggagacatcagagggcattaatggcgagaaacatgccgcccctcatggtcgtgggccagcctgtcatggtaactgcagttgaggccataatggcacccttgtccatcagcaggatgagagatggttacttctggggctacagccatcccagcaccctgtgtttctccatgtcaccctttcctcctccgtccttgccccttccaactgtgtttcttccacctatgcctccctctgacgaggcccaatttggccggttcccttttgttatcgggcattctttcacattccccaatgt

SEQ ID NO: 36099 - DNA, 748 bp, Macaca Mulatta
  misc_feature (1)...(748): n = A,T,C or G
gggaattttttggtcagtttatgaaattttaaagagaacttgcattttcattgttaatcagtgttttattttaggtggttttataactgtaannnnnnnnnnnnnnnnnnnnnnnnnntttaaaagtattgcaaattaccgtgcgctgttggtgctgaatatttgtttaatagtgaacctttttcaggtgtgttttgagagttataaccaccatggcggcagccatgagaatgcatctgtcagttctcgtgcaggagggagcgtagcttactgaaagcccagctactgtggtctgaaattcatccctgtgtacatggtgaggctatgcttctccacgctgctgccagtcaatgactgattatgacagggatattatatgatgactcctcaactttagctgagcactccatgatggtcttgccaaactcccttaggattacattgtagtccaagttgctgtcacccaaccttccttcctcctttcgttcaccttgggtcttacctccattgtggtctcattgctttccagcctcccatcaaccccagctccctacctatttttcctcactggcattgcccttaataaatctgttgcacagcagatcccctttttgggtgttggcnngtctgcttcttagcctagactaacacaagtgaccattgagtggagatttgaggaaacagggtaataaggatggggcattagggaaatccacacaaaaggggcaaaagaccatggatnatcttg

SEQ ID NO: 36100 - DNA, 720 bp, Macaca Mulatta
cgagggaggagagccgccacaacagcgcagcagtgcaggagctgtgaggagattcgggcagtcaccccgcctcccctgcgtcccgccaccagccgcctccgtcctcggacccattccaacaatctcttaaaacatggtggattactatgaagttctaggcgtgcagagacatgcctcacccgaggatattaaaaaggcatatcggaaactggcactgaagtggcatccagataaaaatcctgagaataaagaagaagcagagagaaaattcaaacaagtagcggaggcatatgaagtgctgtcggatgctaagaaacgggacatctatgacaaatatggcaaagaaggattaaatggtggaggaggaggtggaagtcattttgacagtccatttgaatttggcttcacattccgtaacccagatgatgtcttcagggaattttttggtggaagggacccattttcatttgaattctttgaagacccttttgaggacttctttgggaatcgaaggggtccccgaggaagcagaagccgagggacggggtcgtttttctccgcgttcagtggattcccgtcttttggaagtggattttcttcttttgatacaggatttacttcatttgggtcactaggtcatgggggcctcacttcattctcttccacgtcattcggtggtggtggcatgggcaacttcaaatcgatatcaacttcaactaa

SEQ ID NO: 36101 - DNA, 790 bp, Macaca Mulatta
cccagaggtcagaagtcagatataaccagagatcccagacctcctgcatgagctcgtgtcccaaacgaaatgccatctcgagctcctacagctccacgggaggcttcccatggctaaagcggaggaggatgggggggccagcctcatcccactgccagctgaccctcagttcctcaaagacagtgagtgaggccaggcctcaggctgtctcttgcgggtcacacccagtgagaaaaggcagcagatacatcaacagggcagacactcacccccaggactggataccccagatcccagacctctaggccccgtagacgcaagtttcccctgctgccacgcaggcgaggggagcctctgatgctgccacctcccttagagctggggttccgggtcactgctgaagtcctggacctggagaaggaggcggcattccagtgcatcaacagcgtactgcggggtgaggccaaaaaaatctgggactgcagaccctcacggccttcccacgctttgtcttcacttgcaacagggacttctggtctgcctgctgtttctaaagcacccagaatggatgcacagcaggagagagacaagtcccaagactcccagggcccagtggctcccctagcatctgctgcagaggctccctctacagctcctgtgtctgggaagaaacacagaccaccaggccccctgttcttctcggatccccttcctgccacctcttccaactcccaggactcagtccaggtcacctcgctgattcctgcccccttgccagctgcaagcatgg

SEQ ID NO: 36102 - DNA, 827 bp, Macaca Mulatta
cgacgattgccttaggaagaagccgtagtccatgaagtatggattaccatttgtatttttcactaacagtaaatgtatttttcttattaattgtttgccttaggaatgatgaattacattttttgttccttcttaccataaacatctgcattcctcagctcagccttccttgtatgttgtttctttataaatggttgagctgctgatgcaggtattgccaagctaacagtacaaatcattttaaagaggaagctggcgcgtatggcagccgaggagcacactctgcaggacactggacaagacagtaaatattcaacttttaatgctgattaaaggagtataggtaaagaatacgtaggtatacataattggtgagacaaatattcactttatttatattttatatattatttttttaatttggtaaatactatccagttttgtagttgtccttgttgatttgtgtgatattaaagtattagtaataattgccaggaaactatcattagggagggtttagttggttgctgtttggactgggagggatgatttaaatttagtgctagaaaccaattttagtgactgcacagtttatcatttgtcagacagaacgtagctataaagctaccctgtaagtcatatcgaaaaagtcggaggaagattagtacatgttatcactaaaaatagaatttcgatctctaatatcttacaaaacccgcctgggaggcaccggcaacgtagagctaaccaccggaaaaaaccgcaatggcaacagcccggcgcaaacgcatcctgaacaagaccggaggagcaccagcgcagcacaa

SEQ ID NO: 36103 - DNA, 773 bp, Macaca Mulatta
  misc_feature (1)...(773): n = A,T,C or G
ggattcacattcctgagcttggcattcaaggcctcatggtcagacttcatcttacctttctaatctattcagtttgtacctttcatatgccagaaggttaccatggttatcttgggatggttttaatttagtaacttttctcctacttttttagattgtctattttttaattttctttttcattgttatcaaacatatgcatgccttcttttaaagggtcaaataattctacaaagcttgtgctgaaaaaagagtagattcctccagccgtgcgcacacacacacgcattttcagctccccagagttaacgacttccaactgtttagcttggtcttttggtgctgacctccataactctaaatagcatacttgctttgctatttcttgatttctctaatttgggattatctgtttccttttccatatgaaagatgaaggatttactctattttattctcttcactcttcacctgtgccacatatcagccctttcattatcccccaccatagttaggtcagtatttatggcttctatgattataagcatgtaaatgttacctacacttgaatcttgtaggaaaactaaaatccttttttctttactgtataacttttttgtttttcctggaagttaatattgtcccttttattttcctttaggaaactngttttaactctccttccttctccaaaacctggacccacattatcaggcttcttttccctcaatcccccaccattagtttagataaagtattttgccggttttcaa

SEQ ID NO: 36104 - DNA, 785 bp, Macaca Mulatta
  misc_feature (1)...(785): n = A,T,C or G
ggattgctggggttcacctggaaccagattcagttgaagtgagcctggtgtctggggctgcaggggctgacctggaacatggatttacagatgtggttctggagcctcagctaatacttctcttaaaattctaataattaaattgattagaaaaactatatgaaaagcccatttaaagatcagtgaatatatggaaggtttttcatgacaaaaatggtttttcagttgagaggaaaaataatggactatacaataaataaaattagaagctttgctacctatatggaaaaataaaactagatttctgtttgatagcacatatataattgaatcttttctagattaggaatctgagtatacaagatttttaaataaatggcaaaacatcagaaaaattataatgttgcatcaggatagtctttgataagaagcaacacatcagaaaaacaaaagataagattgagaaataatgttataatattgggtgctgaaaagagaagaattaagtttttaataaatgccagagtagcttgtataggaatgacctgcctgcagataaacattataaaatctacacaaaatatattcttgaaatgacagcaactccaatggaactggagggctaccagccaaagagtaaagaggatacaaatttatgtttagagagacttttgctttttgcttgaagacacatccccaaccctttgtggcccaaaataccttacactccctttacaaaactgccaatggatgggacttgtgggctaccaacgatggggtgaaan

SEQ ID NO: 36105 - DNA, 639 bp, Macaca Mulatta
caaccgaaactgatcgctgtaaactgggatcttcggaagtacctgttggagggaatgtagcagtaatggcttttcaaagcatgagaatcaacaggcacattccaatgagcaaaccccaggaatccacctgttctcatcttgttaacaacgctccttccacggaaaccgaccctgtcctatttcctcgccttgatcattgcccagaaggggcagggactgttgagaaacagaggcagcatgtagcctgaaggcttgcaccgtgcagaagaggatccctgcggctgcgggctcttttccaggcccaaggacaaggtggcgtgtgctgggttgatctgcactctgctttggccaggatggctctccttagagaggcaaacggctccgatgccaaactgccctcacaattccaatcacaaaggcaggctagggccacagttcaaacccaattgctaatgtccacaaagaaaagcagcaagctggaaatgcagtcggtcttgccatgctggccgctcagcttctcacccccgggcctaagaaggacgaggtgaggatgagttgcgtttacagagtcctcaccaggtgccagtcaccgatctcaatgtctcacagctgccatcccgccaggctccaaggaggaag

SEQ ID NO: 36106 - DNA, 682 bp, Macaca Mulatta
catactacacggtgaaactccataaaatccctaaaagataggcgttcagagaacttttgattttggcaaacacatccactttctgggagcatggtgcaccccagcacagtggggacagacagtcctgtgctcaggaccctcccagacctcaccctgtgtgcctcttcacctggccgttcacttgtgtcttttatcatatcctggaataaactggtaaacgtaagtaaatgttgccctgagctctatgagccattatgacaaattatcaaatctgaagaggggcttgtaggaaccctccatttgtagcccagtcggacagcagttgtaggcaacctgcagaccctctgcttgcaattggtgtctgaagttgcggggcagtatctggactgagctcggaactagggggccttgtgctcatcagagtaggtcgtgttcaaattgagttaaattgtagaacacccagttggtgtcaacagagaactggacagttgcttggtgtgaaaaagctacacttctcttcacaaaccacacttcatgagccagggccattccagcaaacctgcttctttgacaccaactaatgaggaaaacactttttcctgttaagccttgtatactcccaacacttctgacagtagccacgagtgtacctttgctactgggggaagatacttcgctactt

SEQ ID NO: 36107 - DNA, 216 bp, Macaca Mulatta
  misc_feature (1)...(216): n = A,T,C or G
ngcatttttcaagtccgctggagccagtgcccaggaggagcaggcacagttccgagagcaggtgaaagagcacagagtgtgctgccagcgcctggctcacctggtggcctctgcccaacaggagccagacgcagtgatcccagccccagtgactggaggcgagtctgtgagtggggagacccaccaggccctgcaggaggtcatggagaagctgga

SEQ ID NO: 36108 - DNA, 1235 bp, Macaca Mulatta
ttgaaatggaatgaagacctgagttatttggataggaaaaaattatgatagtgcttatgggaactgtaaactcttttgtgtttgacgcatcaaacttcaagttttttgtaggtttctctcctgaaattttctttctcttctatactttatgcacttactatactactgatgtaataaaagggcagggttaaaaatattgtatctgtattcattgtgaatcctatagcttttctagttatcaaaaaatttctttctaaaatactcttaatcccattgttttggtttacatcttaccaatttgtggtatttcaaatgccattaatcattttagtacaacacctgtgtttataaaaatttgaaaacattacatattgtatttgaaactaattagtgaatggtaagaaaaaaactggccgacagaattataggtgatgcattagttaagtttcaaaactcataataaaggaaccttcagagataagttgaaacccagtggtatccctggataccactggggactggaaaagaccccaaaaaggcagtggagaagattagtgtttacttgctgtggttgtggtgtgctgctacttaattacaggtggtgacacgctgaaattcttattgtccaataatctgaagtagtttccggtatttatctgtactaaattggctataaattgagtctgcaaagaggaaactttttgactgtactgtatttaggagcctttgtacagctaggtcagatctccacgatatgaagtatttgagttttaaaatatactgttattaaaaggaaaaagacatggccatttttccatgtgcttaaatgataatttccttattcagtttcagaagaaaaagaatgaaattgagtaactgtcattgcgttagctctatgttgaaattgggaaattgtggcataaagcttaaattcgtgtttatcaaatgtggaagcatagtaagtataatgctgctttgtatataatgtaagtgctacaaatagtctcagcactgacaatgtattgatacctcttaaatgaatgcaacttttgatgtaggtgttttgatatgcctcagaaaatatctgagtgtctaagaatttgttaatctgtttggtaatgaagatacttcctgtggttttgtttcatattttcatgtttaaaatttaagttttacatttttactactgttaatttaagtaaaatttgttctgtggttaaaatgaggttggcagt

SEQ ID NO: 36109 - DNA, 631 bp, Macaca Mulatta
  misc_feature (1)...(631): n = A,T,C or G
ggggatggatgaggctggtcagggatcgctggtaagaacaggtgtctgttgctattactctctgttggtctgcctgggcttgaatttagatgccgggagctgctgggcccatcactagaatgactttggaacagtctcagctaaaggctagaagtgaataaataattctaccgccactcctcgaaataagattttagcactctgttatttgcttcgaacaggagatcagagaacatttgagagtggcagtttgcatttgggacatggcacggcagccgtggctgacggccaaggactgtctcatgcagaaacccttgcctggggcctcgggtgcgtcttaacagaatctgggataaataccaggacttgaacagagcgcccgaaaaacagagactggccgctgcctgtgaaaacaacattgacaccctgcagtcttccggaaaagggggcacacttctacatctgggggaaaaaaggtgggaagaaccctcttctgcaaaaccttggggtggaattgcggccaattggccagattcccctttgttaaaatttgggccccaaaaacctcnnnnnnnnnnnnnnnnnnnnncttaaataaataaccgtgtccctgcctctatcccctcccacg

SEQ ID NO: 36110 - DNA, 720 bp, Macaca Mulatta
cttacaaacaacaaatcagagaagataacattggaaatcagcttctgagaaagatgggttggactggtggtggtttaggtaaatctggtgagggcatacgggagcctatctcagtcaaagagcagcataagcgggaagggcttggtctggatgtagagagggtgaataaaattgccaagagagatattgaacagatcatcagaaactatgcccgctctgagagccacacagatttgactttctctagagagctgactaatgacgaacggaagcaaatacatcagattgcccagaagtatggtcttaagagtaagtctcatggggtgggccatgataggtacctggtggtaggtagaaaaagacggaaggaagacctactagatcagctcaaacaggaaggccaagtgggccattacgagcttgttatgcctcaagcaaattgagatcttactaatttattttgtaaatgcctaatgaggcagatttttgaattaaagagatgctacatgttccggttgcagagtatattcataagatgtctcaccttgttcatttcacatagtggtttattagatattggaacctacagaattctgtctacttgtattagcttaatccagcagatgatattgtgcagttactgcttgagtcttcgatattgctgtgtccctcagatttaagagtttgacaagcaagaaccctatccaatggcatttaccc

SEQ ID NO: 36111 - DNA, 784 bp, Macaca Mulatta
ggatctttcatactctgtattctatgaaagaagccttaagggattgcttcaggaacaatcgggcttattctttgagctgacttgggaatgcttgaacttgttaggtgaaaagccttagtttcaaaatgttttgttatgtctgtaccagagaaatgttatcattaaagggtataatatatgaaaagtgtttagcaaagggcttggcacttaatcgatcctcaatattattaaattttatacacattctaagggtgatacatagagagaattctgcttctaagaatatctcagtatggcagagaagactggtggtgtaagttcaacatcagcttgcagcataagattttgtgaaaatatataagaggtacacctcgcttgggaacctactgcgatcgtgagagaccgatgagttacaataatgcagaagagctcagaacactatagaaatccagttttgggtacaaaaaacacacaagatatattttgcaagttttattgttagttgaagattaactgcagaccatgtacagacaccagtgtgtgacttacataagacacagaattctgttcagagcattcagattgtttcattgttccttgcgttgtaaagaggagacctttctatgatttgtagatatcctttctaccttgatgttattttctcctgccaaaagatggtctaaaaaagaccaaacttcctgatctaatatgaacagatggcttgcacatccattttgattgctattttaaacaaaattgtcattttatgctggctttttccctt

SEQ ID NO: 36112 - DNA, 305 bp, Macaca Mulatta
ttcaactgactcacaagctctcaggtgcttactgggtgggatttgactgttgttgctaattaaatccccattccaccagtgattattgtgactcagtagtccttccccattagtgatcataaaacttcagggaaatcaaagtttctcatcaggaaatgttttggaattactagtataaagttaggaaagtggggaaattaggttactgccaagacctttaagccttctaaacagctttatattttattgtgtttaccttcatcagactcccttcacttgctttaagtttttaaaagtattcccca

SEQ ID NO: 36113 - DNA, 687 bp, Macaca Mulatta
  misc_feature (1)...(687): n = A,T,C or G
gggnnnnnnnnnnnnnnnnnnnnnnnnnnnnnnnnnnnnnnnnnnnnnnnnnnnnnnnnnnnnnnnnnnnnnnnnnnnnnnnnnnnnnnnnnnnnnnnnnnnnnnnnnnnnnnnnnnnnnnnnnnnnnnnnnnnnnnnnnnnnnnnnnnnnnnnnnnnnnnnnnnnnnnnnnnnnnnnnnnnnnnnnnnnnnnnnnnnnnnnnnnnnnnnnnnnnnnnnnnnnnnnnnnnnnnnnnnnnnnnnnnnnnnnnnnnnnnnnnnnnnnnnnnnnnnnnnnnnnnnnnnnnnnnnnnnnnnnnnnnnnnnnnnnnnnnnnnnnnnnnnnnnnnnnnnnnnnnnnnnnnnnnnnnnnnnnnnnnnnnnnnnnnnnnnnnnnnnnnnnnnnnnnnnnnnnnnnnnnnnnnnnnnnnnnnnnnnnnnnnnnnnnnnnnnnnnnnnnnnnnnnnnnnnnnnnnnnnnnnnnnnnnnnnnnnnnnnnnnnnnnnnnnnnnnnnnnnnnnnnnnnnnnnnnnnnnnnnnnnnnnnnnnnnnnnnnnnnnnnnnnnnnnnnnncccatnnnnnnnnnnnnnnnnnnnnattatccacatcatttactacatttttgtcgcccctctctcctctctaaaatctcttcaaaattctttatgtgccgcggccctcctcctcagaaaacttttctaactttg

SEQ ID NO: 36114 - DNA, 767 bp, Macaca Mulatta
  misc_feature (1)...(767): n = A,T,C or G
gggaggctgtaaaacaaatccggaatcttactctgtgataaagacccattaaaaaaatcaggagatttttggcaagagaacgacagtagtcagattgctatttcagatacctagtgattggcagcaggatgcattgaatggccttaactgcatgcctgtaatcccacctacttgggaannnnnnnnnnnnnnnnnnnnnaacctgggaggcnnnnnnnnnnnnnnnnnnnngtcatgccattgcactacagcctgggcaacaagagtgaaactcccnnnnnnnnnnnnnnnnnnnnnnnnnnncatttttttcatgttatctatccaagcactgtcccatggtcagcaagtcctattttacaatgtggattttccaaaataattattgaatacagctattctatggttacttttagtgtttttgtggtatgtggtgtgggagtgtttatggaattaccagtatcttaaattttcaaaagaaacttggaagtctgtcactctaaatgaaagtctgtcactctacatgaattatgtgctcaaatttgaccagctcagttttagacacaaaacagtaatttgaaaaaggaaaaatgaagagtttaaagttcaatgggttaaatttttgttcctgccataattaaaattaggttttaaaatttctaaaaagtgtgaaaaatttgctttgtttaaaaaccaaaaatgggtcgggggaatatggctaaaaggttaaatcaccggtttttttaaaggttttaaatccatgcccc

SEQ ID NO: 36115 - DNA, 643 bp, Macaca Mulatta
  misc_feature (1)...(643): n = A,T,C or G
gggcatgaattttggcatgctctttaagccataacttaattgatgatatcttgaatccaatcctggtcagatatattttacacatcctcctaactcctttgggaggaatcagagacagggtttctgaccactaccatggagaatcaagataaaatatcctgtgactgttagaagctcaattaggtatttatattggatttaggaacatgaaatcaatgccactgaaagctcgaagaactcttatgcttattaacaagcagctctttatcttgtctatctccccagcatgctcaggcagagaatatagaagaggtaacttggagttaggcataagagaggcatagacagtggatgaaccatattttcactgatccttggttgtcatagttgcattagtaagctcccgagaaggtggctcttgcagaaattagtcagacctaaatgtttcttcctgataaacaacatcacagaaaagatacaccaagatctcctgttgggcttaggtttcagatgtgctacagacgaaacattaagacctgatttctatctcttnctgatattcagttataatatgaagccatttatattttctcaatttctagtatcaaaggcagccagtacattgattaattctactnaggaa

SEQ ID NO: 36116 - DNA, 766 bp, Macaca Mulatta
  misc_feature (1)...(766): n = A,T,C or G
tgaagttttaaggattcggatcatttcctccttttcctaagccaggggagggacattggaaatgaaaattggagactttaaaggggcacctggtaatttttgtaacaagcttttgagggtgcaagtgatcttctcccactttacagaatgtggtgactgagactcagaggggccaaatgatgccccaaggccacccagctggggagttgcagagctcccacatttaaactgtttagcttccagatgatattttttattctgtgtgctgttgcatcacttatgaactgaccgtatgcatctccttgaaaatgggccaagtatttgtggaaaaaaagcagttatggaacagctggtgttgtatgatcgttttaaattgatgtcatacagcaacatatgcatgcgggtatgtatgtgtacagatatctatacatatctggaaagttgtttaaatattaaagatgattatctctggctgatggaatttttactaccttacaaatttaaattgtttaaattattttaccaaaaatgcattttttaaaaaaaatgtaagaaaaacttggatttctttgaacagttacagtcattcatagctgttcctggaggatgagatggcctgtttttgttgagacagactctcactctattgcccacgctggagtacagtggcgcgatctcggctcactacaacctccttccagnnnnnnnnnnnnnnnnnnnnnnnnnnacccaggtaactgggattacaggcacctgccaccacgcc

SEQ ID NO: 36117 - DNA, 672 bp, Macaca Mulatta
gtcactgaatttgtgttcctggggttgtcctctgaaccaaagatgcagctgattctttttattatgttcttgttcttctatttatcaactgtggctggaaatgttataatcatcattattatccagatggaaccttgcctccaaactcccatgtacttcttcctcactaatttatcctttctggatatttgctacacatccaccaatgtcccccaaatgctgtccaacttggtggggaaaaggaacaccatcccattctccagctgtgctactcagatgtacttctccctctcctttggaatgattgagtgtgtcctccttggtgtcatggcttatgacagatatgtagccatttgtcatcctcttcattatactttcattatggaccaaaacacctgcattcaattggcagtcatttcttggtccagtagcttcctgagttccatggttatcaatgttctcatgttgagcttgccctactgtgggcctaatatcctgaatcactttttctgtgaggtaccttctgtcctgagtctggcttgcactgacacctcattcacggagctagttgtttttatcttcagtatcatcattgtcttcatccctttcctcctcattacggtttcctatgtccggatccttcaatctcttctcaggatgcggtcagcctct

SEQ ID NO: 36118 - DNA, 185 bp, Macaca Mulatta
ggcacatgggcataggtaagcggaagggtacagccaatgcccgaatgccagagaaggtcacgtggatgaggagaatgaggattctgcgccggctgcttagaagataccgtgagtctaagaagattgatcgccacatgtatcacagcctgtacctgaaggtgaaggggaatgtgttcaaaaacaag

SEQ ID NO: 36119 - DNA, 927 bp, Macaca Mulatta
tgtatgatgggaagagtggagatgatgtgatttgtggtgctatgggggatgttcgatggctagcggtggatgttagggtcgtggattttgtgttggtagtggggtgttatgtggatagtatttttgagtcatgagacattgttgttttagtgatgtggtgctagatctggtacgtggtggggatgcgggattggttgtgctgtcgacggggtgttctcgtcacgtggcacgtgacagcagcgccgggaccacgagtggtggtcagccaggccagcggcaatgcgcacgatgtgattggttcgctgggtagagggctcccatctgcggggtaggggctccggcaatccgtctgggtgcacatggcacgtgtatatctgctcttctccagaaggcaccaccacagctgcccacttctggaaggttccatctcctcctggcactggtctccacaagctcggtgtcctgagtttggtcctccgcatcccggtgccaggtcagtgtgatctccgcagggtagaagcccagggcccagcacctcagggtggcttcatggtcagagacgggttggtggttcacgtgtgtctttgggggatccgcgcgcagcagcgactcattctggttctccaggtatctgcggagccactccaggcacttgccctccaggtaggctctcagctgctccgccgcacgggccgcctcccacttgcgctgggtgaaccgagccgccatgtccgcggcggtccaggagcgaaggtcctcgttcagggcgatgtaatccttgccgtcgtaagcgaactgttcatacccgcggaggaggcgcccgtcgggccaccaggtcacagccgtacatccactggagggtgtgagaccccccctcgctctggttgtagtagcggagcgcggtcactcaggttccctcgagagtct

SEQ ID NO: 36120 - DNA, 599 bp, Macaca Mulatta
atgaaaattagaaaaataacgcatagagccaaaaatgaagaccttgaccctgtgttgagtgaatgaattcgacaacaaagaagtaaagatataccactgactggtttgttggtcatgaaacaagctagaatataccatgaagaactgaatgttgaaggagagtgtgaatattcagaaggctggctgcagaaatttaaaaagtgtcatggaatcaagtatcttaaaatcttggtgaaaaagcttctcctgatgatgaagctactgaaaattacattgatgaatttgctaagataatatctcatgaaaatcttagccctgaacagatttacaatgctgatgagacagctctgtactggtgctgtgttcctagaaaaacctcaacaatggctaacaaaagagcaacaacagatgtcaaagataacaagcaaaagttaactgttcttgggtgtgctcatgctgcaggcacacacaagataaaattggcagtgatcggaaatagcctatatccaaggcgtttaaaaggtgtgcataatttacctgtacattattatgcacacaagaaagcatcagtaatggaaaatcttttccaactggtttga

SEQ ID NO: 36121 - DNA, 438 bp, Macaca Mulatta
  misc_feature (1)...(438): n = A,T,C or G
acaggtgcatttgaatagttaccaggttgccatgtatttgaagtggtgtgagagctactcgtttggaaccgtagtggattttcaaataggaaaatcaaaaggcccaaannnnnnnnnnnnnnnnnnnnnnnnnnnnnnnnnnnnnnnnnnnnnnnnnnnnnnnnnnnnnnnnnnnnnnnnnnnnnnnnnnnnnnnnnnnnnnnnnnnnnnnnnnnnnnnnnnnnnnnnnnnnnnnnnnnnnnnnnnnnnnnnnnnnnnnnnnnnnnnnnnnnnnnnnnnnnnnnnnnnnnnnnnnnnnnnnnnnnnnnnnnnnnnnnnnnnnnnnnnnnnnnnnnnnnnnnnnnnnnnnnnnnnnnnnnnnnnnnnnnnnnnnnnnnnnnnnnnnnnnnnnnnnnnnnncttatacaaagaaaaattaaaactattttaaaataatca

SEQ ID NO: 36122 - DNA, 588 bp, Macaca Mulatta
ggggctttccgcgctacctacagaagggtccatacggcgttgttctggattcccgtcgtaacttaaagggaaactttcacaatgtccggagcccttgatgtcctgcaaatgaaggaggaggatgtccttaagttccttgcagcaggaacccacttaggtggcaccaatcttgacttccagatggaacagtacatctataaaagggaaaagtgatggcatctacatcataaatctgaagaggacctgggagaagcttctgctggcggctcgtgccattgttgcattgaaaaccctgctgatgtcagcgttatatcctccaggatactggccagaggcccgtgctaaattttgctgctgccactgaaacaactcaattgctggccgcttcctcctggaacctttctaacaaatcccggagcccttcgggaaccccggttttttgggttcggaccccgggttaaacccccccttcggggggcctttagttacccccccccttggctgggtaaaaaaatccccccgcctttggaaattcccccccgcaaaaaggggcccccccgggtttttgggggaacccccccagaatcc

SEQ ID NO: 36123 - DNA, 628 bp, Macaca Mulatta
tttgaaagaatttagccatttaataatttctcattctcaacttgcatttagattaaaatctttttatgagtctctgaaatgtctacctgcgaagaacatgtaaacattgccaggtaccagtcattattctttaatggctttttagtcctctgctatttttttaaggcaaaagaaatattcatctaacatttctaatatcaaatccccaattgtgattgtttttaaagatcatggcatgatcacagggaccaaggctgtgtgcatgcataactctggatttgaaaggaggagagttcagccatctagttcttttcttcacatgacacttttaaacagccagtttgactgaaattaaccaacttggcacagcctaaaaagaagtaatgtgaaattaaattatttttctttgaaagtcttttgaaataagagaccatgtaagtaggaccctaagataaccaaggaatttgcttccagggccctcattcctctgccattacttacaaattttttaatttttactacctaatactctttctctaccttttccacatttgaaaacatacaaggcagctcacttcatccaaaaacctaaaaactccaggaaggaaagaaacgatgatatggggaa

SEQ ID NO: 36124 - DNA, 1003 bp, Macaca Mulatta
  misc_feature (1)...(1003): n = A,T,C or G
gcatcagcaggactcagactctcagcagcgtgctctgacgctgacctccacagacnnnnnnnnnnnnnnnnnnnnnnnnnnnnncattcaagaaaatcagaggactttgttaaagattcagaactgcacttacccagggccgccagcttggagactgttgcccagttccggagagcccagggcggctttcctctgcccggtggcccgcctctggaaggcgtcggacctttccgtgagaaaacgaaacacttacggatggaaagcagggatgacaggtgtcatctctttgagtatggccagggtgattgaaaactcagcctcaaaacaaaaaattcactagttatgattcaacgcgttcaacagaagccatccccagcccagcttaaattataaagatagaaaataactgttccaatctgcgtggtgcttctttagtaaatactgtacagattttaccatggagaactttttttttagtttttaccttttcttaattacccttattccaaatggacgaacactttctaccactgctgaccattgtaaaataccgtgtatataaatcccattgaaataatgccctggaatagaacatctcaaatgctgcttaattacagactcaggtcgattacttgtatttcatgtaatgttcctccaaagttagacatctggtgcaagaccaaccgggagaccatggaattgtcaaaagtacaaactgacagtgtgtatatttaatttaaagacttatttaaaaactcacaagctctcacctagactttggagagcagtctgttttctgtaatgtctgatactagaaactaatttgcttattttagttgtattcaagatttgaagatgtattttatagacaagttctgtttttgaactttgtggaactgttccaatcaatttcccagttatgatgagtatttacattatgaatgtataacccagacatgatttgtaaagccgacagtatgtttctattacacaacactttttg

SEQ ID NO: 36125 - DNA, 671 bp, Macaca Mulatta
cagtagaaaacgaaatagtaatatgctaagggtcactgagattcactagcagcagagccaaatccttttcaataggcgtatattaacaggctgcttattttggcagaggttacaacatatagatgaaaatgaatcttagtcactgaatattcatatacatttccctcaataccttagacattcatggtagattttaattagttagctttctaactagtcagatttctgcccaaagttcttagtcaatagtaattaagatatagcttcaaaaatggctttgcttttgatttctactcatattcatatggctccagaaaaatatttttttcatatttgacaatgtcagctccactttagaaattttcaataaccagatgagaaaaaattaagaaattgctcaacagaaacatttgtaaatggatttgaaagattgagccaaattctgttgtcagttctaagcatgcagttctcacctccatttaggcccccatcagatgagggtcaggaatttagctggggagcctaaatttagttcagcctacctttgcgaatagcatcaattcagactctcttttcattatgttttcttttctttttccctgttattaaactacattgtgttagagttgtagtctaggatcctgagatattttccattcttgtcaccattt

SEQ ID NO: 36126 - DNA, 868 bp, Macaca Mulatta
  misc_feature (1)...(868): n = A,T,C or G
cgcagagagtgttttaaggtgtaggagttttaaaggctgaggggaaggatcaagggaagaggatgagattgagattccaagacaggaaataattagtggagcaagtcttggaatatttgggagggtagaattaaagacacaaatttgagaagctaactgtggaaaagaggagagagaattccttttctgagatggcagggagtagaaaagcgaggattactatgtggagaaatgttaaagtggagataaaagaagttgggagtgctggcgtctaatggtctgtttcagtgaagtatgaggctgggtcaccttcagaggtgagattgataggatgcccgggtccaggggacatgcttctgtcacagcttggaaagggcatgtgataagcccttcaagcatttagaacactggcatcnnnnnnnnnnnnnnnnnnnnnnnnatgtggtatgtgggttaagggagggagtgagagacacagaaagattctgagcatctttggaaagctggatgtatttggtagcatatttgaccttttccttatatatcatctgaagagtttttgccagtgtatatagttttacaaaaattagaaataggatataaatatagctgaataggatagcctctgtatattttaaagttaatgaagcctaataaacagttaatgagcatctttacaaccttctaaatttttcaaccttttaaaaattatagcagccgtgcttgcggacagtccaaaaacacaccatgggccatactttgcctatcctgatataaaacaagtaaatcttctgagaagtatttaagataagcccaggacagttagtaatataggaaaagatctggataaacatggttgagaatttca

SEQ ID NO: 36127 - DNA, 835 bp, Macaca Mulatta
  misc_feature (1)...(835): n = A,T,C or G
ggaattcttcttcttcatcttacaggtaaacaaactaaggcaaaaaagaaagtgaaataataagtgccagtacgcagagctagtaaggaatagggtctgccaagtcccaaaatgcatgccatcactgctgccccaaactgcctgtggcacagatagaggtcatgtcttattcatccctgccatccactggacccagcttagtgcctgacacacagaggggctcagtcaatgctgattggtttgaggtgcagcaaaagtgcctagcagggtgagcacctttgctgtgattgagtatctgattctctatgaagagaaggggagtcctgagtcaaacacattcttctggctcctgactctcacctttatttgccctgcttctttgctcctccttcttcctaactgcaccattcggattcaaagctggagcttagtgcagacaaagggaaaacagaactttgaacgaccactgtgggattatgagaggagaaacaagaaatttgacagctgaggaataaagtgaggagaagagaaagtgattaagctttatcactttaacttaaaatttaacctaatgaaaacaaaatcttatctgaaattggaaaaatcaatgtattgattgttggttcattgccctcttctttatgatttgacagtctgagaataatctgatgggtgtggcttaaagatgtggatcatgtgtggaactggaattgggtgttattcnnnnnnnnnnnnnnnnnnnnnacctgtacaatacacctgctttatgcacttgagcagggaagaaatccacagggactcacctgtctcctggtctgcaaaaaaaacaaaatca

SEQ ID NO: 36128 - DNA, 795 bp, Macaca Mulatta
  misc_feature (1)...(795): n = A,T,C or G
gggggagggaaactgaggcagggcttgcttaatgtcctctggaatgtgtctagacttgctggctccttgcttatagccctcctaggctcccaggctcctaggctcctaggcttctattcccattatctcaagtagcagaacatgttccatataaatgctaaaccatcacagctgtaaatcatgtacttaatgcaacatgtccttttgacctccacgttctcaccacctgtttctttgttgattacccataaataccgtgggctcccagggctttggggccttcgcagcctctacaatagcgaaggccctctggcgtcccacctttttctttcactcttttcctcaatcctttgactccgctggactttgtcacccccacgacctggtgttgggtctgatcaccccaacaacatctttgtttaggtagaagtcagaagttaagtcagtaggtgagatgtctcaggaatcagacagtaacagaatactgagaagttaaccctaaaaagcattaagttttaagaggagggttaaaagaaagtgtttagcaaagaagactgagggcaagaaacccatgggaagacaagcatgatagaagttactaaagcccgaagaagaatttcaaaaaaaatgcggcaagcatgggaaacattttgaaagacccaaattatggaaataaccctttgaagaaggtccctcagtaatttacggtaaaaggcaaaattcggtttagnnnnnnnnnnnnnnnnnnnnnaaagtcaaacttttccggtggggttgaagaaaatgtattggtgg

SEQ ID NO: 36129 - DNA, 907 bp, Macaca Mulatta
ccagcttccccaggcccccaggcagttgagagccgagccggtgagggcaatggtgcggaggccgaacttctccagcagccaagccactggcaggagaagagggatgtaggtcagcatgtagcacatggacagccagtcgatggcaaaggcactgacaccgtagaagtgcatgaagatgttattgatggagccgtactggatccactgaaaggcgttgcacatggagtagcagctaaacaccaggaccacggcccaacggcgcctgctcaccttgatcacgctgaggtcctcagggcccgagctactggggtgagccaagccactgggttgggctaaggcactggggtgggccgaactgctggggtggacagagacgctggggttgatggagacgctgggatggaccgagacgctggggtccgcttggagtgcggactccggcgcaggggtgtcatcgcgctcttcctggctgggaccttcattcaccatgaccacagtctcctctggaatcccggagaagtggtgaggactccggcagtcttaagggatagtggcttccgctggtctcttagagttgaaagaacacttgcctattccagaagaaacagagactcaaggctgcgtaaaagcctcaagtggggcttcgtgtgctcacccccaagctcctcctcccacttttgcttggggctgtctgttcccacccgcggcgatcgttgtcccaaggccggccgcacacgctgcagccggctccggaccgctcctgccttgggtctccccacaaggcgttccttgtgcaggaaaagttctctccttgcgcagccacttcgcccgcagagtcctctccggggccagcttggggcctcgccccgtcgggcacacgtgaccgccccgcccccgccctggctgg

SEQ ID NO: 36130 - DNA, 824 bp, Macaca Mulatta
  misc_feature (1)...(824): n = A,T,C or G
ggggtctgaatctatcgtgtttgccttttcaggtgccatttctactgcctaatacagtgccatttgccttgtgaagacccataaacattcattgtgttgaatgtaaggtagagactctccctagtcttactgatctcagtaccccacaaatgattaagaatgatatgaaaaccagcagctaaggaacatcttattatttagttgtagcatattcataacaagtgtccttcaaggatgaacatatattctcattctatttgtatttatcaagtaaaacttgtgttgacctttagtgcattatattcagcttttgaaagtattatgtatgtactggaaagaaaagaaatcttagagtcttggacattgtttatttgagcaacaactagaaaggagcaatgaggtttatttcagttgtatttttccctaagcacaatctgccatagtttatgtatgacagagataattcagaaaagaaaactatatataaaagttgtatataaagtttgtctctgaaatatttctttgaaatttttaaaaaatgactcatgtttaaaaacaaaaacattccaagcattggactttttttttcatctggttatcatgacttttttaatttcgggtgtaaaagtaaatccacattggtttaaaattgtaatgtacttttaaaatttcaaaaaatcaaatctggaagaaataaccaatttgcgaattttcggaaaaccaggcaattgctttttaannnnnnnnnnnnnnnnnnnnnnngtcacccgaaaaagtggcctttgaatttctcatttaatgtaaaccttttgtgaaaacacctc

SEQ ID NO: 36131 - DNA, 828 bp, Macaca Mulatta
  misc_feature (1)...(828): n = A,T,C or G
ggaagaatcaagaaaacctcagttggtgagtagaaaatatcagaagcctacttagtcctatacgggattgttttatcatagctcctacaggatgtttgatggcattgtgtacagtagtatttgttctctccatcatgagataactccagccacaatgttttccatttatgcgtggtaatgttttgtccatttaagatgcaatcacatttcattgtattgtattccaatttagaaatacagcaaatgttttttatatatattaaatgtaaaatatatacatatacgtacacataaattataaatatatatcttatttttatatatgtaaattatttaaaacatggtggagtaaaattagcaagataacagaatgggaagcccaccaattcaactaaaaattcatagacaaattttctttgtgagacattaagaaaccacttgagatgctccaaagctgttggtgaaactactcatgttgacgctttagggaaatctaaggcacactccttccctaattcttacccccagcacagtgccaaaaaagcaggaaaaaactccccagctccaaggctttgctcttggnntataaatgatggatgacatgtcccattcccccaattttttccgggggctacctccctaggattggccttctcttcttagcctggtctcaggtgtacccgatagaaaccaaggcataagccctgggcgtgccttggggaccaagcaggaaaccttaggcgtgggggggcggcgaaaccctggccagtttttccctagccactgggggggttcccttccttcctcttggaatccaaccattggagc

SEQ ID NO: 36132 - DNA, 837 bp, Macaca Mulatta
agcatttccaggagatctcatggttcctgcacccttttcacctctcagtggcccatcatgcaaccaaaaatgcatgggcttcctcaaggagatgggctcacctggctatcagagtgaatgcatcaatcagctcatccaccaactgagctagactcaggtgccaaactgcagtaaatttttatcagggaagtggaagcatgtgtttttgtttttggggcaatttttatcaagtatcttcgaagaaaattatttcctgctttcatcttcaaaaactagaaaggaagggtcaaagaaaagacagtaggttattttcatggcaagcacgtctcatcgcagtccagttccaaggaaaaattccagtgttttctacatcggctgccacctcctctgaaatcagcacattccatggaggaaggagtccggctttgttgcatcctctctcctaggatttaatgttggtgaatgaataactctagcatttgaacaaggcttcctaagactctggcagcagttgatctagtgcaggtacataattcaatctggagatacctggagcctcgttctgaaaaagacttgacatacacataggaaaaaaggcacataaacaaatgttcacttgtttctgctgttaaaaaaaagagatttttatcatctgattgacaatgagaatagtgaaaatattgaattggttgggggttgttcgcaaatttttgtggaaataatgtataaaggaaattagaaaatgaaaagtatattggcacagttatatatttgagttttgagaagaacctagaagaaaattcagatactacattttatgcaaatgatacttctcaa

SEQ ID NO: 36133 - DNA, 117 bp, Macaca Mulatta
aatatttggagttttcctggccttattggatgtggctctgatctttgctgacctaattttcactgataactacctttatattcctttggagtatcaatctatttctctatctattgc

SEQ ID NO: 36134 - DNA, 166 bp, Macaca Mulatta
ggaacccaacccatgtgggccctgtggccacagaatgctggcaactgctgctcaaggaccagcatgagggggccagggccagggtgctgcttttgggaatgctgtacacctcagccattgtggcttttgtgctgtataagtgtttcagatgcaaggatggcggggg

SEQ ID NO: 36135 - DNA, 1763 bp, Macaca Mulatta
  misc_feature (1)...(1763): n = A,T,C or G
tgagtgggtcttcagacccttagggctcccgggtcagctatgtggccacagcatgggctgtggtacccagtggcagtggtgctgcttggatgggccccggtggaaatgtgagaggcaaccgacaggtccgccgtgagaatggagaaggcgctgaagtacctggaggtgcacaacaccaaggaggaacatgcctttgcctgtagtgtcagatgggcgtttgtgactgtgctgcaggaagtgcatgcccagtccctgtgggacacagcgcagggaggaagaagaacctctgttgcaggcttgcccagggannnnnnnnnnnnnnnnnnnnnnnnnnnnnnnnnnnnnnnnnnnnnnnnnnnnnnnnnnnnnntgtggtggaacacattttctatgcttcctgtgcccctgctgagttgtgggagttcagcaagtaatgtcggcagtcatgtacagacttagtacaagtcatttgggagaaggacgttgctgtgcaacccagtcccacccaagccttccagttcaaaattacctgctgcagtcaggcgaaagtgtaaagccttttctgtttgataagagaactggccaaagtgcccagctcgtgggggacactggacaaccaaaggccatatgtgaacttggcaatccactggtccccaaacccagagaagtttctgggcaaagctgcattcattgatggttatgggggccagtcagtgaaagtgaaacctgtgtctttgcatcttggcattggcnnnnnnnnnnnnnnnnnnnnnnnnnnnnnnnnnnnnnnnnnnnnnnnnnnnnnnnnnnnnnnnnnnnnnnnnnnnnnnnnnnnnnnnnnnnnnnnnnnnnnnnnnnnnnnnnnnnnnnnnnnnnnnnnnnnnnnnnnnnnnnnnnnnnnnnnnnnnnnnnnnnnnnnnnnnnnnnnnnnnnnnnnnnnnnnnnnnnnnnnnnnnnnnnnnnnnnnnnnnnnnnnnnnnnnnnnnnnnnnnnnnnnnnnnnnnnnnnnnnnnnnnnnnnnnnnnnnnnnnnnnnnnnnnnnnnnnnnnnnnnnnnnnnnnnnnnnnnnnnnnnnnnnnnnnnnnnnnnnnnnnnnnnnnnnnnnnnnnnnnnnnnnnnnnnnnnnnnnnnnnnnnnnnnnnnnnnnnnnnnnnnnnnnagcaatgcatggaacgcttggacgctccggtgggttgttagtccccactatggaagggagctgagctctggtattccttaagaaagaaacagtttaatagcaggatgggtgtgttcatggataaccatcccctgggactgggaacacggttagtaactgtatatggtgcctgtcagtctcataagagtgtggcgggatgggctacagtcgttgtgcagatgacttacctgacagcaaggtggtgtgttcatgggttacaacccctcaaactgtgacggtacagacatccactttagcgaagtgaggcgcctacttagagcggtaatgtacactgagtacaagtcccttagcagcagagatacaagagattttagggtctatatccttaatgcaagataagaccatggggcctgaggcacccctagaccctgagcctttaccgtaaggaagggcataccctcactcctggtggggcatggtatacagatagaactagccagagtacttactgctgctgctgcagtattgcaaaagcctagtactgacaccatatggtgtaaaaacaggtgtcggcaaagtagctaataagctaaactcagggcag

SEQ ID NO: 36136 - DNA, 413 bp, Macaca Mulatta
ggagctccagctgaaggagaaggaggttaagtaaggagagctctataccatggctggtacaaagcttactgccagcagatgcaccagtgataaaacatccaggaagcaaccggctacagaagctgcttgcaagagtgtgccctctactggaggagtgaagaagcctcatcattacagtcctggtactgtggcactccatgaaattagatattatcagatccattgaacttctaatttacaaatttcccttccggcgtctggtgtgagaaattgctcaagacttcacaacagacctgtgcttccagaatgcagctattggtgctttgcaggaggcaagtgaggcctatctggttgtcctttttgaagacaccaccctgtgtgctctccatgccaaatgtgtaacaattatgcca

SEQ ID NO: 36137 - DNA, 75 bp, Macaca Mulatta
cacggttcagcagatggtttttatgcttctttcaaacctggccttgtcgcatgactgtaaaggagtaattcagaa

SEQ ID NO: 36138 - DNA, 1084 bp, Macaca Mulatta
  misc_feature (1)...(1084): n = A,T,C or G
ggcnnnnnnnnnnnnnnnnnnnnnnnnnnnnnnnnnnnnnnnnnnnncgggcagatcatgnnnnnnnnnnnnnannnnnnnnnnnnncaacacnnnnnnnnnnnnnnnnnnncaaaaatatgaaaaattagctgggcgtggtggcacacgcctgtagtcccaggtgctcgggattacaggcgaacaaaaaaangctcagctagataggatgtacaattggaaaagaatagggtagcccctcaatctgctacactgagctaatctcaaaagaaactaattgcaaagaccaaaacaattatagcatagtggaagaaaagacaaaaaaaatctaggcgcggagtatataatagaaacaattaagaacgcacaactaatagcaatagtaacaagagactaataaatgatcagtaacagaaaatcgaaataatatgtgagccagaattagcacatctcacaataagggaagcacaaccacagcggggacacggcgataaatacgcgaaaaaaattaaaaaaaagctgccctcgaaaaaatatataaacagtgagcggaaagaaagcagattattagttgaaaatgttacagccgtcgggatagtgtgaaaaccaataaagttggagccctataaaacacagtcgagataggaaggcgtttagattttgagtcgaatatggtatgtgattgtgtgataaatatgattggtatatataaacaataacaattatacaatcgacacaggaagagctcgcaacataatccttaacaccggtttcgcccatgttataacaacccgtaagaactgtggtgagataatggggagtattgctcttatattctacacaactcgagtatggttaataaacagtatagagacgcaacaacaaagaatagccgcgagtcgaatataaagagttatgtgctaatctctaaactgtttcacaacacaaacagaaatcgaaacaagcagactagaaataagcggcgatacagataagtgggggctcagacgagtgaatgaaaaaanaatatagaggacagagtgtacgacgctgagatgtgtacgaacgatgatgtatgccccag

SEQ ID NO: 36139 - DNA, 811 bp, Macaca Mulatta
  misc_feature (1)...(811): n = A,T,C or G
gggacctcacccctccttggtttctccctctatctgtggccattgttggatgtattctcatctaacaacacaatctggaaagactgaattgaatatttatactagtggttcatatcctttattgctcaatgatctaattaaaaggatcattgccacatttcatatttatatttctacaatttgtttagaaaacatctcctgaccatatcagtagctggtgttatctttttatcaactgcttcccagagtcctaaaacaatacaaattttggattgaaaagttcaacataaggagtttgagtgagtaaaggatgggataaagaagtcaagaagattcaatgaaaagtatcacaaaaaagagtttgatcaacaagagaaataaaaaagcccaagatgaaatgggaggggaaggaatttaagaacagcaataagtaaaactcttaagtaactccagaaagaaaatggtacattttgccaaagaccacttatacttgagaacatggaagaatttgcctgatcctctctttggggaagagagtctctactcttttccatcaaccccgttaccctcagcctctccaacgccacttctcctgactttgtcgtcacttgcttccgcagtacattgtaacctgtattgaaattaaagtcttccccttgaaatattgggagtttgtcttgagaggcaaatgttagcccctagaattcccaagaattcaagggaccatgttaaggtctttttacacattagcccaaacntccataaattcagtcctccgcctttccttttttggaaatttaacacatttcca

SEQ ID NO: 36140 - DNA, 526 bp, Macaca Mulatta
  misc_feature (1)...(526): n = A,T,C or G
aacgagggtccattagcctccaggagatctatgagttgggctttgggagtttgagaaagccctggaattgagtgcaatacattgtagtaggtgagtatcttttacagattctcaaatcagactccaaaatgttaagacccaagaagataccctgaagtacatttagcaactttgatctttatcaaaagcaaccttttccttaaattgggctttaataacaactggcttttcagctataccttcaaactcagacctgttaatatattacaggtataacaagaaagctggaagtgtgcagctaaggagcagagtgtgggccagtagatagaaaattactaaaaggaaacatcacagataaagggagattctgggccgggccagtggctcagaacgggcatggtggcttacgactgtaatcctnnnnnnnnnnnnnnnnnnnncgggcggattgcctgagctctggagttggaacnnnnnnnnnnnnnnnnnnnnnnnnnnnnngtctactaaaactacaaaaaaaaaa

SEQ ID NO: 36141 - DNA, 789 bp, Macaca Mulatta
ggggtattgggtggagcccaccgcagcttaaggaggtctgcttgcctctgtagacaccatctcagtttttattggtgctgaggatttttcagagttcagctccatgttccatcccactcctggctgctgtgcacctcaagctcttcttcaggtgacaatttcacttagcaaagtagagcttagtgtgggagaatctaaattcttcacatgtacagcgattggtgaacctgaaagtatagattggtataatcctcaaggagagaagataatttcaacacagaggatagtagtgcaaaaggaaggtgttaggtcacggttaaccatctacaatgcaaatatagaagatgcagggatatatcgttgtcaagcaacagatgccaaaggacagacacaagaagctacagtagttttggaaatttaccaaaaactcactttcagagaagtggtatctccacaagaattcaaacaaggagaagatgcagaagtggtttgccgagttagcagttcacctgcgcctgctgtcagctggttgtatcataatgaggaagtcaccgctatttccgacaatcggttcgctatgttagcaaacaataacctgcagattctcaacatcaataaaagcgatgaaggtatatacagatgtgaaggaaagagtggaggccaagggaagaaattgacttccgtgatatcattgttattggttaatgtgccgccagcaatctcaatgccctcagaaatcttttaatgcccacggcagaaagaggagaaaaagatgacgtttttcctgcc

SEQ ID NO: 36142 - DNA, 678 bp, Macaca Mulatta
ttctgttattgctatggttgcctgctttaaagagatgcctaataattgctataaaatggtatttgaaaaatctaacttaaaaaataaaaattgaatttcttttaaaacaaatttgtatatgttcagtaaaataactacatggcaattgtcttcactgcctacttagaggaatttttttcttcatacaaaatttatcaaaggagagtagtaaaagtttagtaagcagaaatctatattaattttctatggctgccataataaaatatcaaactgggtgactgaatagaaatttattctgtcaaagtttgggaggccagaagtctaaaatcagggtgttggtagggttgattctttattggaggctcagagggagaatctgttcctggcttctggtgattaccagtagtccttggtgttccttggcttatggcagcgtaactatataaaaccaatcaagctagagccaagggaaaatgtttcaatttcttgagtctttaaattttatttacagttaaattgaatttaaatggaaactcccagttcccagcactgcagtccatcctaatcttttcttactgcactgtgcttttcctatgacacttatcaccatgaggcacactggaatttccttatttctgaagtttatatttattgcgcgtgtatctttactaaactcag

SEQ ID NO: 36143 - DNA, 209 bp, Macaca Mulatta
tggtatgaagttctggtttttaattttgatttctagaattacgtatttatcttccaaactgaaaacacaactagaatagtctatgatttcagtgtttgggatgttacagggtcagtttttttgaaccttcagttatgacatctgagacagattgagcatcattatcaatgcggttctttatttactattaaaatcatgcattcaatact

SEQ ID NO: 36144 - DNA, 776 bp, Macaca Mulatta
  misc_feature (1)...(776): n = A,T,C or G
gggtattgatccatagatcatattctgtttcttttttccctcaaccctctgttttgaggcctcttggtgctgctatgtgcacatctcgttgatcacttctgtctaacttggcactcatccaccacattttacttctcccttcctgtgagactggacatgttggttctgccaactctccaagaccacaaataatgctgcaatgaaccttcctcgacttgcccccagggacctgggcaagaatttctctaaaccagagattttcaaagtacaattcacagacccctcagagttactgaaactctttcggaggatgctcaaggtcagagctgtttctaaaataacactaggacactatttgcctttttcatgaggttgacgtttgcaccatttgtaaaactgttgtcaccttagtgtgaatcaaggcagtggcaccagcctgtactagcagtcattgtattttgtatttttcaccactacatactcagaaaaagggggaaaaccccaccaatcttactgaaaagtagcttagagaaagcagtaaaaactggtaattttattaaatctcaagcctggagttgacgtctttttaatatcctgtgtgatgaaacaggaagaacgcagaaagcacttctgctgcatgctgagtgagatggttgtctagagaagagcgctgtgcaattgttttgagtgtgagctcaacaggncccccttttttctgggaccgtcattttttacttgaaaggaacaattggacaggataaaactattggtttatt

SEQ ID NO: 36145 - DNA, 1942 bp, Macaca Mulatta
  misc_feature (1)...(1942): n = A,T,C or G
aaaccttcatatcccgttcaagcattcgaagacacatgataatgcacaatggagatggaccttataagtgtaagttttgtgggaaagcctgcccttgtctcagagtatgtcttatacatgaacgagttcacactggagagaaaccatatgaatgtaaacaatgtggtaaagcctttagttattcaaattcccttcaaatacatgaaagaactcacactggagagaagccttatgaatgtaaggaatgtgggaaagcgtttggtagtcccaattccttttatgaacataaaagaattcacactggagagaagccatatgaatgcaaacaatgtggaaaagccttcagatggttccattcctttcaaatacatgaaagaactcacagtgaggaaaagccttatgaatgtaccaaatgtgggaaagcattcaagtgtcccagttatctttgtagacatgaagtgacccactctgggaaaaagccctatgaatgtaaacagtgtgggaaagcattatcttatcttaactttcaaagacacatgaaaatgcacactagaatgagaccttataaatgtaagacatgtggaaaagactttgattctcccagttcatttctaagacatgaaagaactcacactggagagaaaccttatgaatgagcgcactgtggtaaatcctttaatcgttccagttcctttcactatcacgaaaggactcacactggagagaaaccctatgannnnnnnnnnnnnnnnnnnnnnnnnnnnnnnnnnnnnnnnnnnnnnntcatgaaaagacccacactggagagaaacnnnnnnnnnnnnnnnnnnnnnnnnnnnnnnnnnnnnnnnnnnnnnnnnnnnnnnnnnnnnnnnnnnnnnnnnnnnnnnnnnnnnnnnnnnnnnnnnnnnnnnnnnnnnnnnnnnnnnnnnnnnnnnnnnnnnnnnnnnnnnnnnnnnnnnnnnnnnnnnnnnnnnnnnnnnnnnnnnnnnnnnnnnnnnnnnnnnnnnnnnnnnnnnnnnnnnnnnnnnnnnnnnnnnnnnnnnnnnnnnnnnnnnnnnnnnnnnnnnnnnnnnnnnnnnnnnnnnnnnnnnnnnnnnnnnnnnnnnnnnnnnnnnnnnnnnnnnnnnnnnnnnnnnnnnnnnnnnnnnnnnnnnnnnnnnnnnnnnnnnnnnnnnnnnnnnnnnnnnnnnnnnnnnnnnnnnnnnnnnnnnnnnnnnnnnnnnnnnnnnnnnnnnnnnnnnnnnnnnnnnnnnnnnnnnnnnnnnnnnnnnnnnnnnnnnnnnnnnnnnnnnnnnnnnnnnnnnnnnnnnnnnnnnnnnnnnnnnnnnnnnnnnnnnnnnnnnnnnnnnnnnnnnnnnnnnnnnnnnnnnnnnnnnnnnnnnnnnnnnnnnnnnnnnnnnnnnnnnnnnnnnnnnnnnnnnnnnnnnnnnnnnnnnnnnnnnnnnnnnnnnnnnnnnnnnnnnnnnnnnnnnnnnnnnnnnnnnnnnnnnnnnnnnnnnnnnnnnnnnnnnnnnnnnnnnnnnnnnnnnnnnnnnnnnnnnnnnnnnnnnnnnnnnnnnnnnnnnnnnnnnnnnnnnnnnnnnnnnnnnnnnnnnnnnnnnnnnnnttcgtagacatgaaaggactcacactggagagaaaccctatgagtgtaagcaatgtggaaaagcctttatttctttcagttccgttcggtaccacgaaaggactcacactggagagaaacagtatgagtgtaagcaatgtgggaaagccttcatgtcttctactgcatttcagtatcatgaaaagacccacactggagagaaaccctatgaatgtaagcaatgtgggaaagccttcatttcttccagtagccttcgatatcatgaaaggactcacactggagagaaaccttacgaatgtaagcagcgtggtaaagccttcagatctgccactc

SEQ ID NO: 36146 - DNA, 939 bp, Macaca Mulatta
  misc_feature (1)...(939): n = A,T,C or G
ggaatttttctgtttatttctctattcactcagtagaatttgtggttgaattccaccttcgctgccatagtttttttttttaccacattcctaatggttttcaaactctatactgtagtagaaaattcatccaactactgaatttagttttagcataatactggatcaaattgtttgaattttcattcctgtcattnnnnnnnnnnnnnnnnnnnaacaaaactaaacaacaaaaccgtaggaaaaaaggaatggcttctttccaactagccaattaaaacgtcctaaagccttaggtttcttttaacatcttaatggttattgaaaagggtacagaaactatcaaaatacttatccaatcaatggggggaagagctgtgtcttccgggacaggagagtgatgaaaattttttaggatacgctattatgcgtcccacttaaaaggcatttgaaccctgattttttaaagaaatgaaagtttttcccacatagtcggaaggtattttaaaaacagttctttccaatcgccacaaagaaattttaatccctttaaaaggttgtttggaaaacattatcacacggttcaagctactagcaattggaataatctctaaatcttttagaaaatatctcaacctaannnnnnnnnnnnnnnnnnnnngtagacattttacgaatgctttccctgacacaatttttgtggggatatgtatattttggcgccaggtgtctttattaacccttgttttctcggtgtttgcagtctagaaaggaaagctctgttatataaccctttcatatgtgcaaagggagatatctccatctctaacgtggccgcaagagaaccagatcgttgtattatcaatattgtggatgccctcctattntgtgaaaatctttatttgaagctggggcgaaaaacaatcaacaactcattaa

SEQ ID NO: 36147 - DNA, 1244 bp, Macaca Mulatta
  misc_feature (1)...(1244): n = A,T,C or G
atttaccttcacgctggagccaagatcgctgcggggagtcccacgaagcaccactgccctctaagaccttggaaagggaaacagcagaaggtgtgggtgcgggtgctggagctccgctgggtcacacggccagcacccgagtgggaactcagagctgaaacctgggttctcactgcagctggatgcagctgtgcccggatggccctcgtcttcctgtacggcaccttgaagcggggtcagcccaaccacagggtcctgtgggacggcgcccacggctccgcagcctttcgggcgcgcggccgcacgctggacccctacccgctggtgatcgcgggggagcacaacatcccgtggctgctgcacctgcctggctcggggcgccgcgtggagggtgaggtctacacggtagatgagcggatgctgcgcttcctggacgacttcgagaattgcccggccctgtaccagcgcacggcgttgcgggtacagctgctggaggagggggccccgggcgcggaggagccgccagcgcccactacggtgcagtgcttcgtgtacagcagggccaccttcccgccggagtgggcccagctcccgcactacgacagctacgactccgaggggccgcacgggctgcgctacaaccccagggagaacagataaggggggcaggcagggtgggcctatgcctgagagccctggggctccaagatgtgcccagcccatgctgggtgaaggccgaagcagaacagggccttttccaaggaatcagcgggagaaggaaccaatctttcagtggcagctgattttacaaataatgttgacacacaaatagcaaggtggttccctcccatctttccacctggtaggaaaaattcaggattttaatacccctaaatgacatttagagaacttatgttatgcctaattcttcnnnnnnnnnnnnnnnnnnnnnnnnnnnnnnnnnnnnnnnnnnnnnnnnnnnnnnnnatatttaggatcaatgtaaagacttggtgttgcagctagattttagcagccctattacactgattctggcctgtagcccctgagaaagctgatttcacacggctgggtagaatttgtaaagaaggtccacagggcaagcatgctgtatatcagagtgcgtacagcaccattcttcataattttcagatcaagcttcatagcagatattaaagattatttaaatttgaagttgatgttttgggaaatcaaatataaaa

SEQ ID NO: 36148 - DNA, 665 bp, Macaca Mulatta
  misc_feature (1)...(665): n = A,T,C or G
tgnnnnnnnnnnnnnnnnnnnnnnggtttggcttgttttagtggtatactatgttatttggtttgtagagccagtgcttttgtgtgaacatgataaactactgattaaaactttgatttgtaaattcctggggtgcgttgttgatctgaattgtattttattattttattacactgcctacgtaaatccatagtgctctgtgaagcatatgaataacatcaccatgctgtgcttgaagaagagtgaagatgaatggtactgattgttatctgtgtcaataaatgagatattctgattatggtacagttagcagaagggaattaaaggcttaagattttaagtatatttccttcaaggaatgtgtgatttgatgtcagtagttccccacattttttaatatgaaggcccctttcaatatcaaaatactttataaatctccacttgaggacctgttgaactttttgagtatctgttgatcaagaaaataaagtcaaaagcaacaattaattagtaatgtgctcaaaataaatttgtattttataaatcatgatatcttttccatgttactctgtctatttggagttcttaataccacacatttgtttagggagatggaattagcaactagtctgtgctaccctgtatttttttttaaccatgtagtt

SEQ ID NO: 36149 - DNA, 167 bp, Macaca Mulatta
  misc_feature (1)...(167): n = A,T,C or G
atagaggactctagtaactgtgacattgtcaaagctactcanatacgggatttttgaacgatgtaaagagttggtagaagcaggatatgatgtcaggcaaccagataaagaaaatgtgtcacttcttcattgggctgctattaacaacagactggatcttgtaaagt

SEQ ID NO: 36150 - DNA, 522 bp, Macaca Mulatta
ctgctgtatcctggtggctctctcctggatgggcggcttcattcattctataatacaggtggctctcattgttcgacttcctttctgtgggcccaatgagttagacagttacttctgtgacatcacacaggttgtccggatcgcctgtgccaacaccttcccagaggagttagtgatgatctgtagcagtggtctgatctctgtggtgtgtttcattgctctgttaatgtcctatgccttccttctggccatgctcaagaaacattcaggctcaggtgagaataccaacagggccatgtccacctgctattcccacattaccattgtggtgctaatgtttgggccatccatctacatttatgctcgcccatttgactctttttccctagataaagtgatatctgtgtttcatactgtaatattccctttacttaatcccattatttacacactgagaaacaaggaagtaaaggtagccatgaggaagttggtcaccaaatatatcttgtgtaaagagaagtg

SEQ ID NO: 36151 - DNA, 730 bp, Macaca Mulatta
  misc_feature (1)...(730): n = A,T,C or G
ggtgttttggatttttgtgtggtattttatttcctttataccaatgccattttgccatgctgttttggggtggctgcctaactctagtgaaaattctttctgtattaacgaaagtttggcctttgaaaatccttaatgttttgcattttttacattgtttttaaagaaatattctaactgcttgcactgttactgttctttaccagccttttcaggagccaaaaaaacaaatnnnnnnnnnnnnnnnnnnacccagagaaaaaactttccttcttcccccttcctgatgatgagtgagaagtattgagaactttcggggtcagtgcccttctaaactccccttcccccaataatgcagctgtgtaatgaatgggtaaatgccaccggtttggaattcaggcacagcccccagtctgccctgcagggtaaattttgacatcctttccccttttcctttccctcactagggctaaccnnnnnnnnnnnnnnnnnnnnttcctcccctttaggtaccttccaaaaaaagttaccccttggggtttttggtcataaatttccccccttaaaaaaataaatgccttaaacccctttcctaagccaaaggtaattatggaatttaaagaaaggaacnnnnnnnnnnnnnnnnnnnnnnnnnnnaacttggggttttttggaaaataacccccnnnnnnnnnnnnnnnnnnnnnnnnnnnnnntaatccccctttta

SEQ ID NO: 36152 - DNA, 430 bp, Macaca Mulatta
aaaatcggtgctcccgagcagccctgctgtcacggtgaaagtagcagcaatgggactcggggatgcctgagccacaggctggcagggcacccgctgcagcctggggctgagacgagggcgtctgtcagcaattccagcctctctttgttagctgtgccctctaactagatgcgtgtggtcgtttccttgtgtctgtctgtcttttccaatgtctgatgtggaaaaatgaacagaaacttgtatttgggggaggagttgcatttgcctttctgagagcacaagaattacaatatttcatcgccaggagttctctggaatgcaggttctgccttgaaactgggcgggaagcagagtgtaaatggctaatgctgtggagacacgcggttggaagattgagttaattctgaattcagcagagaacaactgaaac

SEQ ID NO: 36153 - DNA, 150 bp, Macaca Mulatta
gatctctaggctgctacctagctctgaaagtcagtgattctggaagacaaatatctttctaaagtggcaaatagggctgttggtaggatttgcggtggaactgtaaggatttcagcaaatacaacatatagtttttaaccatatggaatg

SEQ ID NO: 36154 - DNA, 668 bp, Macaca Mulatta
  misc_feature (1)...(668): n = A,T,C or G
ggacctaagcctgggggttgccccatgcagagagcccttacacacgaccagctcccccacccccaccctgcagctgcctcttgggaggtgggcactcttaatgccctgtgacagtcattcattccacggcccctcagggagctcaccttctacgagagggcacagaggctctggccctggcaaactgggattcaagcccaggtgtgaggcctagtcctctgccatctgggccacagcacaccatctcccaacaaccaagagattctcttcgtcccagcctcatcagcccccaggggatgggacagggcaggcaccaggcaacaaggcccaaagagacctcataacttgctcaaggtggctgagcctgtcccctgtaggacagacccagcaggcaggcctgtccaggcgtggggactgcaaagaacaagaattccattcacacggagcctcccagcagccccatatggggtgcgccagcctcagagaggggagggacattaggtttcatccaaagaaagcatttccatgactcaaaatatctgcannnnnnnnnnnnnnnnnctcctaatgtctagcccagggctgggcacacagtagggcttcaaggcctacgtggggatgacagggaatcacatttaggtgtcggcacactccatgctgggtcatga

SEQ ID NO: 36155 - DNA, 765 bp, Macaca Mulatta
ccagcgttctgctgccgtcaagcccaggacgtggcctctcactaggcactagggtgcagtgtcttccccggggtgaggagccccaggatccagcccgtctcctacagctgggacatccctgtctctctgctgctctgtgactggggaaggagtcggtcagagctggtgcaaggagcagcagggcagggccgaagaccagtctgaggggagggctggagtcccccatcgtggtcttaggaagagtaggaggtcagctgtgcgggagcgtgtgcccctcacgtcccgggcctgcgggcctgcgtctctcctggttccagctgcaggtggggcgccggggacagcactgcctcacgggcttaagcagtggcctaacgcctctcctcactctcacaggtgcgtgggactcatgaactcaccaatcccgggatcgccgagatcaccatccggccagaccgcaagatcctggccaccgcaggctgggaccaccgcatccgcgtgttccactggcggacgatgcagccgctggccgtgctggccttccacagcgccgccgtccagtgcgtggccttcgccgccgatggcttgttggccgcgggctccaaggatcagcggatcagcctctggtcgctctacccacgcgcgtgactcacccactcccctcccgggagacaaggagggcgggcagggaggtgggcatcgggccccagccttgacctgaaacctcaagggcctctgaggaccagcaaatcatggcccaaggaccac

SEQ ID NO: 36156 - DNA, 445 bp, Macaca Mulatta
aaataatgtcaggaatactactttaatgcaggtgtataatcttgaaaggaaaaatgcttccatgttgaagccagattttgtgtagtaaaacttttaaatattattttaaaagaaatatgtatatcaatatctctatattctttggaatgatactaaagtctctggtctaggaccataccttatataaaggtataagagaccatgacaaagtctgaaaatggaataaataatgatgccttttatttaaagtggtccacataatatacattgagtactccatctctccaaatgtatttccataatgtgtcgaaaaccatgctgacgttagtatgatttttatacttttgccgaatagacttagaatcagatgaattgtcttagtgtcttgcaaaaagagttggggacaacttgggccaggcctgtgacatgcatagggagtgtatgt

SEQ ID NO: 36157 - DNA, 534 bp, Macaca Mulatta
gggctttttttcctgtagcagcatccggggtgagaggaacgtggttttctcctctctccgccatggcgtgtgctcgcccactgatatcggtgtactccgaaaagggggagtcatctggcaaaaatgtcactttgcctgctgtattcaaggctcctattcgaccagatattgtgaactttgttcacaccaacctgcgcaaaaacaacagacagccctacgctgtcagtgaattagcaggtcatcagaccagtgctgagtcttggggtactggcagagctgtggctcgaattcccagagttcgaggtggtgggactcaccgctctggccagggtgcttttggaaacatgtgtcgtggaggccgaatgtttgcccaccaactgcgccgtggtctaatgaccaccaaacatatgctctgtctgctggtgctcccctcacactggctgctagctcatagagtcgatctgatgaatgtgagccaaacagacgttgctaaatagcgagatcagctccccatatggaacctccggctatact

SEQ ID NO: 36158 - DNA, 1001 bp, Macaca Mulatta
  misc_feature (1)...(1001): n = A,T,C or G
ggcacgagaatactaatctttgggaagagctggatgagaagcaggctgcttgcatgttctcaaagtgcctcatcatagactgctattcattacaggaagaaaagtactaactaaaccatggagaacgcaaatgacaccttgacctgttgatgcaaattaacctcaccaataagaggcatgtaggtgtctagtatttggggatgtggtaccccgagaaggacaccacatcactgctgcatttttccacttgcagctgtataaccgagtctaatcacgagaacacattaatcaagctcaaatgaggaaacatcctgtaaaattactagcctgaatttttcaaaactcccaatgctacgataaagaaaggcagaagaaaccctgataagaataaagaaggtggaacaagtttataaaaaactggaatgcccgtatggtcattctaagaacatcggaataatggggagctacattaggaatttaggatgaaaaaaattattgactttttaagatggtgtaacatttattcctttggaaattttttaaaattaaatccctttcccaaagaaatgtccttttggggaggggataattaattttcccacggcttcccattgaggcaaaagaaaaggttttttatattaacccttgggccaggagaggctttaaaatttttgttaaagcattttccatgtataattgtttgggggtttttcgcgtaggggggggggataaaatacaaattttttctcttttgcgacacctnnnnnnnnnnnnnnnnnnatttttgaaaaccatcaaataaaagggcgccccagggaatattctcaataacgggctaaaggcgacatttcgtacaagaattagccaaaaacgtttaacggagagaagcataaaagacgtaataataatatccataccgcggtactccacctaggaggaatgacgatttgagacaaattgggggaaatttcccccaaagcgtctaaagtaaagccgggcgg

SEQ ID NO: 36159 - DNA, 664 bp, Macaca Mulatta
ctgaaaataaagactttggtttcaaaaagataaacctgtacagtgcacagatgtttcacataaaatatgtgatcagtcaaagttagagccacccttagagtcatcttgtaacgatcttgaaacaaacagaggaattctagagaaaagtagtgtggagcatgccactgaaaaaagcacagctaatgatacatgctcgttggctgctattcaggaggatatttaccctcaggaaatagatgcatccagcaattatactccccaagatcctgcaagaaatgaaattcacaatgataaggcacctgtcttatacctacacgaccagctgtcagaacttttaaaagagtttccttatggcattgaggctgtgaatacacgtgaaagttctgtgggccagcaaactgcataccagacctcagaagatcaaactgctgataaaaccagttctgactccaaagacccagcagatcaaatacaaattacagtattaagctcagagcaaatgaaagaaatatttcctgaacaggatgatcaaccctatgtagtagacgacttgacggaacctcagaaagatgagcccatcacagaagtagttacccaggcacctgcaggaggagaaagtcgtgattctgtggtactggactcagagaaagacgatatccactgt

SEQ ID NO: 36160 - DNA, 824 bp, Macaca Mulatta
  misc_feature (1)...(824): n = A,T,C or G
tagtgattccccacaaccttttttgtggccaccaagggacagggtttcaatgaaaagaataattttttcacactggggggtggggggacgagggggatggttttcagtaatgattaaaagttgctttggcattttattagagtttccacaaggaaacatggaaccctagatccctgcccatgtgcagtttcacataggggttcaccactcctgtgggaaaccctaatgccactgttgagttgacggggaggtggagttcagctttaccccacccatggttcacctcctgctggccagcggggttcttaacaggctacggaccagtaccagtccatgatccaggggttggagacacctgctatactggtttctccttccactagaggttgattgtgttgtttgcttggtaatttgtttcattagtgacttgcctgcagtagctcnnnnnnnnnnnnnnnnnnnnnacgtgagccaccatgcccagtctgtttgttgttcttttaaactcttggatttctaaatgnnnnnnnnnnnnnnnnnnnnnnnnnnnnnnnnnnntgctttgttgcccaggctagagtgcagtgcagtggtgctatttcggcttattgcagcctccannnnnnnnnnnnnnnnnnnnnnnnnnnnnnnnnnnnnnnncnnnnnnnnnnnnnnnntcccaccacannnnnnnnnnnnnnnnnnnnnnnnnnnnnnnnnnnnnnngnnnnnnnnnnnnnnnnnnnnnnnnnnnnnnngcctcaaatgatccgcccannnnnnnnnnnnnnnnnnnnnnnnnnnnnnnnnnnnnnnnncgcacc

SEQ ID NO: 36161 - DNA, 782 bp, Macaca Mulatta
ggctttcttaatgcagtaaaggggaagcttaggtttatgtttaggattctattcctggaattgtgtgagccaggaatggaggaggggagactttcagtggttaaggctccatttctcattttcccaacttttaaatgattatttgtctatggacagtttgaatttctggttttcagtttatttttttaatgattaattcgtattaaggcaacaagacagtacaacaaaataatctctagagaggtccactttgttgctgaagtaaacgttacttgttgcaacccgaggatggtcataagatttggccttcggtattcctgtctggcaaaatggagggggtgatattagcggttccctgtactatatcacagccaagagagattagagagagaaaatgtagatcaaggtgagctgcctacaaattactctgtctccaaagcacaacatgaaaagaaatgatggggaggaaaaaaacccacagatttaattcgcactttgactctcacttaattgaactattttctttcctagattggcttttcttactcttttctgttagtagatttatttacaaacattcgcaagaagatttcttgggacaagaattatttaatacgtcttttgaagtaaattgctaaaatatcccaattttaatttgaaaagtgaaatttttgaaaatactttggaaaagaaaagtaaaagttttaacttttttaactaaaagttagttttttgttttttcgaaatggacccctggaaaattccttccggattaaaaaatt

SEQ ID NO: 36162 - DNA, 815 bp, Macaca Mulatta
  misc_feature (1)...(815): n = A,T,C or G
gggagttgtggtgtaaatgtgtaactacatagcagaattcaaagacttaggnnnnnnnnnnnnnnnnnnaactatcttaacaatttttcatattgattacatgtggaaatgataagatttggatatattaggttgattaaatatattaatttcacctatttttacccatttttattaaattccacatgtggcttgtattatattgctgatggacagcagtgttctagagggtgtcatagacaagggcacatgagttggattttgagacatgagtggtagttacccagctaaagaaagataaatgcattattctgggcagagagtacaacatgtaggcaggcagtgtgaaagttctgtggaatggtaaaaggtgtgtctggagcaaagcttgggatnnnnnnnnnnnnnnnnnnnnntagatttgtttaacatttttaaaagtataatatgttaaattgaagatagaagccacaaaaatagtgccatcttctttggtttaatatatttaatttcttggttttattttgcatatggacatgtaataaactgaataactaccctcaggcaataaaaaaacaactcctctgctgggttaatttttcttttgaacagcttcattgaagtataatttgtatactgtaagtccatccattangtgtacaattcagtggttgttagtagtagattcaatggttgttgttactgttagattcttaagtttttaaagataacttaaagtttagcaagaaaggcagaaagtgtcatttttcccactttccagctacagaaggaactcctaagactcttaaaattta

SEQ ID NO: 36163 - DNA, 627 bp, Macaca Mulatta
gtcacgtgacccgcctctgcgcgcccccgggcacgaccccggagtctccgtgggctgccggggcgcgcgtgcgcggaggcctccaggagctgtccgggtcatctaccatgggagtgaggcacccgctctgctcccgccggctgctggccgtctgtgcccttgtgtccttggccaccgctgtgctcctgggacacatcctgctccatgatttcctgctggttccccgagagctgagtggatcctccttggtcctggaggagactcgcccagctcgccagcagggagccagcaggccagggccccagaatgcccaggcacaccccggctgtcccagagcagtgcccacacagtgcgacgtcccccctaacagccgcttcgactgtgcccctgacaaggccatcacccaggaacagtgcgaggcccgcggctgctgctacatccctgcaaagcaggaacttcggagagcccagatgggacagccctggtgcttcttcccacccagctaccccagctacaagctggagaacctgagtgcctctgaaatgggctacacggccaccctgacccgtaccacccccaccttcttccccaaggacatcctgaccttgcggctggacgtgatgatgg

SEQ ID NO: 36164 - DNA, 100 bp, Macaca Mulatta
acgcaaatctgacacactactcccttaggataaattcctgtaagcgccgtctttccattttaagcctattatactatgaaggagtctgaattaagatcta

SEQ ID NO: 36165 - DNA, 656 bp, Macaca Mulatta
  misc_feature (1)...(656): n = A,T,C or G
tcccgggatgttaaagtctaattaaaacgtcttttctagcttcaacagagaggtttcaccagcacatttaccagaagaatctgggaatggattccactacagtgatattgactgcatctttaagaagtgaccattatacnnnnnnnnnnnnnnnnnncacacaannnnnnnnnnnnnnnnnnnnnngtactctaatactgcaaggttttttaaacttcccactttatttttttatacacattaatcagatatcattacttactgcagttgcaactatgcacttgtataaagccataatgttggagtttatatcactcattcctgtgtacctgatggaagttgcatgttcatgtttaagcagttactgtaacaagaagtttaaagttaattatatcagtttcctaatgcttcatgataggcaactttacccattttgaatgccttaatttaattttttttcaaagtctcagccctttctgtattaaaaaacaaaaaaagtgtttaccagctcttaggatgtaaactagctttgtggaagagaaatcgtgcactatttttacacataaatagttatatcaatgtcagcctattttgattaacaaatgtttttaaagtattattggttatagaaacaattatggatggtgttggaacta

SEQ ID NO: 36166 - DNA, 168 bp, Macaca Mulatta
ggcggagcaaagtgtccgttgagatgtaccagtcgcaggtggcaaagctggaggatgatatctacaaagaggccgaagaaaaggccctgctgaaggaggccctggaacgcatggagcaccagctgtgccaggagaagaggatcaacagggccatccggcagcagaagg

SEQ ID NO: 36167 - DNA, 900 bp, Macaca Mulatta
gggggccgagaggaaagctggaggcgcgggtggggaacatgtcagagtcggagctcggcaggaagtgggaccggtgcctggcggatgcggtcgtgaagataggtacgggttttggattaggaattgttttctcacttaccttctttaaaagaagaatgtggccattagccttcggttctggcatgggattaggaatggcttactccaactgtcagcatgatttccaggctccatatcttctacacggaaaatatgtcaaagagcaggagcagtgacttcacctgagaacatcccatcgggaggacaagagaaatcatgtttattcctcaggaatactgaagtggcccctggagtaagctgccattcttctgtaacaatgttatcagtgatgcttttaactccagcacctgtttatggtatttgaaaacaaagtctgttatcttgtttatgtaattttctctctcggaagttgtaaggaagggtgggtccttaaaataaattaagacaaaaattacgatatagtaaatatcattcctctcaaattgtaacatcttttttgggtcgccccttaacccctcccaaaaaatcttttcctagaaccattttcattttggagcgcctcggggccccttttaagggtatattgtataaatggttctaatggacttttttctcctttggaaatacccttggtccatgaatatttgggccttgggaattctacaccaataaaaaaaaagcctcccggtcggggaagatcgattgggttctttgtaaaaaaaataccagaatggggagcctttcagaaggcctaattgagctgggagtctcttccacacacgtaaattctcacaagcgcaaccctccataataaccttagagtataagcccccacttctc

SEQ ID NO: 36168 - DNA, 543 bp, Macaca Mulatta
gtgagcagcactgctccagggccctcggggtcagcagcttccatgagttctgatttctctttgctcctctgctctctccacctggcagatctgcgggatggttctcacctgctgcttgcaccggaggctccagcggcatttttactaatggccaaccacctcgtcttccaactgcccctcaggacgacaggtggccacatgccatctgcaaggcctgcagagttagcaccagctccactagggccatagataccccctcttttgtgcccagctcctgcaaatccaccaagtgcctgagaccatagcttctattgtgcccacccaggcagggaccctcggccccctctcctccattttcagcccccatggccagatcctgggcagggaaatgatcctttcaggagacaaccagagcccctcaccaggcacaggggcacccgtggactacgagatggtggcagttgagttctctgctccctcccaacccctgaacctggaacaatgggcagaaaacccaggaaccccggcactcctgcattcagc

SEQ ID NO: 36169 - DNA, 1140 bp, Macaca Mulatta
  misc_feature (1)...(1140): n = A,T,C or G
gggttccacagggcttctaggaaatctcattaagaggatagaggaccagggagagggagtgggtatagcaggcaccactgtcattcctctttttgtctttcatccattctctttttttctccggcagcagttctcaactaggggtgattttgacccccaggagaaatttggcaatatctgcagacatttttggtggttaaactgggggttactattgtcacctagcaagttcaggccatggatattgctaagcatcctgcagtgtgcatgaccatccacagaacaaagaattatctggtccaaatatcaacaggtcaagttgaaagcctctgttttgaggaatgttgtcctaatgttgggagattgagcaaccatttacctgaataataaaggttgaacggtctggtgtaatgaaaccaatgaggataaaaattaaacctggaaagttcccctggaaaggcaaatcggtgaggggcctgccgtgtaaaaataagctcacccgaggaatttgaaggggaacatagttttaacgtagcaactttttctactattttcccaccgggtaaaaaaaaggaaaaacaattattctcctgtgtgttaccacccgttaaatattttattgggatatcatatataaagaaccccgcnacaaatgggagaaagcacttgttttctccttaccactctatccaaacccactcattaaacaactcaataatacgttacttcatataaagggaaaaaagtcgagataatactcttggaagaacaaaacttcggcttgggtttacaccttgcactacgaggaaaaaaaaaaatcgggctagtgtcaacctcctcacttagagaaacagaagattttttagcaggcgcaaaanggcgccttgtgaaaaaaagacgagagagataaaatatgttgtgttcgtttatatattacaatgtaatgatcggatcccctgtatacatacgactcgtgtttctccggcaataaccagcgaaaactaaaatgtgcaaaaaatgaacggccgcattggagcacccaaagaagcattaacacacttactctagtaagggtctcacataggatggggcgcgctgtctattaccaacaacgagacaaacaaataggaaagagacgcg

SEQ ID NO: 36170 - DNA, 742 bp, Macaca Mulatta
  misc_feature (1)...(742): n = A,T,C or G
gggtaataactaaacaggcatttaattttatttcagtatctatggaaaaaatacttcattacatctcactctattttatgttgtctttattacagaatcacttgtctgtttgttgtgtgccacttactgacaaagctttaaacagtacttgatgccagctctttactctctggctgtgggacctatttctcttaggtacttgtgcttattaatctacttactaaattgtcacattgacaattttgggaatgatactaccatatctgaaatggaaaatgtaatatgcttagtacttctgtaaaatacagcaatactggtattactttacatcagtaggcatctttgacgtgagcagataaatattttgttgactcagcaaaggtaacactttgtgactaaaatatcccattatatataatgttttttgaaatgtttgaaatttggggaaattatcacatatctagaagttgcatgaaggttatagagagatgtaactatttgttaactattacatggatttcatacttgggcagtgacaactaacgtttctttccctaaaaattgtaaaatggggttaatcttttaaatttatgaaaaataaaagtaaattttaccttccccncnnnnncaannccacccnnnnnnnnnnnnnnnnnnnntatcgaaaacaatataactgaanagaaatcaaaattaaataatatttgtgtggttgtgggtttcggcccctccggtgttgttg

SEQ ID NO: 36171 - DNA, 905 bp, Macaca Mulatta
gtggtgggaagggatattctcctaggaggatgaacctacctgttgtagttgccactggttctgggctgctctgcgtttctccatggccacttgtttctgcagacaagcaagggagagggaccaggagaagaagtctattttttctggctggaattttgggagattgcaagctggcacaactcagcttgctcactctttccctcttcctatctgactgcccttccctccctgtactcaggacccctgggtgtaccttggcctggagctgctcaaaggcttcctggagttgtgtccgcttcctctgggcttcctccatctgagtcagggccttggtgaggccaattttgatggcctctacgtgctccctgtaggtggccttcagctctttccattgttccttagctgcaattgccttctgtcctgagatgagccaccaggaatgagaacatgagtgagggtggcctgctagcctgcctccttgcaacactgggcctccttcccatcagccaaatgggagacctatctgaaatcctccttcgttccccactcaggccagatgctactccaatcccctgcctactcacggctggtgtcttcagaagccaaggggtccagacccttagcagtgtcctcctgagccaggatgttctgcaggaagtccactacctgaagctggctgcagagcagcttgtctttcttctgggagtcctgctcagagggagggcagagacagggaacgtccttacctccttacaggtttccttaaagtctgctctctgccaatgctgccctgtatctcaataagaggagccaggaccagaccctggcttctgaaaggctcgctctcatcttgtacataccaccacaaactcaaccaggatcttggctggcagttctgcctcctc

SEQ ID NO: 36172 - DNA, 280 bp, Macaca Mulatta
cagagctgccacagatcaatgtggggtgctcacccagtggggcccagttgtgccccagggaggagccagcccctccctcttacctgccccctgccagtgcctgagaactcactggggctgctgtgatcaccatgtgcctaccttgcccagcagcccatgctttgccacatcacaactcggggcctctgggccaaggccacagtagatcccacaaggtccagggtggtggtgtccccatctgcaacaggggaaactgaagacccatgaacaggcttgccca

SEQ ID NO: 36173 - DNA, 728 bp, Macaca Mulatta
ccaacggacaaccgtggcactagcccgtttccacccggcccgtgcccattcccagctcccttctgcctcggcaaagcctgtctccctccggggaaggagtgtgggagctagggccccaaacagggtgagccgaccactgtcccgcccgcagcagcctcctccagccgcgagcccagctgcagggagcttctggcctgggaacccccccaggaactgcaggcagacaccgcccggctctgcgccttctatgcccgcctgtgcccggggtcccagggcgcctgtgcgcgcttggcgcaccagcagtgcctgcagcgccggcggcgatgcggtcagttctgttcaccgggaccgggacggggggcggagggaaaggggcctggccagcctctgaccgccgctccgactcctgtacggtctgcagagctgcgctcgctggcgcacacgctgctgggcctgctgcggaacgcccaggagctgctcggcccgcgcccggggctgcggcgcctggcccccgccctggctcgccccgctccagcgctccaggagtctccccggcaccctgcccgcgagctgcggctgcactcaggtactccgcgccctccagcccagcccagcccagccctggcccggccccacccgcgcggcggagccactttctccggccgaggaggtcccctaaccctgtgcctccccaggatcgcgggctgcaggcactcgattcccgaagt

SEQ ID NO: 36174 - DNA, 911 bp, Macaca Mulatta
aaattttagtccattgctcttcattaacctaagtataaaactactaatatctttcaagtgccagaagttcctcaagaagctgcagagaaagaaattcccatggctccacccaaaaaaccagaagttacaactgtgccaggtacaatttggccctgacttcattctgcagaagagatatcttctctcctactgtaaacaattttagcccatttctcttcattaacttaagtctaaaactactaatatctttcaagtgcctgaagctcaagaagttgtcccagaacagaaagttcccaaggctccgcccaaaaaaccagaagccccacctgccacaggtatttttcaccccggtcctttttctgcagaagaaatatctcttctgatcttagaaatatttcagtccatttatctcattaacctaagtgaaaaactactaatatctttcaagtgcctgaagttccacaagaaattgccccagaaaagaaaacactggtacctcctaaaaggccagaagttccacctgttacaggtacttgtcatttgacctcaagtttcagaacatccagttcctctgctgtatattttttttagtagtctccatagctctacatgtaactttactaatatcttttaagtgccagaggctcccaaagaagttgtccctgaaaagaaagtgcccttggctcctcctaaaaagcctgaagtcccacctgttaaaggtatttgtcactgaccttagacttcagaagatctaattcttttgcagttgaatatattttgttccagtggtcttcataacccctaaatgtaattttactaatatcttttaagtgccagaggctcccaaagaagttgttgctgaaaagaaagtgccagtggctcctcctaaaaaacctgaagtcccacctgtt

SEQ ID NO: 36175 - DNA, 917 bp, Macaca Mulatta
  misc_feature (1)...(917): n = A,T,C or G
ctgtgctgcatattactttgcaatggcctcatctcagagaatgaaagagggtcacattcttctgaaactctctgcagtcttccaaccaccacaaggccatggatgtggggggtctattccagacagacttaagggttcaagtggaagctgccatctcccattccactgaaggactgtccaagagatttagtgcaaggtacactgcagtagtgaattcccaggcacttgaaagtgactgcctaatccctagtaattgtaattactagccttcttggagattatgcagcccacaagtacagactagtataaagcaaaagggcaaaggaacccccaccctccaccccacccattaatgacttgagtgggcaagaagaagtgatggccttccttgcctaaaacaatagctttgtttttaggggatggaaaggtagaatgtggagtgacatggttctatcgtttacttatgagactcagaaatatatctacaaagccagatgctctgtcgtcatatttgcagacatctacaccccttgctaaaaacccactgaagnnnnnnnnnnnnnnnnnntgacccacaccatcaacattaccctcaaatctaattgccctacatcatattctatcatgtggaccaggttcctggaaagctggaatgcatgattcttttttaaactgccagaatgggagggagagagaaaacatttctaccctttgatcaccggtgtgaacagaatccggaatgcagtttcagcctgacctgcagtcattcatgttcattggatttgacgaatggaaacccaaggttatcgaagattggaaggttatcattgtgaagaagtagcttaaaggactccggtttctctctacaagtgtgatgtctccatgaagaagacttagtatggatttgggtgggtaag

SEQ ID NO: 36176 - DNA, 828 bp, Macaca Mulatta
gggttggtcagcaggcagcaggtgtgtttcattgtacaaatgtaaatttgcttcaattctattggcatgtggcttgttggaaaattgggccagtttcactgagagagtggtgctctgggtatggtatatcatggccccatactcctcagctcaggccctggagtgggaacctgtgggtatgaattgaactgctgaatcactaaatcctagagctttgtgggccaattaactttccctccagacacttgtctaaataactggaaaacacagaaggcagtcttctcctaatttgcaatctccggtctgaaaacatggtgggtgagcaccattttccctagcctcagcttgcaagctatttccaacttccctgcaacaaaaaggcacaatgaatggtagtgatggacaagttccggtctgattgatacctctgtaagacagttaaggcctgaggctgcaaatgctcaggccaacttaccacgacagtgagcaactaatggaaccatttagacccctaccataattttacagaaattcaaccctgaaattcctgggagaatgccaaaagaagcttggctgtatcccaatccaggaggggctcaaaaaccattggaaaatctggtgtgccaagtaatgcctaacggggcttctgtggcctgtgaaataccaaaatggggaaaaaacattgaataaacctaaaaccagcaacctcccccatttggcccctccaagccctttcccccggaacaccctggtaaagccaaaaatctccaaagcttcctcttaacaacctctaaccgagtttaaatggaaaaaaaacatattcttcca

SEQ ID NO: 36177 - DNA, 693 bp, Macaca Mulatta
actgcgtgggaggagctctggggctgaggtccaggcctcccttctcctggtaaaaatgaaaagggagtcaaggttttaacgttaaagagattatttgagcaaagagctgttcatcagtgcagagcgcccagtcatgttttgtgggtgcttggagcaaaggcttttgtaaggggcatgaggaagcgaaccaaattcagaaattacagtgacagttgtggagtcgcctcatttggactgtccaggtggaaatttcctgattatgtaatgagaggttaattggaggtctgcggttggttcaacctgaatatcgtttccccctaaggtagtaatttacaagacatgtatttgagctggatttttttccttaggaaccaatggtactagtgctacttcagtctaactgactgctagttaattattttaaacactccagagggggactggttttccactgcgtttccaaatgtgtgacaagcagggtctcacatccaccatcctgtccccccagcctatttgtcccttattgtacatttcacacacagtattttaatcattttttcacaaagcattggatggcacttttttagacatctgttttctgtttgtaaaacgttttatgtgagcagagaagaatcccctgacacactgctttaaaaaaatttgcgtctcttcttttatcttcctcaggcacag

SEQ ID NO: 36178 - DNA, 471 bp, Macaca Mulatta
agccgcgcccagccgtcgcagcgccgttccaggaggcctcccgcctttccctaccccgccccgcaggccacacggcgccctggcccagcgcgcgggctgcccctcggcgacgcctccccatcgcgagccagcagaggcggtctgcggtcgggtacctgcgtccagtggtggcctgtacagcgcgagtgcggccgagagcaacgcgacaacagccgtggcggcgactgcagccccggcccccgcccgtgtgaccatccccgggccaaatggagtcgaccttacctcgcctgcaagcccggattgccccacagcgaggactcagggccatcgggcagcattccgggttcccagccgcccccgcgccgccgccggaaacacagtcattggaagctttttccggtttcccgaccgcccccgcgccgctgtcggaagtgggatcccaactcgctcaatcacacccggttctagatg

SEQ ID NO: 36179 - DNA, 712 bp, Macaca Mulatta
  misc_feature (1)...(712): n = A,T,C or G
ggatagatattaacatatgtacacacacacacgtacttagccataggtatacataagtcaagcgcttatactgtacctataacgcctcactcatggaggtgtgaggtattaaatggtcttctgtttaaatggaaaactcttaagacaaaggaaattggagaaggtgagagacagtactgagatacagagagatggagaaagagaaagagcatgagagaaagagaaacagacactaagtcaaaaacatggagattcagagatagaaagagaatcgcagaaaagaaaggcatgaccatggagaacttgtaatcatagttttaaaaagtaccagagtgaacatgaacttggtaggccacaatatttttttcctaatgtactaaaatactttttccacatttggatggggaagttctgaaattttttggattcccaaaaaggccaacctttggacctacctaaatttacccccttggaaatggggcccccaaaatgtgcaggggcaaaagggccccccccaannnnnnnnnnnnnnnnnnnnnnnnnnnnnnnnctgggggggcctttcccggaaaattttttcaaaaacctttcccccnnnnnnnnnnnnnnnnnnnnnnnnnnnnnnnnnnnnnnnngcgcacgggttttannnnnnnnnnnnnnnnnnnnnnnnnaaatttttccccccgcgggggaggggggggggctaaac

SEQ ID NO: 36180 - DNA, 146 bp, Macaca Mulatta
aggtggccacctgtccgtattccgtctatggagcttgggtaggtggctccatcttgtgctcactctccacgttcaaggacatgtgggtcaccagcaaggagtacaaggagatgggctcttccatcgtcagtagaaaaagcttctga

SEQ ID NO: 36181 - DNA, 954 bp, Macaca Mulatta
acgagccgttgatttagaagctctaagtacactcgtcttgaatagtgctaaaggttggtcttcaggttgtggcagtcaaggctccaggatttggtgacaatagaaagaaccagcttaaagatatggctattgctactggtggtgcagtgtttggagaagaggggttgaccataaatgttgaagacgttccacccccttgacttaggaaaagttggagaggtcattgtgaccaaagacgatgccatgctcttaaaaggaaaaggtgacaaggttaaaattgaaaaacgtattcaagaaatcattgagcagttagatgtcacaactagtgaatatgaaaaggaaaaactgaatgaacggctagcaaaactttcagatggagtagctgtgctgaaggttggtgggacaagtgatgttgaagtgaatgaaaagaaagacagagttacagatgcacttaatgctacaagagctgctgttgaagaaggcattgttttgggagggggttgtgccctgcttcgatgcattccagccttggactcattgactccagctaatgaagatcaaaaaattggtatagaacttattccaagaacactcaaaattccagcaatgaccattgctaagaatgccggtgttgaaggatctttgatcacttgagaccattatgcagagttcctcagaagttggttatgatgctatggctggagattcgtgacttcgcggaccccgaattattgacccaccaagttgtgaaacgcttatggatgcgggggtggcccctgttatacacccaatttctccgaatctcaaaaagacgcaggcggcgtctagcatggaggaggggggcgcccctcaagcaggtataagactgacggagggcacatacatacgaccggggacgctataagaaaagctgagggatcaccccaccccacatacctcttctctttctttttt

SEQ ID NO: 36182 - DNA, 197 bp, Macaca Mulatta
gaaccggcccaagatcgccgccttcctgccagcccggcagctctggaagtggttcggcaagcccacccaggtaaccaagctcgcgctcgggcggggcgcaggggctgggggccttgtctgtctctgctgaacccacggcttcacgccgtgtctccgcgtgtggtaacctcccagaaccccagggtggaggactggcg

SEQ ID NO: 36183 - DNA, 964 bp, Macaca Mulatta
ccggtccggttttcccgggatcccacgtcgatctgtgtttgggttcggactctgggaggattttggctttgctcgccttcctctttcagaagactcgagatcggccagcaggtctgctagatttgaaacgcgactgttactccttgttttccggttctggccgttttagcctctcgggaagcgtggaaagaagggtagggcgtatgcctagtgaccgcctctggttgtcgggctcgcggctggcgccgctacgtggagtcgctctcttttcgtcacttttggttgcagacttgttgagtagaagtgcagactgatgctttaagactcggggaaaggtctttcccttatctccaccccatcaagcaccccagagaccttagagatttgtcttgtttctagacacgtgtactcgaatgttgtgcggaggacttaaatattcgagaagagagtgggaactcctggaattttaagagatttctgtgtatttccaaagctgacttttaactaccggcagcgtgggattcgtgattgtttttcgccatcgtgtggctccaacatgaccttcccttcttggttaagtcagctgtgcaggggtttatccagacccatccgaagaaccacccaaccgatctggggttctctctacagaagtctggtgcagagttcacagaggagaaatccagaattcagtagctttgctgtccggaccaacacatgtggagagttgcgttcgtctcacttaggccaagaagtcaccttgtgtggatggattcagtaccgaaggcaaaacacattcttggtcctaagagatttccatgggcttgttcaagttgtcattccccaggatgagtcggcagcctcggtgaggaagattttatgtgaagcccctgtggaatctgtggtgcaagtgtctggtacagtcatttcccgtcctgcaggacaggagaatccaaaaatgccaaca

SEQ ID NO: 36184 - DNA, 891 bp, Macaca Mulatta
ggctggccgccccgctttgggctgaggggccttgtgatacagtgtctgtgtttggccacggccaggccgacccccaggcaggggagatgattgtcccagcctctgcacgctccaggggcagcctcacgcgccaggcccaagcttcctgaagcagaacctgagggaagttcttccttttgtctgacttgagtacatcttgctgctgtcgttcttgttctgacctgggtggaaatggagagaggccccttctggggtttcagggcactggagggtctggggcttggggcacttcaggaggcccccaaacagcacagacagccgggatgtcacctgagcttggggatggcttccaggctctcctccgcccggccaccccccactttgtgggtatttactgaacgcctgcaccgtggcatgtcggatcctgtacccatagcaactgaggccagactcggccttccaggcccctcctgtaggcagcagagcacccactgatgccaggtgctttcctgggtggggccaggggctgtgaggagaagggtgtgtgtccagggcttctcctgtgggtggctgcattggcactggacccctggagatgaggctggggaggaggcagggacgccggggttgaggcatcaactcggggtcaggcatgtgcccttccagaccaggtaaccccaggaacccctccctccaaccacagacactggtccctctctgggggaggcctggagggaggtccagggcccaggctgccaggagggtgtctggggctgaccctcacgctgccaccagagggcgcctggagcccaccgtgctgacccggggaccgccaagcggcagcggccgggaggacaggatggctgcagccgtcgacccgcttgcctctcc

SEQ ID NO: 36185 - DNA, 187 bp, Macaca Mulatta
tttctgtctactacaaaagtaatgcagagggaagagcaagaagtatcctctccaaagcttagcagggttctttttaacctggcagtaccaaatatctggccactgctcccggcagtaactggttcaatcaaacttcaggagatacactctgcctgccctcctatacatctaccacagttagaattta

SEQ ID NO: 36186 - DNA, 706 bp, Macaca Mulatta
tgctatatgagtactagatatcatacagtgcctgaaatgtaacaaatgctctgagatgtgtgttattagaattgtaaacagattccaaaaatgcagtcatgtttgacatgaaaagtgaaagtttctcctgccccacctaatctcactctccggaagaaagcactgtgaacagttccttccctaggccaccttccatatcgttctttagaaatacaccatgatttataatcctttgggtatatactctgtaatgggatggctaggtcaaatggtatttctagttctagatccttgaggaatcgccacactgttttccacaatggttgaactagtttacagtcccaccaacagtgtaaaagtgttcctatttctccacatcctctccagcacctgttgtttcctgactttttgaggatcgccattctaactggtgtgagatggtatctcattgtggttttgatttgcatttctctgatggccagtgatgatgaactttttttcatactgctataaagacacatgcacacgtatgtttattgcggcactattcacaatagcaaagacttggaatcaacccaaatgcccatcaatgatagactggattaagaaaatgtggcacatatacaccatggaatactatgcagccataaaaaacgatgagttcgtgtcctttgtagggacatgggtgcagctggaaaccatcatt

SEQ ID NO: 36187 - DNA, 157 bp, Macaca Mulatta
gaagtgacagatcaaaaacatcaaagtgaacaaataaataaaatatctttcactgaactctgagggaggcaaatgaggagttgagatagaaaatggaggggaaaatcctcctgagagaggtgtctggtctctggtgaggggatgttcaggctgaagc

SEQ ID NO: 36188 - DNA, 1168 bp, Macaca Mulatta
  misc_feature (1)...(1168): n = A,T,C or G
actttaccaggcgtgcaaggaggttctaagtccactttggctgnnnnnnnnnnnnnnnnnnnnnnnnnnnnnnnnnnnnnnnnnnnnnnnnnnnnnnnnnnnnnnnnnnnnnnnnnnnnnnnnnnnnnnnnnnnnnnnnnnnnnnnnnnnnnnnnnnnnnnnnnnnnnnnnnnnnnnnnnnnnnnnnnnnnnnnnnnnnnnnnnnnnnnnnnnnnnnnnnnnnnnnnnnnnnnnnnnnnnnnnnnnnnnnnnnnnnnnnnnnnnnnnnnnnnnnnnnnnnnnnnnnnnnnnnnnnnnnnnnnnnnnnnnnnnnnnnnnnnnnnnnnnnnnnnnnnnnnnnnnnnnnnnnnnnnnnnnnnnnnnnnnnnnnnnnnnnnnnnnnnnnnnnnnnnnnnnnnnnnnnnnnnnnnnnnnnnnnnnnnnnnnnnnnnnnnnnnnnnnnnnnnnnnnnnnnnnnnnnnnnnnnnnnnnnnnnnnnnnnnnnnnnnnnnnnnacttacagcctccctgatgccctggatgtcagaaaatgtctggaccagtcaagataagagccaggcagagtcaggaagaaatggggataggggttcctatttaaatatataaagaattctttcccaggtggggaaaagtcatccagcaatgtgagtgatcacctctccatttatctgtttgaccaaatggaatttctatactgaaggtttatacaaagaagccacaaaccaccattgtcacaatgaccctacctaaccccttgtgtaaatgttctggaaatgtacccagaagtctggagaaggtccagtcaaactgggtgcaggaagaagaaagctctggtctcaggtcttcgacagaatcccctggatgctgggattgccaccatgctaagccgagggggcatctgaatgcgcgggagtgcaggnnnnnnnnnnnnnnnnnnnnnnnnnnnnnnnnnnnnnnnnnnnnnnnnnnnnnnnnnnnnnnnnnnnnnnnnaagagaacagcatgtaagattcattaaccaatgacaaacacgccgggttcactgctggtctccacagctcgttggttcagtgtggctcagttgcctctttctctctacttctggtctcagaaaataaagagagagaagccgagcgctcatggagtttctcagagacacagcaaaaac

SEQ ID NO: 36189 - DNA, 781 bp, Macaca Mulatta
ggcaactgccaccttgccaccttgactggtactttatgagtgtaggacaactacctaatcatttctaatcctgtcccctccagtttcacagatgctgtcacagaaatcttcctaaaattacccttgattcatgccagctttctgctcaaaacactagcaagatgccctgttcccctctaggagaaagcttggatatactctttgagagtctggataatttggctttggccaactttccctactgtccatctcctcctccctctgtgcctacagactgctcaccccccattttccaaggctttgacacttttaccttagaaactttatttgtgacctcctctggcctggaaagccctgacgttcattcttcagacaaagacctggctcttgccactaactgaaatcgcttcccgtctcaacccaaccgtctcatagcctggccctttcattttgctcttgtgttagttagattaaagctttgtcttgttatgtatgtgttgtttcattagctatacagatttttttttattatgatcagaaaaattctcttatctattatgtttaacattttctagtttttggtggattgtcctttttccatttgaaagcttgggtgggttttccctttgaatgttccttttttagaaagataatttattgaagtggaattcacctaacattaaaagtaaccattttaaagtgaacaatttggtggcatttagcacgttcacaatatgaatgccacatcatcttgatatagttccaaaacattcccatcact

SEQ ID NO: 36190 - DNA, 312 bp, Macaca Mulatta
ggaactgtttctcctaagtaacattttttcatcacacttgaaatactgtaactctcgatgccaaattcaggaaaaatgggcagttaggagaagtccagggaaagccgactgagcaggttgtaaaggtaagcagtcctgttaaatgtacataaaaatgtcactttgcttctctactttaaactaggaaaactgataggtcttttgaataaggtatgatataagatttaaaaatacaaataggtcatcctctccaaaaaagccgtttgtatgcttaactgatgagtgacagatctgtaataattatttagaaat

SEQ ID NO: 36191 - DNA, 767 bp, Macaca Mulatta
  misc_feature (1)...(767): n = A,T,C or G
gggaaatcaattcaggggtcattagcctgtaggtgatgtatttaaagccatgggattgatagaaatcacctagagaagaagggctgagaaaacaagaaggctgaaagattgacccctgagactccaccaaatataaagttctggaaataagaaagagctagcaaaggaagccggcaaagtgaaaccagtgaggaaagaagaaaaaaccaggatagtgtcgtggttttcaagttaaatgagcctctgatagactgaagaaccttcccattaagtacctggatgctaatctactcctgtcctatannnnnnnnnnnnnnnnnnnnnnnnnnnnnnnnnngagatcgcnnnnnnnnnnnnnnnnnnnnnnnnnnnnnnnnnnnntcgtctcaannnnnnnnnnnnnnnnnnnnnnnnnnnnnnngttcggtgcagtttccatcgtttcctgatagcatattgtttaggattcctggggccaccataacaaagcagcacaaactgagtgacttgaaacagtagcaggttcttccctcccagttctggagcccagaatctgaaatcagggaagtcctcagggccatactcccttctcaggaaaaaaggggagaatcctttcctccttctagtgtctgggtagactcctggacattttcttggccttcctggcagattttgaatccccaatctcctggccctgtggtccttccacgttagccccttatttccaaatggtggccccccgtgggggtcccctatttcccaaaaac

SEQ ID NO: 36192 - DNA, 1492 bp, Macaca Mulatta
  misc_feature (1)...(1492): n = A,T,C or G
aatcttcctcttcagtgaatacatccaataaaatgaattttaaaacattttcttcatcacctcctaagcctggagatatctttgaggttgaactggctaaaaatgataacagcttggggataagtgtcacggnnnnnnnnnnnnnnnnnnnnnnnnnnnnnnnnnnnnnnnnnnnnnnnnnnnnnnnnnnnnnnnnnnnnnnnnnnnnnnnnnnnnnnnnnnnnnnnnnnnnnnnnnnnnnnnnnnnnnnnnnnnnnnnnnnnnnnnnnnnnnnnnnnnnnnnnnnnnnnnnnnnnnnnnnnnnnnnncaggtggttcatctgttattagaaaagggacaatctccaacatctaaagaacacatcccggtaaccccacagtgtaccctttcagatcagaatgcccacggtcaaggcccagaaaaagtgaagaaagcaactcaggtcaaagactacagctttgtcactgaangaaaatacatttgaggtaaaattgtttaaaaatagctcaggtcctaggattcagtttctctcgagaagataatcttataccggagcaaattaatgccagcatagtaagggttaaaaagctctttcctggacagccagcagcagaaagtggaaaaattgatgtaggagatgttatcttgaaagtgaatggagcctctttgaaaggactatcnnnnaggaagttatatctgctctcaggggaactgctccagaagtgttcttgcttctctgcagacctccacctggtgtgctaccggaaattgatactgcgcttttgnnnnnnnnnnnnnnnnnnnnnnnnnnnnnnnnnnnnnnnnnnnnnnnnnnnnnnnnnnnnnnnnnnnnnnnnnnnnnnnnnnnnnnnnnnnnnnnnnnnnnnnnnnnnnnnnnnnnnnnnnnnnnnnnnnnnnnnnnnnnnnnnnnnnnnnnnnnnnnnnnnnnnnnnnnnnnnnnnnnnnnnnnnnnnnnnnnnnnnnnnnnnnnnnnnnnnnnnnnnnnnnnnnnnnnnnnnnnnnnnnnnnnnnnnnnnnnnnnnnnnnnnnnnnnnnnnnnnnnnnnnnnnnnnnnnnnnnnnnnnnnnnnnnnnnnnnnnnnnnnnnnnnnnnnnnnnnnnnnnnnnnnnnnnnnnnnnnnnnnnnnnnnnnnnnnnnnnnnnnnnnnnnnnnnnnnnnnnnnnnnnnnnnnnnnnnnnnnnnnnnnnnnnnnnnnnnnnnnnnnnnnnnnnnnnnnnnnnnnnnnnnnnnnnnnnnnnnnnnnnnnnnnnnnnnnnnnnnnnnnnnnnnnnnnnnnnnnnnnnnnnnnnnnnnnnnnnnnnnnnnnnnnggaagtagaactcctcattaccttaattaaatcagaaaaaggaagcctgggttttacagtaaccaaaggcaatcagagaattggttgttatgttcatgatgtcatacaggatccagccaaaagtgatggaaggctaaaacctggggaccggctcataaagg

SEQ ID NO: 36193 - DNA, 632 bp, Macaca Mulatta
tgccttctctaaggatcttagatccttaaaatatatagtatctttttaagtttgtatctaaatagcacttactgtaatgtatgatacctaaacgtttattaaaagttagaagaaatgagtaccaacaggaaggaatggaagagaggagacgggctaagacattgctgatctgagggacagacctctatcaaatagagggctgggagaagtagtgattagaagcagagtgagggaactaaatggagccctgactgcaccaaataaagttctaattttgctgcttgttccaaataaattagtgtctgtttgtgtaatgcagactaaatgccagttgtctaaagccaatcagaatgtagaagcaagctaagaactaggaggaaaaattaattgcttggccatcattcctttttgggccacataacctctgtagtggggctcaaatggacaccatatctctcacttatccacttcgattttcaaacttctcactctctggacagcttgcctcttatcttaaccatttataggaaattgcaaaacttgcatctttatgagctagaatctggagcccaaggaaaagcacagagtagcatgagatgccagaagaggcccatttccttccacaggaaaga

SEQ ID NO: 36194 - DNA, 372 bp, Macaca Mulatta
  misc_feature (1)...(372): n = A,T,C or G
gacatgtagagctgaagatggatcaggctttgctactcatccataatgaacttcttggggccaacttgactgtctactggaaatctgaatgctgttatcacntgcttgtttcaggtgctggtaaacgttcctcagagtccaaaagccgggaagcctagcgttgcagccgcctctgtcagcacccagcacggagctatcctgcagctgaacgacaccttggaagagaaagaagtttgtaggttntttgtagactggaatacagatttggagaatttggaaactattctctcttggtaaagaatatccataatggagttagtgaaattgcctgtgacctggctgtgaacgaggatccagttgatagtaaccttc

SEQ ID NO: 36195 - DNA, 765 bp, Macaca Mulatta
  misc_feature (1)...(765): n = A,T,C or G
gggggtatgtccttatcattgggtgggtgttgaagtcaggctccccacttttcttccacccacactctagagggaggaagccacgttattgctcagtgggtatgaatgttatgtgtccgcacttgaccttctttggtatcatgctctctgtgggtaggagtggggaatggctgactatgtcctccttttaagtctttgcaaaaggtatatgtcttgggcttttatttgtgccatttggcttaaactggtttgttgttgtccatgagttttttgtcttggtagcctgctgcttccctgcttttttgactagacacagcagaattttcttcgagttttgtgtatgtgtgtgcctgttggtgtttctgagttgtctgcttctctagcaacttttcttgtgtatatgagttagaaaggaaacctagggaattcatcctcttttgtttcttggcatctgaagccctcattggtctgccctctctctacattctgttgtcttcttttgtttgtcttacgtatcatgaccaagggtttttaaagctgtatttagtggaaagaacagagaaaagtacattttctgcattttgtctggaagtggaagtctgcattcatttttgccttttatccctgaatatagagttctgggatgattatggttttcttcttcaagcatttaaagacattgcattgttttcctgtcntccatggtttctaatgagaaatcaggtgtgggtgtcagtagtatcattaattcccatgtatataaaa

SEQ ID NO: 36196 - DNA, 97 bp, Macaca Mulatta
acaggctggagactgcgggtgctgcgtgatgctgtttatgtacggcctgaagggagggaggggtggccaccactggatccccagatctctgcactcc

SEQ ID NO: 36197 - DNA, 640 bp, Macaca Mulatta
gggctggtattaagactaccccctcagtcagcagtgtggggctcttcaggcgcagctctcagcaagccttgctgcttgttccttcaataggctgcttcagattccatgcaattgacaagtttgttttcagagaggaaggccttttaactgaaaactgcaatcaaaaccgttccttacattgcgcaaaaacagcattttaagagtgcaatagtcattcaaattgaggactacatcctgtaaccttttccagctggactaaattaaatatgtaacatccccaggagcaatttttgagaacagcactcggctttaccttgactactgaatcattaaaagacatgtggaaacattccacattccttccatctgaccctttggcgataaatggccacctcctggcaacttatactgaagtctgtttctaaacaaataatgtacgcccacctggtctgcccttaggcactttgctgggtgcctgaaaacagtgacatgtgttcctggatttataaaagatccacattctcctttgagtctgctgatgccaatttcttattcttttatctgcataatagcttaatgttaatgacttgaaaacttcagttctgtggatttaaagaggggaatataagttgattgccct

SEQ ID NO: 36198 - DNA, 877 bp, Macaca Mulatta
  misc_feature (1)...(877): n = A,T,C or G
acgaggcctagagtatattgatgaacttaatgtctagtcacacattataggcatgtattctccccagcatttaattataaagctgggaaacaaaagatgatagttttactactgcatacaaacannnnnnnnnnnnnnnnnnnnttcagtataaacttatcaatataggaaatgtgaatacttactatttcctgagctaccaaagtttttttactctgtggataagttaatgacttttgctatatgtatatttatatatatatttggtagagaacataaaaacctaaaatttagtaacaaggggaaaataaagcatgatctggagatacatgtttcaaattttaaaaaagtggccataaagatcaacagtagaatttaatactgttatatgtacatggatgccctttaataagaggcatggaatatttcttaacctgtaaaaataagtgtggatcatgctaatgtatatacttgtgcatcttaggacatcaagtggtttgctgctttgatggaaattatggttcagtgggttggatacaagagagatgattgtccacagaataacctgtgaactttcacccctctgtatggaaacttgtttcagggccaaatccttgtagctgtctacttgccccggtcattgccagccgtattattcaaacatggtgataccgaggcctaggatcgttctaaaaacacgccggtaatggacgcatgtgaccctttgatgcaacagtgtggacacagccagtttggacacccgaagcatagcaccctcattgattacaaccgcatgttgttctgatcacacaanggtttgctgcctctggacttggaacctattgttgaatctaaaagggcactttgcataactcca

SEQ ID NO: 36199 - DNA, 218 bp, Macaca Mulatta
gaaggagaacttgaagcagaatggctgcaagatgtgggtttatcaactctgatctcaggtgatgaagaggaagatggcaaagccttgctctctacattgactcgaacccaagcagcagccgtggaaaagagatacaatacctatacccagaccatgaggaaaaagaataagcaatctgtcagggatgtcagagacatttttggagtcagggaatctcc

SEQ ID NO: 36200 - DNA, 632 bp, Macaca Mulatta
  misc_feature (1)...(632): n = A,T,C or G
tgagaggaaagagaactagtatcaataaataagaaaataattattcatatattaacattgacatgtgaactacatatctaaaatcttgctggagaaaaatcaaggcaagaattccagaactgtctgcaaatagctcatttatttaagttttgttaaaaagcaaaagtgtggccgnnnnnnnnnnnnnnnnnnnnnnnnnnnnnnnnnnnnnnnnnnnnnnatgggcggatcactaggtcagaagattgagaccatcctggctaacacggtgaaannnnnnnnnnnnnnnnnnnnnnnnnactagctgggcgaggtggcgggcnnnnnnnnnnnnnnnnnnnnnnnnnnnnnnnnnnnnnnngtggcgtgaacccgggaggcagagctcnnnnnnnnnnnnnnnncnnnnnnnnnnnnnnnnnnnnnnnnnnnnnnnnnnnnnnnnnnnnnnnnnnnnnnnnnnnnnnnnnnnaattgatttacatttgattaacttttcctattccatgcactagttattttaaagcatgataaaaaccttctgggcattacctatcacacagtacttatgcataaacttagtaaaatcactaatgtttgataaaataagatggaggcataacgaatagtct

SEQ ID NO: 36201 - DNA, 793 bp, Macaca Mulatta
  misc_feature (1)...(793): n = A,T,C or G
ggaaccacgaaatatttacttattctattacagagcaattctgtcctatttacccaggagaaatgaaaaaatatgtccataataaagtctgtgtatttttagttgctttactaatgataaccaagatgacaaacagcccaggggtccatcaacaggaaaatgaaagaactatggtatattcagacaaagaaatactactcagcaataaaaaggaatgaactactggtatacactgaaacttaaatgaatgtcagaaacatcacgttcagtgaaaaccttagataaaatagtggatactaatcagtatgccctctgctgtataacggcttcacatttctgttttaggcattctattaaatcctgagcaatccgcaaacacaagcagcaaaatcgcaaagctgactttgagttctggcctccccttatttctacaccatcccatttgaaatccttcatagatgatgattatgaaatctaatccttatgattatgtgtcaggcctgctgattcctgatggccttttaggcactctggtgtcaggaagatttttcttaccccattcaaattacacaacacaggccaattctgaatatgacagtagtaagcccaccatatagcaaatgcttacatttaccacagtgtctaactaacataggtatttaaaagtacatgaaagccaacngacaagaaaaactaaaggacctttggggtaaatgttttccttcttggaaacctggaaatcaatttccggctttctttaatattccaacattttttaaggggtattttttaa

SEQ ID NO: 36202 - DNA, 635 bp, Macaca Mulatta
  misc_feature (1)...(635): n = A,T,C or G
gggggcaccagtgcagtgatgattgtacttatttgacacatactccccctcgtcctgggtcttgctcctgagaagggtgggtaacagatactccagagaaaagaatgcacattgaatggatgtgagagaccacattgcctctcccactgctttggggagcattttcctgtcatttctaacttaccacgtgcttggtgtactatatgtatgttgtgcctcatatgttgcaaggtgagtatagcctactagatgtgggtaatatccagcctagatgattggaaagataccaatttaagtaagcttggtaaaatccaannnnnnnnnnnnnnnnnnnnnnncaggaacaactacattttctcatctacaggtagctaggggcaacacagttccattgtagagggaaaccaaagggagagccccacaaaactttgggggcaagggagagagagactcatctgacacttcttttggaggtcagggtttgtatatcagaattgaagttagaataagtgaattaaactcaatgtgatggaatgtgagtgaacctagaacagcactgaagtatgacataacctggaagactgagaagggtatattatttgaggatctttttatttcccaagtctttgcactgg

SEQ ID NO: 36203 - DNA, 203 bp, Macaca Mulatta
  misc_feature (1)...(203): n = A,T,C or G
agttggtgaaagatttccaagaattgcggaggatcatagagtctatgaacatgttccacgccaacctggggttcttctttcttcacttcacccagatcttaatgttggaaatgctggcgtggctaatactgtatcattttggcagtggctggcctgttactatattcatttcctttcttctcacaatttctcaggtaagcagn

SEQ ID NO: 36204 - DNA, 760 bp, Macaca Mulatta
ggggatttctattgtttttcccataaggagcctagagaagccaattttgaacttgcaaaggcttttaactgctcaagataatttttaggggtaaccacgaaatgaacctcaaaagtcctgtcctccagatgtcagaaaccaaaaaacgtttcccaacatggtcgcaaagttaagctattaaagatgaaaaacaagacagagaaattttatccagtattgctttgtgtccttaaaagcttaacctcgtgcccactgaagaatatctaatctaaaaataatgacaaatttttgagaaatcacactttttccaattttagtcctttcttatatttcacaaagattaatccctttaaaatttctaggctagaaaaactattcattatattaaagctgcaacattctatgatttctgagaaaaacattctataactaggtttctcttaaactatgtaaatatcttattgtctgtactatggaataatatttgggacaaaaattattgaaacattggagtcttaaaagtcatagaagccaagtggaaacaatttaagtgtagcgtttcctgtataagatccactggatttttttttctgtgatttagagtagataatgttaaatggttgatatgaaactttatagtccctttttcaattttacccatgaaagttgaatgtgtggtattaggacattatgcatttctaaaactatatgaatctgaagtacccccataatttcaaatcaagagacatgtaaaaaccca

SEQ ID NO: 36205 - DNA, 782 bp, Macaca Mulatta
  misc_feature (1)...(782): n = A,T,C or G
gaggatacttgtccaatcattgaacctatgtccttcatgtactgacggaacactgacggcacatatgaagcctggttttccggatcagactatgctggtttgggcagatgtgagaagagcgagaaccctggcccaacttctgtaggtggctccagtaaggctgctggtgacccatcttgctttcgggagtgcaatgaggcaaaaggctttgttatgatttaacatagcctatatttgacatataaagcatttttttttttctaagaggctcagcaagggttttactctatccagcatagttttggattaaacattttgtatggagaatctgaagctctcctacaagaacttatatggtattaagaaaattgaataaactgaaaattgagtacatatttgcaaagagcactttattgcaagaatattttatcaacactttctctacatgtaaggatgaagtttgtgggaaaattatgcattgctactactgaatcaatataggaatatacagacagaacaaagtaagggaagacataacacaaaagtctaatttttccttcaattttcctatattaaaatnnnnnnnnnnnnnnnnnnnnnagatggnnnnnnnnnnnnnntgnnnnnnnnnnnnnnnnnnnngtnnnnnnnnnnnnnnnnnnnnnnnnannnnnnnnnnnnnatgattctgctgcctcagccttccaagtaggtgggattacaggcgcatgctgcctatgcccggctaattttgcttatagtagagancagggtttcaccat

SEQ ID NO: 36206 - DNA, 702 bp, Macaca Mulatta
ttaccactggattatcatatctgaggcatacactagttatcatgttcatttccaaaattctttgcactctgaatctcctgtgctgctgttggagtctctatatggtttactacaggacatcagtctgtcatccacatgtccctaggcacatatccctggacacactcctcctggagtggcaggaatgactagtgacctccaccgacttcctccctgtcacttgcatgattcctctgcttctacaccttcccctgtctcctcagactcctgtttatctagaagattatgagcacttttaaaaagatctaagataaaacttcaaaagaagtagcccataaaaccgatacttttctcttccaaaaggtgatggcatctctcctacaaaaagaggatgtaattcactcagatgtgcaagatgaactggttgattctgcttgttatttgtgcatctaattagtttgaatctatacagtaccaccaccttaaggtgtttccaaaggacaactctaaaacacttactattttttaagtagaaagtttggggtattaagtgaaatttcaatattgaattcattgcctaaggcaaacattagatataagtgggaaacatcttagaggattttactgttttacatttttttaggtgaatagcaaccttagatcatcttagaaaatacagttactgtcaccaaattaaacttg

SEQ ID NO: 36207 - DNA, 317 bp, Macaca Mulatta
  misc_feature (1)...(317): n = A,T,C or G
cccatggagtgaagataaagaatgtcttcataaggttttatttttttcactgctannnnnnnnnnnnnnnnnnnattgataaaaatgaaagtgccaaagtgagggttagcttaaagtataagcatagttagcaaaccgttttttttctgatcactcctttccatttaaaaaataatcctcataggagtataaacagaggaaggggaaatggaggatgggcttaagagaaagataatatttcacaaatatctgcatagcaaattcaattcatctacctagtaactccctccatgttaacctacgggtgtcctcccctc

SEQ ID NO: 36208 - DNA, 774 bp, Macaca Mulatta
  misc_feature (1)...(774): n = A,T,C or G
ggaatctgatttttgtttttgttttgattttgataattcatgttgacttaagtgtttttaaacttgaaaataatagtttaaaagagtgtacttatattaaaataattgtaaaatataaagcaagcactatctatatggaaaagttcaatacaaattaattgaacgaacagcaaaaatctagctctaaaaagtgttacaaacatacctacgcataataataataaaatatatgagtagtttaatatatcttttatttattgttcactttcactcctttattgatttatcccaaataaatgtattgagtattgtgtgtgtttttccaaaaacaaattctccaattattcagcaccaatttggtctccaacaattgaattccattctgacagtaactgttcgaagttattgtagaccccacggtttaaggtctcagtcccgtaagactgtccccacttcggatgccagccaccaatagggtctcaaggttactcacacttctgacaggctgaaactaatcagaggttcccacaaccccctgcagtttcagttatttgttagaatgactcattgaactcanganagtgctatgcttacagtttattataacagatacaaatgagcatccagtgggtgaagtatataaagcaatgtgtaatangattctgagcataagagcctctgtccccatggnagtcagggtgtgctaccctctcagcacatggatctgtttacaacttggaaactctacaaatcccataaattagtgttttttaa

SEQ ID NO: 36209 - DNA, 752 bp, Macaca Mulatta
  misc_feature (1)...(752): n = A,T,C or G
gggtagtgccagaacatgaggataacaagctgagagaaaaagtatttaaagaaataatacctgaaatttttctatactatgaaaaaaattaaacatccaagaagcgtaaagaattccaagtataataattgcaaatatatttccccttagacacatcacagtaaaattatgaaagtaaaaaagaatcttggaagcatgaaaagaataatggctgatgtacaaggaaactctaataatacagtaaaaatcaaggccacagtggaggtatatgacatattaatagtgtagaagaagtaaattcaaaattttacctgaagcacgactgacattcttaaatcaaggtaaagatattgctagataaacaaaaactgggaatgtgttcttagcaaacctaccttgtaagaaaagctaatttttgagaatgaagaatactgaccccaaactgtaattgaaattcctatgaaaaatcagagtaccagtcataattatgtaataattatagaggctagtatgaatgcatattttttatgtattagctggcatatgtgcctatacactatatacttatattcatatatgtgtatcgtatgcagtatttccatatttgtgtttgtgagcttacaacatagagaagtgagatctatttaataatatcacaaaggatgtggttaagaacaaaactgttgtaataaggaaatgattcnnnnnnnnnnnnnnnnnnnnnnagacagagtttcgctcttattgcccct

SEQ ID NO: 36210 - DNA, 758 bp, Macaca Mulatta
  misc_feature (1)...(758): n = A,T,C or G
ggnnnnnnnnnnnnnnnnnnnnnnnnnnnnnnnnnnnnnnnnnnnnnnnnnnnnnnnnnnnnnnnnnnnnnnnnnnnnnnnnnnnnnnnnnnnnnnnnnnnnnnnnnnnnnnnnnnnnnnnnnnnnnnnnnnnnnnnnnnnnnnnnnnnnnnnnnnnnnnnnnnnnnnnnnnnnnnnnnnnnnnnnnnnnnnnnnnnnnnnnnnnnnnnnnnnnnnnnnnnnnnnnnnnnnnnnnnnnnnnnnnnnnnnnnnnnnnnnnnnnnnnnnnnnnnnnnnnnnnnnnnnnnnnnnnnnnnnnnnnnnnnnnnnnnnnnnnnnnnnnnnnnnnnnnnnnnnnnnnnnnnnnnnnnnnnnnnnnnnnnnnnnnnnnnnnnnnnnnnnnnnnnnnnnnnnnnnnnnnnnnnnnnnnnnnnnnnnnnnnnnnnnnnnnnnnnnnnnnnnnnnnnnnnnnnnnnnnnnnnnnnnnnnnnnnnnnnnnnnnnnnnnnnnnnnnnnnnntattctaattcggcaactaatttcaccctaataaaaattcccaaaaaaacttttgaaaacactctttcatcatacgccgaaagggtttctatttgtttcaacatttctttccgaaaccacgaggcttttaaatggaacaccatggatataatattggggaatcaacaaatttccacccaagaataacgggggtttactaacagcaccaaaggtaatataaattttcaactatgcaaaaaaaaganaagaccaaaaacgaa

SEQ ID NO: 36211 - DNA, 773 bp, Macaca Mulatta
  misc_feature (1)...(773): n = A,T,C or G
ggactagccttaaaactactagtctaataaaatcaactaccacttttgtgaatctgacaggccgtatttttatatggccctttacagaatggagtgtgttgaataggatactaatgccattgagttgagctggcctagagattgagggattctctaacacaactttccctcagctattatgcaacagattagggcaaaagatgggatgacagatggggtcagacagaaagagcttctgggaaacaagcttacatattcttttttaaaatgcacaaagcccccccccccccggctaagaggtcacttggtttgggcttcattaggactgagactttgttgagttgtttctgggaattggggagtggatgatattcaggctctcaacattcccagcgctctcctgagggtgccactttctcaagatgaaaactgtgactgaaaaaattaataataaatgtttctgagctgcctgtgttctccctgggtgggtgagagaagggattagactcctaagcctgcctcagatacaggaggcatcattggctcccattttagagaacttgaaagcaaggctttggacaaaattttgagaccctaatcactttaccttccttccaattacccaacatatggtaaacaacatttgtgcagaaataggaatgtatttagtttcaggttgaactgggggcctttataaacttcttactcaaaatgatttgaaacttttacctggacgggnnnnnnnnnnnnnnnnnnaagcctacaaaccatgg

SEQ ID NO: 36212 - DNA, 580 bp, Macaca Mulatta
cggcacgtcgcagtgggacggagatagagcagcggggcgtagccgcggcggcgccactccgcgcgttcccggagcggaggcactgggcggcgcagataggcggtcccgggcagccactgcagcgacagcgggtaatccgagtggcgactgaatgtggaggtaagattgaagaggcggatgcccgggccgtggctcagcaagaagttgttgaggggcgactcctcgtggaggagcgcccagctctggtgcgccaggcgcggcagcggcgcggccgaagcgcggaagtcggtgccgtagaagagcagcgcgcgcgtccgcgagtccctcagcgctccgcggttccgggacgccacgcacgcgccgcgcgcacactcgatgcgctccgagtctcccgggaagtgggggaatagccctgggctccaccacagcagcaccggcaaatctccggcctcctccctccctggtctcggcgttccggagctgcgcgtcacccccactgcgcccagcgccgagggcggccggaaaaccgcgccatcccacggttccgcccactccgcctcaccgccggcctccctctccg

SEQ ID NO: 36213 - DNA, 766 bp, Macaca Mulatta
  misc_feature (1)...(766): n = A,T,C or G
ggctgtaatttcggtaatgatgaagcattccttttaaaaatagagtaaaaagtacttgtggtttattttcatgaaacaggatagaaatccctcatctcatttaattaaaaaaagaaccactggtaaaatccagtcttctcctttctccaatacctgtcaagatttattttgtatatctgtattttctaaaattgttaccctttatcttttacagtaaaaagattaataatatggggtcaatcctttaggtattttaaattatgtgatttagtctatctagtgtatttgcctatttatataactatttattttgacctatctatgtaactacttatttctaagtcaaccctctgtaagtgtagatgtctaagtctagcttatatataacttacaagttctatgaaaataccacgttgtaactcataaatgtatacagttatcaatcaaaaataataattgtaattaaagttaaaaaagtaaaaatatgccatcctanatttctcagtgcttttaaagtgtaaaacgtattcatttttatgaatcacaacctaatactctcatagtattaaatactgtgagagtaagcctttaagtatattgagttaatactcctcagttcatggcatggaatcatcattgggttcctgtcagggcttttatgctggtttaatggaattaaattcattttacccattttgtttatttccccaatcccgggttccccatttttcaacagcccccccagccccccacaaggaaaaatcac

SEQ ID NO: 36214 - DNA, 430 bp, Macaca Mulatta
tccttgtgttcagctctttccaaattaaaacaaatatatattttctaaataaaaatatgtaatttcaaaatacatctgtaagtgtaaaaaatgtctcatgtcaatgaccattcaattaatggtcataaaatagaataattcttttctgaggctagtatttaaataactgtggcagttaattggatgttcaccgccagttgtcttatgtgaaaaattaacttttttgtggcaattagtgtgacaatttccaaattgccctatgctgtgctccatgtttgacttctaattgtaaatgaaattaagcattttgaaacaaagtacactttagcatacaagaaaatctatccaaggaaacattttatcattaaaaattacctttaattttaatgctgtttctaggaaaatgttattagctccataaagtacaaag

SEQ ID NO: 36215 - DNA, 782 bp, Macaca Mulatta
  misc_feature (1)...(782): n = A,T,C or G
ggtcacgccnnnnnnnnnnnnnnnnnnnnnnnnnnnnnnnnnnnnnnnntgcccatcaccgtgcctggctaattttttttgtgtgtttttagtagagacatggtttcactgtgttagccaggatggtcttgatctcctgacgtcgtgatctacctnnnnnnnnnnnnnnnnnnnnnnnnnnnnnnnnnnagagccaccgcacccggcctccnnnnnnnnnnnnnnnnnnnnnttcatttacatatacctcaccagtggaggcacctcacatgatcattcagtgctcccatgacatcaccaactggggcttgaactctgccttttcttcctagattagtcttgggaaatcataaaaggccttttgtcagaagaataaagtatttagacccatgatttgaaaatttcctctctcaaagaatcaatcagaaattctaaaattagtgtcaactcattccagtagcaccctgacagtgatctacaaaacaactatacagaaattcaataaagatacagacttgatggttagccaatttannnnnnnnnnnnnnnnnnnnngaaatctcacccttttccccaggtttgaatgcaatggctttatgttagtttactggcacctcggcctcctggaattcagtgaattctcctggatctggcttcccaaaaaactgggaaaaaaggcacctagccccccaaaaccggggcaaaaattatgggaaaatgttttaaggaagaagatgtagggttttcccccaatgattggggcccggagccctgggttctct

SEQ ID NO: 36216 - DNA, 689 bp, Macaca Mulatta
  misc_feature (1)...(689): n = A,T,C or G
ggcttaggctaggtgtgnnnnnnnnnnnnnnnnnnnnnnntnnnnnnnnnnnnnnnnacaggaggatctcttgatgccaggagttcaagaaagggaactctttgaggtcacttactcaaatttcaacaacccataatattcaaagtacctgaaagtaaagcaagaccatgtgtgcattcttgcatttctttatccagtcactcagacattgttagtttttcttagttttcctctcaggattctcaaatattaaaattcagccaaatttgaatttatagtttaaaagaatcataaccaaaaccaagtgggcttttccctagggatacatatttggtttaatatctgaaaatcaattagtataatacaccatattaatagaataaaagatttcaaaaccacatgatcatcttactagaaaaagaaaaagcatttgataaaatccacactccttcctaataaaagcactgagcaaactaggagtgaaattagtacatgaaagtggaacctcttaaatgccttttaatggtcacaataacaattaaacgtcaacatgagctttgagggggagggacaaatgttcagatgatagcacttgataatagagagatgtttatgggctgctcagcctgataaatgatatctatgaaatacccacagctaacatcatagttaaaatgtgaaaagactaa

SEQ ID NO: 36217 - DNA, 780 bp, Macaca Mulatta
  misc_feature (1)...(780): n = A,T,C or G
ggcccccctacaaggcagtgtaagcatttcctgttattatatannnnnnnnnnnnnnnnnnnnnnnnnnnnnacaggttctcactctgtcactcaggctagagtgcagtggcatgatcacagttcactgcagccttgactccctgggttcaagtgatcctccaacctcagcctccccagtagctgggatcatgtgtgcacaccacaccannnnnnnnnnnnnnnnnnnnnnnnatggagtctcactcactctgtcatccaggctgaagaggcagtggtgcaattttggctcactgcgagctctgtctttcaggttcaagcagnnnnnnnnnnnnnnnnnnnnnnnnnnnnnnnnnnnnnnnnnnntatcaccatacctgcnnnnnnnnnnnnnnnngnnnnnnnnnnnnnnagannnnnnnnnnnnnnnannnnnnnnnnnnnnnngacctcaagtggtccgcccacctcagccannnnnnnnnnnnnnnnnnnnnnnnnnnnnnnntgcacccagctgtaccccagctaattaaaaaaatctggttttgtaaagatggggtattgccaggttggccgaggccggtccttgaactcccggggctcaaggcaatccccccaggcttcaagcttccccaaaggtctggggattacccggccttgaaccactgcaatcccagcccttcctccagtaatttcaaccctttgagtcggaattcctattggcgaattttttttggaaaccatgaaacacggcattttgggcactgggcctacatcc

SEQ ID NO: 36218 - DNA, 1886 bp, Macaca Mulatta
  misc_feature (1)...(1886): n = A,T,C or G
gtgatggagtggctgaagtatctgcaaatggagagagaccagtatgcccagtatctgcacggagagagtgccatgtggtggcagaggatgcgggagatgtcagagnnnngtgcatacgttgagggaggagagggcacatagcatgagtcgagtacaggaactggagacgagcttggctgaactaaggaannnnnnnnnnnnnnnnnnnnnnnnnnnnnnnnnnnnnnnnnnnnnnnnnnnnnnnnnnnnnnnnnnnnnnnnnnnnnnnnnnnnnnnnnnnnnnnnnnnnnnnnnnnnnnnnnnnnnnnnnnnnnnnnnnnnnnnnnnnnnnnnnnnnnnnnnnnnnnnnnnnnnnnnnnnnnnnnnnnnnnnnnnnnnnnnnnnnnnnnnnnnnnnnnnnnnnnnnnnnnnnnnnnnnnnnnnnnnnnnnnnnnnnnnnnnnnnnnnnnnnnnnnnnnnnnnnnnnnnnnnnnnnnnnnnnnnnnnnnnnnnnnnnnnnncttcctttctcagctgaacccccaccccnnnnnnnnnnnnnnnnnnnnnnnnnnnnnnnnnnnnnnnnnnnnnnnnnnnnnnnnnnnnnnnnnnnnnnnnnnnnnnnnnnnnnnnnnnnnnnnnnnnnnnnnnnnnnnnnnnnnnnnnnnnnnnnnnnnnnnnnnnnnnnnnnnnnnnnnnnnnnnnnnnnnnnnnnnnnnnnnnnnnnnnnnnnnnnnnnnnnnnnnnnnnnnnnnnnnnnnnnnnnnnnnnnnnnnnnnnnnnnnnnnnnnnnnnnnnnnnnnnnnnggaaggccgcttcctttctcagctgaaccctcgcccccggagtccccagcagggtcctccaaggtggagcagcagctacaagcagaggctgagcacttgcggaaggagctggagaatctgacaggacagctttaagcccaagtgcaagaaaatgagggcttgagtcacctgaaccaagagcaggaggagaggttgctggaacaagaggagaggctgttggagnnnnnnnnnnnnnnnnnnnnnnnnnnnnnnnnnnnnnnnnnnnnnnnnnnnnnnnnnnnnnnnnnnnnnnnnnnnnnnnnnnnnnnnnnnnnnnnnnnnnnnnnnnnnnnnnnnnnnnnnnnnnnnnnnnnnnnnnnnnnnnnnnnnnnnnnnnnnnnnnnnnnnnnnnnnnnnnnnnnnnnnnnnnnnnnnnnnnnnnnnnnnnnnnnnnnnnnnnnnnnnnnnnnnnnnnnnnnnnnnnnnnnnnnnnnnnnnnnnnnnnnnnnnnnnnnnnnnnnnnnnnnnnnnnnnnnnnnnnnnnnnnnnnnnnnnnnnnnnnnnnnnnnnnnnnnnnnnnnnnnnnnnnnnnnnnnnnnnnnnnnnnnnnnnnnnnnnnnnnnnnnnnnnnnnnnnnnnnnnnnnnnnnnnnnnnnnnnnnnnnnnnnnnnnnnnnnnnnnnnnnnnnnnnnnnnnnnnnnnnnnnnnnnnnnnnnnnnnnnnnnnnnnnnnnnnnnnnnnnnnnnnnnnnnnnnnnnnnnnnnnnnnnnnnnnnnnnnnnnnnnnnnnnnnnnnnnnnnnnnnnnnnnnnnnnnnnnnnnnnnnnnnnnnnnntttctttggactctcaccccttccctcagagccagtggtcagactccatctcacctgagacccaacaggtacaccctgtgaggccccaagggaagggcttctctctactgccctggcccgttcatcctgtgtatccccctacaagaatgcgcacctcctgcccactagtgactttttaaaacttggctttagccagtgccgaagaggagcaggcacagccacatgggcggctgaaagagcaaagggtgcactgccagcgccttctgacatggtggccttggccc

SEQ ID NO: 36219 - DNA, 877 bp, Macaca Mulatta
  misc_feature (1)...(877): n = A,T,C or G
ggggtcagtacaggtcctccgtatgctgagtgccggtcccctgggcccactgttctttccctagactttgtctctgtgtcttatttcttttctcagtctctcatcccgcctgacgagaactacccataggtgtgcaggggctggcccccttcatctgccgccgaacgtgggtgcctttctctagggtgaaggtacgctaagaacatgagcattgaggacagtcgacgagagattcccgagtatgtccacggtcagccttgcgaaatcagaccactacttctgcagaacaacactttactggtaaaaagaacagcccacatgagggaaaactgatttggtggaaagacaacaaaaaatctctcctctttaaacgtccaactgctagcgccatgcagccaaatgtcctcttctacccagtcccaaaagaaaaacccagctggttccttaacgaatgaaaagccatcccacaggaaaacggacttatattggttcaaggggacgaccgcaccactactgtcccaacccaccttgagcagctgacccccgatggccccgcccaaacccatgcccccccagtactccccctttcccagcgacgaggttccggccggcataacgcagccaacaacaaaccatgaaagcaaattccggcctaccggccccgaccgcccatgaagcatcactgagaaccacacaagccccacatccctgaatcgcaccatccttgaccatctctcccggacggtccgggataaatatcacgatagcccccacttcggcgccaaggagcgcggccgccactctccaactccaaatatactagtcacccggaatacggtgtgtcgcttnctcatacgccctccatacaacgagcgct

SEQ ID NO: 36220 - DNA, 699 bp, Macaca Mulatta
  misc_feature (1)...(699): n = A,T,C or G
taaggaggcaggcaacgctacacagggctgggcaaaaaggtgttactgaggcccgtggactggacagttgggtaggaactagaaggccaataggaaggagggcaaaggtacccaaccaaacagtaagtatggcagtgagtatggtatgcctagaataaaggtggttgggattagaattgggtgacactgatcagtagtttaattcagaagtatttcttcccaactccaaagtctcactttgggctgaacgtacacaggaagaaggtagacttctaagaagagtcacagggtttcaccatgttgctcaggctggtgtannnnnnnnnnnnnnnnnnnnnnnnnnnnnnnnnnnnnnnnnnnnnnnnnnnnnnnnnnnnnnnnnnnnnnnnnnnnngcaaaataattacaatggagagatctggaagatcaccttaatcaagtgatcaaatttagtattataggcgatctgctgttacgaggcaggaaggatacattacctatgcagtatttttcccaaaaatgaggaaactgacaaatccagattgtgggacatttacaagacaactatctttgactcttaaaaaatgccaatgtcatgaaagatcaaagaaagtagaggaatgttttagattaaaggaaatgaagacatgacttgcagtgcctgattttcaattggattctatactattcttttcatct

SEQ ID NO: 36221 - DNA, 313 bp, Macaca Mulatta
  misc_feature (1)...(313): n = A,T,C or G
gagagagagagaanacgcgaggcgtaactgtgttctctcttcccctcctctccccaagccaccccagaatccatacttcgttcctcctggaagctcctatgtgagctgcagcgcccatgctggggaggccctgcactccagaagcatcttctgaccttggcacagaactgatggcaaagggcgggctgggttttcagctcctgtggacctgagcaagaccccacacctcattccttccccggtatacatcacactgtgcttatgccgccagtcggaactccaatggtaaccccatttgggggtggccatgatc

SEQ ID NO: 36222 - DNA, 278 bp, Macaca Mulatta
tttgaatataaaagccctctttctctgtggttgatcattggaccatgggttctctgcatctttcttgagttaggattttttacagagataaaccacctgagtggtattagattaatatttaggttgttttagccacaaaccaacttttcaacctgtaccataatcattggcttttttgttaaatgaactatgaaaagagaaataattctttgttggagacattcattttatatgatgtataagtacacatataaatcaaactatatatccctccatcc

SEQ ID NO: 36223 - DNA, 8645 bp, Macaca Mulatta
  misc_feature (1)...(8645): n = A,T,C or G
aatttgagtgagaatcagctcaacaaatacgccaaactggcacccttgaaaggcttctggcaaaagaagaagcagagaaacaccaacacggactccatcaagacacctttttcccaaaagcaaagctttgaaccaggtagctttgaggtgtcatttctgccacctgctcgcaaacgaaaatctaaacttggcaacaggcacaggattcaaagaatcccatccattgaaatttcagcaagtagtaaacagatttcattatgcaatgatcagaggcaagctagtaatcgtaaagaagatggaggcctaaaaggtacactgaagtcagcacctctgggtgcccctagctgtgcaaatggatcacatttaaatgacatcacaggccctgactctgtgaaagtcaaagcccaagacacagagtttaaggggccagagaggaaagtgctcaacaaaatcaaatttaaaagtgaagctaggttaaaatctaagaaagtcaaagctgctgggcaagaaagcaaaccaattgttcaaatgagccctctcttggaagaccaatcctccaaggctaatttgaagaatgaagttattcctgggacctcaaacagttgccatctgtctgaatttcatgaggcaaaggctgctaagaattccacttttctaccaacgacctgctcttctgaaatgcctttatcatcagctaatgttaccactaatatacctgttatccctggagggtatctgcnnnnnnnnnnnnnnnnnnnnnnnnnnnnnnnnnnnnnnnnnnnnnnnnnnnnnnnnnnnnnnnnnnnnnnnnnnnnnnnnnnnnnnnnnnnnnnnnnnnnnnnnnnnnnnnnnnnnnnnnnnnnnnnnnnnnnnnnnnnnnnnnnnnnnnnnnnnnnnnnnnnnnnnnnnnnnnnnnnnnnnnnnnnnnnnnnnnnnnnnnnnnnnnnnnnnnnnnnnnnnnnnnnnnnnnnnnnnnnnnnnnnnnnnnnnnnnnnnnnnnnnnnnnnnnnnnnnnnnnnnnnnnnnnnnnnnnnnnnnnnnnnnnnnnnnnnnnnnnnnnnnnnnnnnnnnnnnnnnnnnnnnnnnnnnnnnnnnnnnnnnnnnnnnnnnnnnnnnnnnnnnnnnnnnnnnnnnnnnnnnnnnnnnnnnntgcaagatacccaactcccatctgatgactcttaccaattatgtcactttaataatggagaaatctgctttctttccaacaggggccagtcaatatggatgatggtcggctctttagctttgattcaatggccccactctctgtcagctcaagtaattattgctccttaagcttgaagtcctgtgaaaaggatggcgatgatgatatcactgatgacttcctggcccattgcagccctaagctggtgatccagcaaagcattgatgagatagcaccactgaaggagtccactgatctcctggatatatccaacttcacccctgacaaattccgtcactcttccctttcagagatgtccccaccggacacccctagtctttcccctcaaattaccagatgtgagagtatgaagacactaggaacactgaaggggttccaagagggtgtcccaggaccattggacagtgtggaaaaaatcaagtgggactgcagtaccctttcacggcaggtccaaatggaggatggatttactttaaataaccaccagtttcagtttcatatgttcaatgatgaggattctctcagcctgctccaaaaaaacccttgcctgtcaacatttaatgatccatctggtcaaaatagtaccaacaacaaagtgtcaaaatcaagaaagaaaagttnnnnnnnnnnnnnnnnnnnnnnnnnnnnnnnnnnnnnnnnnnnnnnnnnnnnnnnnnnnnnnnnnnnnnnnnnnnnnnnnnnnnnnnnnnnnnnnnnnnnnnnnnnnnnnnnnnnnnnnnnnnnnnnnnnnnnnnnnnnnnnnnnnnnnnnnnnnnnnnnnnnnnnnnnnnnnnnnnnnnnnnnnnnnnnnnnnnnnnnnnnnnnnnnnnnnnnnnnnnnnnnnnnnnnnnnnnnnnnnnnnnnnnnnnnnnnnnnnnnnnnnnnnnnnnnnnnnnnnnnnnnnnnnnnnnnnnnnnnnnnnnnnnnnnnnnnnnnnnnnnnnnnnnnnnnnnnnnnnnnnnnnnnnnnnnnnnnnnnnnnnnnnnnnnnnnnnnnnnnnnnnnnnnnnnnnnnnnnnnnnnnnnnnnnnnnnnnnnnnnnnnnnnnnnnnnnnnnnnnnnnnnnnnnnnnnnnnnnnnnnnnnnnnnnnnnnnnnnnnnnnnnnnnnnnnnnnnnnnnnnnnnnnnnnnnnnnnnnnnnnnnnnnnnnnnnnnnnnnnnnnnnnnnnnnnnnnnnnnnnnnnnnnnnnnnnnnnnnnnnnnnnnnnnnnnnnnnnnnnnnnnnnnnnnnnnnnnnnnnnnnnnnnnnnnnnnnnnnnnnnnnnnnnnnnnnnnnnnnnnnnnnnnnnnnnnnnnnnnnnnnnnnnnnnnnnnnnnnnnnnnnnnnnnnnnnnnnnnnnnnnnnnnnnnnnnnnnnnnnnnnnnnnnnnnnnnnnnnnnnnnnnnnnnnnnnnnnnnnnnnnnnnnnnnnnnnnnnnnnnnnnnnnnnnnnnnnnnnnnnnnnnnnnnnnnnnnnnnnnnnnnnnnnnnnnnnnnnnnnnnnnnnnnnnnnnnnnnnnnnnnnnnnnnnnnnnnnnnnnnnnnnnnnnnnnnnnnnnngattccgactacaatctcctaaaagcagaaacaaccttttgggttttacctgtgtttgaagaagagacttgcattttccagaaagacatttgatgtttgtgttttatttctttcaaaatatgccttgtggtatgtatgttgacatgtaagtgcttaaagaaaagaattttaaattgtgggaatacgtctttggagcaaactttaatctcatgttctatgtaaaagacttaaaaagtcatacagttgcacaagtagtttatgcactatttacccacaaggaaaaaattgaaaacattgtgccaaaactacaaacaagtgactgtagtgtatatatttttacttctatatcaacatttggttgtatttggggaacttgtccctgttaatttactagaaacattccagtgattcttgctgttaaccacccccacttatgtggatagcacctgtagatcatggtggaaaaatatgttgtgttacacaatttaccaaaattaaaggatagtgtttgaaatgtgccaaattttcttacctcatctcacagattcacccacagtttaaacctcattaattatttttaaatggatatatacacacccaaacnnnnnnnnnnnnnnnnnnnnnnnnnnnnnnnnnnnnnnnnnnnnnnnntatatatgtatacacaaacacacgttcttttaaaattttaaactctactgtcttgtatggaaacannnnnnnnnnnnnnnnnnnnnnnnnnnnnnnnnnnnnnnnnnnnnnnnnnnnnnnnnnnnnnnnnnnnnnnnnnnnnnnnnnnnnnnnnnnnnnnnnnnnnnnnnnnnnnnnnnnnnnnnnnnnnnnnnnnnnnnnnnnnnnnnnnnnnnnnnnnnnnnnnnnnnnnnnnnnnnnnnnnnnnnnnnnnnnnnnnnnnnnnnnnnnnnnnnnnnnnnnnnnnnnnnnnnnnnnnnnnnnnnnnnnnnnnnnnnnnnnnnnnnnnnnnnnnnnnnnnnnnnnnnnnnnnnnnnnnnnnnnnnnnnnnnnnnnnnnnnnnnnnnnnnnnnnnnnnnnnnnnnnnnnnnnnnnnnnnnnnnnnnnnnnnnnnnnnnnnnnnnnnnnnnnnnnnnnnnnnnnnnnnnnnnnnnnnnnnnnnnnnnnnnnnnnnnnnnnnnnnnnnnnnnnnnnnnnnnnnnnnnnnnnnnnnnnnnnnnnnnnnnnnnnnnnnnnnnnnnnnnnnnnnnnnnnnnnnnnnnnnnnnnnnnnnnnnnnnnnnnnnnnnnnnnnnnnnnnnnnnnnnnnnnnnnnnnnnnnnnnnnnnnnnnnnnnnnnnnnnnnnnnnnnnnnnnnnnnnnnnnnnnnnnnnnnnttttattcagtactccccctactttttaaaaaaatttcacagctccaacattcctcactactaatttttcttccccttaattcaccacttgacttctaacatttgatctcttttatttgcacaattgaaggcctgtgcatctgatgactgatgcgttatggcacagatgagataatggatgtgagagcgctttgtagatcataaagtgctatacagatataggggattaatattattaatattgttagttgttgtcgttgttactattcttactaatattgttactaacctattaacttgtgaatatataggctggggtgggagggtggagagtaagtgggaagggaaaaaggggatttaacaaaaaaagggaagatgtttcaaaaggaaaattttaagcaaaatatgaacctacctagtcaatgccacctaaatgtattcacaaacagagaagcaacatttgaaagtagtcagagagaaatggaaggaaacctgtcatgtatataagtatatatacttcccggtccatgattcttttaagccagcctgctctattccttacagctgggtcgtaaaatgaacgagcctgtgttcttgatcttgtgtgttcccagcgtcagtctcttgtgtctgtggggatgcgtgggtgaggagcgttatgtgaggctggtacaggcccannnnnnnnnnnnnnnnnnnnnnnnnnnnnnnnnnnnnnnnnnnnnnnnnnnnnnnnnnnnnnnnnnnnnnnnnnnnnnnnnnnnnnnnnnnnnnnnnnnnnnnnnnnnnnnnnnnnnnnnnnnnnnnnnnnnnnnnnnnnnnnnnnnnnnnnnnnnnnnnnnnnnnnnnnnnnnnnnnnnnnnnnnnnnnnnnnnnnnnnnnnnnnnnnnnnnnnnnnnnnnnnnnnnnnnnnnnnnnnnnnnnnnnnnnnnnnnnnnnnnnnnnnnnnnnnnnnnnnnnnnnnnnnnnnnnnnnnnnnnnnnnnnnnnnnnnnnnnnnnnnnnnnnnnnnnnnnnnnnnnnnnnnnnnnnnnnnnnnnnnnnnnnnnnnnnnnnnnnnnnnnnnnnnnnnnnnnnnnnnnnnnnnnnnnnnnnnnnnnnnnnnnnnnnnnnnnnnnnnnnnnnnnnnnnnnnnnnnnnnnnnnnnnnnnnnnnnnnnnnnnnnnnnnnnnnnnnnnnnnnnnnnnnnnnnnnnnnnnnnnnnnnnnnnnnnnnnnnnnnnnnnnnnnnnnnnnnnnnnnnnnnnnnnnnnnnnnnnnnnnnnnnnnnnnnnnnnnnnnnnnnnnnnnnnnnnnnnnnnnnnnnnnnnnnnnnnnnnnnnnnnnnnnnnnnnnnnnnnnnnnnnnnnnnnnnnnnnnnnnnnnnnnnnnnnnnnnnnnnnnnnnnnnnnnnnnnnnnnnnnnnnnnnnnnnnnnnnnnnnnnnnnnnnnnnnnnnnnnnnnnnnnnnnnnnnnnnnnnnnnnnnnnnnnnnnnnnnnnnnnnnnnnnnnnnnnnnnnnnnnnnnnnnnnnnnnnnnnnnnnnnnnnnnnnnnnnnnnnnnnnnnnnnnnnnnnnnnnnnnnnnnnnnnnnnnnnnnnnnnnnnnnnnnnnnnnnnnnnnnnnnnnnnnnnnnnnnnnnnnnnnnnnnnnnnnnnnnnnnnnnnnnnnnnnnnnnnnnnnnnnnnnnnnnnnnnnnnnnnnnnnnnnnnnnnnnnnnnnnnnnnnnnnnnnnnnnnnnnnnnnnnnnnnnnnnnnnnnnnnnnnnnnnnnnnnnnnnnnnnnnnnnnnnnnnnnnnnnnnnnnnnnnnnnnnnnnnnnnnnnnnnnnnnnnnnnnnnnnnnnnnnnnnnnnnnnnnnnnnnnnnnnnnnnnnnnnnnnnnnnnnnnnnnnnnnnnnnnnnnnnnnnnnnnnnnnnnnnnnnnnnnnnnnnnnnnnnnnnnnnnnnnnnnnnnnnnnnnnnnnnnnnnnnnnnnnnnnnnnnnnnnnnnnnnnnnnnnnnnnnnnnnnnnnnnnnnnnnnnnnnnnnnnnnnnnnnnnnnnnnnnnnnnnnnnnnnnnnnnnnnnnnnnnnnnnnnnnnnnnnnnnnnnnnnnnnnnnnnnnnnnnnnnnnnnnnnnnnnnnnnnnnnnnnnnnnnnnnnnnnnnnnnnnnnnnnnnnnnnnnnnnnnnnnnnnnnnnnnnnnnnnnnnnnnnnnnnnnnnnnnnnnnnnnnnnnnnnnnnnnnnnnnnnnnnnnnnnnnnnnnnnnnnnnnnnnnnnnnnnnnnnnnnnnnnnnnnnnnnnnnnnnnnnnnnnnnnnnnnnnnnnnnnnnnnnnnnnnnnnnnnnnnnnnnnnnnnnnnnnnnnnnnnnnnnnnnnnnnnnnnnnnnnnnnnnnnnnnnnnnnnnnnnnnnnnnnnnnnnnnnnnnnnnnnnnnnnnnnnnnnnnnnnnnnnnnnnnnnnnnnnnnnnnnnnnnnnnnnnnnnnnnnnnnnnnnnnnnnnnnnnnnnnnnnnnnnnnnnnnnnnnnnnnnnnnnnnnnnnnnnnnnnnnnnnnnnnnnnnnnnnnnnnnnnnnnnnnnnnnnnnnnnnnnnnnnnnnnnnnnnnnnnnnnnnnnnnnnnnnnnnnnnnnnnnnnnnnnnnnnnnnnnnnnnnnnnnnnnnnnnnnnnnnnnnnnnnnnnnnnnnnnnnnnnnnnnnnnnnnnnnnnnnnnnnnnnnnnnnnnnnnnnnnnnnnnnnnnnnnnnnnnnnnnnnnnnnnnnnnnnnnnnnnnnnnnnnnnnnnnnnnnnnnnnnnnnnnnnnnnnnnnnnnnnnnnnnnnnnnnnnnnnnnnnnnnnnnnnnnnnnnnnnnnnnnnnnnnnnnnnnnnnnnnnaacagttccaagaattgaagaaagctaagtttctatgctgaagaggagaatggagcactagctagtcctaactattgctagaaatagaaatgtttattttctcctttattattgagaaattatctaatttaaggagttaccattttcatttagggatttttttaatgactgcccatcactacagaaatatgttctttttataaaataaaactaatgtgaggttggtttgttttctaatcataaaattcactaagcctatagttacatttagaagatttagtaccaaaatcaaacttttagtaacaaacaggaatctcgtcaacaaaatgtaggccagggattttgtaaaggtttctcaaagacccaaataagggagnnnnnnnnnnnnnnnnnnnnnnnnnnnnnnnnnnnnnnnnnnnnnnnnnnnnnnnnnnnnnnnnnnnnnnnnnnnnnnnnnnnnnnnnnnnnnnnnnnnnnnnnnnnnnnnnnnnnnnnnnnnnnnnnnnnnnnnnnnnnnnnnnnnnnnnnnnnnnnnnnnnnnnnnnnnnnnnnnnnnnnnnnnnnnnnnnnnnnnnnnnnnnnnnnnnnnnnnnnnnnnnnnnnnnnnnnnnnnnnnnnnnnnnnnnnnnnnnnnnnnnnnnnnnnnnnnnnnnnnnnnnnnnnnnnnnnnnnnnnnnnnnnnnnnnnnnnnnnnnnnnnnnnnnnnnnnnnnnnnnnnnnnnnnnnnnnnnnnnnnnnnnnnnnnnnnnnnnnnnnnnnnnnnnnnnnnnnnnnnnnnnnnnnnnnnnnnnnnnnnnnnnnnnnnnnnnnnnnnnnnnnnnnnnnnnnnnnnnnnnnnnnnnnnnnnnnnnnnnnnnnnnnnnnnnnnnnnnnnnnnnnnnnnnnnnnnnnnnnnnnnnnnnnnnnnnnnnnnnnnnnnnnnnnnnnnnnnnnnnnnnnnnnnnnnnnnnnnnnnnnnnnnnnnnnnnnnnnnnnnnnnnnnnnnnnnnnnnnnnnnnnnnnnnnnnnnnnnnnnnnnnnnnnnnnnnnnnnnnnnnnnnnnnnnnnnnnnnnnnnnnnnnnnnnnnnnnnnnnnnnnnnnnnnnnnnnnnnnnnnnnnnnnnnnnnnnnnnnnnnnnnnnnnnnnnnnnnnnnnnnnnnnnnnnnnnnnnnnnnnnnnnnnnnnnnnnnnnnnnnnnnnnnnnnnnnnnnnnnnnnnnnnnnnnnnnnnnnnnnnnnnnnnnnnnnnnnnnnnnnnnnnnnnnnnnnnnnnnnnnnnnnnnnnnnnnnnnnnnnnnnnnnnnnnnnnnnnnnnnnnnnnnnnnnnnnnnnnnnnnnnnnnnnnnnnnnnnnnnnnnnnnnnnnnnnnnnnnnnnnnnnnnnnnnnnnnnnnnnnnnnnnnnnnnnnnnnnnnnnnnnnnnnnnnnnnnnnnnnnnnnctaggtgctaataaaaggatatttacttcaaagtttctggttttagaaaccacaatacaaagaaaaaaaatacacttttgttggaaattttgtaacacaaaacatgttgtgaaagagtgtagtgatcttgtgcaaaagaaaatgaacatttgtgagcttcttgctgttttatagattttcttgtaaattattcttgtaacacttctggttttgttgttcttgttgcgaaggtttcaaatatttgtgactgaatgtacggtgaaactgtcataatgttacctagctgagttttgttattgtttat

SEQ ID NO: 36224 - DNA, 278 bp, Macaca Mulatta
agatgtatgagacttcagcagaagggtgaaggctgtagaatggagagaaaactctctgcctgcatggctaatgattgacttggtcttttaactgattatgtcatctgaggagtctgtgaaggtttatgaagaatgaattcaccatacagcctcccctcagatggaaatgtatacacgatgtagaagaataaggggctgtgagtctcgggagtaagaggaggggaataaggttaaggctcctagtactgcttagcttctagccttgggtcttgccgcaa

SEQ ID NO: 36225 - DNA, 281 bp, Macaca Mulatta
ccaatggaccacaccatggaaaccgtgttgtttatgtttcacagatttgctggggataaaggctacttaatgaaggagggcctgaaagtactcatgggaaaggagttccctggatctttggagacccaaaaagcccctctggctgcggacataccaatgaaggacgcggaccagcgccaagacagcacactgaacttccagaacttgttttcactccctgcggggctcaccgctgtggacaacaactattttgtagtacctatgaagcagaaggggacgaa

SEQ ID NO: 36226 - DNA, 91 bp, Macaca Mulatta
agatggtcaaactactcttgtctagaggtgccaatattaatgcttttgacaagaaagataggcgtgctatccattgggcagcatatatggg

SEQ ID NO: 36227 - DNA, 469 bp, Macaca Mulatta
aacaggattcagactaaaaggaagagatgggtagcagagcaggaattgctacacactttgtaagatactgaaaaggtacttatacggatgtaagcattttgtattgttggaataacaagacaaaatagtgcatgggaaggtacagtgggtggttgaaatccacagacttttggtgaaatcgtggtgtgaatcctggacctcttagtttatagctgtgttaccttggagaaagtgcatacgctctctaattctgtatcctcatatgcaaactggagataatgatacctggattcagggttggtaccttcagtgagtatttataagtgaacaagtagagtctcttaaatcaaaagtcatgcctaccttaagaaagtctaatatgtacaaatctaaatttatatataaaaagatagcctttatttgaagacattttgaaagcttctatatggtcatgagtttccctagtgca

SEQ ID NO: 36228 - DNA, 745 bp, Macaca Mulatta
ggggtgaatcaataggacttaattatagtttagaagttatggttaaaagtaggaaatcaagagtcatctctagacctgtggatggagcaattggatagttggtgccatttcctggagaggtggcctgtaagagagaggtagagaattggaagatgattttgcgatgttatctttgagatttctgaaatacccacaaggagatgttaagtaggaagctgatttgtaaatgtggagctctaaggaagggtctgacttcatcagtctcttagggggacgctaaggaaacaccagatgggtttttaaagcatgagaatgtgataattgctacataatctcagacttttgaacttataaactatttgctcaactgaaatagaggtatgatctcttctattaaattggacatctgaatgggggtgtgtgggccagctaccttcttgattatatatgtaatatacatgaacctgtgtacttaaggtgaaaaataccgatttattaataccacttttagaggactaatgtatgctcttcaggtgctaaacagtttcctcccacgttcaatgtatatggtaagatttctgttgactttcttgaatggatatactttcattttttaggaactgcatatatttcatgaaatgaaacatgcccacaggagaactacttaattaattatgggatggctgatcttctcacacaatggaaagtgggtatggtttcctttgattagcctattttatgaaaa

SEQ ID NO: 36229 - DNA, 676 bp, Macaca Mulatta
accatgtaaattcgaaccaaaagaagctgctatagcgagtgtagtatcacaaagataggataagggggaaaagccactaatagagataaagaaggatcctatctaaaaaacagttcataagtaagatataatagtcatgaacttgaatgcactttacatagtcatgaaatgcatgaactaataatgacaattacaagaagaaactgactttcacaaatacagtagcagattaaaattgacctttagagaatataatcagaaaaaatcattagtagagctatagacattttgaactatcaggttaataatttagttgtagttgacacacagaacttggtatccaagaacaagatagtatcacatacagtactagaacataatagttaaaagctcagcatttggtagcctgggttaccttgggtaaattacttaatcatactgtgctttgattttctcaactgtgaaatggggataataagcccaccttaatagtcgccatgtggctattatgaggaacatataaattcctataatagccaccatatggctattatgaggaacatgtaaattaatacctataaacatttaggatagtatctgggacaacgtgtagttatttttagatacattatcttagaattgaggttacacagacccaattctgtaactatgggtt

SEQ ID NO: 36230 - DNA, 1719 bp, Macaca Mulatta
  misc_feature (1)...(1719): n = A,T,C or G
gtnnnnnnnnnnnnnnnnnnnnnnnnnnnnnnnnnnnnnnnnnnnnnnnnnnnnnnnnnnnnnnnnnnnnnnnnnnnnnnnnnnnnnnnnnnnnnnnnnnnnnnnnnnnnnnnnnnnnnnnnnnnnnnnnnnnnnnnnnnnnnnnnnnnnnnnnnnnnnnnnnnnnnnnnnnnnnnnnnnnnnnnnnnnnnnnnnnnnnnnnnnnnnnnnnnnnnnnnnnnnnnnnnnnnnnnnnnnnnnnnnnnnnnnnnnnnnnnnnnnnnnnnnnnnnnnnnnnnnnnnnnnnnnnnnnnnnnnnnnnnnnnnnnnnnnnnnnnnnnnnnnnnnnnnnnnnnnnnnnnnnnnnnnnnnnnnnnnnnnnnnnnnnnnnnnnnnnnnnnnnnnnnnnnnnnnnnnnnnnnnnnnnnnnnnnnnnnnnnnnnnnnnnnnnnnnnnnnnnnnnnnnnnnnnnnnnnnnnnnnnnnnnnnnnnnnnnnnnnnnnnnnnnnnnnnnnnnnnnnnnnnnnntttttttttcttttattacaaaaggtaggctatgtttattagagtcacacacagttgactgtctcagtgtgactcaagaccacaaaaaacccatttctccttcacttctgagtcctgggtttaagacctataccagcaggcgtactgcttggggtccattcacaggtttacaagtttttcattgagggcaatctgtgactgtgtgaggttggccaggtaggtcaccatcagcaggtcattgatgttgctgttgagcatggtctcgaagtcatcgggaactatcttgggtacttggttaaccaggctcatcaggaagcggcccacagtattgtcagctgacacctttccagacagtacatcctctgcatattgcaatactgtgctcagggcatcctggatgcgagctgatgcccctcctacttgctgcaagtcacttgagagtccaatcactctgttggggctaaagcaggtcttcatgatcaggtcaactccgatgcgttcagtgtcatagtatgcgtatttcactgtcagaggtgtgaacatcactcccatggtcctcccagggacacccattaaagtactgacataggctttgatgctcatgcggccgttctggagacttgtgtccacagtgaggtggatggggttgggggcctctcggctgtagtactcatggattagcacagagtgctctgtgatgtcatggcctgtagcgtaccagcccaggatgagctcatttggagaaacttttttatgcagttcatacatgttcttagcaaattccatgtcaacagccacttcatcttctgactcattgtgtggcactgaaaagcaattggtgacctccactgagtgcttgtcgacagttcccaacagggtcccgataactcgggcagcaccctcattgcgtctctcgtagctgtccacaatggaggccaaaatcactgggtgcagcctgaccacgcggccgccggggaagggccctgggagagcaggaccaggcagagcgggcgctggggtctgcgctggagcttgcgccgacgccggggtctggccaggagcggcagttgtagccgctgctgccgcagggtctgaagatgcggctggagccgcagcgggaaccgcagccgcagccggtgctggcgttggcgctgggactgaggctgaggccgatgctgggccgccaccggggctggctggcgtggccggagg

SEQ ID NO: 36231 - DNA, 237 bp, Macaca Mulatta
  misc_feature (1)...(237): n = A,T,C or G
cagatccctctcgagagctgaagacgctttgtgaggaggaggaggaaggtcaaggacgaccccggcagncagttgccagcccttctaatgctgaggataccagcccagcccctgtgagtgctcctgcacccccagccagagcctcccgaggccaggggccagaacgagctactcaagccgggggccaggtgggccctgaggccccaagcgccccggaaacctcaccagagatgaggt

SEQ ID NO: 36232 - DNA, 769 bp, Macaca Mulatta
  misc_feature (1)...(769): n = A,T,C or G
gggaacgaagagtcctatctattatccttgcttcctgggtctgggccccgggaggtcagtgggcatgtacctatccacatctgcagaggattgggggataaagagagaaaactcagccctgccaataactgacgacaccatttccaatgaggctgtgtgctggagcggaattcctgtaaaccaccgatcctgacctggagttcacggctgggtttcagaggacctgtggccttctgaaatggcattcctgggtctgtctctgttctcctaatgcctttgactgaggctgcaaagctgatgtgtggagcatccaggaagtgcattctctctgataggattcccagaagacctgccgcctgctagttctgttctgttttcctgatggaccactgctcactgtgaaattaaacatttgcagaaggcctcagatgaccttgaagagctcactaagattcaggaggcttgattttatcctggaatctgacaccggtgtgctcttccgttcattgagttcctttagttctctctccctctcactcattcatgtataggattattaagtaagacattttccatttctttgaaaatgttaattacttattttttcaagaatttcaattaaaatatttccccaatggtctcccacattgcatggtgaaagcacttatagntaggacactttttgggggncanaaatgttaaaagaaaaaaaactaaagaaacatttnattggatgaatgaatggtttatttcccctaatttttaataa

SEQ ID NO: 36233 - DNA, 785 bp, Macaca Mulatta
  misc_feature (1)...(785): n = A,T,C or G
ggnnnnnnnnnnnnnnnnnnnnnnnnnnnnnnnnnnnnnnnnnnnnnnnnnnnnnnnnnnnnnnnnnnnnnnnnnnnnnnnnnnnnnnnnnnnnnnnnnnnnnnnnnnnnnnnnnnnnnnnnnnnnnnnnnnnnnnnnnnnnnnnnnnnnnnnnnnnnnnnnnnnnnnnnnnnnnnnnnnnnnnnnnnnnnnnnnnnnnnnnnnnnnnnnnnnnnnnnnnnnnnnnnnnnnnnnnnnnnnnnnnnnnnnnnnnnnnnnnnnnnnnnnnnnnnnnnnnnnnnnnnnnnnnnnnnnnnnnnnnnnnnnnnnnnnnnnnnnnnnnnnnnnnnnnnnnnnnnnnnnnnnnnnnnnnnnnnnnnnnnnnnnnnnnnnnnnnnnnnnnnnnnnnnnnnnnnnnnnnnnnnnnnnnnnnnnnnnnnnnnnnnnnnnnnnnnnnncctcattgtgcaaccccctactaccttactatgaatgactggaatggctggcccccctccttattttatattcatatttcagaagacaccaccctactgttaaatctagtttgaaaaaagggaggggaaatcgaacccccctaaaactgtgttttcaagccagtctcatagcccccctataactttttttcacccaannnnnnnnnnnnnnnnnnnnnnnnnnnnnncactttgttcgggccgccctcgggcccttcgaaaaagcttttctagaacctatttcgttttgggccccggcgggcgcccacgtagggtaaagtggaaccatgggtccataagcttggtttc

SEQ ID NO: 36234 - DNA, 4719 bp, Macaca Mulatta
  misc_feature (1)...(4719): n = A,T,C or G
gaggaatggtcacctctgttcaggtctcgccagcacgttgccccggggacacagcagccggaaagccccaaggtggccggtgccgaggtggccatcggctggccgcaggtggaagaggtgagggcctgtctgagctgggnggccctggtgctcctgcagctctgggcaaacctggacgtgctactggtggcctcgtggcaggagctgagtcagcacgtgtgcgccatcaccaaggctctcgcccagtgtcccctcaagtgcgtgannnnnnnnnnnnnnnnnnnnnnnnnnnnnnnnnggcagtaccgggaatcccaggccttttccttctgcacagcagggcgctgggcagccggcgagccggtggcaagagacggcacagggctgcggggggcctggcggaggcagatcaggcagtttagtcgagtcagcccagccgtggccgatgcggtggtcacagccttcccctcccctcgccttctgcagcannnnnnnnnnnnnnnnnnnnnnnnnnnnnnnnnnnnnnnnnnnnnnnnnnnnnnnnnnnnnnnnnnnnnnnnnnnnnnnnnnnnnnnnnnnnnnnnnnnnnnnnnnnnnnnnnnnnnnnnnnnnnnnnnnnnnnnnnnnnnnnnnnnnnnnnnnnnnnnnnnnnnnnnnnnnnnnnnnnnnnnnnnnnnnnnnnnnnnnnnnnnnnnnnnnnnnnnnnnnnnnnnnnnnnnnnnnnnnnnnnnnnnnnnnnnnnnnnnnnnnnnnnnnnnnnnnnnnnnnnnnnnnnnnnnnnnnnnnnnnnnnnnnnnnnnnnnnnnnnnnnnnnnnnnnnnnnnnnnnnnnnnnnnnnnnnnnnnnnnnnnnnnnnnnnnnnnnnnnnnnnnnnnnnnnnnnnnnnnnnnnnnnnnnnnnnnnnnnnnnnnnnnnnnnnnnnnnnnnnnnnnnnnnnnnnnnnnnnnnnnnnnnnnnnnnnnnnnnnnnnnnnnnnnnnnnnnnnnnnnnnnnnnnnnnnnnnnnnnnnnnnnnnnnnnnnnnnnnnnnnnnnnnnnnnnnnnnnnnnnnnnnnnnnnnnnnnnnnnnnnnnnnnnnnnnnnnnnnnnnnnnnnnnnnnnnnnnnnnnnnnnnnnnnnnnnnnnnnnnnnnnnnnnnnnnnnnnnnnnnnnnnnnnnnnnnnnnnnnnnnnnnnnnnnnnnnnnnnnnnnnnnnnnnnnnnnnnnnnnnnnnnnnnnnnnnnnnnnnnnnnnnnnnnnnnnnnnnnnnnnnnnnnnnnnnnnnnnnnnnnnnnnnnnnnnnnnnnnnnnnnnnnnnnnnnnnnnnnnnnnnnnnnnnnnnnnnnnnnnnnnnnnnnnnnnnnnnnnnnnnnnnnnnnnnnnnnnnnnnnnnnnnnnnnnnnnnnnnnnnnnnnnnnnnnnnnnnnnnnnnnnnnnnnnactccaccctggagtgtagctggaaggaagggacannnnnnnnnnnnnnnnnnnnnnnnnnngtcccagcccaagaaaacagtttccactgggaagttaggtccggcggcagcgcttcctctggcagggccggggctctcgactgctggggtgggccgaggtcgctgcctggggatcagacactggggccttgcgtcggctgcaactcatgctcaggacccagcccagcttgttgtgtagcacctgcttgaggcctggcggcaggggcaggccctccagcgtgtcccccgagtctggccgcagctggcgcaggcggtggcagcagaggtactggagggacgtggcgctggcgcaggaacgggtaaccttcatgctgcttcgggctgccgtggagcacaccatcgggtagaacctcttgttctgcagcttggtggctgccacgcctggaagggaggagcctagcctgaaccccgggcagggaaggggacagctaccgagcacagcccctcagaccacatgctacagtcacctaggtgggcagctgacacagctgaggcaaggcagagggtgcacgtgctggccctgccactccagcctggcctcgctgtcccagcccctgggaccctggggcctcaggcttctgggaggaaccctttcaggaaacctcagtgtccgctgggctggggtgggggggccacctccctcagggtgacagctgagaggagctcaaatggtgtggcggcctcacctatgcacttcctgttcttgaagaaggtgagcgtgccgtgccaggtgtccaggtgcacaccgatgatggagccctggccgaaccgcgacgagaagctggtcttgtctcccttgtggtggaggaggcctgggggcagccagggttggagtgagcccaggagctccaggctcggccccgccccaccctgggcctcacgcacccgtgtaggagaggccccagctgtcctcatccctgcccagcaggctgcagaacgtgtggcggtatttgtccaggtccacatccgatgtcccgatgcctaccatctaggaacaggggacgggcagaggccactctgggccactggggccaggccccccagaagcaccccggaccggagcaacttaccatgtcggtgccgtagacgggcgaggtcatcttgatctcccagaagtgctggccctcccccagctccttggtgccccggatggccgctgtgccacagctgtactccatgtggaagctgaccttgcggttgtcacagctcagcagggtggctgacgacttattcaagtcatcccagacccagtcgaaatctgtaagagaggcccaagctggggcagccctgagagctccatggggnctctgccctgcccacccctaggcccgcccgcagtgcaatcccagcaggggccggaccccatctcacactcgtcttcctctccgcatcgacagtccttgccccggtggnnnnnnnnnnnnnnnnnnnnnnnnnnnnnnnnnnnnnnnnnnnnnnnnnnnnnnnnnnnnnnnnnnnnnnnnnnnnnnnnnnnnnnnnnnnnnnnnnnnnnnnnnnnnnnnnnnnnnnnnnnnnnnnnnnnnnnnnnnnnnnnnnnnnnnnnnnnnnnnnnnnnnnnnnnnnnnnnnnnnnnnnnnnnnnnnnnnnnnnnnnnnnnnnnnnnnnnnnnnnnnnnnnnnnnnnnnnnnnnnnnnnnnnnnnnnnnnnnnnnnnnnnnnnnnnnnnnnnnnnnnnnnnnnnnnnnnnnnnnnnnnnnnnnnnnnnnnnnnnnnnnnnnnnnnnnnnnnnnnnnnnnnnnnnnnnnnnnnnnnnnnnnnnnnnnnnnnnnnnnnnnnnnnnnnnnnnnnnnnnnnnnnnnnnnnnnnnnnnnnnnnnnnnnnnnnnnnnnnnnnnnnnnnnnnnnnnnnnnnnnnnnnnnnnnnnnnnnnnnnnnnnnnnnnnnnnnnnnnnnnnnnnnnncccccgcaccaggcccagctgcaaccacctggcctcagggcagccccaccacactgtggcccaatgaccttcctgttacctgagcagaccctgcctcaccacagggtcccattgcccagtgcccactacaggccccacccctcctggtgccagcttcagcggtcacctgaggcttctccagccccttcatccctgttctgtttttcttcttttgcttcactgaagttctccttggtcctgattcttggcctcctcccactgaaatgtgagctccttgtgggaggcggggcccctcccagcctcctccctgtcacaggctttgtgggtgcaacccagggcctgaatggaccagagggtcagcagggagagtgctaagtgaccggggggccctgtggcagaagccttgggacagtgagggnnnnnnnnnnnnnnnnnnnnnnnnnnnnnnnccaggagaaaccacaggtgaccatgacatgggcgccaccagcttccaggtgaacgtggacctatccaaagccaccttcagggcaggacactgtcgtctctggaggggacggccccacccaacagacaaggcaggcccagaggactctaccgcactgcctagaagtgggggtccccaaagccagggtagacccactgagtcagaagccagggcacagaactgagcacttgtgcagcaaatccagggctgggctccctggagaaggagacagannnnnnnnnnnnnnnnnnnnnnnnnnnnnnnnnnnnnnnnnnnnnnnnnnnnnnnnnnnnnnnnnnnnnnnnnnnnnnnnnnnnnnnnnnnnnnnnnnnnnnnnnnnnnnnnnnnnnnnnnnnnnnnnnnnnnnnnnnnnnnnnnnnnnnnnnnnnnnnnnnnnnnnnnnnnnnnnnnnnnnnnnnnnnnnnnnnnnnnnnnnnnnnnnnnnnnnnnnnnnnnnnnnnnnnnnnnnnnnnnnnnnnnnnnnnnnnnnnnnnnnnnnnnnnnnnnnnnnnnnnnnnnnnnnnnnnnnnnnnnnnnnnnnnnnnnnnnnnnnnnnnnnnnnnnnnnnnnnnnnnnnnnnnnnnnnnnnnnnnnngcgcaggggagctgtgacagcagagagcagcagcaggtcacacaagcagcagccccggaaggacacggcccatggtgacagaggacaagcagcatgcgtgtgtcagacactggcctgtggacacgcccgcatcccacagccatgaccctgcgaggccaggacagtctttaagagggcacatgacctgtggcagttagaagtggggcagttagtggcagccacgctcctactgtggtc

SEQ ID NO: 36235 - DNA, 2874 bp, Macaca Mulatta
  misc_feature (1)...(2874): n = A,T,C or G
agactccgcacagctcagacccccgcagtcagccttgtccacctttctgtccccaggcccagtggtgtctccctgctatgagaacatcctggacctttctaggagcacctttagggggccttccccagagccacctccatccccactgcaggtgcccacctacccacagctaactctggaggtaccacaggcccctgaggtcctcagaagccctggagtcccccccagcccttgcctcccagaatcttacccctatgggagcccccaggagaagagtttggacaaggcaggctcggagtctccccatcctggccgcaggaccccaggcaactcatccaagaagcccagccaggggtcagggcggcgacctggggatcctggcagcacacctctgcgggacagactggcggccctggggaagctgaagacaggccctgagggggccctgggcccagagaagaatggggtgccagccaggcctggcaccgaaaagacccggggaccagggaagtcaggggagagtgctggagacatggtgccccccatccacaggccaccagagcagctagaagctaagggagggatacggggggcagtggccttgggcacgaacagcctgaagcagcaggaacccggactcatgggggatcccggggcccgagtctactcctctcactccatgggggccagggtggacctggagcctgtctcaccaaggagctgcctcaccaaagtggagctggccaagaaccggctggcaggggccctgtgcccccaggtaccccggtacccctgccaaagtgccaacctcagcccccagccctgggcatccccaatataagcccttccagcagccccaccaagctccctttccaaggcacccaacaagagtggtggcctcaacctggggctcccccattcaccaagnnnnnnnnnnnnnnnnnnnnnnnnnnnnnnnnnnnnnnnnnnnnnnnnnnnnnnnnnnnnnnnnnnnnnnnnnnnnnnnnnnnnnnnnnnnnnnnnnnnnnnnnnnnnnnnnnnnnnnnnnnnnnnnnnnnnnnnnnnnnnnnnnnnnnnnnnnnnnnnnnnnnnnnnnnnnnnnnnnnnnnnnnnnnnnnnnnnnnnnnnnnnnnnnnnnnnnnnnnnnnnnnnnnnnnnnnnnnnnnnnnnnnnnnnnnnnnnnnnnnnnnnnnnnnnnnnnnnnnnnnnnnnnnnnnnnnnnnnnnnnnnnnnnnnnnnnnnnnnnnnnnnnnnnnnnnnnnnnnnnnnnnnnnnnnnnnnnnnnnnnnnnnnnnnnnnnnnnnnnnnnnnnnnnnnnnnnnnnnnnnnnnnnnnnnnnnnnnnnnnnnnnnnnnnnnnnnnnnnnnnnnnnnnnnnnnnnnnnnnnnnnnnnnnnnnnnnnnnnnnnnnnnnnnnnnnnnnnnnnnnnnnnnnnnnnnnnnnnnnnnnnnnnnnnnnnnnnnnnnnnnnnnnnnnnnnnnnnnnnnnnnnnnnnnnnnnnnnnnnnnnnnnnnnnnnnnnnnnnnnnnnnnnnnnngagctggcgggagcccaagcctgagtacggggatttccagccagtgtcttctgaccccaagagcccttggccagcctgtggaccccggaatggcctggtgggccctcttcagggctgcggaaaacctcctggaaagnnnnnnnnnnnnnnnnnnnnnnnnnnnnnnnnnnnnnnnnnnnnnnnnnnnnnnnnnnnnnnnnnnnnnnnnnnnnnnnnnnnnnnnnnnnnnnnnnnnnnnnnnnnnnnnnnnnnnnnnnnnnnnnnnnnnnnnnnnnnnnnnnnnnnnnnnnnnnnnnnnnnnnnnnnnnnnnnnnnnnnnnnnnnnnnnnnnnnnnnnnnnnnnnnnnnnnnnnnnnnnnnnnnnnnnnnnnnnnnnnnnnnnnnnnnnnnnnnnnnnnnnnnnnnnnnnnnnnnnnnnnnnnnnnnnnnnnnnnnnnnnnnnnnnnnnnnnnnnnnnnnnnnnnnnnnnnnnnnnnnnnnnnnnnnnnnnnnnnnnnnnnnnnnnnnnnnnnnnnnnnnnnnnnnnnnnnnnnnnnnnnnnnnnnnnnnnnnnnnnnnnnnnnnnnnnnnnnnnnnnnnnnnnnnnnnnnnnnnnnnnnnnnnnnnnnnnnnnnnnnnnnnnnnnnnnnnnnnnnnnnnnnnnnnnnnnnnnnnnnnnnnnnnnnnnnnnnnnnnnnnnnnnnnnnnnnnnnnnnnnnnnnnnnnnnnnnnnnnnnnnnnnnnnnnnnnnnnnnnnnnnnnnnnnnnnnnnnnnnnnnnnnnnnnnnnnnnnnnnnnnnnnnnnnnnnnnnnnnnnnnnnnnnnnnnnnnnnnnnnnnnnnnnnnnnnnnnnnnnnnnnnnnnnnnnnnnnnnnnnnnnnnnnnnnnnnnnnnnnnnnnnnnnnnnnnnnnnnnnnnnnnnnnnnnnnnnnnnnnnnnnnnnnnnnnnnnnnnnnnnnnnnnnnnnnnnnnnnnnnnnnnnnnnnnnnnnnnnnnnnnnnnnncgcccctcagagctcagagcctctgaggctgggccaaaaggtggagaggagcttcctcccgagctgcccctcctttcccaggccctgcccgtggaccggaagcgaagccaggagtccagccgcccatcccctatgccccagggcccagcttaaagggggtagccgcacccccagcacgtcggacatggctgaggaaggcagagtggccagcgggggccccccagggctggagacctcggagtctctcagtgactcgctctacgactcgctatcctcctgtgggagtcagggctgagggtctgcgccacaccacggccccgctggatttggggaccacagactggatcggcgctc

SEQ ID NO: 36236 - DNA, 664 bp, Macaca Mulatta
tttaatttaggtttatatactctaacccaagttactattttaaagcaaactgcagtaggggtggggtgaaaaatgaagagaaacctactataagggtactgtaattttggggagccagctaacacctttgacttgtgactgagctcttaactaagccatacctcaatatgctcctttgggaaaaattaaaggttcagtagtcaaatacttttggaaatgctgggccattatgcacagagaaggtctgcagtaaggaacatttcaaatttgaacagagaacatccaaatctaattagtcttagaatccatttgccatggaatgtaccaggcagaactggaatgtatttcaggaaattattgtctagagaagtggttcttaaattgatggattcctttatcgaatcactcattgattcagcaaatattttgaagtgtttatttccagccactgttctaggcactgagaatacaacagtaataaatgtcagtacttaggcttattcatgatggagccattccttttataaaataatggcattagtaaatgatagaggcctccctcccgtgttatttcctaacatttcattggaaattatactagatcatgaaacccagaaagtctacaaccttcgatctggagaatatctggagaataatgtgtacc

SEQ ID NO: 36237 - DNA, 2023 bp, Macaca Mulatta
  misc_feature (1)...(2023): n = A,T,C or G
ggggggtggagctgccagagtaaagcaaagagcaaggaagcaggctcgttggaaggggttgtgacagccccagcaatgtggagaagtctggggcttgccctggctctctgtctccttccatcgggaggaacagagagccaggaccaaagctccttctgtaagcaacccccagcctggagcataagagatcaagatccaatgctagactccaatggttcagtgactgtggtcgctcttcttcaagccagctgatacctgtgcatactgcaggcatctaaattggaagaactgcgagtaaaactggagaaagaaggatattctaatatttcttatattgttgttaatcatcaaggaatctcttctcgattaaaatacacacatcttaagaataaggtttcagagcatattcctgtatatcaacaagaagaaaaccaaacagatgtctggactcttttaaatggaagcaaagatgacttcctcatatatgacagatgtggccttcttgtatatcatcttggtttgcctttttccttcctaactttgccgtatgtagaagaagccattaagattgtttactgtgaaaagaaatgtggaaactgctctctcacgactctcaaagatgaagacttttgtaaaagtgtatctttggctactgtggatgaaacagttgaagctccacagccccattaccatcatgagcatcatcacaatcagggacatcagcaccttggcagcagtgagctttcagagaatcagcaaccaggagcaccaggtgctcctactcatcctgctcctccaggccttcatcaccaccataagcacaagggtcaacataggcagggtcacccagagagctgagatatgccaggaagtgaaggtttacaacatctacaaaagaagctctgacgaaagagatgtataaatcaattactctgtaaattgcccaaagattcagagctggctcctaggagctgatgctgccattgtcgacatctgatatttgaaaaaacagggtctgcaatcacctgacagtgtaaagaaaacctcccatctttatgtagctgacagggacttttggcagaggagaacataactgaatcttgtcagtgacgtttgcctccagctgcctgacaaataagtcagcagcttgtacccacagaagtcagtaccaattgacgctgaaagagtaaggcaaaaaagtgagaatgatcttcaaactaaatatttgaaataggacatactccccaaatcagtctagacacaatttcatttccagcacttttagaaactaccaaattagtaaaccagaaatcgaaattagatttgtgcaaacatgaagaaatctactggattggcttccagattttaaattttatgtcatagaaatattgactcaaaccatattttttatgatggggcaactgaaaggtgattgcagcttttggttaatatagnctttttttcctttccagtgttctatttgctttaatgagaatagaaacgtaaactatgacctaggggtttctgttggatagttagcaaatttaaaatggaggaagaacaaccaagacatgctttccattttttttctttacttatctctcaaaacaatattatccttggtcttttcaatcttacactttttaacctaaaaagtgggattttggtatttttaagaatccagaaatactttagccacatgaaatatttttgctcataaaagccttattttaacctatgtttttaaaaaaatcccatttagccttcctgggaataacccaagaactttattatcccttaattttttaactaatccccccaataaaataaaaagccctttggtccccatttcctttcccccgaaatggtgggtaaacccaccctcaatcctaaaaaactttggagttgggccggggctcttaaaaagaataatnnnnnnnnnnnnnnnnnnnnngaaaaaataggggccgggtcccctaaaattgcgccttagaaaagataattttctccatacaccccagag

SEQ ID NO: 36238 - DNA, 714 bp, Macaca Mulatta
ggatagacgtgagccaccgcacccggccgaccatggaaaattatagcctatctttaactacattgaatagaggcttgtgaagcacctttgatgggttttgcaattacattgatgagaaaatagatttataacattatgatggcatttctgccaatgttaaagcactgctgataggcagataagcctatcagtgcaagtatacaggcctgcactgctcccagaaggccaggtaacatctattcccatgaagcagtctatcagggtaggtatcttgcattttaaaagtttaaaaacattataaaacccactcaaactaccttcagcaagtaaaggcaaagtattgaaaaattgcggggtttcttatgtaacaggactgaaacgaagtttagaacctggaactagaagagcacgaggcaacttactttcttccataatttccctctttcttcccttgcctccttccgccaccttcctgccatccctgtttcctacgtattccttggtaatgtcaacatcataagcccaattttttttgtaaactagtgaactctaggattcatctttattaccaaaactcttaaatcgtatcttctataaatgcatatttttttgtttggcatgtagtgtaaatacagctttcgggggaacctatcttaaagaaggcctggaaaggggaaccagccttaacagaaaacttgccctggtttaactgga

SEQ ID NO: 36239 - DNA, 439 bp, Macaca Mulatta
  misc_feature (1)...(439): n = A,T,C or G
ggggtatttgtatttactatgggaaaggtgtggactacagattagtattatatttaatggattttaagtaatttataagtatgctgagtgtaaatttttaaagaactgtattataaaaggacatatcctgtgaaatataacattttactgtttaatagaataattctataagaagaatgatttgtctcacccacggaactgattacattccggatgcaatcaacaggcactttgtaatttcnnnnnnnnnnnnnnnnnnnncggggggttgaggggtaacaagacatcatctgtataaagtgcagtttgtgtcactcaaaatatgcactgtatggctacacaaaagcagcttgatgaacaaatcaccctatggctcattaaagaacaaagcttccagaagcnnnnnnnnnnnnnnnnnnnnnnnnnnnnnnnnnnnnnc

SEQ ID NO: 36240 - DNA, 793 bp, Macaca Mulatta
  misc_feature (1)...(793): n = A,T,C or G
ggcaacactctgagagacaaactgggctcatatgacggggttgcattttattttcttaacaggtctttaaattgggcagttctgaaattctgtttggtcacttctagatggtacgtcatgtgaatacaaccaagtactgtagttgaaattgtgttataccactactcatatgttgttttaggtactatgcataatgttaatagctgagatgttaaagaatttgaagtctaaaatataaaagataaatatacctatattaatcctatgttaagatgctctggaaataaaggccttattcccttacatatgcgatttttgtaagataatatatacacagtgtattttaaacatttgtgtgggtggtccatgtagttacttcccatacgacaaagctgacaaaatttttaatttacacaatgtattctgcattttcaaatgtttatcttatatatatagcaaagaaattatcttactgatatgcattgaccaaatcccatggagaaaagacatttagatacatctcatttgaggctccccttcctctcatgtgtttgattttttggaagatgacacaatgtgtgggtaaccatgcaaatgtttatgaataactttattgaagtgattccatcagtattctgttctaatacttggagaatgatcttcaaatttatatattttatttctttgtttcaactatacagtgataatccaggaaatnnnnnnnnnnnnnnnnnnnnnnnnnnaaaaactgatttttttatttgtaaaatgtttgtaataatgtaaaggtgaa

SEQ ID NO: 36241 - DNA, 808 bp, Macaca Mulatta
  misc_feature (1)...(808): n = A,T,C or G
gagcgtaaggagcctagatcgacccaggcgagagccttggctggaggggagtttagggacggagcgactgtctgctggaccaggggctgtgaacgactccagggaccaggcaggtattcttcgacgatcaaagccggggctgaaaccacctacgagttccttttccgttcccaccccccttgcaggtggctcatcgtggtcacggacttccagacgcgctcgcgcttgctgcgttccggcctcagtccccgcgggctcgcgcaccagctcgtgcgccacgacgatctcctgctgggtgactaccgcctgcacctgcgccgctccctggtccggcggcgcatgctcgaggccctgggggcggagccgaacgaggaggcctgacgcccgggccggccccggctgcgcttgcgcaccgccccgcgggctggggccacccacccggagcccaggaggatagggggcgttgccttcccaggaaggaggcggggccggctcgagggggtggatactgtgagtttaattataaagaatgacctggtacaaaagccatttctctctgcaaaatcttggtcgggagtcaggggaagggaggtgatggggnggtaggaatgaacccccttgttataatcccgcctccctaatcttcctccagtccctgtacgtggactcctgggtcccaatcccttgaaagatgaactgaggcccgcggaaggtaagaactgggctccggggctttcaacgcgtgccgagtcctgcctcagattcagacgtcctcatccggccccctcctcttccccttccaccccct

SEQ ID NO: 36242 - DNA, 119 bp, Macaca Mulatta
  misc_feature (1)...(119): n = A,T,C or G
nattcagaacattgagtggttctctattgagaaatagccttgtcatagaaatgatatgacccccaaatccaaacttggtgtggcacctaacaaattttttatggccattccctttatca

SEQ ID NO: 36243 - DNA, 625 bp, Macaca Mulatta
  misc_feature (1)...(625): n = A,T,C or G
acagcggcgggacagtggtattggtcagccaggacgggatccagaggccgcccttccgcttccccaagggtgggcacctcctgcagttcctctcgtgcctagagannnnnnnnnnnnnnnnnnnnnnnnnnnnnnnnnnnnnnnnnnnnnnnnnnnnnnnnnnnnnnnnnnnnnnnnnnnnnnnnnnnnnnnnnnnnnnnnnnnnnnnnnnnnnnnnnnnnnnnnnnnnnnnnnnnnnnnnnnnnnnnnnnnnnnnnnnnnnnnnnnnnnnnnnnnnnnnnnnnnnnnnnnnngggctggcctactgcagacacctgtccaccgtgaggacccacctgtcagccctggtcaatcacatgatcgtgtctccggacttgccctgcgatgctggacaggggctgacagccgggatctgggagcagtaccttcaggacagcacnnnnnnnnnnnnnnnnnnnnnnnnnnnnnnnnnnnnnnnnnnnnnnnnnnnnnnnnnnnnnnnnnnnnnnnnnnnnnnnnnnnnnnnnnnnnnnnnnnnnnnnnnnnnnnnnnnnnnnnnnnnnnnnggtggacgagcagattcatgcctgctacgcacagaccatggccgagtggctgggctgcg

SEQ ID NO: 36244 - DNA, 158 bp, Macaca Mulatta
cttcgttgcgtttagcctgatgttcctgatcatcttacgcccctactttacccccagggagccatcctcagggcctcccagagaggagaacagcaagaatgatcgagctgaagtgggggaatggataaggatcagaaataggtatatcacttcgaaag

SEQ ID NO: 36245 - DNA, 811 bp, Macaca Mulatta
gggatgctattttggtgggtgaaaggaaagtataggctcttccatcccaagaaaatagtgtaaaaaaagcatggagatggaatacaagtgacatggccagtgggcactaaaaggcctgcctgtatagtagtccccctcttctccactgagggtatgttccaagacccccagtggatacctgaaatcatggataggacctgctgaaccctgtatatgctataaagcgtggagacagaatacaattggcatggccagagggcactgaaaggcctgcctgtagagtagtccccctcttacccactgaggctgtgttccaagacccccagtgcatgcctgaaaccctggataagacctgctgaaccctaactaagctatgttttccccccttatataaatacctgtgagaaagtttaatttgtaaattgggcacagtaaaaaaattcttactataccctaatagagtagaacccttattatccaccggttgctaaatcaaaaattatgtgaaaagtgggtctcaaatatcgcccgaaaaacctttattgggactatcacccatggggacaaattgaaaataagtataaagttgaaatccccgttggaataaccaaaaactgtcccatttaacaagggggaattgcctggttattttgaaaaagccaaaagggtttttaacactcaacacttgtttaaaatttccatttaaaaaaacccacaactgtcatgaaaatttatgcatatctgtcacaaaggtagtggtaacagaaaaaagggtcaatttacaagggtttttttgatatcccacaaaact

SEQ ID NO: 36246 - DNA, 808 bp, Macaca Mulatta
ggtacaaataaactgaaagcaaaagaatggaaaaagacacattatgccaacagcaatcacaagaaagttgggtggccatactgatatcagacaaaatagactttaaaaccaaaaatattagtacaaagagatattttatgatgataataaggtcaattcatcaggaagataccacaattataaacatgtatgcaactaataaccgagcacccaaatacatgaaacaaaagctgacagaaatgaagagagaaatgtacaatttaactgtaatggttggagacttaaatataacccacttttaataatgtattgaactagacataagattaacaggaaaatagaagatctgaataacactgtaaactaaatagacttaacacatatctacagaacattctatacaactacagaatatatattgttttcgagtacacatagaacattctccaggatagaccagaagccataaaacaagccacaacaaatttaaaagagtggaaataatacaaagtacaatatctaattataatatgaaattagaaataatatcagaaaaagaaaacttgtaaaactcacaaatatgtggaaactaaacaacatactccaaaatagctaatggatcaaaagaagaaatccaaagtgaatccagaaaacacttttcggatggataaaaaacaaaggacccaaccttggccaaaatttcatggggataacagcaaaaagcagtggttccagaaatgcaaattttttaagcctgttaaatggccattatttaagaaaggacccaaggattcctcaaatccattaa

SEQ ID NO: 36247 - DNA, 843 bp, Macaca Mulatta
  misc_feature (1)...(843): n = A,T,C or G
ggagtcttcgcaaatgtttaatacatttgaaaacaatttatgggattttccccacctcacaggagttcttatgaacatgaattattaaaaaccaatcacagattaaataagtttcttatagccaaatgatggcaacagcaagctacaagaatcctttcaaaacaatttatagcaaaattatggttgataggagttgggcatgtttaatatgcttggcacgaattaccaaacgtcctccagaaggactatctgaagtcccatagggttacagatagcctgttcctcagcttaaagttgtaaaacttaggtgtgaatttcttatttatacataaatattgttgttcatcaggagttcggtgtgaaatacgtgaagtagcttttttccctttctagtcaggaagccagttgtctccattccttttaaacttttccccactggattgaaatgttacctttttcataaactatattcccacaatgtgtgtgtcttcgattaattttttaaatgggagaacaaattcctgcttataaataaatgcagcttggttgtcaaaaannnnannnnnnnnnnnnnnnnnnnnnatgtcggcccgcctcggcccnntcgagaaagctttctagaaccatttcgtttntggcggcgcggggccccagtagggtaaggttgaaccatggggtcataagcctggttttccctagggaagaatccctgggtccaatgaattaaggtggctttggggatttcttccacccaaattaaaaaaaaacggccccggggcggggcaaaaccagaagccggtttccttggaacacaaatttctccagaatggggaagttttccta

SEQ ID NO: 36248 - DNA, 872 bp, Macaca Mulatta
  misc_feature (1)...(872): n = A,T,C or G
ggcgtggnnnnnnnnnnnnnnnnnnnnnnnnnnnnnnnnnnnntagacgggtgnnnnnnnnnnnnnnnnnnnnnnnnnnnnnnnnnntaacacggtnnnnnnnnnnnnnnnnnnnnnnnnnngaaaaactagccgggcgnnnnnnnnnnnnnncgnnnnnnnnnnnnnnntctgggcgaccgagcgnnnnnnnnnnnnnnnnnnnnnnnnnnnnnnnnnnnnnntacttgtaaaacgagagtaaagaaccggctccattttcttgttaacgtcaataggttaaatctctgaaaaagacacctcgaggctcctgggccaaatctaaagattcaatgactcagttatttggatgaacataacatgtaagtcaaacacattgtgggtccgtcctgttcaactcccaaaattatgcattcatcacatactcggcttttccccatttttggtacataacggaaatcgtgggaaaaaacatgtaagggtggggaccccctaaagctttgaacaaccattttacaattcatctttcactgtgggaactaatttttttcaaaagccacataaattcactgaaaaatttaggtactacgtttgaaaaaaaccttaattggaaaagaaggagggggaatttcgggaattgggaaactttgccatttttgttttaaaaacgcattcttccaaactctaagctcccgggatctcacgatagagcatccaccccacctggtaaaatccccataatatcattcttccggagaaacattaataagcccggtggccgctatttcaccaataagggcccccgacgcgaaaaggtgaaagaatttaatacccggggtgcctcaatacaattgggttgtaaacaaactctc

SEQ ID NO: 36249 - DNA, 200 bp, Macaca Mulatta
ttgccaattacattcagtcagcataacagccagaacatagatgcagtttagtgacaacacaagtggaatccatgtggaaagcgactagcttggggtttattttacacaagttaatacttggtgctaatacttggaattattgagaaatcggcattttcccactttccttactttctgtttcactttaccactcacactag

SEQ ID NO: 36250 - DNA, 633 bp, Macaca Mulatta
tcccatgccctgtggcactcaggacagaggcctggatggattgtttgaacgaatgactttggcagggggtgggtgaagagactgctgtccccccagccctccctcctgaccatgtcctctctccttcccacagccatcaagggattctggaccacctgcccttccttctccaccttctacttcctctttgccatttttgtagtgtccaccatctttcactgccaccagcgcctggctctggtgcccgcgccctgggcatactcagcccatgtggtcctggcaccgagacacctcccccgagaggggctgttcactatcaactccaagggccgcctggggaaccagatgggtgagtacgccacactgtatgccctggccaagatgaacgggcggcctgccttcatcccagtccagatgcatagcaccctggcccccatcttcagaatcaccctgccagtgctgcacagcgccacggccagcaggatcccctggcagaactaccacctgaacaactggatggaggagaagtaccgccacatccctgggcgctatgtccgcctcacgggctacccctgctcctggaccttctaccaccacctccgccacgagatcctccaggaattcaccctgcat

SEQ ID NO: 36251 - DNA, 743 bp, Macaca Mulatta
  misc_feature (1)...(743): n = A,T,C or G
gggtatctagcttcttttgctcagtgttatttttgtgatcatctagttgtagttctagattgttcattgttattgctgtaaggtattcaattgcataaatataccaaaagtggtcattttaaagaatttttaaaatttctggttttttaaatagagacaggatcttgccatgttgcccagactggtctcaaactgctgggctcagataatccttccactttggtctcccaaagtgctggaattacagaagtgaactactgtgcccaacctacaagtggtcattttaagttgcattctctttttccttgtagcttagaaatgctgttgactttagtatatacttatagacagtaactttgctagattctcattaattctggtatctttttttgtcttggcttttctttatagattatagataataattttgtttgctaatgatagttttttcccccattggtgtttatatctttcatttcttttgatcaagaagagaagcaagcatagaataatcagatgcaaaaatcatgggttgtatattttataaataaatagaaagattttctttagatttcggaagtgaaattgagctggaatttctgcgtgttttgtgtttctgttttgttttacaccctgnggcttctgctgcctctcagtgcctgtgtggttttagacagggggagttaatttttggggagggagtgggaacaagnaacgggcccaaactaactttggtcttttgg

SEQ ID NO: 36252 - DNA, 723 bp, Macaca Mulatta
  misc_feature (1)...(723): n = A,T,C or G
ggggggtgaagaatctagtgttcagctgagcctttttgagacaaagaaaaaaatctgtgatacaacagagcaatggactgatagctatagaagcgccgaaccagaaaaggtctctgggctagggaaagacactatctcatcgaagaagctggaccaggtctgtgatgggctccctgcccctccccacaccactgcccccttcaccgggagctacttcaacttggaaaccatcaaatattcataacttttgtctatgtatgtaactgttttatctgaagaaaagggaaaacagttattggaatgaatgaaagaagagaaaggaattctaaggaagagaagatggaaggaaagtaagtgagaagaggaaattnnnnnnnnnnnnnnnnnnnnnggagaagagactagaggaatagaaattaaaagtaaaaagaaaagaataaaaggatagaacaaaaaataaagaaaaggaggaagggcaaaggagaaggactgcagaagagtgaagtccaaaatggaagcttttctcccagaagctcagtttctcaagccacaggaccgtcccanggctgangatgaagaaacagggcttctctgggnncatccaggtncaggggcatttttcaaaccaaatctgatagagccagctaaatgtttgacttgaggagacactgagatataaagcaatagagcagctgagtagaaagaacagaaangagaattttn

SEQ ID NO: 36253 - DNA, 828 bp, Macaca Mulatta
tcttgtgtctggcattgttcatccagatgttagttgggacaggaagaaaaacccagagccctgaaacgaactggatcccagtgatcaatacaagttctactcagtgaatgtggattacagcaaactgaagaaagaaggtccaggtttctgaatgaaatatttcactctaaagctgccttagaatgaaggtcttccagaaaccatctgcacagttttccacttaaccaggaaatatttctcctctaaatgcatgaaatcattttgatataatctactggatattacactgattaataaataactgaaacttgaaaataaaagaggtgccataaaatactttcatttactaatgagctactaaattaactgccccattctgaagagagatcaggcttatttctgagaatgtagagaacatgatgcttctacagttggcttcttatgcacagctttgatcttgtgaagaaaatctaaattatcagtttttctcatatacgttttggaataaaaattatccacttgacagtggaaacaaagggagaggatattctaaagcaaaaattaatcatttcattgaactaaagatccttactatcatagaacaatgttagatacctaaaatgtaaaacatgcacctttatgcctataaccttgcaaatttgctcctgggaatggtagtggaaataaaatctggcccatttgttatggatttatttgaatcaatttaattgaattactgacctattaaaagaaatcattttaagttgaaatattaaaatggagggtccagccaatgtttgctaaagactgtatggctcgttatcccaa

SEQ ID NO: 36254 - DNA, 242 bp, Macaca Mulatta
ggagtcagaacaaggacaggcctgtgatgtgtctgtgacaaggaggacaatgtcctaaggaatggagaggaagaaagtgaagggagccaggtccctggatgtccatgtgaaacagtagcccaggatgtgctctgtggactgctacaagaaagagagagacttgatcttccttaaggcattgatttatcatgggtctctttgttgtagccacttaacgttaccttaatacacccacttcatgg

SEQ ID NO: 36255 - DNA, 610 bp, Macaca Mulatta
  misc_feature (1)...(610): n = A,T,C or G
gggagtcagtgggaggactttttcacccctggcattagcagcttcaaccttgttttccacatgcaccagctcctattaataaattagcaaggaaagtgtatgtcatgtgcaggaacagtgaggcagggacaggggttctgctccttctcacctcaccactggcgcgcagcttgcccctgtctttgcccccaaaggtattttgtgtctagtgtcaaatgggagcgattcttcactggtccttaaccttgggttttaaaaaggcagcttccctgtttgggtagcgtaagatctgattatagtaagtcctcttccaaagagatggcaatatgctgggcatctgcttcaaaaaaagtctgatttcacaagagaggtaggatttattgttcaatttccctttcagtttgcaatttcctccagtattttttaaaatacctcggnnnnnnnnnnnnnnnnnnnggaaattttcctttgggactgtaaagttttatttgaaaattctaaaaaaccttttttgaatttttgaaaaaataacttatttaatactaataacaattatataaaaacctccccactaattacacttaacaaatttcactactttctcacttca

SEQ ID NO: 36256 - DNA, 434 bp, Macaca Mulatta
aggggatcccagtgcctctctggtcctgtgggtgtgagtcactggggcacacaggggaggccacgggtggcggccgtgcctaggtccagccagacgggtcatgtctccaccaggcgcctgaaatagctctctggggcatccagctcagggaagaaggtgtggatgccctgcaggacggacgtggctagagctgcagcagcccttccaggtaactgggaccccgcccagcgacacactctctggcccagaagccaggagccgaccgtgccccatccctccccattacagcccttcgtccttctcccactcctgcctggctctgctgtgccctcgaggggaacctggccagctgggtgccaagtgctgtaactcccagcaggcagcatccttcccacagccccggatgtgaggaagctcctgggatgctcccacct

SEQ ID NO: 36257 - DNA, 187 bp, Macaca Mulatta
ctcaggcctctttctatcttgctctcttattttcttctggtcagaaagaggctcaaagacatatggtatggacagcagaatctggcttcctgctaacactctttccacctacccatacaccctcctcacctaccaggctatttgatgtggcagaaatgaccacccttccagtatctactatcctctt

SEQ ID NO: 36258 - DNA, 396 bp, Macaca Mulatta
  misc_feature (1)...(396): n = A,T,C or G
attgagtagaaaattttaggtcagtttgggtgcttatttgtaatatttttcctactacattggagtttagcagttctttttttctggatccacataaaagtatcatagtttatcttacagtgggtgaaactgactttcttttggttgggtgggtgaggatttcttaggcctgatagaatatatattctgtgaaatttgttaatgtacgtattagattgtattggatttttttttcttgaatttttagtggtattattagataggttatttcccagtgtttacttccatgaccagcaattatctaagccagtcacacacgcctaaacctctnacanttaacgcgcgcgccgaattgngacatatccctaatggnnaacaagttttcacatgggcgca

SEQ ID NO: 36259 - DNA, 846 bp, Macaca Mulatta
  misc_feature (1)...(846): n = A,T,C or G
cgggggtcttgggcaaattatataacctctgtagctgcttcaatgttctatctataaaatcggggataataatcattcttctcttgcaggttattgagaattatttgcaatgatacatttagattgtttagtagtgcttggcatattttgaatgcttagtgaataatggttgttgtctgnnnnnnnnnnnnnnnnnnaatcagatagtagttaaaaatcagcatctagagtcagtggacctgttaagttctaaccctggcaccatctccttcctgtgtaaccttagaggagctctttaacttctctcaccttcagttttctcatctggaaatgtggataatattgtagtggttgagaggaattaaacaagataatatatggtaagtgcttaaaacagtgcctgacacatattaagtactcacttattcaattgttattacatctctggcatttcttaattagctttgcctttcttagtggccgggtcttggggacatactccccaaaccccttgaaaccctcattttccttctaaaatgggtaattttctttggactggattcaaaacccacccttattcatactattggcaaaggaaaattctgaaaacccttattttctcccccgcctattaaaattttttttctaaccctgctcaaaacaggataaattcctccgtgtgcgcccaaaaaaagggttatatcaccccccgaaaaaaagagaactttatattttcacccacggtttctttcccgggagcgtcgcttatattaaaaacaaattcccccaaaacatactagttataactttattaaattaataaaataaccccccatgagaagcttg

SEQ ID NO: 36260 - DNA, 293 bp, Macaca Mulatta
  misc_feature (1)...(293): n = A,T,C or G
gggcaacaatgcatggattccatctttgaggagttcaaagcctagtggagagaacacataatacagttgtacttgtgacaagtaagtgctgcagtaaaggtactaatagcatgttccttggaacagaggaagagaaaccacaaaaccatggaaattagggaagcctttatagagggtgtgacaaaactcaatttgacattttcaagctatgtacaatgctgtgcaccttgcagatgctcaataaagtaattattgnnnnnnnnnnnnnnnnnnnnnnnnnnnnnnnnnnnnnn

SEQ ID NO: 36261 - DNA, 628 bp, Macaca Mulatta
  misc_feature (1)...(628): n = A,T,C or G
acagctatttggtaaagcatacttttgtaaacaacaatggagatatttactgtttgcgtccggacatctgcagatgcccctcacaacttgtggaaacctatgacattgaataattcactatagcttacgggtaataaagttatttgcacaagnnnnnnnnnnnnnnnnnnnnnnnnnnnnnnnnnnnnnnnnnnnnnnnnnnnnnnnnnnnnnnctcgtattacaagttcactggtttcgccgatnnnnnnnnnnnnnnnnnnnnnnnnnnnnnnnnnnnnnnnnnnnnnnnnnnnnnnnnnnnnnnnnnnnnnnnnnnnnnnnnnnnnnnnnnnnnnnnnnnnnnnnnnnnnnnnnnnnnnnnnnnnnnnnnnnnnnnnnnnnnnnnnnnnnnnnnnnnnnnnnnnnnnnnnnnnnnnnnnnnnnnnnnnnnnnnnnnnnnnnnnnnnnnnnnnnnnnnnnnnnnnnnnnnnnnnnnnnnnnnnnnnnnnnnnnnnnnnnnnnnnnnnnnnnnnnnnnnnnnnnnnnnnnnnnnnnnnnnnnnnnnnnnnnnnnnnnnnnnnnnnnnnnnnnnnnnnnnnnnnnnnnnnnnnnnnnnnnnnnnnnnnnnnnnnnnnnnnnnnnnnnn

SEQ ID NO: 36262 - DNA, 1719 bp, Macaca Mulatta
  misc_feature (1)...(1719): n = A,T,C or G
cctccggccacgccagccagccccggtggcggcccagcatcggcctcagcctcagtcccagcgccaacgccagcaccggctgcggctgcggttcccgctgcggctccagccgcatcttcagaccctgcggcagcagcggctacaactgccgctcctggccagaccccggcgtcggcgcaagctccagcgcagaccccagcgcccgctctgcctggtcctgctctcccagggcccttccccggcggccgcgtggtcaggctgcacccagtgattttggcctccattgtggacagctacgagagacgcaatgagggtgctgcccgagttatcgggaccctgttgggaactgtcgacaagcactcagtggaggtcaccaattgcttttcagtgccacacaatgagtcagaagatgaagtggctgttgacatggaatttgctaagaacatgtatgaactgcataaaaaagtttctccaaatgagctcatcctgggctggtacgctacaggccatgacatcacagagcactctgtgctaatccatgagtactacagccgagaggcccccaaccccatccacctcactgtggacacaagtctccagaacggccgcatgagcatcaaagcctatgtcagtactttaatgggtgtccctgggaggaccatgggagtgatgttcacacctctgacagtgaaatacgcatactatgacactgaacgcatcggagttgacctgatcatgaagacctgctttagccccaacagagtgattggactctcaagtgacttgcagcaagtaggaggggcatcagctcgcatccaggatgccctgagcacagtattgcaatatgcagaggatgtactgtctggaaaggtgtcagctgacaatactgtgggccgcttcctgatgagcctggttaaccaagtacccaagatagttcccgatgacttcgagaccatgctcaacagcaacatcaatgacctgctgatggtgacctacctggccaacctcacacagtcacagattgccctcaatgaaaaacttgtaaacctgtgaatggaccccaagcagtacgcctgctggtataggtcttaaacccaggactcagaagtgaaggagaaatgggttttttgtggtcttgagtcacactgagacagtcaactgtgtgtgactctaataaacatagcctaccttttgtaataaaagaaaaaaaaannnnnnnnnnnnnnnnnnnnnnnnnnnnnnnnnnnnnnnnnnnnnnnnnnnnnnnnnnnnnnnnnnnnnnnnnnnnnnnnnnnnnnnnnnnnnnnnnnnnnnnnnnnnnnnnnnnnnnnnnnnnnnnnnnnnnnnnnnnnnnnnnnnnnnnnnnnnnnnnnnnnnnnnnnnnnnnnnnnnnnnnnnnnnnnnnnnnnnnnnnnnnnnnnnnnnnnnnnnnnnnnnnnnnnnnnnnnnnnnnnnnnnnnnnnnnnnnnnnnnnnnnnnnnnnnnnnnnnnnnnnnnnnnnnnnnnnnnnnnnnnnnnnnnnnnnnnnnnnnnnnnnnnnnnnnnnnnnnnnnnnnnnnnnnnnnnnnnnnnnnnnnnnnnnnnnnnnnnnnnnnnnnnnnnnnnnnnnnnnnnnnnnnnnnnnnnnnnnnnnnnnnnnnnnnnnnnnnnnnnnnnnnnnnnnnnnnnnnnnnnnnnnnnnnnnnnnnnnnnnnnnnnnnnnnnnnnnnnnnnnnnnac

SEQ ID NO: 36263 - DNA, 5192 bp, Macaca Mulatta
  misc_feature (1)...(5192): n = A,T,C or G
atcttaaaaaccgcccctcggcctttgggacactcagctggtttaccatagtcctnnnnnnnnnnnnnnnnnnnnnnnnnnnnnnnnnnnnnnnnnnnnnnnnnnnnnnnnnnnnnnnnnnnnnnnnnnnnnnnnnnnnnnnnnnnnnnnnnnnnnnnnnnnnnnnnnnnnnnnnnnnnnnnnnnnnnnnnnnnnnnnnnnnnnnnnnnnnnnnnnnnnnnnnnnnnnnnnnnnnnnnnnnnnnnnnnnnnnnnnnnnnnnnnnnnnnnnnnnnnnnnnnnnnnnnnnnnnnnnnnnnnnnnnnnnnnnnnnnnnnnnnnnnnnnnnnnnnnnnnnnnnnnnnnnnnnnnnnnnnnnnnnnnnnnnnnnnnnnnnnnnnnnnnnnnnnnnnnnnnnnnnnnnnnnnnnnnnnnnnnnnnnnnnnnnnnnnnnnnnnnnnnnnnnnnnnnnnnnnnnnnnnnnnnnnnnnnnnnnncttctcttcgccgcagtcgtaggagtggcttgctttctctatggatatcttaatcaagataactgtacatggnnnnnnnnnnnnnnnnnnnnnnnnnnnnnnnnnnnnnnnnnnnnnnnnnnnnnnnnnnnnnnnnnnnnnnnnnnnnnnnnnnnnnnnnnnnnnnnnnnnnnnnnnnnnnnnnnnnnnnnnnnnnnnnnnnnnnnnnnnnnnnnnnnnnnnnnnnnnnnnnnnnnnnnnnnnnnnnnnnnnnnnnnnnnnnnnnnnnnnnnnnnnnnnnnnnnnnnnnnnnnnnnnnnnnnnnnnnnnnnnnnnnnnnnnnnnnnnnnnnnnnnnnnnnnnnnnnnnnnnnnnnnnnnnnnnnnnnnnnnnnnnnnnnnnnnnnnnnnnnnnnnnnnnnnnnnnnnnnnnnnnnnnnnnnnnnnnnnnnnnnnnnnnnnnnnnnnnnnnnnnnnnnnnnnnnnnnnnnnnnnnnnnnnnnnnnnnnnnnnnnnnnnnnnnnnnnnnnnnnnnnnnnnnnnnnnnnnnnnnnnnnnnnnnnnnnnnnnnnnnnnnnnnnnnnnnnnnnnnnnnnnnnnnnnnnnnnnnnnnnnnnnnnnnnnnnnnnnnnnnnnnnnnnnnnnnnnnnnnnnnnnnnnnnnnnnnnnnnnnnnnnnnnnnnnnnnnnnnnnnnnnnnnnnnnnnnnnnnnnnnnnnnnnnnnnnnnnnnnnnnnnnnnnnnnnnnnnnnnnnnnnnnnnnnnnnnnnnnnnnnnnnnnnnnnnnnnnnnnnnnnnnnnnnnnnnnnnnnnnnnnnnnnnnnnnnnnnnnnnnnnnnnnnnnnnnnnnnnnnnnnnnnnnnnnnnnnnnnnnnnnnnnnnnnnnnnnnnnnnnnnnnnnnnnnnnnnnnnnnnnnnnnnnnnnnnnnnnnnnnnnnnnnnnnnnnnnnnnnnnnnnnnnnnnnnnnnnnnnnnnnnnnnnnnnnnnnnnnnnnnnnnnnnnnnnnnnnnnnnnnnnnnnnnnnnnnnnnnnnnnnnnnnnnnnnnnnnnnnnnnnnnnnnnnnnnnnnnnnnnnnnnnnnnnnnnnnnnnnnnnnnnnnnnnnnnnnnnnnnnnnnnnnnnnnnnnnnnnnnnnnnnnnnnnnnnnnnnnnnnnnnnnnnnnnnnnnnnnnnnnnnnnnnnnnnnnnnnnnnnnnnnnnnnnnnnnnnnnnnnnnnnnnnnnnnnnnnnnnnnnnnnnnnnnnnnnnnnnnnnnnnnnnnnnnnnnnnnnnnnnnnnnnnnnnnnnnnnnnnnnnnnnnnnnnnnnnnnnnnnnnnnnnnnnnnnnnnnnnnnnnnnnnnnnnnnnnnnnnnnnnnnnnnnnnnnnnnnnnnnnnnnnnnnnnnnnnnnnnnnnnnnnnnnnnnnnnnnnnnnnnnnnnnnnnnnnnnnnnnnnnnnnnnnnnnnnnnnnnnnnnnnnnnnnnnnnnnnnnnnnnnnnnnnnnnnnnnnnnnnnnnnnnnnnnnnnnnnnnnnnnnnnnnnnnnnnnnnnnnnnnnnnnnnnnnnnnnnnnnnnnnnnnnnnnnnnnnnnnnnnnnnnnnnnnnnnnnnnnnnnnnnnnnnnnnnnnnnnnnnnnnnnnnnnnnnnnnnnnnnnnnnnnnnnnnnnnnnnnnnnnnnnnnnnnnnnnnnnnnnnnnnnnnnnnnnnnnnnnnnnnnnnnnnnnnnnnnnnnnnnnnnnnnnnnnnnnnnnnnnnnnnnnnnnnnnnnnnnnnnnnnnnnnnnnnnnnnnnnnnnnnnnnnnnnnnnnnnnnnnnnnnnnnnnnnnnnnnnnnnnnnnnnnnnnnnnnnnnnnnnnnnnnnnnnnnnnnnnnnnnnnnnnnnnnnnnnnnnnnnnnnnnnnnnnnnnnnnnnnnnnnnnnnnnnnnnnnnnnnnnnnnnnnnnnnnnnnnnnnnnnnnnnnnnnnnnnnnnnnnnnnnnnnnnnnnnnnnnnnnnnnnnnnnnnnnnnnnnnnnnnnnnnnnnnnnnnnnnnnnnnnnnnnnnnnnnnnnnnnnnnnnnnnnnnnnnnnnnnnnnnnnnnnnnnnnnnnnnnnnnnnnnnnnnnnnnnnnnnnnnnnnnnnnnnnnnnnnnnnnnnnnnnnnnnnnnnnnnnnnnnnnnnnnnnnnnnnnnnnnnnnnnnnnnnnnnnnnnnnnnnnnnnnnnnnnnnnnnnnnnnnnnnnnnnnnnnnnnnnnnnnnnnnnnnnnnnnnnnnnnnnnnnnnnnnnnnnnnnnnnnnnnnnnnnnnnnnnnnnnnnnnnnnnnnnnnnnnnnnnnnnnnnnnnnnnnnnnnnnnnnnnnnnnnnnnnnnnnnnnnnnnnnnnnnnnnnnnnnnnnnnnnnnnnnnnnnnnnnnnnnnnnnnnnnnnnnnnnnnnnnnnnnnnnnnnnnnnnnnnnnnnnnnnnnnnnnnnnnnnnnnnnnnnnnnnnnnnnnnnnnnnnnnnnnnnnnnnnnnnnnnnnnnnnnnnnnnnnnnnnnnnnnnnnnnnnnnnnnnnnnnnnnnnnnnnnnnnnnnnnnnnnnnnnnnnnnnnnnnnnnnnnnnnnnnnnnnnnnnnnnnnnnnnnnnnnnnnnnnnnnnnnnnnnnnnnnnnnnnnnnnnnnnnnnnnnnnnnnnnnnnnnnnnnnnnnnnnnnnnnnnnnnnnnnnnnnnnnnnnnnnnnnnnnnnnnnnnnnnnnnnnnnnnnnnnnnnnnnnnnnnnnnnnnnnnnnnnnnnnnnnnnnnnnnnnnnnnnnnnnnnnnnnnnnnnnnnnnnnnnnnnnnnnnnnnnnnnnnnnnnnnnnnnnnnnnnnnnnnnnnnnnnnnnnnnnnnnnnnnnnnnnnnnnnnnnnnnnnnnnnnnnnnnnnnnnnnnnnnnnnnnnnnnnnnnnnnnnnnnnnnnnnnnnnnnnnnnnnnnnnnnnnnnnnnnnnnnnnnnnnnnnnnnnnnnnnnnnnnnnnnnnnnnnnnnnnnnnnnnnnnnnnnnnnnnnnnnnnnnnnnnnnnnnnnnnnnnnnnnnnnnnnnnnnnnnnnnnnnnnnnnnnnnnnnnnnnnnnnnnnnnnnnnnnnnnnnnnnnnnnnnnnnnnnnnnnnnnnnnnnnnnnnnnnnnnnnnnnnnnnnnnnnnnnnnnnnnnnnnnnnnnnnnnnnnnnnnnnnnnnnnnnnnnnnnnnnnnnnnnnnnnnnnnnnnnnnnnnnnnnnnnnnnnnnnnnnnnnnnnnnnnnnnnnnnnnnnnnnnnnnnnnnnnnnnnnnnnnnnnnnnnnnnnnnnnnnnnnnnnnnnnnnnnnnnnnnnnnnnnnnnnnnnnnnnnnnnnnnnnnnnnnnnnnnnnnnnnnnnnnnnnnnnnnnnnnnnnnnnnnnnnnnnnnnnnnnnnnnnnnnnnnnnnnnnnnnnnnnnnnnnnnnnnnnnnnnnnnnnnnnnnnnnnnnnnnnnnnnnnnnnnnnnnnnnnnnnnnnnnnnnnnnnnnnnnnnnnnnnnnnnnnnnnnnnnnnnnnnnnnnnnnnnnnnnnnnnnnnnnnnnnnnnnnnnnnnnnnnnnnnnnnnnnnnnnnnnnnnnnnnnnnnnnnnnnnnnnnnnnnnnnnnnnnnnnnnnnnnnnnnnnnnnnnnnnnnnnnnnnnnnnnnnnnnnnnnnnnnnnnnnnnnnnnnnnnnnnnnnnnnnnnnnnnnnnnnnnnnnnnnnnnnnnnnnnnnnnnnnnnnnnnnnnnnnnnnnnnnnnnnnnnnnnnnnnnnnnnnnnnnnnnnnnnnnnnnnnnnnnnnnnnnnnnnnnnnnnnnnnnnnnnnnnnnnnnnnnnnnnnnnnnnnnnnnnnnnnnnnnnnnnnnnnnnnnnnnnnngggtgtcacttcctctctattacctcttctctgaagtgtgtggctatctccttgtgtttaaatttggcagttactcgccatgtatgtcagcatagaaaaggaaatgtttttaccttatctcctgtatgtatgatagaacttaaaagaaatgtgcatttgttttcatagccccagcagagaaaatcctcttcatagattacatgcgctgctgtggacaggagggaacaaaaccctctacatatttaaaagcaccaaatgtaatatctgacactgttaagatgcccaaaagagcaaagttgtagtggagatgcagggtcgtttccccatgccatccacagtgttagtgagtccagggctgacttgcagtgatgaagaaaagcagggagctgtgtctgccgacaatggtggctgcatctgtaagtggcttcagaggcagcagccctggggaaattgatgggtgtggcagtggacctgtgaagagggagaatctggccctcagcctatccagtgttaaccactagagaaactgagctttatatccttttgtattgcctgtgaattttagcatattgaaacattaggccaaatactcaggggatttttcattaaacatccctcagataatttagctgtatgtcgttagaaagggaaagctatcatttttattttaaaaataaacaaggccatcttgtaaactgtcaccaaagtcttcccttttttattgcatgtgtgtcttgaatttcataaaacattaattcacaatagggggtcagaatgtactcttgttgaaacacttcttgtaccattttatgttcataattatgtttgaggaggtaaaaatgtatgagcagcttaagtgaagtagaactattcatgatgcttttcatacattgtggcataagatgt

SEQ ID NO: 36264 - DNA, 756 bp, Macaca Mulatta
ggatgattttattttttacacttaagtctttaattcctctggactggatggttcttcataggagagcaactgtaggtgatcattatcctatgaaaagattttgaacctcaaaattactcagggaaatgcaaattgaaatgcttagtgagatgaaacttccccttcatggatttggcagaaattaagagatcttttgccattggggtttgggaaaccatgtactattacctaaaggttatataacatacttccaccagcagtccaataatatatattgaaaagtttaaaacatacatactcttagacccagcagtctcacttttgggatctgtcccatagaagtaaaagcagcatcaatgcataagaatataaataaacatgtttgttgaagtattgtttgtagagggggacaaagccccaactgcaaacaaatgaatgcctattaatagaaaaatggttagataaattctgacatatccttattatggaacagtgtgagagtaattttaaaaatgaactatatgtatactagctgatttcactgataaataattgctttataacagaaatgtttatatacaatatatcatttttggttaaataatcacacccatttattttgtatttatgggggggggggttagatgcacatggagaacggggatgggaagaatatacccccagggctggttaataatggattaccttggagggggaatgaagaaaagggagaaattagccaattaaaggggaagg

SEQ ID NO: 36265 - DNA, 778 bp, Macaca Mulatta
  misc_feature (1)...(778): n = A,T,C or G
ggcttagacgaacaagaaatatgcccaccatgccccaggtaaatgttaactttttttttgtagagacagaagactcctttatgttgcccaaggcttttctcaaaacttccggggcccaagcaatcatccccaaattggcttcccaaaagtgctggcattgcaggcatgagctaccacaactgactgacaattcttaaatgaatcatagatatagagatcttagaatatgtactgtgattagtcagtataccagtcagaaaatagaattcctatgttggcttacagtagctctcaaagtcaacctcagcntactgtaaagtctaaactgaagagaaattgaggataaaactaagaaataaagaagacagtctaatagaaggggagaagcaggcataactgtaactaaaaataatagaaagcaattccattgacaacatcagtaaatgacagggaacaaaatcagaagtgagggagaagaaaagaaagatcagtgtttaaggcaactagtctttctagttcactttctctggtaccttaactagcaaccttatatttgagggtaattagaacaagggcaaaaaccattttttgagagccatgaaggcatcattatattatggttcactacaattacattcacaacagtgaccttctttgaatcttaagaaaaagttgaattaatttaatgtattcagtgtactatatttaattgtaaaagttacgtgttaaaactgtaggttaaataaaatcctacttatatgagataccacatatctcc

SEQ ID NO: 36266 - DNA, 448 bp, Macaca Mulatta
  misc_feature (1)...(448): n = A,T,C or G
ccagggagtttgagcctttgctgaagccacacgtggctgtgaagaaagtcccgtatgtggatgaggaggggaacctgataaagccgctaaaacccaacgggataaagatggagaagtttgtgtttgatgtgttccagtttgctaannnnnnnnnnnnnnnnnnnnnnnnnnnnnnnnnnnnnnnnnnnnnnnnnnnnnnnnnnnnnnnnnnnnnnnnnnnnnnnnnnnnnnnnnnnnnnnnnnnnnnnnnnnnnnnnnnnnnnnnnnnnnnnnnnnnnnnnnnnnnnnnnnnnnnnnnnnnnnnnnnnnnnnnnnnnnnnnnnnnncagggtggcccccagcccaggacggcgcccaagggctgcccagcnnnnnnnnnnnnnnnnnnnnnnnnnnnnnnnnnnnnnnnnnnnnnnnnnnnntgccaacatggcggcgccgcccgggc

SEQ ID NO: 36267 - DNA, 718 bp, Macaca Mulatta
  misc_feature (1)...(718): n = A,T,C or G
cactctacctctgcatccaaatcaaggnnnnnnnnnnnnnnnnnnnnnnnnnnnnnnnnnnnnnnnnnnnnnnnnnnnnnnnnnnnnnnnnnnnnnnnnnnnnnnnnnnnnnnnnnnnnnnnnnnnnnnnnnnnnnnnnnnnnnnnnnnnnnnnnnnnnnnnnnnnnnnnnnnnnnnnnnnnnntgtaggacttcaggtggtagtaagagacgctgagacagcacctgaagaactcttctttgagcttcggagacctccacggcatggtgtgctccttaagcacacagctgagttccgaaggccgatggccacaggtnnnnaggtgacactttcacctatgaggatattgagaaaaatgctctacagtatatacatgatggttcctctgcccgagaagacagcatggagatgtcannnnnnnnnnnnnnnnnnnnnnnnnnnnnnnnnnnnnnnnnnnnnnnnnnnnnnnnnnnnnnnnnnnnnnnnnnnnnnnnnnnnnnnnnnnnnnnnnnnnnnnnnnnnnnnnnnnnnnnnnnnnnnnnnnnnnnnnnnnnnnnnnnnnnnnnnnggatgattcttcccccgacccagagatctggattcggttaaattacctgcccacatatggtactctcttaagaacctcaggacctgaggtggaagaactctcagaattttccaatttcacaatggaagacatcaataacaagaaaatca

SEQ ID NO: 36268 - DNA, 293 bp, Macaca Mulatta
  misc_feature (1)...(293): n = A,T,C or G
gttgcgatcctaaatgtgtacgtaccaaataacaaagttgaaaaatatgtgaagcaaaaactaaagaaccaaaaagacagacaaacgcacagttataattgtagatatctcttcaatatctcttgcttnnnnnnnnnnnnnnnnnnaagtgtctatcgaacaactacagagaatcaacaaggatgcagaagaactcaacattacatcaaccaaccagatctaatcaacatttataaaacaatccaccacaaaaaagcagaatacaaattgctttccaaatgcacatggatcag

SEQ ID NO: 36269 - DNA, 625 bp, Macaca Mulatta
gggtgcctaagaatacaagaacaacagcaacatgaatccatctgttctaccaaaaaggaaaaattgtttcagaagcttcctgaggccctcaccagaagctgagcagatgacagcaccacacttcctgtacggactgcagaactggccaagactgaacttttctgagtgaaaactgccctcatctgtgattatcaaacaccgaatggattttgaaatcaattttattgaagatttgaccatgttcctagactcataactttcccttcaaatttcttccctctggccatttctcatgtttatgtatctgggcctttctcttctcttcaatccaatattttacctccaacaacatcatttctataaatctttccctaccctatcctcattttctctctgtcatccgtcacttctatttctttactcttctcccctctaccctttttcttctcttcctacctttatatctatttcccaccttctccctctctctcccttctcacatcatctccatctctcttctatttttccttactcttctttcctttctctttattttattacttttcctttcttccccaccctatcttttcccctcacctctcacttcacatcttctctctcacct

SEQ ID NO: 36270 - DNA, 268 bp, Macaca Mulatta
acaggcataccatgggcgatcaggccacgcttctactcaaatgtaggaggcaagtttccaagtaccagtcctgtcaagcaattcaaaccaagtcaaaaccaaaaccaacaccaaagtgccaataaaggcacgccatgggtgatcaggccacgctcccactcaaatggagtgggcaagttccaaagactagtcttaccaagtttcagatctccagactccaaatgccagttccttcccggtgttcagccactgtgttaatcccccgcgt

SEQ ID NO: 36271 - DNA, 610 bp, Macaca Mulatta
ttgcccactgtaagctaatgtaagtgatctgagtaggtttaaggtagagtaggtgtattaaatgcattttttacttaacagtattttccacttttgttgggtttactgggatatagccctttttttttctgaaaagcatctgtattataataaatgtggggagtgctgtgagagaaataagtatactgggtttagttcccactgcccaaaaaaggaattgactaatcaggtaagttgtatggagaaggcttgaacacttgaaaggagctaacaatacctgcttctggagtatttaaatgccagtgggtatgctaaatactttacctcacttagaccacctactaaccttacaaagtagttaactctgctcacccagttttacagattgatgaaactgaagcagacagatactgttaacctatcaaaggtcacactgcaagtgggtgattatagtccaaacagcttgtacttggtgcctatttgttttgcctttcctgtgcatctgccaggcagatgagagtggggtaagacattgcagagaaagagtaagaaaaggccatcatgaaacaatttcattttcagaccttataagcacattaaaagtactgat

SEQ ID NO: 36272 - DNA, 114 bp, Macaca Mulatta
ggttgactgtggtgagttccaggaccccaaggtctactgcactcgggaatcgaacccacactgtggctctgatggccagacatacggcaataaatgtgccttctgtaaggccat

SEQ ID NO: 36273 - DNA, 224 bp, Macaca Mulatta
  misc_feature (1)...(224): n = A,T,C or G
gtttcaccatgttggccaggctgatcttgaactcctaaactcaagtgatctacccacctcagcctcccaaaatgctgggattacaggtgtgaggcactgcacctggccccagatttttgatactcttaaaccatctgatccttagtttctttctccaaaatactctttctaggttnnnnnnnnnnngctcttatatttggtgctatgtaagtgaaaatgttttt

SEQ ID NO: 36274 - DNA, 765 bp, Macaca Mulatta
  misc_feature (1)...(765): n = A,T,C or G
gggnnnnnnnnnnnnnnnnnnnnnnnnnnnnnnnnnnnnnnnnnnnnnnnnnnnnnnnnnnnnnnnnnnnnnnnnnnnnnnnnnnnnnnnnnnnnnnnnnnnnnnnnnnnnnnnnnnnnnnnnnnnnnnnnnnnnnnnnnnnnnnnnnnnnnnnnnnnnnnnnnnnnnnnnnnnnnnnnnnnnnnnnnnnnnnnnnnnnnnnnnnnnnnnnnnnnnnnnnnnnnnnnnnnnnnnnnnnnnnnnnnnnnnnnnnnnnnnnnnnnnnnnnnnnnnnnnnnnnnnnnnnnnnnnnnnnnnnnnnnnnnnnnnnnnnnnnnnnnnnnnnnnnnnnnnnnnnnnnnnnnnnnnnnnnnnnnnnnnnnnnnnnnnnnnnnnnnnnnnnnnnnnnnnnnnnnnnnnnnnnnnnnnnnnnnnnnnnnnnnnnnnnnnnnnnnnnnnnnnnnnnnnnnnnnnnnnnnnnnnnnnnnnnnnnnnnnnnnnnnnnnnnnnnnnnnnnnnnnnnnnnnnnnnnnnnnnnnnnnnnnnnnnnnnnnnnnnnnnnnnnnnnnnnnnnnnnnnnnnnnnnnnnnnnnnnnnnnnnnnnnnnnnnnnnnnnnnnnnnnnatgcataataaccctttatggacaaaaataccccctatattggcctacaccctgttgacttcccctaaaagccccatgttccgaaagcccccccatttggcagggaatccaaataagtccccttgggccccccaagttaacttccctgtaaaaccttaaggg

SEQ ID NO: 36275 - DNA, 703 bp, Macaca Mulatta
  misc_feature (1)...(703): n = A,T,C or G
gcgagattttggcgagtggttggttggtctgaagtccttgcaagacgctgatgttcaagctgttgacatactcattgcctacttttaacacctgtcagagaaacgtgatatggggtaaggaggtgcttttttaaaatcgttcatagacttctgtaaaatgcaagataaattaaagttattataacannnnnnnnnnnnnnnnnnnnnnnnnnnnnnnnnnnnnnnnnnnnnnnnnnnnnnnnnnnnnnnnnnnnnnnnnnnnnnnnnnnnnnnnnnnnnnnnnnnnnnnnnnnnnnnnnnnnnnnnnnnnnnnnnnnnnnnnnnnnnnnnnnnnnnnnnnnnnnnnnnnnnnnnnnnnnnnnnnnnnnnnnnnnnnnnnnnnnnnnnnnnnnnnnnnnnnnnnnnnnnnnnnnnnnnnnnnnnnnnnnnnnnnnnnnnnnnnnnnnnnnnnnnnnnnnnnnnnnnnnnnnnnnnnnnnnnnnnnnnnnnnnnnnnnnnnnnnnnnnnnnnnnnnnnnnnnnnnnnnnnnnnnnnnnnnnnnnnnnnnnnnnnnnnnnnnnnnnnnnnnnnnnnnnnnnnnnnnnnnnnnnnnnnnnnnnnnnnnnnnnnnnnnnnnnnnnnnnnnnnnnnnnnnnnnnnnnnnnnnnnnnnnnnnnnnnnnnnnnnnnnnnnnnnnnnnnnnnnnnnnnnnnnnnnnnnnnnn

SEQ ID NO: 36276 - DNA, 440 bp, Macaca Mulatta
acctgaattcagtgctcagtgcccaggtctgctctgctcagagtcaggctctgctcctccacctgtacggagagggtggccgtggtcatggtccaaggtgaggttcctggaggaaggcaggcacattaggacttctgatggggcctcgcacaacataacaagacctctacagcccatcctcaccagttcccttttggcaagtggaaaaggggcaatgcactatttgtgctgaaggctgtgcaagctgcagacacaaaaattggttgcaatggaaacctgaagcaaagggcataggttccaagttctgctgtgccccgtggtgaggaagcaggggaggtggagccctctggagtaatttttccttgactggtgaggtgggtcctgaggatgaagggtacagggcaggccccagcagtcaggagattctgggtgtagtaaaa

SEQ ID NO: 36277 - DNA, 615 bp, Macaca Mulatta
atgatgagaactctgatcaccacacacccactgctcctgcttctattgctgcagcagctgctgcagccagtgcagtttcaagaggtggatacagatttcgattccccagaagataaaatggaagaatttcgagagtatttggaagaatttcgtaggacagggcccaccagaccacctaccaaagaaaaagtcgaaagacgtgtcattattgaacctggaatgccattatatcatagggactactgtaatgaagaaatcatgagaaaaaatgtttaccacaaacagcgttgtgtgacagaacattactttctccttatgcaatatgacgagctggaaaaaatctgttacaacagatttgtgccatgtaagaatggagttaggaaatgcaacaggagcaagggtcttgtagaaggagtgtattgtaatttaacagaagcatttaaaataccgaggtgtaaatataagtcattttataggaggggctatgtccttatcacctgtgcatggcaaaatgaaatacacaaacttattcctcatactataaatgatctcgtggagccacctaaacacagaagtttcctcaatgaggatggtgtctttgtcatactgccctag

SEQ ID NO: 36278 - DNA, 487 bp, Macaca Mulatta
  misc_feature (1)...(487): n = A,T,C or G
ggggaaacacggtgaatcaggaagtagaggcccaaaggggtcaaaggnnnnnnnnnnnnnnnnnnnnnnnnnnnnnnnnnnnnnnnnnnnnnnnnnnnnnnnnnnnnnnnnnnnnnnnnnnnnnnnnnnnnnnnnnnnnnnnnnnnnnnnnnnnnnnnnnnnnnnnnnnnnnnnnnnnnnnnnnnnnnnnnnnnnnnnnnnnnnnnnnnnnnnnnnnnnnnnnnnnnnnnnnnnnnnnnnnnnnnnnnnnnnnnnnnnnnnnnnnnnnnnnnnnnnnnnnnnnnnnnnnnngggactcaaaggctcaaagggagacatgggggacccaggtatgacaggcgaaaaaggaggaattggacttcctggattaccggnnnnnnnnnnnnnnnnnnnnnnnnnnnnnnnnnnnnnnnnnnnnnnnnnnnnnnnnnnnnnnatcataggcccaccaggcccaccaggtccccatggaccacctggccccatg

SEQ ID NO: 36279 - DNA, 778 bp, Macaca Mulatta
  misc_feature (1)...(778): n = A,T,C or G
ggcatggtggcgcatgcctatagtcccagttannnnnnnnnnnnncnnnnnnnnnnnnnnnnnnnnnnnnnnnnnnnnnnnnnnnnnnnnnnnnnntnnnnnnnnnnnnnnntnnnnnnnnnnnnnnnnnnnnnnngcnnnnnnnnnnnnnnnnnnnnnnntgcttatatactctttctttcccccagattcctaccctacccctactcccaaaaactccagcaccaaattctgaatactacttaggttcgagcatcctgtccctcctcagagtctgtttgcttttgcatttcatcttgcttctcctaatttgccagttctcactgcggtctctcagcagccaagatggtcacagggaataaacacaactcaaaataagctttaacttcttggttcttaaaaatgcacaaaactccttaacaaaatagggcctacatttcaaattttcttatttctcccgtctatctttccctcttgttacaccttggtagggtaaggaaggtttataagggtgaagaaagaagaggtgagaaaggtaaagataaaagaagagagtctggctggaatgactccgtgtctgaaggagcaagacacagtgtttgatcaggtagaacatgccaatcaactacaggaaccccgccttccctctctcgtgtggaatagaatctttattagaagattagaggacattttgaagaatataatttttaatcaaatatatccaaaattttatggactctgggggaccaggacaaaaaattttaaggccttctggatt

SEQ ID NO: 36280 - DNA, 847 bp, Macaca Mulatta
ggggggggggagagaggagacgacccaacattgaggagagtttatttttaaacatggctagttgtcagtatgtacgtgagctagtatttttatgagtagagttttttaaaggcacattctgtatactgcttagtatatgcattttataccatgtaattatataacactcaaataagttcagcattagaaatgtttagctttgtatgaactaagtgtgccagaaataaacctggagcaatttttaaataagcaaaataaaggagatttttctatttgttcactttattcactttcatgtacttttatgtactgcaaatcagatttcagtctaaagcgaaacatcactaagttaataataaacctatcttttggaaagttgaatattaatctgtacccaaaacgtatttagtaaaatatttgctaccacattataaaacataacttatcatgttgaatagatgattctgggaaatactaacgatcacactggtaactgttgcacacacctgtaacttatatacattggtcgagtttcttcaagagaactccctatgtcatttataacgtgtgcgcccatttcttaccaaaaaagggtcgggaaaaataatggcgggttgtccttctcctctttgcacggaccctcatacctcgcccccatacctcgggctggcgactcccacctttcgcgggcgggcggcgcgctttacacttcgcactgcacacgatggtcggacacacttcggaatttgggtgttcccccagtgtgtgtctcctccccctgtctctttctccgctcccccgtccgcccttaattaattgtttgcgttgcctcccgctcggcctgtcg

SEQ ID NO: 36281 - DNA, 525 bp, Macaca Mulatta
cctatagatgactaagtaggttccggtccatcgaggttgtagagtttgagggatcagattcttaacaagaactgattgtccagctagggtgtcttcatatggctagaaatctgatttaaaatcggtgagatgttccttgggctgtttggtctgaggacctgaggtcataggtggatctcttcacagagtgaggttgaggacaggtgactggtctcccgaaggagtcccgctgacccgggtcttcggcaccaaatgtctcacgtgttcatgtgaagagaccgccaaacagactttgtgtgagcaacaaggctgtttatttcacctgggtgcaggtgggcctggggaaatcagcccaggttcttctcccttccactgaaagctggggttcttgtggtcgtggtcatggtcgtggtcgtggtcgtggtcgtggttgtggtcgtggtcgttgtcctcgagaactggggacggacctctcccgacagcctgaggcgcgtgttcgagaagtacgggcgcgtgggcgacgtg

SEQ ID NO: 36282 - DNA, 760 bp, Macaca Mulatta
  misc_feature (1)...(760): n = A,T,C or G
gggctttttcgcaacgggtttgccgccagaacacaggtgtcgtgaaaactacccctaaaagccaaaatgggaaaggaaaagactcatatcaacattgtcgtcattggacacgtagattcgggcaagtccaccactactggccatctgatctacaaatgcggtggcatcgacaaaagaaccattgaaaaatttgagaaggaggctgctgagatgggaaagggctccttcaagtatgcctgggtcttggataaactgaaagctgagcgggaacgtggtatcaccattgatatctccttgtggaaatttgagaccagcaagtattatgtgactatcattgatgccccaggacacagagacttcatcaaaaacatgattacagggacatctcaggctgactgtgctgtcctgattgttgctgctggtgtttggtaaatttgaaagcttggtatctccaaagaatggggcaaaaccccgaaaagcatgccctctttctggggcttaaacacacgggggttggttgaaaaacaaactaaaatttggttgggtgggtttaaaacaaaaaattggaattttccccattgaagagcccccccctttacagcccccagaaaaaaagattacgcaaggggaaaaattttgttttaaaggggaaaagtttcccagcccaactctttataccnnnnnnnnnnnnnnnnnnnnnntttggggcgccttttaaacnnnnnnnnnnnnngcnnnnnnnnnnnnnncaccccctgga

SEQ ID NO: 36283 - DNA, 778 bp, Macaca Mulatta
ggcattcttttccaggtgacagagacttgaacagatttcgggagacactttaagagtgaaaggtgagaggaggaacggacagtggagaggtgtgtgctgcacatgactaaatatttccttcccgtttgacattactctcccgggagtccttaaaaaaatattagtagaatctttattttaaagtttatttatgtgggtcttatggaagccctaaaggctccctttattttttttttacttcaagtggaaattatttcacatctatgtttgatgtggtggtggggaaagtaccctggacttagagccaagagaaacagattcttgtctgagctctgctgctgaatagctgtgtaggctctctggcttactgggcagcagagtcttcatctgtcttagagactggcaaagttttcctgtgatgggccagatagcaaattaatttaggtttcccaggttacatgcagtctctgttgagtattttacttcggttttgtttatttgttataatcctttaaaaatgtaaaaaccgttcttagctcctgggcaggtcatgggctgcatctgccctcttgccttcattggctgagtcctgatctgtaggaaagaaaggagggggctgttcgctctcgccgaggaacaagtcggtcaggaagccgtgcagcaaccatgggctttttagggatacccggaaaaacccccctggaacccggaagtggccatttacccgaatttccaaatccccctaaccaagccgcaacgttaaaatctcctgggaaaa

SEQ ID NO: 36284 - DNA, 809 bp, Macaca Mulatta
  misc_feature (1)...(809): n = A,T,C or G
ggaccaagggcaattgttgtgctttagctcaatccacaagtgttaaatatcacatggagatttttaatcccttatctataatgcaaagcaatatttattacagaattaattctgagaggcatcatttatggtttctaatccattctacttcagatgcctttgaagtgaagtggtagggttttgcgtgtggggttgattgtcccgttgttcattggcacagtctggtattttcactcgctcttgatgtgaattatgcagcaaattcaccaaaatgcaggaaaaaggcttggcttgaaaacttttacattttaaaaacccattttaagagtgtggtggaagaagaagttgggtgaaattcagtgtcctgcagtttgttgtctaagctccttgtgatgactgactgatttcttttttattttaatattttaattttaaaattctggttccatcagaaaacaagtttttaagtggttaaaaaacaaaaacacactgcaaacaaaaacaacgcccagcccaaaagagactctagaaaagatgtctggttggctaagtatactggtttgtctggctgagcctaagaattttttactgtcgcctttttgtaaagtgtaagtaaggtttgggataccgcaattgtgggagaagaacttgtaaatttcggagcttgtgtgccgcctttgtaatgaagcgatagtggagagaatgtattaacgcccgagaatccgaatccagtccccttggtggnnnnnnnnnnnnnnnnnnngacgggatgtgggcacccgccatgacaacccgcctggaaaaacagt

SEQ ID NO: 36285 - DNA, 642 bp, Macaca Mulatta
gtgaaagaggttttcaaatttcatttttccctggggtttttagtaagttccttcggggaatttccgggtttaaaggtttttacctttcttattttgggccgtaaccaaaactttgtgtttcggaaaattcaatctggaagtgaagttaaaggtgaggctttatttttatcagagtttttcattttcttctcattgctaaagggttgtcctggagtaggctttcactcccccggggacaggggtggagggtgcattccactttagagatcctgggactgacagagcagtgattttattttactcaacttggggtccccagagcctggtatataggaggcacttaaaaatgctggagtgaataaataaggatgcaaggccacactgagagcagaaacatggcatggaattcagacaccattcctacaggggattttcagatgcaacattctcagcacttagccttttgtccagatttgagaaggtcccagagagagaatacctgcttcttctccttgaggctcgttgaaacttgttcagtctaacagtgtctatttcctggtgaaagctgctttaccggagtctggggacagcgtcagatgtaatcctcagtactgtgaatgggattcctgtgttcacaccccc

SEQ ID NO: 36286 - DNA, 297 bp, Macaca Mulatta
ggccgggttttacgtaagacgaagaaaaaggttttaggcgctcctgacactcctgggaagactgtggatacccagggccccacgccggtttgtacatcaacatttttggggagatgaaaatctgaagtggctgaaatgaatgatgataatgaagaaaatgaaacacttttcaaacagcccatatcctgtgtaaaagaagaaatacaaaggactcacttacacattcacagaaaaaagacaaaggaaaagcaatcagtggttttcaatatattatatataagatttcttctgaaaaat

SEQ ID NO: 36287 - DNA, 842 bp, Macaca Mulatta
atcttagtagcctcagttattcaaccgttggagtttttctacctctctactaccctgctgaagttgctcttcagcagaaaatctttgtggaacatattccacactttgaaatcttcgtgggacaaaagatctttgtggaaccaatctttgtggaacatattccagctttttgaatgagtgcatatccagtagtacctttaaagttatactttgtacataacaaatactcagcaaatgtgaacctttatttgctcttacttcaaaattagtcccaaatgttggaaataaaatataggacattgatctagatatgaggtttttctccttcattctcagatgttgaagaaatcaaagtagcatatgcacaaggttaaaaaccacatatacaaatattatagaacagcttataatgaaaactttgcctgcctttataaaaaatgtgattatcttcttctgttaatgtcaataaaagatggtttgtcctagaaggtctaaaaatggtattatgttctggaggaaacctagcaaaaactttcctagtttagtacttgtctctaaattgatgttcacccatttcaatattgcagacttgttcatggtctttatttttctagcgtaggtaacagtagattctttagattcatatatgcaggaaattcttgctttcctaaaccaggaatctgggaccgtggaaccactttatcatcagtggatttacccttaaagatttaaatttagcctataatgttcaaaaacggaccagttatcatggagctgataattaaatggctgctgatattctcccgaattactcgcaacaaaacttccacagtcaattcaaa

SEQ ID NO: 36288 - DNA, 1928 bp, Macaca Mulatta
  misc_feature (1)...(1928): n = A,T,C or G
gcccagcccgcagagctcgcgccgcggcagcctagccgctcggccccgccgcgctcgcagaggccgccatgggcactgcgcgctggttcgcgctgggcagcctcctcgccctggctaggctgctggaaggccggctcgtgggcgaggaggaagccggctttggcgaatgtgacaagttcttctacgccgggaccccgcctgnnnnnnnnnnnnnnnnnnnnnnnnnnnnnnnnnnnnnnnnnnnnnnnnnnnnnnnnnnnnnnnnnnnnnnnnnnnnnnnnnnnnnnnnnnnnnnnnnnnnnnnnnnnnnnnnnnnnnnnnnnnnnnnnnnnnnnnnnnnnnnnnnnnnnnnnnnnnnnnnnnnnnnnnnnnnnnnnnnnnnnnnnnnnnnnnnnnnnnnnnnnnnnnnnnnnnnnnnnnnnnnnnnnnnnnnnnnnnnnnnnnnnnnnnnnnnnnnnnnnnnnnnnnnnnnnnnnnnnnnnnnnnnnnnnnnnnnnnnnnnnnnnnnnnnnnnnnnnnnnnnnnnnnnnnnnnnnnnnnnnnnnnnnnnnnnnnnnnnnnnnnnnnnnnnnnnnnnnnnnnnnnnnnnnnnnnnnnnnnnnnnnnnnnnnnnnnnnnnnnnnnnnnnnnnnnnnnnnnnnnnnnnnnnnnnnnnnnnnnnnnnnnnnnnnnnnnnnnnnnnnnnnnnnnnnnnnnnnnnnnnnnnnnnnnnnnnnnnnnnnnnnnnnnnnnnnnnnnnnnnnnnnnnnnnnnnnnnnnnnnnnnnnnnnnnnnnnnnnnnnnnnnnnnnnnnnnnnnnnnnnnnnnnnnnnnnnnnnnnaaaagatcttcagaaactgcttccatttaaccctcagctgtttcagaacaactgtggtgagactgagcaagacacagagaaaatgaaaaaaatcctggaagtggttaaccaagtccaggatgaagaacgaatggtgcaatctcaaaagacttctagtcccccctctagcaccaggagcaagaggtctgctccgttgcctccagaggcatctgagggaagtagtagctttttgggaaaactcatgggcttcattgctaccccattcatcaagctttttcaattaatttattaccttgtggtagcaatcctgaagaacattgtctatctcctgtggtgtgttaccaagcaggtgattaatggcatagaaagttgtctttaccgcctggggtcagccaccatctcatacttcgtggccattggggaagagttggtgagcattccctggaaggtgctgaaggttgtggccaaagtcatcagggctattctccggatcctttgttgtctgctgaaggccgtttgccgagttctgagcatccctatccgtgtccttgtggatgtggccactttccctgtgtataccatgggcgctattccaattgtatgcaaggacattgcactgggccttggtggcactgtctcactgctctttgacactgcttttggtaccctgggtggcctatttcaggttgtttttagtgtctgcaagcggattggctacaaggttacttttgacaattctggggagttataaactcaaaaaactaataatatccagtcaccgtgaatttgaaagctggaatattttgtctttacaatgggtttctgttcactgtcagttatcattatattttggcctttggtggggatgtctgcttgtttttgcaaaagaagatggcagaatttagacttgacagaggagaaatgctcagggtgagattaggtgtagtaatctgctgtttacctccagttatgtgtgcaaactcccaagccactaataacttcagttatgcactctgacatagatgaccacctgaaacgcactggtatttatttctgatgattaaaaattacaggagagggaagaagagaaaaagaacaactttaaacc

SEQ ID NO: 36289 - DNA, 671 bp, Macaca Mulatta
ggttttgtataatctttaaaaatctacactttgcctttgtagatatttaagggaaaccatttggggttgtcttgcatgtatatttttgttgtagataagtgttgcttagttatttctgcaaattttggttgaaatgcttacagactttaatacagtatatattttcaaaatataaacttttatatttctgtgataagttaggatatgcgttttaggcaatatttttcattaatatcacttgttcttttgaaaaatagcatactggtttggtgccaatttttttcattagaatataatgctcttatattattggagagcaggttaatcttttttcaaagtaattgcgtttgaagtataatttcaaaatgtattgaatttgtgaataagccttaccattaggatcagtaaatttttcaactttgcaactacataagtagtttaagatctccccataaattctcactgtgtggcagttgatggagtttgtgaacagagccttaagcttgttgcaaaaaaatttaaaaagggtaatacgggttgtttcctccatgcaatgtaagccgtgctgatggactgaatacagtctgttcattcatggctaatctgaagagtttgattgagttgatggcggcaggcaccagatagacacgttggtgattgtctttggccat

SEQ ID NO: 36290 - DNA, 769 bp, Macaca Mulatta
ggattgtttatttttctgggagaagataaatatttttcctaagatttttaaaaggaatctaatccaaaaggctaaacatttgctaatatgttataaaatgttaatggacattatctctgggttagtggaattactctcatttgtattttctgttttctgtaataaatatgtgtcaattttaataaagagttatgagagtttaatgagacttgatttttatttttagttgttggcatatgtgcttatgtgtatgtttgtatttaaaggaagaagagagataaacagagcaaggagctgttttgaagagtgagagtggcagagggtgaagagaatagggcagtgaaagacaaaaaggatgggagccagtcatgtagttgctggttatttaggaatttcagaatatatcctgtacttctgaatatttgatacttattctaaaagtaggatttacccttgagtcttgtatttcttctcgttgctaaagctttataatgtctattttagtggaaaattcctgtagctgtaatctcttaatgctgccaatctcattctcatgatacttttagagtaatagcgtaatttcccccaacacaacactgcctggtgtttctacataagatgttgaaaattcccagaaggggggaaaacttccagtaaggggtggccatttaatttttgatgaaacccgttttcttttccctttttctgaaacatttatagtttcatggtcctttggaacctaaaaatgggaggggaagaattctttttc

SEQ ID NO: 36291 - DNA, 746 bp, Macaca Mulatta
ggggtctagcagtttttctttatcattctgaaactgggtttacctaatacattgataaattattttgaaggaatttttatagttccagtcacttcacttttaccctgacacatataaatgactaggaatgaccttcagattgcatttagcatctgtaaccaatctgacaataatgtgttcatcagggacctatggattaaatcacatactggcatatttaagctgaatatcagcctggaaaataaatgtactatattaactgaaatactactctttgtgtaggtattttgtcatatgtttaagacaaagctaaaaagaatggaaatcatatcacaataacttaagtctttcttcaaagtgcatgcagtcttttgcaatacctcattcagccaagtatttgttctcttcttcattcagtataaggcagctttcagtttgcttagaaggcaacattagaaggttagagttcatcagaaatacataattttaaaatgtgagttcaactgaataaattttaatttctgtaggaaataaagaatcaaaatacctgttaaaagattgcaatatatgataattatttttaaagtatctggctaaacctgatagattttctggaaatgaataaaatcagttctaaaaccaaagctgatttttagaaaatgtgaaaatataaatcagccctatccataatagttttctccaaaaacttttatcttacagaagttacttttaaaaataatattaac

SEQ ID NO: 36292 - DNA, 834 bp, Macaca Mulatta
  misc_feature (1)...(834): n = A,T,C or G
ggatgccccagttagatacatcaacatgattcaccactattatgacgatgcttcccacactatatcttatcatgcagctaaagctactaaacacaaatcaccaccaaccaccccttacaaaaacccccacccttcagtctcacaatgtccgnnnnnnnnnnnnnnnnnnnnnnnnnnnnnnnnnnnnnnnnnnnnnnnnnnnnnnnnnnnnnnnnnnnnnnnnnnnnnnnnnnnnnnnnnnnnnnnnnnnnnnnnnnnnnnnnnnnnnnnnnnnnnnnnnnnnnnnnnnnnnnnnnnnnnnnnnnnnnnnnnnnnnnnnnnnnnnnnnnnnnnnnnnnnnnnnnnnnnnnnnnnnnnnnnnnnnnnnnnnnnnnnnnnnnnnnnnnnnnnnnnnnnnnnnnnnnnnnnnnnnnnnnnnnnnnnnnnnnnnnnnnnnnnnnnnnnnnnnnnnnnnnnnnnnnnnnnnnnnnnnnnnnnnnnnnnnnnnnnnnnnnnnnnnnnnnnnnnnnnnnnnnnnnnnnnnnnnnnnnnnnnnnnnnnnnnnnnnnnnnnnnnnnnnnnnnnnnnnnnnnnnnnnnnnnnnnnnnnnnnnnnnnnnnnnnnnnnnnnnnnnnnnnnnnnnnnnnnnnnnnnnnnnnnnnnnnnnnnnnnnnnnnnnnnnnnnnnnnnnnnnnnnnnnnnnnncctggatcgggaaacacttgtactaagcactattcaacccacccaaacctcttccattagacttctacttagacccctcttaaacctttctggggtatttaacctaaacctaatttccttagaaaatatggccagataagcccccttaac

SEQ ID NO: 36293 - DNA, 766 bp, Macaca Mulatta
  misc_feature (1)...(766): n = A,T,C or G
ggtgaataatcagacattcccagatcattcttatattgtcagataacacttctgtataatatcactttggaccatggacatgagctggaagaatgatgtatttttatagattgtatgtccagaatgactttagaaccgcatgatacagtggaaggagcactagactagtagtcactacccttttggattcagggctcctcacaattaaaatgagtggaatgaaacaaggtgaaaacataaaaacatccctttgtatactgttttgctgcttacagtgtactttggcattgctttatctccctggattctcacggtaggatttctgagatcttaatctaagagctccgaagttgtctacttttttgaccctagggtgctccttttgttttgcagagcagggtcatttgatttgctagctggtggcagagttggcaccattacccaggtctgactaccagtcagaggcactttatttgtatcatgaaatgatttgaaatcattgtaaagcagcaaagtctgataatgaatgccagcttttcttgtgctttgataaacaagactccaaataatctgngagaacctgaataaaagtttgaaggggctcgattggggatcttgaagaccaaaattgtagggaaatcttaccatttttgcccataacattaatgaaaagcaaaaaccattataaaaagttaatttttaatttccccatatacctaatccattttattggatggctttccagaaatgacatcttaccggattc

SEQ ID NO: 36294 - DNA, 810 bp, Macaca Mulatta
  misc_feature (1)...(810): n = A,T,C or G
ggcgaaactccatttcnnnnnnnnnnnnnnnnnnnnnnnnnnnnnnntcactatatgtggccaggaagaggcagagactcagaaaagatctgagaggaccttaagtttacacctcaggcagatcattgacttagagactgcctatatcaatcaaatcaaatcaaaacaaaacaaaaccaaagctgcagcaaacccttgggaaggaagaaaatttgatttccagatcactgcattattagattcaaatgtccagttttcagccaaaaatcacaaggcatacaaagaaacaagaaaatgtcccattgaaaggaaaaactaaaaccaacaaacttcctgacaaaaatctgatggcctatattttagacaaagactttaagataactgtcataaagatgttcatgaactaaaggaagacttggggaagtcaagaaaacaatgcataaacaaaacagaaatattaagaaagaagtagacaacctataaagaaacccaaaataaattttaaagctgaaaaataccataactgaaatgaaaaattcactagagagattcaaagacaaatgtgagtagtcagaagaaagaatttgaatttgaaaataggatgattaaaaatatcaagtctggaggaacggaaagaaaaaagaatgagggaaacgtggaatggaggtataaggggacctgtgggaacctttacacccatcaaaccagatcaaacatggtgcatttggtggaaaannnnnnnnnnnnnnnnnnnnnnngggccaggtgaaaaaatatatttgtgaaaaaaaggggaaatggggggggaat

SEQ ID NO: 36295 - DNA, 825 bp, Macaca Mulatta
ggggagccggccagggtggcggcggctgggcaacgactacagcggagccgctggggaagccaagatgccgtctaagggaaaggacaaaaagaaaggcaagagcagaggcaaagacactaaattgaaaaactgaaacagcaattaaatgaaacaaaggaaaaagcccaagaggagaaggataaattggaacaaaagtataccaggcaaatcgatgaactagagggacagttccatcaaaaagccaaagaaattggcatgattcacacagagctgaaagcagtaagacaattccagaggagaaaaatccaagtggagagagagttagatgatctgaaggagaatttaagaaacacagagcggatacatcaggagactcttagaagactggaaagcagattttttgaagaaaagcaccgactagaacaagaggctgaaaagaagataataatgctggcagagagagcccaccatgaggctgttgtgcaattgaacgatgctggaagaaatgtttttaaagagaaatgtttatctccagaaaagccctggccatatcaccctgaaggaaacctgggccctcctacaaaaaaaactcccagaaatttgcaagaagagtcatgcctttaccttttatctccaaaagggagatcaatggatcttgtttgattaaaggaaaaaaattatgcaactttgtccccgcaggagattaccaaatctccaacccctttcaaaagaaagggtagtaaaactttgggaaaacctgctcctggggtttcattgaacccaaagaagttttgacaactggaaatctttttaaaaagtggcccc

SEQ ID NO: 36296 - DNA, 706 bp, Macaca Mulatta
  misc_feature (1)...(706): n = A,T,C or G
cgaggctcgtgctgaatcggcacgaggagacttttctgtttgggaggatctctgtttttccacatggaaccccaagaattgtactagaagaaatggataaattcctggacacatacacccccccaagactaaaccaggaagaagtcgaatccctgaagagcccaacaacaagttctgaagttgaggcagtatttaatagcctactaacnnnnnnnnnnnnnnnnnnnnnnnnnnnnnnnnnnnnnnnnnnnnnnnnnnnnnnnnnnnnnnnnnnnnnnnnnnnnnnnnnnnnnnnnnnnnnnnnnnnnnnnnnnnnnnnnnnnnnnnnnnnnnnnnnnnnnnnnnnnnnnnnnnnnnnnnnnnnnnnnnnnnnnnnnnnnnnnnnnnnnnnnnnnnnnnnnnnnnnnnnnnnnnnnnnnnnnnnnnnnnnnnnnnnnnnnnnnnnnnnnnnnnnnnnnnnnnnnnnnnnnnnnnnnnnnnnnnnnnnnnnnnnnnnnnnnnnnnnnnnnnnnnnnnnnnnnnnnnnnnnnnnnnnnnnnnnnnnnnnnnnnnnnnnnnnnnnnnnnnnnnnnnnnnnnnnnnnnnnnnnnnnnnnnnnnnnnnnnnnnnnnnnnnnnnnnnnnnnnnnnnnnnnnnnnnnnnnnnnnnnnnnnnnnnnnnnnnnnnnnnnnnnnnnnnnnnnnnnnnnnnnnnnnnnnnnnnnnnn

SEQ ID NO: 36297 - DNA, 491 bp, Macaca Mulatta
gcccagggggcaagcggggccataagcgcctcatccgtggcccgggcgaaaatggggatgacagctaggaggctggaatagggccggccacatgtggactgtggggctgcctgccttccgctccctgccaccgtcctccttcctgggctccaggaaagtgtttccaggagggcaggagggctggcggctgaacgcacttgcagcgtccgagggccacggggctggcattttgtgacccttccctgttgctgtccctgcatctcatgtgtgttcccagggtgtccgggaaccctgcctggctggcttaagggggctgggtcaggggcctggcatgaacctggcctcctggggagctgagactagggtcccagcacagcccaaaaacctttggccacaagaggtggggtcagtcagggctggggcaggggtcactgcagtttgggatggttgaatgctgtattttctaaagaataaaatatttttaaatcaag

SEQ ID NO: 36298 - DNA, 917 bp, Macaca Mulatta
  misc_feature (1)...(917): n = A,T,C or G
ggaatgacagtttacagaatggaagaaaatattttcaaaccgtatattgataagagacttgtatctaggatatataaagaactcttacaactcaataataaaaagacaaataatctaattgaaaattggcaaagatctgaatagacatttctcatgagaagatatgcaaatagccaataagcaaatgaaaagttgcccaacatctttagtcattagggaaatgcaaataaaaaatccaaagaaattgaaatcagtgtgttaaagagatatctgcattccagtattcattgaagtattgttcacaataagcaagacatggaagcaatctaagtgttcatcaatgaataaatggatagagattatgtggtatatattaatatatataacagaatactattcagccctttaaaaagaagaaaattctgtcatttaaaacaacatggggaagaccctggaggacagtatactaagccgaataaacatgatcctcactttatataatagattctaaggaaaagttgaaattccatanccagcagaagaaggagaaatgggtgcttaaccaaaaaggctggttgggtgggaggtggtggaacaaagttagggaaatggagggaaaaggcaagaaaaatgtttgggtttgaaaaggggtggcaaaaatttttcccatttttgaacacggaagggaaatagaaattttttaattcaatccctttttggtaccaggcaaaaaggtggacctgggtaatggttaagctaaaatgcgtggttctaaaataaattttccaaaaaattgggccttcataacgaaatttatagaaactttttaaaaaagtggtttccccccagcccaacaacaaataacacagcgaccaacaatcgagctatgtataacaatatccatnacnatcaagaca

SEQ ID NO: 36299 - DNA, 635 bp, Macaca Mulatta
  misc_feature (1)...(635): n = A,T,C or G
cgtacagtaagattgaggacatttgtcatctgggattatgcttaataaattaatagtgtttttaaattaattagattcactcctaagtcattatcagtaaatttgctcagtatctgacaagaatttctagcatatatttcttgattagagcatgtaaaattctaaaagaatttttatagtattttccaggcaataagaccaaacaactagtgccctaaatttaccaaatgcatgagtctaagcctgtgctatatatatatactcaaagccaagtttacatctgtgtacacaagtgtgcatgcatatgtataattattttttcagaaagactacagttttaacaatcatgagctttgtgttttgattttactcctattcctgtattgtattaagtgtactatcatgttcttgaggcatatctccaggagattttcttttccaagaaaaaagtgggacattacataagnntaggtaaacgcnntagcgctagatactcnctttaatctctattacatcagatctctggctcccttttacaaccaggcagtcttcaattataggtggctaacagggaagaaaatcattggcagagcaacagcttcatgtaatttcagagtataaaaattaattttaat

SEQ ID NO: 36300 - DNA, 824 bp, Macaca Mulatta
  misc_feature (1)...(824): n = A,T,C or G
ggnnnnnnnnnnnnnnnnnnnnnnnnnnnnnnnnnnnnnnnnnnnnnnnnnnnnnnnnnnnnnnnnnnnnnnnnnnnnnnnnnnnnnnnnnnnnnnnnnnnnnnnnnnnnnnnnnnnnnnnnnnnnnnnnnnnnnnnnnnnnnnnnnnnnnnnnnnnnnnnnnnnnnnnnnnnnnnnnnnnnnnnnnnnnnnnnnnnnnnnnnnnnnnnnnnnnnnnnnnnnnnnnnnnnnnnnnnnnnnnnnnnnnnnnnnnnnnnnnnnnnnnnnnnnnnnnnnnnnnnnnnnnnnnnnnnnnnnnnnnnnnnnnnnnnnnnnnnnnnnnnnnnnnnnnnnnnnnnnnnnnnnnnnnnnnnnnnnnnnnnnnnnnnnnnnnnnnnnnnnnnnnnnnnnnnnnnnnnnnnnnnnnnnnnnnnnnnnnnnnnnnnnnnnnnnnnnnnnnnnnnnnnnnnnnnnnnnnnnnnnnnnnnnnnnnnnnnnnnnnnnnnnnnnnnnnnnnnnnnnnnnnnnnnnnnnnnnnnnnnnnnnnnnnnnnnnnnnnnnnnnnnnnnnnnnnnnnnnnnnnnnnnnnnnnnnnnnnnnnnnnnnnnnnnnnnnnnnnnnnnnnnnnnnnnnnnnnnnnnnnnnnnnnnnnnnnnnnnnnnnnnnnnnnnnnnnnnnnnnnnnnnnnnnnnnnnnnnnnnnnnnnnnnnnnnnnnnnnnnnnnnnnnnnnnnnnnntctgaattccttgtggtcatccgcggaaattctacaatcccctaatttcctcccccgggctttcgcgaaaataatccttcccccacaatttggtaacccttacctacc

SEQ ID NO: 36301 - DNA, 813 bp, Macaca Mulatta
  misc_feature (1)...(813): n = A,T,C or G
ggatgccccagttagatacatcaacatgattcaccactattatgacgatgcttcccacactatatcttatcatgcagctaaagctactaaacacaaatcaccaccaaccaccccttacaaaaacccccacccttcagtctcacaatgtccgnnnnnnnnnnnnnnnnnnnnnnnnnnnnnnnnnnnnnnnnnnnnnnnnnnnnnnnnnnnnnnnnnnnnnnnnnnnnnnnnnnnnnnnnnnnnnnnnnnnnnnnnnnnnnnnnnnnnnnnnnnnnnnnnnnnnnnnnnnnnnnnnnnnnnnnnnnnnnnnnnnnnnnnnnnnnnnnnnnnnnnnnnnnnnnnnnnnnnnnnnnnnnnnnnnnnnnnnnnnnnnnnnnnnnnnnnnnnnnnnnnnnnnnnnnnnnnnnnnnnnnnnnnnnnnnnnnnnnnnnnnnnnnnnnnnnnnnnnnnnnnnnnnnnnnnnnnnnnnnnnnnnnnnnnnnnnnnnnnnnnnnnnnnnnnnnnnnnnnnnnnnnnnnnnnnnnnnnnnnnnnnnnnnnnnnnnnnnnnnnnnnnnnnnnnnnnnnnnnnnnnnnnnnnnnnnnnnnnnnnnnnnnnnnnnnnnnnnnnnnnnnnnnnnnnnnnnnnnnnnnnnnnnnnnnnnnnnnnnnnnnnnnnnnnnnnnnnnnnnnnnnggctaataacacctggatcgggaaaaaactgttatctagcgcctattcaaccacccaaacctcttcccatagcttttactaaagcctcctaaacctttctggggatttaacaaaacttatcctcagaaatattgccctt

SEQ ID NO: 36302 - DNA, 672 bp, Macaca Mulatta
gggaaatgattaattaaatagcttttgtgtcttacattggtagccagccagccaaggctctgtttatgctttctgggggcatatgttgggttccattctcacttatccccacaacatatccgtatatatcccctctactcttacttcccccaaatttaaagaagtatgggaaatgagaggcatttcccccactctatttctctcctcacacacagacttatattactggtaggaacttgagaactttatttcacaagctgttcaaacatttaccaatcatattaatacaatgatgctacttgcaattcctgcttctaggggaggggagataagaaaccctcactctctacaggtttgggtacaagtggcagcctgcttccatggccgtggagaagcatggcgccctggcttctctgaggaagctgggcttcatgacaacggcagatgtaaagttgtttcctccttgtgaagtcaggttgaggctgggagacagccattgtaaatgctctactttggtctgctgttctctagaaagaatatttggtttcctgtataggatgagattattcctttccaggtattttgtaattcgggaaccaaacccatgcctcccctaccattttactgtatccattagatgcctgagaagagtgtgaattccacgaattgatc

SEQ ID NO: 36303 - DNA, 649 bp, Macaca Mulatta
gggggatcaccgagggcatctacggcagtacatttttatacctgaaattcctggtggtgtgggcacttgtcctcctagccgattttgtcctggagttcagatttgaatatctgtggccattctggcttttcatcagaagcgtctatgattccttcagataccagggactggccttctcagtattttttgtttgtgtagcattcacgtcaaatataatatgcctgctgttcatccccatacagtggcttttttttgctgctagcacatatgtgtgggttcagtacgtatggcacacagaaaggggagtgtgtttgcctacagtgtctctctggatcctctttgtttatattgaagcagccattagatttaaagatctcaaaaactttcatgtagacctttgtcgtccatttgctgctcactgtattgggtaccctgtggtaactttgggctttggctttcaaagttacgtaagctacaaaatggcgttaaggaagcaaaaagagtacaaaaagagatgagtttacatgcactttctcaacagctctcctccgagcacgaagcacaaagcagaaaaaagccaggacaccaaggatactgaatgattctcacctaacacccacgagatcccccaaaaaacccccatttcaaa

SEQ ID NO: 36304 - DNA, 644 bp, Macaca Mulatta
  misc_feature (1)...(644): n = A,T,C or G
gggattctaatcattgtttaattatatatattcatgtataaatataccaatttcttatcttttaaaggatatgtttgatattgctgagttttaatggagactttgcacacacgaaatattttagagctttgtttaaataaaatttttgatgaaacataataaaccagatcgtagatggtatttgcttacattaattaccactatcaaaatttaaaataacaatgttaattacataacacaacaaatgtttaatttgtaaactggactatcaaaattatttatttcttggtgagccttctttgaatttgaagatttacactttaatcaagcgtgttaaaaattataattatttgagtataattttctttgatccatcttgattaagagaccagcattttacatagatttggtatatatgaatttttatgaagttcctgctattagggtannnnnnnnnnnnnnnnnnnnnggagggtaatgactgggaatagcatagagatttttgtgacaaataaaatcagacctttctctggatgtttttgtaggcaggacttgtttctgggtcagctttaggaagaggtggagaagaaatgagaggagtgagaggagaatgtctgttgatgctccgggcagttctttgcgaa

SEQ ID NO: 36305 - DNA, 594 bp, Macaca Mulatta
ggggagggtgtgtctccttggcctcctagagggtggggatccgtggtgcttcttcgggaacagcctcctgcaggaagacccgccacctcgctggacctttacctcgctgcctagattccgaggaataggagataggagacgaaaagccagttggtttgggaagcggctgattatcctaaagggtagtgtgggagtccagcacttccgtgcacctctttgggtactacggaagggagatttccagcatcgagtggaatatatgaccagggagtacaccttgagcgcttgtgtgcagttatcttttggcggaattctgcttggattcagtagaatattgcaacagaatgattttcattaagatgtaatctaaattcttatttctcaacaattcaaacatattcaaaaccttttcaattctcacttacaccaaggattatgaaaaacagcacttactcttcattaaaatgcgaaagcccccactacttcttcgaagacccttacctccaaaattcactaagccgtctttacatgagataaaaacccgtaccgcccaaactggtaaaactgggtcactacacgtaacatttccctgaa

SEQ ID NO: 36306 - DNA, 191 bp, Macaca Mulatta
  misc_feature (1)...(191): n = A,T,C or G
gcagattcttgaaagggaatacaataacctcttggccctgggaactgaaaggcgactggatgaanagtgatgacaagaacttcagacgtggatcaacctggagaaggcagtttcctcctcgggaagtacatggaatcagcatgatgcctgggtcctcagaaacattaccagctggatttaggttaaccaca

SEQ ID NO: 36307 - DNA, 2141 bp, Macaca Mulatta
  misc_feature (1)...(2141): n = A,T,C or G
ggttgggttttatttaatattttttaatatatttgagaagcatggtctgcctggactgcacttctctaaaagtgagatataaaattgtgcagctattttaaaagttgtatatacaatatgtgtgtnnnnnnnnnnnnnnnnnnnnnnnaaaggacaaacaggttgctttgttctagttctaatttcttaaaaaccactacatggttacaaaattggaataacatttggggacagctaggttaactacaaagaagaggattttaagaggagatgtgttgtattgactcattttgtattatttttggcttccagttcccatagctgttagagtctggtttgtttttgtttttactatcaaaattatagtaaagatctctcaatctcctggctaaagattgagggaaggcaaatctatttctaattatacatatatcagtaaggatgatctcaacataatagtaatgtgtatcttttggtatccagttttatttctggccttctaagaaagtgtctcataacacagaacattgccatttgctcttgttggccacaaatattagtcctagagcctaggaaaaaaagaattgattaatggtccttttattttgtagccttataaatgctgtagatattatcaaaaaaattaatttcatattgtttacatcatgcaactaatctaagcctcaaaatcgttattggggctataaagaaaatgtttacttacccacctgaaacaggttaagaatattcttaatctcattatagataattgcccccatgggacttgaaatatgacaccttgtgctgaaaacttcaggttggcaatatttgaagctttcactgtagaagagtttaacattaactcctattttgacttacaaatcttatttctcatcactaaaatgcttttgaattaataaatccacccacatgagctgagagtttttcttttgttgaaagaaacagacatctttctgtatgaaagtataaattgtatggttttagatacataggaatnnnnnnnnnnnnnnnnnnnnnnnnnnnnnnnnnnnnnnnnnnnnnnnnnnnnnnnnnnnnnnnnnnnnnnnnnnnnnnnnnnnnnnnnnnnnnnnnnnnnnnnnnnnnnnnnnnnnnnnnnnnnnnnnnnnnnnnnnnnnnnnnnnnnnnnnnnnnnnnnnnnnnnnnnnnnnnnnnnnnnnnnnnnnnnnnnnnnnnnnnnnnnnnnnnnnnnnnnnnnnnnnnnnnnnnnnnnnnnnnnnnnnnnnnnnnnnnnnnnnnnnnnnnnnnnnnnnnnnnnnnnnnnnnnnnnnnnnnnnnnnnnnnnnnnnnnnnnnnnnnnnnnnnnnnnnnnnnnnnnnnnnnnnnnnnnnnnnnnnnnnnnnnnnnnnnnngcaaagtttataacttgattaaacgagaagtggttcaggatgaagatggacttgttagaaaatgatcaagtcctttaagtacttgtttctttttcaggttgtgatgtggccattccaagagcttttgttgagagtttggtttataattgtctcttttgtcttgttagtaaacattcatttgcaacagttttgaaggtgctgagtggaaaaccgaaacacatggttattgcatattggacctagaatgaaataattgcctcaatatttaacaacaagccattcttgtctcaaaggtttaaattccagaatatcccatttgcaaatcatatgcaattgaggttaatagcatgagcatctgggtaatgaagagccttcatttacgtaaatttgtcactaaaaaccagtagtagctctacaaaatattaaactgctacaatgttcaaggaaatggaatatctttgtcattggtgctgagaagagcatttaggtagaagacagttatgcctgaagattgagtataaatcattccaaccagtggttctcaacgttggctgtatgcactttgcagtcactttggagtgtttgaagacgtatcgatgctttgggttccatatgccaagattctgatngtggtctggaatatgagctggtcataangatttttttatactttctggtcattttcatatgctgcccaaggtgagaaccattgnntctaaattcaccttgagtttctcatctgcaaaatag

SEQ ID NO: 36308 - DNA, 406 bp, Macaca Mulatta
  misc_feature (1)...(406): n = A,T,C or G
cgctgtgattgtattatatttaaataacaagaggatatctgtacacaatccagtgaaaggaaaagagaagtgatctcattgagaattccacactcttacatatttatcagtgttattaactgccacttaactgcctctttaagctgctaattaacactgtcatttacatcttgatttgaaggtagcctcatgtctgtaaaggacttgcttatttgaaattttcaattttaaaggtttttttctggaataaagttttagcatgttgattacaactgctgtatatgacttcctttcaccaataactgtcagtgctttcagctttcttggcttcctcagagcattataattacttgtgcttgtcaaaagnggtattacatttaattctaagtgcaatcagtgatatctt

SEQ ID NO: 36309 - DNA, 861 bp, Macaca Mulatta
  misc_feature (1)...(861): n = A,T,C or G
ggatcacagaaacaaaggaaagaaatcaaagagaaggtacagaacggggagaaggctcagaaagaggaaacctgcacaatactttgaggggaggggatgtccttggtatatttttttaattaagcactgtcaaccctgtctgtaactgctccttggacaaataagcccaagataaaaataaaattgcttcaaatccattggtaatggaaacgaaatgatacttaagtactatgtcccttttccatggaaacacaatcccaaccccccatggcacaaccctccggtaaccctaatggaaaaaattcccctaaactttcccataaaaaaaaaaacaactttccctccnnnnnnnnnnnnnnnnngnnnnnnnnnnnnnnnnnnnnnccgttctccccccctttttttggggccccaccaaaaaaggggggcccccgaaaaaaatcccccacattttttcttccaggggggggcaacaagnnnnnnnnnnnnnnnnnnnnnnnnnnnnnnggtggggcgcgcccttttttttcgcggggcggaatnnnnnnnnnnnnnnnnnnccaccacacacatattttttgagnnnnnnnnnnnnnnnnnnnnnnnnnnnnnnnnnnnnnnnnnntttttataatcaccccccccccggcggtgtgtttgtttttcccccccacaagggggggagagaacacctctttttgtggggggcgcccacatagagttgttttataataacaccccaccaccacccccgggtctttttgtggnnnnnnnnnnnnnnnnnnnnnnnnnnnnnnnnnnnnnnnnnnnnnnnnnnnnnnnnnnnnnnnnnnnctccccacccaaagagaaggagcgccc

SEQ ID NO: 36310 - DNA, 959 bp, Macaca Mulatta
  misc_feature (1)...(959): n = A,T,C or G
gggttgactaggctggtttcgaactcctgacctcggatgatctatccacctccnnnnnnnnnnnnnnnnnnnnnnnnntcgtgagccactgtgcctggccttattgacatatttatgtagtagtgttggtaggtaattaaattggaccttagggattgtttccctatgacctgtttgggcaacactccagttgtctgaggaatgcatatccggctagcctctagcatccccaaattatatgtgtatttcaaacattaaagtcagtcacacactgccttgttggttttctcatcagtaagatgatgtcctttgcatctctgacagaaaatgccttctgcctcttaaaatggcaaggaagagggctgttcctattaaggcccaactccgggtttgggtttccctaaccaggggggagggggaacttccttttccaaactatttttgcctaaaccccagtggggtttaaaacccnnnnnnnnnnnnnnnnnnnnnngggggggcttaaaagccagggcgaattttcttttgaccccccgggaaggtggaaaacccacccctgggggtaacacaccggtaaaaaaacccccgtttctcctttcccnnnnnggttcatcaaaaggataaataattaaagaangnnnatttatttgggggcgcgccccctttgggcgccctcttaaaaagaaattctttttataaaacnnnnnnnnnnnnnnnnnnncggcgcnnnnnnnnnnnnnnannnnnnnnnnnnntagaaaaacagaggggatatcaaatggtgttttttcttctaaaaaagaaaaacttcgcggggacaaagaaaaaaagagagggggggtgggaggtctcccccccnnnnnnnnnnnnnnnnnnnncgccgccgtggggggagaacaacacatatgtttttttttactaaaaaaacacacccacaatgaggggggtttgtctttaag

SEQ ID NO: 36311 - DNA, 1060 bp, Macaca Mulatta
  misc_feature (1)...(1060): n = A,T,C or G
ggcacggtggctcacgcctgcaatcgcatcaccttgggaggccaacgcgggcggatcaagaggccaggagatggnnnnnnnnnnnnnnnnnnnnnncaaaactccatctccnnnnnnnnnnnnnnnnnnaagccgggcatggtggcacgcgcccgcagtcccaccccactcaggaggctgaacgccgagaatcgtttgccccgggaggcacacattctccacctcgaaatccccccaccgcactccagcctgcggccactcatgcagaatccctcccctagctgttctcccgggacccgatatcacctcttcactgggtacccttttgtactgcacccacccatggaaagaccatggcgccccaaaccccctccagtttgcccccgattacggccaccccgaattttggccccccccccggccagccctttctaaactgttcccaacactttgggcactccccaccaactccaagaatgcccgggggcccaacagggttgatggagggaatccacctcctcctaggacggcgttccacacgcatcttacacgatgcctccatgacccctacgtggntggtcccgcgcgctgtcaagcaccgtgttcccgcagatatctacccagaggcgtatctacctcccccctagtctctattgaccgccatcatagtcgcccctgtttcgttcccacataaccccccattatccccccctgtttaccatccatcgcttcccccttttccacggttgattgcgttgcccccatccctcccctctagtttccgccgtgtcctgttcgatttctatcacacctccaccccacccttgatcatatcccgccgccacgatcccgccatgtttcccattctcacctttctctcccgcacgttttctgtttccccntccacgatctcccttaatttctggcgcacaccatttctgtagaccatacgctctgctggccgcntgccccctgcatctttcctcgctcacttttttccccacttatgtgcagtcgcccatccaccctgggatacgcttttcccgccggcccagtcccg

SEQ ID NO: 36312 - DNA, 428 bp, Macaca Mulatta
agtaatcagaacctgggtgataagctttttagcaagaaagtcttaatttgtagcatgatttgggggaggaaaccatctttggggaggaaagacttagtttggaatggggaagaaccaggttgatgataataatgtagttttgttctagaggtatatattagaaacaataacagttcagttgaaaagcctacaacattacttgtataatgcttctagtcatggtattctttccttcagtcaccttgttaacacaaaagtttagtttatataaaagacaaagttaactataaaaaaagttagtctcttcagacatttctgtaaagatacaacagaatttcagcatataagtaattggaaggaagtagctttcagagtgtactttcattcattaaaaaagcaagctggatttacaatgtgcagttatttgt

SEQ ID NO: 36313 - DNA, 338 bp, Macaca Mulatta
tgatcagcagcagcctaagtggaagagtgcctgtgatcctaggaaacctgatgggcgatggagcagcgattcgacttttgtgtttctctttaatccttccgacttccccaagccccgcgcactcaggttccgctccaagtgcgggacctgcccggggtgtgtcgggggtactgggccggaggcggccggtgagtggggcttacagggccccgggaccgaggtgggtgctcttggaggttctggaaagtggaaacacggtttcttcgaaggaagcgggcgaaagggtcgcgggtggtttggctgcaggtcgggtcaggaggtacctccacggttgggaa

SEQ ID NO: 36314 - DNA, 737 bp, Macaca Mulatta
  misc_feature (1)...(737): n = A,T,C or G
gggagtttcagcagttttttgctcacattagtctcattttaatttttcccattctagctgccatttatcaaataatcgaaattatttcctcagagaaaaaggtttaggtatcctaagaccttaaaatctcagtacatttttaaaagtatattgtctcattctgttgggaagttacacaatcatgcaggcttctaggtctagccaggccatctagtttagtcaagacagctgtgtaacaaacatagcattgaggcagggcacgnnnnnnnnnnnnnnnnnnnnnnnnnnnncgggaagccgaggcgggcggattacctgaggtcaggagttagagaccagcctgtnnnnnnnnnnnnnnnnnnnnnnnnnncnnnnnnnnnnnnnngttagccgggtgtggtggcgggtgcctgtagtcannnnnnnnnnnnnnnnnnnnnnnannnnnnnnnnnnnnntgnnnnnnnnnnnnnnnnnnnngcccgagaccgtgccattgcactcccagtctgggaaacaagaatgaaactccannnnnnnnnnnnnnnnnnnnnnagattgatcccagaaaattaagaataggggtagaaaaaaaacccctggatattaaaagaaccctggaaagaataaaatccctttaaaaaaaaactggtttttcccggaaatatttttggaaaattggtgggggaacnnnnnnnnnnnnnnnnnnnnnnnnggccccccttaaaagggggggt

SEQ ID NO: 36315 - DNA, 121 bp, Macaca Mulatta
catgtattcaactacagtttttctgtttgtttttcctcataacattaatagcagtgaacgaggaagtagttatttttaatttcaagttgacaccttgaaaacatagtaaaacagacggttt

SEQ ID NO: 36316 - DNA, 364 bp, Macaca Mulatta
gttacaggtgtcaccaattatgtaatgcggtatgtcactgtacccttgcgtaaatgtactagtgacgaattgagggctgttatgtttcccatgtcagcaatgaaaatacctcctcaaacaaaagtagaagaggctcccttggagaaagtagagacacctcccaaggcaagtgtggatgcaccccaccaggtgaatgtggaagtattctgcaacacaagcatggaagcatcccccaaggcaagtgtgggcatggccactgaggtgagcacggactcatcccctgtggcgagtgtggatgtgtcacctgtggtgagcacatatgattctgagatgagcacggacgcatcccccgagttgagcatag

SEQ ID NO: 36317 - DNA, 798 bp, Macaca Mulatta
  misc_feature (1)...(798): n = A,T,C or G
ggagagtgaaacttnnnnnnnnnnnnnnnnnnnnnnnnnnngtatactattaattttatttcataaaagataagaaagcacttggaaattttcaaagtacgggaaagctataaggcctgattatattccagactctggtcccagccattcctcatctgcttccctaagttaattcaaattcagtttcaccatcatactgggacccccacctgatgtggtttctttgcccatttttcaaatatgtattatttgtggcttacattagcatcttagatttcactctgacttcctcaccagtcggtcttaatctgctataatatggccatcactctatatggttgaaactgttggtatccaaattacaagtgacttaatgtctaaatccactggatgcattctacttgttaatatatttcacacacataaacactcacactgacacacataaacacttcttaaaactctctcctccatgggttggagctatagcctcttggacttttcttttccctactctaacccatcttctcagtttcctccaaagactcacttttccttcatctactcattacatgttagtgttccccaaggttccgcctgttgtcctgtcctctttatactctaacatccttggtgatcccatctactactcctgtgttcactaccatgttttggtgctgatggcatcaatgtctgtgtcccaacaccagattccccctgagatgctcccgaaaatacatatgcctactatccnnnnnnnnnnnnnnnggnnnnnnnnnnnnnnnnnnnnnnnnnnnn

SEQ ID NO: 36318 - DNA, 648 bp, Macaca Mulatta
ggggcctttgtctcttactgcagccggcgctccacgtctcctcttcgctgctctgtctcctctgcgtccagggtcaccgatgtgaccctgttaccagcaggaacttggagcttcacaactaagacgccaggatcccctggaagcctagaaatggtattgctgtctctaagccagacctgatcacctggctggagcaaggaaaagaaccctggaatatgaagagacgtgagatggtagacaaaaccccagttatgtgttctcattttacccaagatgtttggccagagcagagcataaaagattcttttccaaaagtgatactgagaacatgtggaaagtatggacatgagaatttacagctaagaaaagaccataaaagcgtggatgcatgtaaagtgtacaaaggaagttatattggattaaaccattgtttggacactcctggaaagcaaaatttttcgtgtggaaaaatagggaaaagcttttcaaaattttcaaatgtaaaaaaaataagaaaaaacatacggaaaaaaacctttccaatggaaacccggggaaattttttccgttttcccattccccccaaaaaaattctcctaagagtttctacagttgaaaaggggagggctttaagggcccaaaatataa

SEQ ID NO: 36319 - DNA, 674 bp, Macaca Mulatta
  misc_feature (1)...(674): n = A,T,C or G
gnnnnnnnnnnnnnnnnnnnnnnnngnnnnnnnnnnnnnnnnagataggaccctgggagggggcgcaggtacatgccagtttcaattaccacaatattctagaggcggtctgcaatgacaaggagggcaaatgaaattagtgcaagatttcttagagaataatgggcagacggaaaaaatgtaaaaacaacataaaaacagggtctgctgataatgttttaaaatatacatttatcttctttttgcattgtgaaaaaataaattttgtgtgatagttttgatgatgaaaggtagaagttctacctatatttgaatgagtttttttttaaggtaatgagaatgtcatggagctaaacttgacaaagaagagatcattgaaatgctgaaaattttagcagtcttcttaaaagtattgagggggcaaaaattaccaattatgccataccaaaataagcctataaatgtgtttcacattgctaacttgtgtttcagttgatcagtttgtaatactagttatgaacttctgtttacataaaaatctgtaatnnnnnnnnnnnnnnnnnnnnnnnnnnnnnntcgccctcgccctcaaagcttcagacatcctttggcccggcccatagtaatgactggctaccgttccaggaacggcagatatgttgatctccaaaaan

SEQ ID NO: 36320 - DNA, 124 bp, Macaca Mulatta
agaacatttacttcccaagatgctagaatgacaatctagttggaatcgaagcataaaaccaccagcaacacagcttataaagtagtgtaaagtagcacagttttaggcacttcactcagtactt

SEQ ID NO: 36321 - DNA, 570 bp, Macaca Mulatta
tctgcctggctggccgtctgttcagccctgttgacaaacctcccctggtctcctgctccagcgtccaccccgccgcaggcccctctgctgacccctgctgccgtcgcttgggtcccggcacagccttcttgcctctgcccgccccgtccctggctgcctcccccatggggcttcacgcacctgcacagcctggacagccaggtctacactgcaccgggtcccaggctcctggtgcccaacaggacccaacctgagctccccgcccgacccccggccacccagacctgcagacctggcatcccccagccacccaaacactaagccaggaggtcaccctggactccccctgccctcccgctccctgcaagtctgagtcccaggtacccctccgtccacctctctgcgcggccctgtccacaccaccgagcccccacaccccacatttctgcaggagtgcggctgacaggctcccccaggggtcccgcccctcccagctgctccacagctctgacccaagcaggacgcgaatcactcgtgttatgaagaccctactctggtgcccctctgccc

SEQ ID NO: 36322 - DNA, 300 bp, Macaca Mulatta
ggggggtgtgcccttgtaaccgtaaaacatctttctccatgggtgtttcagcttcaattgaccaatcacataacagttatatgtttggggggaaaaagaaaagtttctaaaaaatgtagcccattacatatatgggtatgaaagcagaaaagtggaggaggcagggatatcattgacaaacacctttgccagtttctttgtattcgtgattttttgtgctattaaatgcagtattaaaacaagaaaagcccacatgggctagtgaaaggagaggaaataagggggcttgtataaggggag

SEQ ID NO: 36323 - DNA, 733 bp, Macaca Mulatta
  misc_feature (1)...(733): n = A,T,C or G
tttgaaggtgtggcctgtgcttactgattatagtaaaatatattggaaaagagatacatacagggaagaattgcgaaacagaaaagacccaagatttgatgatttgggaaattctcagctcatctgannnnnnnnnnnnnnnnnnnnnnnnnttaagagattcattgtcaggaaagcatgttttagagagataggcaaggatgtttgctattaccgagatcaaaacatacattagaacactcatttctttgaagagattaaacatgacttgtagatcccctcaatacaaacaatttataagaagtttaaactatcagtcatctcagcaaaagccaaaaatatagataggggattccctagggggaataatctgcataaacctcttttctaatggtgtgaatttcagtgacatacaggagactcacaaaattcttgaaaattttatacaagtgaaaatgctcaccttgggtctaaaggaaccttgaaagtatgaagttaaagggtgtagacatgtaaagtgtgaagttaaagggtgtaatattctatacatgggactggctgcagaaacaggtgcaagccctttctacctttcatgagaaaggaaggatgactcagagcagaggggactccattgggcagagtcctgaaccacgtgatattcccatgtcttgacgtccagtggcatttgccaaagtagatttcaacttttctcgggattagtggttccatttgt

SEQ ID NO: 36324 - DNA, 699 bp, Macaca Mulatta
  misc_feature (1)...(699): n = A,T,C or G
caccgcgtcacctactgcgtggcggacgcgcggctgcccaaggtcttcgcctgggtgtaccggcacgagctgaagcacaaggccgtgatgctgcgctgccacgccgtgctggtgtccaagcccgaaaaggcgcaggctatggccctgctgctctaccagacgtcggccaacgcgctggcggaatttaaacgcctcaagcggcgggacgacgcgaaacaccagcagcaggagctggtgggcgcacacaccatcccgctagtaccgctgcgcaagttgctcctgcacggaccctgctgctataaaccgccagtggagcgcagccgcagtgcgcccaagctcggctccatcaccgaggacctgctcggggaacaacaggagcaggagctacaggaggaagaagaggaagaggagcaccccgagggctgcccggaggaagaggagaaccatgcggcagagggagatccagcagaggaggccgaggcgcagcaggcgctggtggtcgccatgcactttgagtgcggggacttgttggacactctggagaatggccgnnnnnnnnnnnnnnnnnnnnnnnnnnnnnnnnnnnnnnnnnnnnnnnnnnnnngcctctgctgctgggcagtgcctcaaacatgaaggctgagctgtcgcaacttattagcgacctgggcgagctcagcttcgacaacgacgtgcgca

SEQ ID NO: 36325 - DNA, 656 bp, Macaca Mulatta
ctgggcgcgcgcgacctctttttcagagttgtgtgttctccctgcccgtttcccgcccgaccctcgcccgcgatgctggcgctgcgctgcggcccgcggtggctcggcctgctctccgtgccgcgctccgtgccgctgcgactccccgcggcccgcgcctgcagcaagggggccggcgacccgtcttcttcctcctcctccgggaacccgctcgtgtacctggacgtgggcgccgacgggcagccgctcggccgcgtggtgctggagctgaaggcagatgtcgtcccaaagacagctgagaacttcagagccctgtgcactggtgagaagggctttggctacaaaggctccaccttccacagggtgatcccttccttcatgtgccaggcgggcgacttcaccaaccacaatggcacaggcgggaaatccatctacggaagccgctttcctgacgagaacttcacactgaagcacgtggggccgggtgtcctgtccatggctaatgctggtcctaacaccaatggctcccagttcttcatctgcaccataaagacagactggttggatggcaagcatgttgtgttcggtcacgtcaaagagggcatggatgtcgtgaagaaaatagaatctttcggctctaagagtggggagacatc

SEQ ID NO: 36326 - DNA, 165 bp, Macaca Mulatta
ttcgggttgtcccctgggagggagggcccacgggcagggacatcggggcttgcccttccctcggcgcggtggagctggggcgtccccgactcagagggtgctttccgagacctccagggatccccgaggcgaggaaacccgggccccggacagaccgaccctggg

SEQ ID NO: 36327 - DNA, 1481 bp, Macaca Mulatta
  misc_feature (1)...(1481): n = A,T,C or G
cctgatgtcttttctgtcacagatctgatagagacagttaatgaagtttccaagctgagcatcgcacatgaaatcgtagtaaaccaagatttctatgtggaagagaccattttaccttcaaacangtgtagaaggcaggtttgcggaggcaatgtacaatgctttttggaaccatctggaggaacaactattgagtactcctcctgacttcacctgtgctcttgaacttctaaaagatgttaaggagnagaccttgctatcactgctattaccatggcagaaccgcctaagaaatgagatagaagaagctctggacacagatctcctcaagcaggaagcagaacatggagccctggatgtccctcatctttctaactacattctcaatttgatgactctgctatgtgcaccagttcgagatgaagcgatacagaaactagaggccataacagatccagtacagttactgaggnnnnnnnnnnnnnnnnnnnnnnnnnnnnnnnnnnnnnnnnnnnnnnnnnnnnnnnnnnnnnnnnnnnnnnnnnnnnnnnnnnnnnnnnnnnnnnnnnnnnnnnnnnnnnnnnnnnnnnnnnnnnnnnnnnnnnnnngtctcctcgattataccacaaaatggctaaccaaagcagccacagacatcactacaccatgtccgagttctcctgagtcacctagctcctctcgcagcgtggcgtgttcacttccaaacggggcaggtaacaactcagagcccccgagtccaacaatggtgctataccaaggctacctgaacctcctcctctgggatcctgaaaacgaagaattccnnnnnnnnnnnnnnnnnnnnnnnnnnnnnnnnnnnnnnnnnnnnnnnnnnnnnnnnnnnnnnnnnnnnnnnnnnnnnnnnnnnnnnnnnnnnnnnnnnnnnnnnnnnnnnnnnnnnnnnnnnnnnnnnnnnnnnnnnnnnnnnnnnnnnnnnnnnnnnnnnnnnnnnnnnnnnnnnnnnnnnnnnnnnnnnnnnnnnnnnnnnnnnnnnnnnnnnnnnnnnnnnnnnnnnnnnnnnnnnnnnnnnnnnnnnnnnnnnnnnnnnnnnnnnnnnnnnnnnnnnnnnnnnnnnnnnnnnnnnnnnnnnnnnnnnnnnnnnnnnnnnnnnnnnnnnnnnnnnnnnnnnnnnnnnnnnnnnnnnnnnnnnnnnnnnnnnnnnnnnnnnnnnnnnnnnnnnnnnnnnnnnnnnnnnnnnnnnnnnnnnnnnatcagcggatccgtttgtttctcaaatgctgtttgcttcatggcatgcaggagtctctgctacactttcctggaggcctcattctcattgaaagggagttggcagaactgggctggaagtttctcaatctgatgcatcataatcagcaggtatttggcccatactatgctgagatcctaaaaaacatcatccatccagctcaagcacaagaaacagatgtggagcataactg

SEQ ID NO: 36328 - DNA, 682 bp, Macaca Mulatta
  misc_feature (1)...(682): n = A,T,C or G
tgcagcgttggcagcctgggtcagcttaggacgccaagtgtgcttcatttttaaattatatttaaaggttctgatatttgtaacccaaacttgtnnnnnnnnnnnnnnnnnnnnnngacaggnnnnnnnnnnnnnnnnnnnnnnnnnnnnntctggtgcgatctttggctcactgcaccctccacctccggggttcaagcggnnnnnnnnnnnnnnnnnnnnnnnnnnttgggattacagttgcccactaccatgtnnnnnnnnnnnnnnnnnnnnnnnnggagacgggatttcaccattcagcaggctggtctctaattcctgacctcacgtgatctgcctgctttcnnnnnnnnnnnnnnnnnnnnnnnnnnnnnntgccaccgttgttggactgcgcccggcctagaagggaaattattttatagtaacttaatacttaagacagctatttgttagagcagtttcaggatgacatcttggaagcttcattagcagttctagcttcttatgcgtttaagagtaacaaactgaattaaatagtagcttttccttattattttagattagcatgtgccacccactgcatagtgaactttctcagtgcgttttttaaaaaacgtatttatttgtttatttttagagccaggatctttgctacgttgctatgctgtccagaact

SEQ ID NO: 36329 - DNA, 576 bp, Macaca Mulatta
  misc_feature (1)...(576): n = A,T,C or G
ctttcctcgcccgcttgcacctcggcgatccccgactcccttcttcatgngcgtcgctcctgtgctgtgggccgaagctggccgcctgcggcatcgtccttagcgcctggggagtgatcatgttgataatgctcggaatatttttcaatgtccattccgctgtgttgattgaggacgttcccttcacggagaaagattttgagaatgggccccagaacatatacaacctttacgagcaagtcagctacaactgtttcatcgccgcgggcctttacctcctcctcggaggcttctctttctgccaagttcggctcaataagcgcaaggaatacatggtgcgctagggcccgggcgcccttccccgctccagcccctcctctatttaaagactccctgcaccgcgtcacccgggtcgcgtcccacccttgccggcaccctctgcgggactgagtttcccgggcgagagactgaatctcttcttctcccatctctggcatccggnccccgtggagagggctgaggctggggggctgttccgtctctccacccttcgctgtgtcccgtatctcaataaag

SEQ ID NO: 36330 - DNA, 1209 bp, Macaca Mulatta
  misc_feature (1)...(1209): n = A,T,C or G
ctctgcagcgcttcagcgagggtgccctggagtacctggccaacctggaccgggccccagaccccacggtcaggaaggacgcctttgccaccgacatcttcagcgcctacgatgttctcttccaccagtggctgcagagtcgagaagccaagnnnnnnnnnnnnnnnnnnnnnnnnnnnnnnnnnnnnnnnnnnnnnnnnnnnnnnnnnnnnnnnnnnnnnnnnnnnnnnnnnnnnnnnnnnnnnnnnnnnnnnnnnnnnnnnnnnnnnnnnnnnnnnnnnnnnnnnnnnnagagcctgggccagatcctcgagacggccgtgagtgtgggcagccgcacgttggagacccagctggatgccctcttggctgcactgcactcccaggtaggaggcgggcatcagtgggcgggttcaggttctgcacacttttccgtgggaagttgctggacgaggggtgcagaaagcaagttggggtggacggctcagccacgtggggctgaggactgggtattccctaaaggtcactcgagtaacttcttagtgatgtggcgatgctcttaccctgcccagcagtggcatgtgcaggtgacatattagcccccaggannnnnnnnnnnnnnnnnnnnnnnnnnnnnnnnnnnnnnnnnnnnnnnnnnnnnnnnnnnnnnnnnnnnnnnnnnnnnnnnnnnnnnnnnnnnnnnnnnnnnnnnnnnnnnnnnnnnnnnnnnnnnnnnnnnnnnnnnnnnnnnnnnnnnnnnnnnnnnnnnnnnnnnnnnnnnnnnnnnnnnnnnnnnnnnnnnnnnnnnnnnnnnnnnnnnnnnnnnnnnnnnnnnnnnnnnnnnnnnnnnnnnnnnnnnnnnnnnnnnnnnnnnnnnnnnnnnnnnnnnnnnnnnnnnnnnnnnnnnnnnnnnnnnnnnnnnnnnnnnnnnnnnnnnnnnnnnnnnnnnnnnnnnnnnnnnnnnnnnnnnnnnnnnnnnnnnnnnnnnnnnnnnnnnnnnnnnnnnnnnnnnnntgtggaggtgggcttactgcttggctctgcccctcacctggcccactccagctgggccccactctccaccgcctggatggtcctggctgcatcccagaaacaaaggggaagaggggacggcagccacagagctagtaaacataatgtaagtgctgtgaacagttacatggtaacaaacttaaaactgtatgaaat

SEQ ID NO: 36331 - DNA, 698 bp, Macaca Mulatta
agagaaggggcgcagcctgacactgtgctgtcctgcatttccagtcctgcttaagtggctcccgtgaccgtgacctgagtggccacttcctcttggaaggggggccgcgacaggtactctccctttgctgcttgctggcggcgctgctgggcctacaaaagtttcttcggcgttggggaaggggctaacgttcttgtccaaagcactcatcttgctgcagggaagggagctgtgcagaggctggaagctgcagagttaggccggagagagcttttgacaagcctggctgtttctgcttcccaccttttttgccaaatacctttgggtcctggaggctgccaagggcgctccgccttgagcaggtcccagagaggctcagcctgcccgtcctgggagccagcgtccttacctctgccctgacctcagcagctacacctaaccccaccgcaccccacccagtgtcgatatccacaacccagcccccaggcctgcacgctggagatttctggatccttccctaggagggagaggtctcctaactcgattggacaggagccttcattccttgactcgtgtcatttgggagctatttatttattcttagtatttaatttttaacatcctctcagggaccaggggcctcctgcttttcagaggcccaagtgcatttatcccaaaacgaggcatcttgacatccc

SEQ ID NO: 36332 - DNA, 591 bp, Macaca Mulatta
ggtaaagtctatgggaagacctcacttctgagagctcatctgcattggcattctggagaacacccttttgtttgtaactggatgtactgtggtaaaaaaatttactcgaaatgatgaattacagaggcacagaagaacacatacaggtgagaagaaatttgtttgttcagaatgttcaaaatgctttgtgagaagtgaccatcttaccaaacatactaaaacacagcagaataaaaaaggtattcactctagcagtacagtgctggcatctgtggaagctgtgcgagatgatactttgattactgcaggaggaacaacacttacccttgcaaatattcaacaaggttctgtttcagggataggaactgttaatacctccaccaccagcaatccagatatccttaccaacattgaaatacctttacgacttgtcacagtttctggaaatgaaacaatggagtaaatattacacaaatacctatttgttgtggttatatttatacagtactgagaagaatattgttcctaagttcttagatatctttgtattgatatgcagaaatttttggattgacagtaacttggttatat

SEQ ID NO: 36333 - DNA, 190 bp, Macaca Mulatta
ccattttcaactgctttgaaacttgcctggggtctgagcatgatgggaatagggagacagggtaggaaagaatgcctactcttcagggtgggccttggattgctaagctggctgtgatgctacttatgcaagttagggtctatgtatttagaatgtctgcaccttctgcagccaatcagaagctggatga

SEQ ID NO: 36334 - DNA, 659 bp, Macaca Mulatta
  misc_feature (1)...(659): n = A,T,C or G
ggggagttctctcccggctgcagagctggccgcccagggggagtcgcagagtttggaagatctctctaacacctctcggccaacttcagaagtgtataagatcagctttatctttccaaatggagacaagtatgatggcgactgtacaagaacatcttctggaatctatgaaagaaatggaataggtattcataccactcctaatgggattgtctacacaggaagctggaaagatgacaagatgaatggttttggaagacttgagcatttttcaggagcagtatatgaaggacaatttaaggataatatgtttcatggactggggacttacacattcccaactggggcaaagtatattggaaatttcaatgaaaatagggtagaaggtgaaagggaatatactgatgtccgaggactaggatggagtgtaactttcattttacagctgctcccgacctgaatttaaacttcacatgtagatgtgcttcccattggaaattaatgttaaataaagtttaaaggtatattgaagcttttgttgtaaggaaacaccttatctgtatttgaatgcctctaacacaccccttaagttgcccaaaaaccctccttcctaaaaaaagatnggagaataattattcataacattaacctttctcccg

SEQ ID NO: 36335 - DNA, 533 bp, Macaca Mulatta
aagatggcagcccagagcttccccacgcaattgcacgggcacgtggatggcggtgccttcagcaacgtgtatgagcccgtggaggacgcgtttctgcttctggacgctatccaggtagcagctgctgagctggcgggagtggaaatatgcctggaagtaggggtctggtgtagtatctgcattcctagcctctatgataggtcctcaggctttgtacatgtgcactgatatcaaccctgaggcagcagcttgtatgctagagacagcaagctgtaacaaagtccacattcaaccagttattacagatttggtcaaagtcttgctagagattgaaggaaaaagttgatcttctggtgtttaatcccccctatgttgtgactccacctgaagaggtaggaagtcacggaatagagacagcttgggttggtggcagaaatggtcgggaagtaacgtgcaggtttttctccctggttccagctctcctttcaccaaaagcattattctatttagttaccattaaagaagacaaccca

SEQ ID NO: 36336 - DNA, 655 bp, Macaca Mulatta
ggggagccgcgctaggcgtaagctaataaggaagaagttgggcgttgagagagcgacgctgattagtgaatgttaaatcacctgaatgaaagcccacttgtgattcgccctaagtaaactggagcccggtgggctggaaccggccggaatctgaggtgactgagagttttcgtcctcttgaataagaactcgacaatagactgagaacttactgtcttgtgatcgattgcctggttctctgtcatttttttattcttcggtgctgtgatcatcacgtcagttctgttgcttttcccacgagctggtgaattcccagccccggaggtggaagttaagattgtggatgactttttcattggccgctatgtcctgctggcttttcttagcgccatcttccttggaagcctcttcttggttttaatccatcatgttctggagcccatctatgccaaaccactgcgctcctactgaccactcttcgcgaaaacgaaaacctgttctctccttcattgtgatgacatcgatgagcagaaagacactattcagagccttgacagccctcctgccgtaagactggaggagtgtccgtccatcacgaagacaaatctcctgagtcctggcttcagaaacagattgcaattgtcctgggggctaa

SEQ ID NO: 36337 - DNA, 900 bp, Macaca Mulatta
  misc_feature (1)...(900): n = A,T,C or G
ggctgcagagatgaataaacaaagaggaacctactctgaagtgagtctggcccaggagccagggaggcagcaaaggaaacttaagggcaataaaagctccatttcaggaaccgaacagaaaatattccaagtagaattaaaccttcaaaatgcttcttcagatcatcaagggaatgacaagacatatcactgcaaaggtttactgccacctccagagaagctcactgctgaggtcctgggaatcatttgcattgtcctgatggccactgtgttaaaaacagtagttcttattccttgtattggagtactggagcagaacaatttttccctgaatacaagaatccagaaagcatatgattgtggccattgtcctgaggagtggattacatataccaacagttgttattacattggtaaggaaaaaagaacttgggaagagagtttgctgacctgtgcttcaaagaactgtagtctgctttctatagataatgaagaagaaatgcaacttctggggtccttgtcagttctctcatgggttggtgtctcagcagtgtcagcagcagtgatcatccatgggtgtcaataaatggctcaatgttcaaattggagatagcagaatcagatattggaaagcataactgtgtaatgctgtgctcatctggccttaaatcacacagatgtggatcttcacaactgtatacttgtaagcataaactttggaattaaagcaactgaatttggagtctgttcagagatgggatttcatcatgttgannnnnnnnnnnnnnnnnnnnnnagctcaagaaatctacacgtcttgctctcccaagttgctgggattactgacataagccatcgcacctgagtgctcatgtaccatttagcttgtgtttttaaaat

SEQ ID NO: 36338 - DNA, 443 bp, Macaca Mulatta
  misc_feature (1)...(443): n = A,T,C or G
gggaagtaacaatgtagcagaggaggtgactacacagtagagacctagataataaagttattactcatgatctatgatgctaattagactgcgacttaataaatcagtaaagaagtatgcgaaataggctgggtgctgtggctcatgcctataatcccgannnnnnnnnnnnnnnnnntgggtggattgcttaagctcagcnnnnnnnnnnnnnnnnnnnnnnnnnggcaaaaacccacctctacaaaaattacaaaaaaaattagctggtgtggtagcgtgtacctgcagtcccagcttctctnnnnnnnnnnnnnnnnnnnnnnnnnnnccctggannnnnnnnnnnnnnnnnnattgagatcgtgccactaannnnnnnnnnnnnnnnnnnnntgaggccctgtctnnnnnnnnnnnnnnnnnnnnaanaaaaacatgtc

SEQ ID NO: 36339 - DNA, 803 bp, Macaca Mulatta
  misc_feature (1)...(803): n = A,T,C or G
ggacaaaacaggttccagagagattaaataacttgcccaagggcatactgctgctaagtggctgaaggcatactgactttgcagtgtatattctttttcagtattcagtaannnnnnnnnnnnnnnnnnnnnnnnnnngtaaagctcattggcagagaatattgctagtgaggtaattcaaacatgttaaaaagatctttggaattctcagtgcatcctgtggtctagaagaaaccatgaggaaccatggcaagttattgaaaaggaaagatgctgcttccaggttaaatgatattgggtggaaggggtgggaattgtattcattgaatttacaagataccaggaaaaccatctgttggaggaaggtaatgaaggaaattatcttatcctacttattcttttacttattctgtgggatagaaaaatctctgagccctctaaaaaaactatatgctgatagcaggagttacagaacaatccagtagtgtctggaatagaatagtggttcagtggttcgaaaagtggagggattgttaaagcacgggatgctgggcccacccccaaagtttctgattcagtaagccttggagtggggatgataatttacatatccaacaggccaaggtgatgccctgacttgggggatcacatttttgtgactgatacagaatactgaatggtcatgcgggtcccccttcctttcggtgtttgaaaaccccttcatcttgaacccaagctcaagtcttagaaagaaaataaagtttccaaaccccaaccgaattaaccctttaaagaacaccctt

SEQ ID NO: 36340 - DNA, 369 bp, Macaca Mulatta
ccaccatgcccaaaaggaagactgaaggggatgctaaaggagataaagccaaggtgaaggacacaccacagagaagatccacgaggttgtctgctaaacctgctcctccaaagccagaacccaagcctaaaaaggcccctgccaagaagggagggaaggtacccaaagggaaaaagggaaaagctgatgctggcaaggagagaaataaccctgcagaaaacggagatgccaaaacagaccaggtcaggaaagctgaaggtgctggagaggccaagtgaagtgtgtgcatttttgataactgtgtacttctggtgactgtacagtttgaaatactattttttatcaagttttataaaaatgcagaatttt

SEQ ID NO: 36341 - DNA, 799 bp, Macaca Mulatta
  misc_feature (1)...(799): n = A,T,C or G
ggcaccaatgacagattagatttttttaacctttctcctaaatccatttaatgaagtctgactcccttagaagaaagttaaattcttgaccaattgtaacagcatttctaattgaacacttaaagaatttatagaaagtttagacattccagcttcctttctgatagaataaaggtatacattgtgcttaattttaaggttataagaatttgcctttgttcttatgttgtcttatttgttccttannnnnnnnnnnnnnnnnnnnngagagctttggaatccttaaggtcaaatatttaaagtgaacatttttattattttgagaaaaagaatcctgtggcattagaaaactatatttacctttcacctccttccctagtgtatttactactgattatcattttaatgtattgtgtggatcttgtggccttaagattggcctgtcattctgatatttggataaagcattatgttacttatgtgataaattcttccagcatctaactattggtttaatttgagtattacataaacactttatttacaacgattgctgctttttaactaaatttatgtgacttcttaataacagttcccacagtgctataactttgagagtgaaaaagaatgaggctttttaagattctattcatttaaaaaagcctagttaagaaaaaatagtttaagaattctaaatttcaataggaatttctcctataagtgaaattcctctttctagaaagattctgaaccataccgggatttccctcccgttttcaagggggaagaaaagattcct

SEQ ID NO: 36342 - DNA, 791 bp, Macaca Mulatta
  misc_feature (1)...(791): n = A,T,C or G
ggannnnnnnnnnnnnnnnnnnnannnnnnnnnnnnnnnnnnnnnnnaatgatccacttnnnnnnnnnnnnnnnnnnnnnnnnnnnnnnnnnnnnnnnnnnntctgcccgtttatatttatcctctaaagcttttacacttccatctatgtattttattatggttaagttttttttttccaattctacatacttttatagttattatggggtgatttattgttattataactactacatttaaggaattatagttttattttgtaagtattatcaattattcaattgtagttttaaatgtgagtggattcggtgctcacagcctctgcttacctctaaatttcctgttcttgagatcttgattttgaaccttctgttggttgtattttgaagaaaagctacttacgtgctgcattctctgactatgctgattagaaaatcattttttattatttttatatattaaaaaaactggttgcgaacttaattggaaattgaatacttgggtattgttctctctttcttgagcctctgcagacacagcttcactttttttctgtcatcaaatgttaccgtgaaaaagtcagaaactttttctgttataattgagtaattggttaaaggtctttgatatatatagggattcagtgtttagccctttaaaattctgtaaccctcaccaagaatgccttcaatttttacttaatttccatccttacctttttccttggaaaaaatccgaaaaactctttttattttccacttaagttattttttctaacccccagaatt

SEQ ID NO: 36343 - DNA, 587 bp, Macaca Mulatta
  misc_feature (1)...(587): n = A,T,C or G
gggagtcaccaagcatccaccggaatgcaaacactggaaattaaggcaagaccaagagaaaggcgctgcaaacactgacaagctttcaggagcagcccgtaccttcttccgttgagctgtatactctgaagatctgccctatgctcaagctgtgctgcctagatgagcccacaggaacacgccttgtagcttcagcttgtcttctcatctcctggatgatcataaccggacttctgcacacgggagttgagatgctggcttgagggctccttgaagaagtggttgatttccagatgtgggcatggagaacacaagatagacttggagcatcttgcggtgccagaaagtgagatagtcctcaagagagaatgggggcatcttaagaaggcacagaagccaacctgaaagaccttccaaaggccaaaactggaatgatttaatcaataaaataaaaacagtactgaattacagcccatagaataaaatgaatatccatacattttgaataccggatataagcaatagatttgataaactaataaatagcgaannnnnnnnnnnnnnnnnnnnnnnnncccttgtcggcc

SEQ ID NO: 36344 - DNA, 789 bp, Macaca Mulatta
  misc_feature (1)...(789): n = A,T,C or G
gggagttagtgtggcatttaaatgatgcccccatttattttagtgggacatgctaaatggctattgcgccaagcagtttgtgaaaataaaggcagtgaattgggtcaaggaaagagagttttgttgtgtctgttaatgccatgaaatatgaaactcggtcctcatctttcctagctatgcaagggtagggctctgaataatcctcactggggagagagaaggattggagctgggcctcattgtttattataaactgaaatagaactatttaagtcatatttatggattgtgcataatttcagttcccagcaaattggtcaagagtgacagttgcatcagttgcctttaaacttttccctaagctttgaacttctgcaaattcagaagctaatttttggcagactcaatgactgtgtgttcataaatggggaacttggattctgggctgcagctagcagcatgccacctgaccgtgaatgaggagaggaacagcattcatgtatggatcagtagttccaaaatgttctaatataacattgaaattctttcaaatgtcaaaaaatcctgggaactgaacttctaatatctacttatttaaaataagtttataacaaaatgttaataaaaaagacagtaatggcttttaaatgaacttgnaattttaatccttttaaaaatatttattttgagaacaggggtctccactttttgtcacctcaaggcctggaattggttgttccattgtggaaacaacaggctcaactgggcaaacgccttacaaactttccc

SEQ ID NO: 36345 - DNA, 112 bp, Macaca Mulatta
aggttgattaagccaaccccaatataaagatcacatgattccacatagctaaaacactgaagaacccaaatttgtaacaaattctgtggcagttttaatgctgagctgctag

SEQ ID NO: 36346 - DNA, 576 bp, Macaca Mulatta
  misc_feature (1)...(576): n = A,T,C or G
ggggggcagttaggggacctggcctgctgaatgggttggggccttctcttggatcaagagtctcttattagattaaggtctcttattagacttcctcattctttctcagaccccaggctgcatggtggcagctgatgaaacgatctgaaagatgagaagagacaattgaggctggtgagggaagagggagacagggggagaagtggtgctcaagatggatgcagaggaccctgggaatgagttccctaggtcagaaggagaaagagacccacatcagagacctgaaaagggaacgaagagtgggggagcaggatggggcaaangtgagctgggacaagatgggtcctttagcaaccgcccgaactctccgcttcctttcaatgaagatcccacccgtttccattggatgcccagtgtttgcttctgaaccccccggttgccttaccccacgtgggcagggctttcccaaaaaaggttgtccttccaggagccccttctccagcctggcccctaatgttccaaaaaatccccctttcccccttttttcccggggccccccttttcaaaccggggttt

SEQ ID NO: 36347 - DNA, 814 bp, Macaca Mulatta
  misc_feature (1)...(814): n = A,T,C or G
gggcagccactggaggggcaaaaaggatgtggagcacctaaaagagccccatgcccagagtcttgtcactatttgacttgtctggcagcttcctggaaaggctacattcccagggtttgtctttaattggcataactcagagcttgccctgtgcaagtggccctctccacagggcattgttaaaaacaatcagtaacaattgtttaatattacagcagcctcaggtagtgacagtagttaaagctaacaacaggctgactgaaaaacttgaaaaagaaaagtgaagaatgagatttccatggggagagggcattaaaaagatttaacataagctgcctggtggcacatnnnnnnnnnnnnnnnnnnnnnnnnnnnnnnnnnnnaaggatcactcaagcccaggagtttgaggctgtagtgtgttatgattgcacctgtaaatagccactggacgtcagcctgngcaacatagcaagatctcatctaacagaaaagaaataaaaaagattaacatatttctggaaatctgagaaggcccaagttttacttctggctaaccttgaggctttgagcaagcaggatgtgaaggctgaggcaaagatgtgaacggtctgcctganattgaaggcatgangctggacgcgnnnnnnnnnnnnnnnnnnnnnnntactttcggaagccgaagtgggcannnnnnnnnnnnnnnnnnnncaaacatcctgggtacacagtgaaaactnnnnnnnnnnnnnnnnnnnnnnnnnnnngggncntggtggtgggctnnnnnnnnnnnnnnnnnnnnnnnnnnnnn

SEQ ID NO: 36348 - DNA, 643 bp, Macaca Mulatta
  misc_feature (1)...(643): n = A,T,C or G
gggggaatccaagacaggcacttccgtggagggcaggtcaggcccagcgctcagctgacacatgttgtttgggttacccccacctaggggccaagggaaacccttggccttctgaaggttctctgaaaaatcaactcacaaaagggagatcaattggaaaaaagacatgtaaatttatttaacgtgtatacacgggagccttcagaatgaagacccaaagatacaggggatattgtccacttttatgcttaagttcaacgaagtatggacagccatgtagaaataggattggacaaaaagtccatcctgatggactgactggggacacccagcaaagcctatctgtctagaatcttcttggcctctccgagcagcatttccttctgggtgtggggcaggaccctctctggaaaagagatcctctgccctgctgtcaaacaagctcgatcagatatttttcatgagaagccctcgcttgctgactcagaaaaatgatcctgacngaaaaaccgaagaattggaaatcaacctcaaattaatccgacaatcggaatgaaaaaaccatctaacccttatccccagcaatacccggggccctaatttagacttccagcgggaaggtgcccaactccctggccttttg

SEQ ID NO: 36349 - DNA, 218 bp, Macaca Mulatta
  misc_feature (1)...(218): n = A,T,C or G
aacacggaccaaggagactttgagtatagcgtggcgaaggatgtgaagtccccacccgcgagaaatctacaagttatactgatagnnnnnnnnnnnnnnnnnnnnnnnnnnnnnnnnnnnnnnnnnnnnnnnnnnnnnnnnnnnnnnnnnnnnnnnnnnnnnnnnnnnnnnnnnnnnnnnnnnnnnnnnnnnnnnnnnnnnnnnnnnnnnnntgcctg

SEQ ID NO: 36350 - DNA, 156 bp, Macaca Mulatta
tagttacacaataaaaattccttcattgaggacctactctctctgaatctgtgctcctgtgggcattcgaagttgagatttaactattaagtcaagaagtacagtaagcaagaaagaagccaaaagctatcttcaaatgcttagtcacctggtttg

SEQ ID NO: 36351 - DNA, 698 bp, Macaca Mulatta
  misc_feature (1)...(698): n = A,T,C or G
ttcacccatcaatcaacacccacattctcctaaccctctccaccctatccattgcggtaggcagttgaggaggtctaaaccaaacacaattacgcaagatcctagggtactcttcaatcacacacatgggttgaataatgataacacttgtatacaacccagcaactacaattttctatttaactacatacattatcctaacaactaccatattnnnnnnnnnnnnnnnnnnnnnnnnnnnnnnnnnnnnnnnnnnnnnnnnnnnnnnnnnnnnnnnnnnnnnnnnnnnnnnnnnnnnnnnnnnnnnnnnnnnnnnnnnnnnnnnnnnnnnnnnnnnnnnnnnnnnnnnnnnnnnnnnnnnnnnnnnnnnnnnnnnnnnnnnnnnnnnnnnnnnnnnnnnnnnnnnnnnnnnnnnnnnnnnnnnnnnnnnnnnnnnnnnnnnnnnnnnnnnnnnnnnnnnnnnnnnnnnnnnnnnnnnnnnnnnnnnnnnnnnnnnnnnnnnnnnnnnnnnnnnnnnnnnnnnnnnnnnnnnnnnnnnnnnnnnnnnnnnnnnnnnnnnnnnnnnnnnnnnnnnnnnnnnnnnnnnnnnnnnnnnnnnnnnnnnnnnnnnnnnnnnnnnnnnnnnnnnnnnnnnnnnnnnnnnnnnnnnnnnnnnnnnnnnnnnnnnnnnnnnnnnnnnnnnnnnnnnnnnnnnnnnn

SEQ ID NO: 36352 - DNA, 923 bp, Macaca Mulatta
aaaaatgacatgcttctgtattcttaggcgactgataacgttcaatgaagaggacgaaggtgtgaactgtaagactggtcctaagccagttagatttttgggcccttccacaagtacccaaatcaaagtcaagaactcggcctccgtcacggtgtctccagccagtgccgtccagacgtcggctggggcgacagcatacaggtttcaaagtggtagccgcagaaaggcagctcagcgctctgcaccttctagaaccacggccctggagggcacaggggcacctgggcatcctcaggcttcccttggggctgcgagcgctgaaaatggaggcacgcacttacctccagctaaggtgctactttccgacaagaagcctacaccccagcgggtgataaagctgaagaggacaccgctgtgcgccaccgcgccttccctggccacccccacggccgcgagacaggccaactccctcaagccgcttcccggtgacgctgcccgggccttgggagtgcggactgagaacgggaaggacaagggaaattgatgaaagtggtggacttgaaatttcccgttcatctcccaaagctttcaacccatttgatgcaaagaagtgacactttcttaatgcagtaaaggggaagcttaggtttatgtttaggattctattcctggaattgtgtgagccaggaatggaggaggggagactttcagtggttaaggctccatttctcattttcccaacttttaaatgattatttgtctatggacagtttgaatttctggttttcagtttattttttttaatgattaattcgtattaaggcaacaagacagtacaacaaaataatctctagagaggtccactttgttgctgaagtaaacgttacttgttgcaacccgaggatggtcataagatttggcct

SEQ ID NO: 36353 - DNA, 514 bp, Macaca Mulatta
ctctaacaagtgggcagcttggaactgggaacgagagagccaccgaaacagaatgagggagacaaagaagtgggcatcaccctcagctccacaagggcttcccaaggtcgctgtaccgtacgcaggcccgggacgaactttattctcgccccagcatcgttgtccgtctcagtgagaccctggctttagggcagacaggaccacgtttcataaattcatactgtcccagcagaggaataacgccagaaagcgttccagtacaaccagagaaagagaatccatgagaaatctgcccttgtgaagttggaatcccctcaaccttcaccccgctgacttgaatgaagcgactgagatgggctgtgatggagcagatctggttgctcgaccttctcccttggaccaacacatgtagttaatagttattggacatgcacattcagtgggtccagtgggttccaggtaccaaacttgtgctgaatggtatgtgccagacactgtcttgcgatctggggaa

SEQ ID NO: 36354 - DNA, 97 bp, Macaca Mulatta
agctgtgctacagtgctgttctcctacccacatggatgctctaagtagttgtgtcactcccactgcctcttcctatgcacactgcaactacttccag

SEQ ID NO: 36355 - DNA, 121 bp, Macaca Mulatta
agtagcaaattgcttcaggagttgagacaggagggagcttgctgtcttggccttctatgagcttctctgagctatgaggccgagaagatctttcagtggagttctagcaaattagctcatc

SEQ ID NO: 36356 - DNA, 606 bp, Macaca Mulatta
  misc_feature (1)...(606): n = A,T,C or G
attctgttatacacaatgcacatacaaacatacacccctaaagcgtagctaactgctcccactagataactgctgcnnnnnnnnnnnnnnnnnnnnnnnnnnnnnnncccctaagtaatggaggaagaaatagcattcttttaaaaggggcttttctgaagagtaaaatgtaaatacaggacatgtggggagggtggggccgcctgcaaaatgtcctgaagatggacaaatagccttttaaattctactttttaaccatctttaccgtgtgtgcctatttgtattgcagatgtgaactactatttttggaggttgatatcagtatgttttgaaactgaattattacataaaatcagagtaacctctttctcaatcctccttttccacactattcttgccaaatatttctgctgaaacccagttccagcaaggcaaaatgatgggactctcaaaactccctcctcatcttcccttcccctctgtcttatgcctggcctgggcttttttgtagttgtcgttggcttttcataagtaagaacaatttattgtagtatttcaagactgcagaatgtcaagtgtatatctataaaactcttttaaaaatct

SEQ ID NO: 36357 - DNA, 599 bp, Macaca Mulatta
  misc_feature (1)...(599): n = A,T,C or G
gtgacttctccactggattactggtcgctcatacacctattttacttgtaaattctactactcactgtctccctactccattctcatttgctgtagaaaatatctgttaccatcctaactttcacccaccatcatgcttacccaaaggctgtgggaatgacctgggacctactgccccttttctaagttcctaaggctcaccgttttcctattgtaatggttcttgaccttataatgtttgaggcatattttcaaatatcatcctttgatttcagatggaatacttgacaagnnnnnnnnnnnnnnnnnnnnnagtgcatatgactgtatatacacacatacacacacgtgcctagtatacagccgtatgatatatatacaaacacacgcacacacatgcctgtatacatcttctgtcacttaacaaatgggaatatgttctgagaaatgcatcattagatgattttgtccttatgtgaacatcataagagtgtccttatacaaacctagatgatatagcctactacacacccaggctacatggtgtcacctattgcttctaggttacaaacctatacagcatgtgactgtactaaata

SEQ ID NO: 36358 - DNA, 642 bp, Macaca Mulatta
caaacctgctcaccctgtcccctaagcccgctctccctgccccccaaaccctggacaccttctgcttgcacagctgcttctgctcgcccaccagggctgcgatgctctcccgggctgcaaccacctcgggcggctccaggatgtccggctggtcatcgcctgtgtctgagtccttctcactgtcgtccttagcgtagcactccttccgctgttcctcccgccatttgagggccctgcgggacttctcatgcttccagctgccacagccccacccagagagacagggcattcaggccataggggcagagcacagtgcacagccacagcttatgctcctgtgtcccaggcacaggggtggggcctggagggtcccgggccgggggcttacccggcgatggtgagcaggtgtcgggaggtgtcaatctggacctccatggcacggttctccagttccagcaggcgcctccgcacatccatctgctcctggaaggcgctgacgagctgctcccgaagctgtcccatgccagcctgctcaccctgcccgctgtgcagctggacctcagctgccggtgagggtggttaaggtagaggaggaggcaagttcaaaagggaaagcctgggcccacctggggccctcccctc

SEQ ID NO: 36359 - DNA, 75 bp, Macaca Mulatta
gttgaagaggacatgtcagcttctgacagtgatgactgtattattccaggtcctatctccaagaatatcaaacag

SEQ ID NO: 36360 - DNA, 709 bp, Macaca Mulatta
  misc_feature (1)...(709): n = A,T,C or G
gggacaaaatctttagaattctgtgggaaaataatcttcggagttgtttgaagttaaaagaagagtttttttttaatgagccaaggtagacagtgtgttatagaaatgcagtattttaaggcaaacttccggaacactaaatctgaattggaaaggactgataacatctctttcaactcatagctgactcaggtggctttttcaccaaaagaatataattcaccatctttcagaccagaatatatagaattcaaaccaaaatttcagtttcagaaagtcaacaagaacggttttgatccttttctaaggaatataaacaaaatgtcagtcagtaaaaaaaaagatcaagatatatacaaatgtagaaacattttaggtgcagaggttatagagcacgaagaccaggatcctccttatccagcacaatcaaaaactgcaggacctgctaataaaacctgggcccatgaccctaatatcttcacaacaaagacgtcagaaactgagaataagttagcccctgaccctactatncatacgataaagggtttagatacaaagaataatttaaaagaaaatctaccaaatgtatctttaccnagttttcaaggagatcatcagggctggaatgtactgcaatactgtcactctcaagtcttaatttaccccagatgattttaacatcatgatccagtcatttagtaaatcgcan

SEQ ID NO: 36361 - DNA, 665 bp, Macaca Mulatta
catagaaaattgtgtctggtcatcttttataagatgatgatgagtcttatctgcacatagcagactttttttcttaggagtttatatgttttattgattctgtttatgatgtttacatgttcttgaaaaggttgtcaaagaaatatatatggcacatattaatgatgctgatcctaatgatttgtgaacctcctagaaattcttatgtctaaaaacctagagattcttctggttcctttagaaacacgtaacagacttgggccaggggtgctgaggcacggggaggactgcttcttggcaggaacacagagggggagggcatcaggtaggggtggaactggatgaccttccagacccgctcctactcagaagtcagcgcgcaggcagagcctgctgtctcccgatgcttgcagggaggaaaatgtctgtggaggacactttaatgaaggatgaagctctctgccgctccctcgaagctgggttcactgtggcaggcaggaggccgagaaactcctcccgccaaacccactgctcaggtggctgctgctggtgtcagtctcctttttaagtgtcagtttctgttcacagacagttcgtttcaatatggctgatttaccctttcaactccccaacatctcatttaattggtaaatttttagttccat

SEQ ID NO: 36362 - DNA, 716 bp, Macaca Mulatta
  misc_feature (1)...(716): n = A,T,C or G
ggggcccttaaatagaagcaccacttcccctgttctgtccagggactgattctttgaatcccaggaacttatgttcattcttctttcctgttttttgggtggggaccactgtgtgtggggtgtggtggggaaacagttgtctttctaaatttatcaaattgtaatttaaatatttagaagcttagcgatttataacaccaactgatctatacatacagtaacagaagatgcttttctcccaacctttaacatttgaggggaaaagtgtgcagattgcagatacttcactggacccaaggtgtgcatcttttgtttgcccagtattacaagcttatcttgttttgccttcttttgtattaatattttgaacttcatctcagcaatattcatttcagttagcactttgtattacttcaaaagaaatgctctgttcagagaatctccaacaaattggaagcaatataagccaaatcattcttggattactgtctaattgaaattagcctacataacaattatattttatgtttaaaatacacatctgcactctgacgatttaataatgtgcactttttgtattaacttgctagcagccacttattttatctgttacagatttttgaaacctttccattttgtaaataataccttattcctttgactatttactgaaccccttaaactttttaccnnnnnnnnnnnnnnnnnnntgtaat

SEQ ID NO: 36363 - DNA, 321 bp, Macaca Mulatta
agttctcagggtgttacaattagtctgaatgctacatctggcatggttacatcatttgaactgtccgacaacactaacgaccaatctggagaacaggagtctgagtacgaacaagaacaaggagaggatgaactggtttatcacaaatctgatggatcagaattgtatactcaagagtacccagaagaaggacagtatgaaggccacgaagctgagttgacagaagaccaaatagaatatgtggaggagccagaggaggagcaactttacaccgatgaagtgttagacatcgaaatcaatgaacctttagatgaatttaca

SEQ ID NO: 36364 - DNA, 1049 bp, Macaca Mulatta
gcagaagatcagctagatagggtgttgagttgctgagtgttttgcaccgcctccatattgacctggaatccatcatctgtccagctgttggttactggagttgtacaacagatagtaagagctgctcaggattatttgcaagaaaaaagaaacactctaaatgaagatgatatggaaaaagaggcctgtactgtattgggagcaaggaggtgacagcggtggtctcattcctggaaaatctcttgtgtttgcaactatggaactgctgatgttcattttagtacggcatatgccacatctcagtaccaaggtgtcagactctccaagtcacatagccactaaaactcgactgtcagaagaaagtgctcgtttggtggcagccacagttaccatactctctgatttaccatccctttgttcacctgctggatgtatgacaatcctgcccacaattctgttcttaattgcaagaatattgaaagacacagcaataaagtctgcagataatcaggttcctccaccagtcagtgcagctcttcaagggattaaaagtattgtgacactttcaatggccaaaactgaggctggcgttcaaaaacaatggacagctctgattcgtagcacgcttgcatgcatcctggaatattctcaaccagaagactctgtacctacacctgatgaagtcggcatgctaacagcaattgcgctctttctgtggtctggtagtagtgaaattataggagtccagtcattacagaatggctgcatgaacagatttaaaaatgcattaaattcatgcgacccatgggttcaagccaaatgttaccagcttctcctctcagtcttccaacattccaatcgtgccctttcaactccttatattcattcattagctccaatagtggttgaaaagctaaaagctgttgaaagaaacagaccaggccagtaacatagagcttttagcggttcaagaaggaaataaaagttccttgaaaacattggttggctctttggttgaagaaccaaacagaagtcccagcttactttgt

SEQ ID NO: 36365 - DNA, 106 bp, Macaca Mulatta
atgtcagtggttatttacactatgctggtgcttatctttatatacacatatcagttgaaaacttcccaggctgtggcaaaatatgactggattgaaaaaagaaaag

SEQ ID NO: 36366 - DNA, 446 bp, Macaca Mulatta
ccctattccaatctcagcaatgctgccaccttacttgtctttcagagttgttcgtttacttcattctttgtgacacagtcaagtgtctcatgacctcagggcaccagaggagtcattcactggtggttgtgatgatatccagtgtccctctgccctgttctacccccagccccattttactgtagcattgcatctgtgtcctgttgtcatttctgttaaccttcaggtattaaacttgctgcatatcttgaaaataaataaaataaaagtgtttggaaatatgtacaactttgatacagtttcagggtgctccagacacccatgaccacttcatgtaaaccactgaaaatttctagagcactttgataggctacagtatgatcatgatccaattttgtaattctcaaataagacgtgtcaattatggcatgtgagggctaaatttc

SEQ ID NO: 36367 - DNA, 2016 bp, Macaca Mulatta
  misc_feature (1)...(2016): n = A,T,C or G
ggcccacctgatccacacccaggcggcttccacaccaccctgcagcaggcctggccactggcctcagctcttctgggagaaaatcagccacatggaagatggagagggcttctggactgagccctggaggggagctgggggccaccnnnnnnnnnnnnnnnnnnnnnnnnnnnnnnnnnnnnnnnnnnnnnnnnnnnnnnnnnnnnnnnnnnnnnnnnnnnnnnnnnnnnnnnnnnnnnnnnnnnnnnnnnnnnnnnnnnnnnnnnnnnnnnnnnnnnnnnnnnnnnnnnnnnnnnnnnnnnnnnnnnnnnnnnnnnnnnnnnnnnnnnnnnnnnnnnnnnnnnnnnnnnnnnnnnnnnnnnnnnnnnnnnnnnnnnnnnnnnnnnnnnnnnnnnnnnnnnnnnnnnnnnnnnnnnnnnnnnnnnnnnnnnnnnnnnnnnnnnnnnnnnnnnnnnnnnnnnnnnnnnnnnnnnnnnnnnnnnnnnnnnnnnnnnnnnnnnnnnnnnnnnnnnnnnnnnnnnnnnnnnnnnnnnnnnnnnnnnnnnnnnnnnnnnnnnnnnnnnnnnnnnnnnnnnnnnnnnnnnnnnnnnnnnnnnnnnnnnnnnnnnnnnnnnnnnnnnnnnnnnnnnnnnnnnnnnnnnnnnnnnnnnnnnnnnnnnnnnnnnnnnnnnnnnnnnnnnnnnnnnnnnnnnnnnnnnnnnnnnnnnnnnnnnnnnnnnnnnnnnnnnnnnnnnnnnnnnnnnnnnnnnnnnnnnnnnnnnnnnnnnnnnnnnnnnnnnnnnnnnnnnnnnnnnnnnnnnnnnnnnnnnnnnnnnnnnnnnnnnnnnnnnnnnnnnnnnnnnnnnnnnnnnnnnnnnnnnnnnnnnnnnnnnnnnnnnnnnnnnnnnnnnnnnnnnnnnnnnnnnnnnnnnnnnnnnnnnnnnnnnnnnnnnnnnnnnnnnnnnnnnnnnnnnnnnnnnnnnnnnnnnnnnnnnnnnnnnnnnnnnnnnnnnnnnnnnnnnnnnnnnnnnnnnnnnnnnnnnnnnnnnnnnnnnnnnnnnnnnnnnnnnnnnnnnnnnnnnnnggctctgtttttacaactctgaaggcacccacctcttgagcacagctggtgatgttgactgtgcagctgccacgtggggacctctgtcaccaggagtcaggaagcactagatcatttgttcttgtttggttttttaggtaggatggtttggagtttaggtaggatttggcatcggcttctgaatgagaggtataaaccaaaaccctggttccagtctagcggtccccggccttggcacaagaactgagggctcctgtaggctcatcccagccaacggtagcgcagtctccccagcgaggcagtggacagtggtgcccctctgcagcccatggcttaagcctacctctgccttctcctagacttcccctgacctcccccttaatcctcataggccagattacagagacaagtctacaacaggcttttggctgccagagggaggcttttaaatcccagatcggatcctgccattcccacttgtgatactgtctccacagcctccagcgcaaaagctaagccctctgcaggatacaccagtccctgtgtgtccgtccagaccactccccgagttccatggcccaatacctgagtctgcctccctcctcctgggatgctcagtcacctggaacagagctcttgaccaccccacccacacctgctcttccttccagccctggtgtgcaaatgacatcaggatagccggggtctggctcacacgaaatttctagaaggcagtctttccctcacctctctcctgcctaccccatcccacccagcagtgaattctgcagttccaccttcaacacggagcccaaacccacccaactttctccacatgctgctcctccccagcctgagcccccatcccctctgatggggacaatggtgacagctccctagcaggtctgcatccaccaggcccctcctagatccactgtccacagagcagcccc

SEQ ID NO: 36368 - DNA, 226 bp, Macaca Mulatta
aactccggcgactcctcaattatgcctaggctccactcacttcccccgccccgagactttcggtttgcctcaaataccctccccaattaataaatacacactaaacaagcgcgtaccaaagaacctggggtctgaagatcacgaaaacagcgctcccaacaatgccacctccaagacaaaacttcctgtgtgtatgtggaaggacggggggaggtgggtggaggtg

SEQ ID NO: 36369 - DNA, 585 bp, Macaca Mulatta
gggcgcataaaagcgcgctgggccgcggcggggcactgccactatgtcctcactgcgcccgctgctgctggccctggccctggccctggccgccgtgccgtgcgcccagggcgcctgccccgcgtccgccgacctcaagcactcggacgggacgcgcacttgcgccaagctctatgacaagagcgacccctactatgagaactgctgcaggggcgccgagctgtcgctggagccgggcgcagacctgttctacttgccctccaactgggccaacaccgcctcctcgcttgtggtggccccgcgctgcgagctcgtcgtgtggtcccggcaaggcaaggcgggcaagacgcacaaattctctgcgggcacctacccgcgcctggaggagtaccgcctcggcatcttgggaaactggtccaacgctatctccgcgctccactgcaggtgcccagctgcccaaagctccgagcccacacaggccccggccccagctccgcacaaagctccacacccatgatccgagccccgaggctgctccatacccctgagctcccgacaggaactggcagcaccaggcctccctaa

SEQ ID NO: 36370 - DNA, 593 bp, Macaca Mulatta
  misc_feature (1)...(593): n = A,T,C or G
ggtattgctgcctctaagccagacctgatcacctgtctggagcaaggaaaagaaccttggaatgtgaagagacatgagatgggagctgaactcccagngagagaaaccctacaaatgtgaagtatgtggcaaagcttttagccagtcctcaacgcttactacacataaggtaattcatgttggagagaaattctacaaatgtgaagaatgtggcaaagcctttaagcagtcctcacatcttaatacacataagaaaattcatactggagagaaattctacaaatgtgaagaatgtggcaaagcctttagccaattctcaaaccttactacacataagggaattcattctggagagaaaccctacaagtgtgaagtatgtgacaacgcttttaaataatcctcaacccttaccacacataagcaaattcatgctggaaattctacaactgtgaagaatgtggcaggacttttaaccaatcccacaaccttactacacataagaaaatttatactggagagaaaccctacaaatgtgaagaatgtggcaaagcttttcgccagtcctaacaccttactacgcataagataattca

SEQ ID NO: 36371 - DNA, 1457 bp, Macaca Mulatta
  misc_feature (1)...(1457): n = A,T,C or G
ggacactgcacagtggaatttatatagtaatgtgatgttagagaattacagaaacgtggttttccnnnnnnngttatgtgttctcatttttcccaagacttttggccagagcagatcataaaagattctttccaaaaattgacattgagaggatatggaaaatgcaaacatgagaatttacagttaagaaaacatggtaaatgtgcgaatgattgcaaggtgccaaaaagaggttataatggacttgatcaatgtttactcactacccagtgtgaagtattcgaatgtgataaatatgtgaaaatgtttcataaatcttcaaatttaaatggacataagataagacatacnnnnnnnnnnnnnnnnnnnnnnnnnnnnnnnnnnnnnnnnnnnnnnnnnnnnnnnnnnnnnnnnnnnnnnnnnnnnnnnnnnnnnnnnnnnnnnnnnnnnnnnnnnnnnnnnnnnnnnnnnnnnnnnnnnnnnnnnnnnnnnnnnnnnnnnnnnnnnnnnnnnnnnnnnnnnnnnnnnnnnnnnnnnnnnnnnnnnnnnnnnnnnnnnnnnnnnnnnnnnnnnnnnnnnnnnnnnnnnnnnnnnnnnnnnnnnnnnnnnnnnnnnnnnnnnnnnnnnnnnnnnnnnnnnnnnnnnnnnnnnnnnnnnnnnnnnnnnnnnnnnnnnnnnnnnnnnnnnnnnnnnnnnnnnnnnnnnnnnnnnnnnnnnnnnnnnnnnnnnnnnnnnnnnnnnnnnnnnnnnnnnnnnnnnnnnnnnnnnnnnnnnnnnnnnnnnnnnnnnnnnnnnnnnnnnnnnnnnnnnnnnnnnnnnnnnnnnnnnnnnnnnnnnnnnnnnnnnnnnnnnnnnnnnnnnnnnnnnnnnnnnnnnnnnnnnnnnnnnnnnnnnnnnnnnnnnnnnnnnnnnnnnnnnnnnnnnnnnnnnnnnnnnnnnnnnnnnnnnnnnnnnagaatgtcgcgaggcttttaaccagtcctcacaccttaccagacataagataattcatactacagagatactctacaaatgtgaagaatattgcacagcctttaggcagtccccacaccctattacacataagataattcatactggagagaaaacctgcaaatatgaagaatgtgacaaagcctttaacaagtcctcacaccttactagacataagagcattcatactaaagagaaaccctatcaatgttgaaaatatggcaaagctttttatcgatcttgaaaacttactgaacacaagcaaattcatactggagagaaactgtacacatatgaagaatgtggcaaagtctttaaccatttctcacacctttctacacataagataattcatactgcagagaaatcctaccaatgtgagaaatgtgggaaagtctttaatcagtcctcacaccttactagataacagaaatcatactggagagaaaccgtaccaatgtgaa

SEQ ID NO: 36372 - DNA, 576 bp, Macaca Mulatta
  misc_feature (1)...(576): n = A,T,C or G
acatgattcacactattatgacgatgcttcccacactatatcttatcatgcagctaaagctactaaacacaaatcaccaccaaccaccccttacaaaaacccccacccttcagtctcacaatgtccgnnnnnnnnnnnnnnnnnnnnnnnnnnnnnnnnnnnnnnnnnnnnnnnnnnnnnnnnnnnnnnnnnnnnnnnnnnnnnnnnnnnnnnnnnnnnnnnnnnnnnnnnnnnnnnnnnnnnnnnnnnnnnnnnnnnnnnnnnnnnnnnnnnnnnnnnnnnnnnnnnnnnnnnnnnnnnnnnnnnnnnnnnnnnnnnnnnnnnnnnnnnnnnnnnnnnnnnnnnnnnnnnnnnnnnnnnnnnnnnnnnnnnnnnnnnnnnnnnnnnnnnnnnnnnnnnnnnnnnnnnnnnnnnnnnnnnnnnnnnnnnnnnnnnnnnnnnnnnnnnnnnnnnnnnnnnnnnnnnnnnnnnnnnnnnnnnnnnnnnnnnnnnnnnnnnnnnnnnnnnnnnnnnnnnnnnnnnnnnnnnnnnnnnnnnnaccaaaactactcaattcctatgctagtagcaatcgaa

SEQ ID NO: 36373 - DNA, 750 bp, Macaca Mulatta
  misc_feature (1)...(750): n = A,T,C or G
gggatattattttgcatctgtaactaaccgtgatcatcatttcttgtaatttcttgtacatgtatattacttgttcttaatagattttggaaacaagactttattgagatcagtttggttttcctattaatttacctgtttgactttataatgtgttttagttttgcagaagaacactgttatagtttagaaggcttttcataaatcccctcataggcaaagatgaaaacttcccactatttttttcccctcttaggaagacatactggaaagaaaatgtttaacatcttagtgtagtatagctattgtaaacagttcatgactagattttgattcggaaatctatactgaccaaggattaatcttaaggattgtataaatcattaaagctgtggtcttttcatgtggagattgatagaaaatatttttgtcccatgtcttatttgctgactttttctgtcaatgagtgagattgttgaacaaactgaatatatgggctatagcaagtagctttacagtacagatcttacaattaagttttactttttgttaaagtgtgtaccattttttcgtttggagtaagacaaaaaatgttttcacatangttccctagggtatacttgctctagcatactttaaagggccactgttgcaagtctacattttatgctggaatctgcattnctgtcaaggcacgcatagaaaagaccctcagtacatggcttttgcactcctcctttttgctccctt

SEQ ID NO: 36374 - DNA, 655 bp, Macaca Mulatta
ctttgcctggctacttgagtagaatgcattataccagatctggtcattttcattgaaatggtttctaattttctttccaagtgctgttgggtttttttctttttaaggaaaacgtgatcacttttatgttataaacttgaatttataaagtgctagtaaattattttaaatgatttgagtgcatgttttaaacctctaagaccagagcatagtcatagcattttcttttaaattgtgcactaacaaaatgctatataatttgtcttctgtccaagatctcctggtttccattgtaagggatttaaccaaaatcttgctcttccataatcttactctgtgaaatagaggaatttgtgtgccttagatttagaagtgtgttctttaatagagtgtacagggctaaaagagtatttaagttaatatgtaggtttcccccatctgtactgcaattgtagagttgagttttgttagagtacaattgcaaatcttatctatataggaaaatagttaaatgtcattctgcatctctttgttttagtttactgcttccatgtgcaatcctaagcattctttgctggggcaactaaatatgtctttattagtgacttctagttcaaatgtaagaaatgttacgtgcgaaaataattttataatc

SEQ ID NO: 36375 - DNA, 965 bp, Macaca Mulatta
  misc_feature (1)...(965): n = A,T,C or G
tggggactcctgagctctactgactcccaacagagcacccaagaggaaaatggccataagtggagtccccgtgctaggatttttcatcatagctgtgctgatgagcgctcaggaatcatgggctatcaaagaagaacacgtgatcatccaggctgagttctatctgaaccctgaccaatcaggagagtttatgtttgactttgatggtgatgagattttccacgtggatatggcaaagaaggagacggtctggcggcttgaagaatttggacgatttgccagctttgaggctcaaggtgcattggccaacatagctgtggacaaagccaacctggaaatcatgacaaagcgctccaacaatactccaatcaccaatgtacctccagaggtaactgtgctcacaaacagccctgtggaactgggagagcccaacgtcctcatctgtttcatcgacaagttctctccaccagtggtcaaagttacatggcttaaaaatggaaaacctgtcaccacaggagtgtcagagacagtcttcctgcccagggaagaccaccttttccgcaagttccactatctccccttcctgccctcaactgaggacatttatgactgcaaggtggagcactggggcttggatgcacctcttctcaagcactgggagtttgatgcaccaagccctctcccagagactacagagaacgtggtgtgtgccctgggcctgattgtgggtcttggtgggcatcatcgttgggacctgtctttcatcatcaagggtgtgcgcaaaagcaatgctgcagaacgcaggtggcctctgtgagacatatgcagtgacgggttcttagagaaacactctgagaactccgcgtacgactcccagctggacatccacctgacccaggagacggagatttcatcgaagactcacnaggggattcatacgagantaaatacgcgcgacaattaat

SEQ ID NO: 36376 - DNA, 331 bp, Macaca Mulatta
tttttaatagttctggacttatttcctcttcttgcaaatgctgccatgtctgtgaagccaatattgctcagtttgtatgagatatattatctgcctttgggtaaaacactgaaacctggtctacagggattgcttactggtattcttcctggcttagaagaaggatcagagtactatgagaggtaagatcatatttggtgcagttatgtaattgaagtcatggatttgtcagtaagcatatttaggtaaaatatgttttagcatcacgaatgaattattctagacagttcagtatatcacatgaatatttctatagcaatgaaacattata

SEQ ID NO: 36377 - DNA, 2459 bp, Macaca Mulatta
  misc_feature (1)...(2459): n = A,T,C or G
gcagccaaccccagagaggcagacgggatggctagttcagcccgggagcacctactttttgtgcggcgtcgaaatccccagatgcggtacacgctgagcccagagaacctccagagcctcgccgcccagagctccatgccagagaacatgaccctgcagcgggccaacagcgacannnnnnnnnnnnnnnnnnnnnnnnnnnnnnnnnnnnnnnnnnnnnnnnnnnnnnnnnnnnnnnnnnnnnnnnnnnnnnnnnnnnnnnnnnnnnnnnnnnnnnnnnnnnnnnnnnnnnnnnnnnnnnnnnnnnnnnnnnnnnnnnnnnnnnnnnnnnnnnnnnnnnnnnnnnnnnnnnnnnnnnnnnnnnnnnnnnnnnnnnnnnnnnnnnnnnnnnnnnnnnnnnnnnnnnnnnnnnnnnnnnnnnnnnnnnnnnnnnnnnnnnnnnnnnnnnnnnnnnnnnnnnnnnnnnnnnnnnnnnnnnnnnnnnnnnnnnnnnnnnnnnnnnnnnnnnnnnnnnnnnnnnnnnnnnnnnnnnnnnnnnnnnnnnnnnnnnnnnnnnnnnnnnnnnnnnnnnnnnnnnnnnnnnnnnnnnnnnnnnnnnnnnnnnnnnnnnnnnnnnnnnnnnnnnnnnnnnnnnnnnnnnnnnnnnnnnnnnnnnnnnnnnnnnnnnnnnnnnnnnnnnnnnnnnnnnnnnnnnnnnnnnnnnnnnnnnnnnnnnnnnnnnnnnnnnnnnnnnnnnnnnnnnnnnnnnnnnnnnnnnnnnnnnnnnnnnnnnnnnnnnnnnnnnnnnnnnnnnnnnnnnnnnnnnnnnnnnnnnnnnnnnnnnnnnnnnnnnnnnnnnnnnnnnnnnnnnnnnnnnnnnnnnnnnnnnnnnnnnnnnnnnnnnnnnnnnnnnnnnnnnnnnnnnnnnnnnnnnnnnnnnnnnnnnnnnnnnnnnnnnnnnnnnnnnnnnnnnnnnnnnnnnnnnnnnnnnnnnnnnnnnnnnnnnnnnnnnnnnnnnnnnnnnnnnnnnnnnnnnnnnnnnnnnnnnnnnnnnnnnnnnnnnnnnnnnnnnnnnnnnnnnnnnnnnnnnnnnnnnnnnnnnnnnnnnnnnnnnnnnnnnnnnnnnnnnnnnnnnnnnnnnnnnnnnnnnnnnnnnnnnnnnnnnnnnnnnnnnnnnnnnnnnnnnnnnnnnnnnnnnnnnnnnnnnnnnnnnnnnnnnnnnnnnnnnnnnnnnnnnnnnnnnnnnnnnnnnnnnnnnnnnnnnnnnnnnnnnnnnnnnnnnnnnnnnnnnnnnnnnnnnnnnnnnnnnnnnnnnnnnnnnnnnnnnnnnnnnnnnnnnnnnnnnnnnnnnnnnnnnnnnnnnnnnnnnnnnnnnnnnnnnnnnnnnnnnnnnnnnnnnnnnnnnnnnnnnnnnnnnnnnnnnnnnnnnnnnnnnnnnnnnnnnnnnnnnnnnnnnnnnnnnnnnnnnnnnnnnnnnnnnnnnnnnnnnnnnnnnnnnnnnnnnnnnnnnnnnnnnnnnnnnnnnnnnnnnnnnnnnnnnnnnnnnnnnnnnnnnnnnnnnnnnnnnnnnnnnnnnnnnnnnnnnnnnnnnnnnnnnnnnnnnnnnnnnnnnnnnnnnnnnnnnnnnnnnnnnnnnnnnnnnnnnnnnnnnnnnnnnnnnnnnnnnnnnnnnnnnnnnnnnnnnnnnnnnnnnnnnnnnnnnnnnnnnnnnnnnnnnnnnnnnnnnnnnnnnnnnnnnnnnnnnnnnnnnnnnnnnnnnnnnnnnnnnnnnnnnnnnnnnnnnnnnnnnnnnnnnnnnnnnnnnnnnnnnnnnnnnnnnnnnnnnnnnnnnnnnnnnnnnnnnnnnnnnnnnnnnnnnnnnnnnnnnnnnnnnnnnnnnnnnnnnnnnnnnnnnnnnnnnnnnnnnnnnnnnnnnnnnnnnnnnnnnnnnnnnnnnnnnnnnnnnnnnnnnnnnnnnnnnnnnnnnnnnnnnnnnnnnnnnnnnnnnnnnnnnnnnnnnnnnnnnnnnnnnnnnnnnnnnnnnnnnnnnnnnnnnnnnnnnnnnnnnnnnnnnnnnnnnnnnnnnnnnnnnnnnnnnnnnnnnnnnnnnnnnnnnnnnnnnnnnnnnnnnnnnnnnnnnnnnnnnnnnnnnnnnnnnnnnnnnnnnnnnnnnnnnnnnnnnnnnnnnnnnnnnnnnnnnnnnnnnnnnnnnnnnnnnnnnnnnnnnnnnnnnnnnnnnnnnnnnnnnnnnnnnnnnnnnnnnnnnnnnnnnnnnnnnnnnnnnnnnnnnnnnnnnnnnnnnnnnnnnnnnnnnnnnnnnnnnnnnnnnnnnnnnnnnnnnnnnnnnnnnnnnnnnnnnnnnnnnnnnnnnnnnnnnnnnnnnnnnnnnnnnnnnnnnnnnnnnggttctcaagccaacggccaccagccactgcgatcactaccttcagtgcgccaggatgttagccggtaccagagggtggacgaggctctcccaccaa

SEQ ID NO: 36378 - DNA, 807 bp, Macaca Mulatta
  misc_feature (1)...(807): n = A,T,C or G
ggaacattatgtttctgatgtaacagaaatttcccaccaaaagttcgattccctccctaccctccttaactaaaacattgaatagaatcctgaaatttaagaactggaaaagagcatagagattatttggtcccaagcccttattttgtagatgtcttcagatataggagaaaagaataaaaatgagcaagttaattttagggacctgaaaataatttaatcacaggaggtttttggtttgaatctagtcccaaaacatttcatttgattgtgactaagacacattttctcctcactgctctattcttcaggcagaggcaactaagtgttaattatgatacagtctttgatagttactgtatcctttttccaaatgacttttactgttgtttggctgccagctaaagatggccttgtgatcttaacatattttcaatgactattctacaagaaatgtttatatattcctaaactactgtgcttattcagctgtcaagcctcagctttgtattcttctccttttaatgctattcnnnnnnnnnnnnnnnnnnagttctgaaagacaaaaactgaaagtccttcctagatactgcaactatccctgctggttttttccctgtgtgtcccttgattaagtcagttaaacacttttgacttttgtcatcagtaaaaatgaggaccatagcctatacaaaaatgggggtaattataaaaatgggaggccggccttttccaaaatatcccggttaagttggtcatttccccaattaatttccttaatggggcaaattaaaaaaatgttttttc

SEQ ID NO: 36379 - DNA, 429 bp, Macaca Mulatta
ctctctgtcccagctggagggacatgagtgtccctgggccgtcgtctccggacggggccctgacacggccaccctactgcctggaggccggggagccgacccctggtttaagtgacacttctccagatgaagggttaatagaggacttgactgtagaagacaaagctgtggagcaactggcagaaggattgctttctcattatttgccagatctgcagagatcaaaacaagccctccaggaactcacacagaaccaagttgtattgttagacacactggaacaagagatttcaaaatttaaagaatgtcattctatgttggatattaatgctttgtttgctgaggctaaacactatcatgccaagttggtgaatataagaaaagagatgctgatgcttcatgaaaaaacatcaaagttaaaaaaaagag

SEQ ID NO: 36380 - DNA, 725 bp, Macaca Mulatta
  misc_feature (1)...(725): n = A,T,C or G
gagctcttcatgtacttgaacgaagtcgcgggcaagcatggtgtgggccgtattgacatcgtggagaaccgcttcattggaatgaagtcccgaggtatctacgagaccncagcaggcaccgtcctttaccacgctcatttagacatcaaggccttcaccatggaccgagaagtgcgcaaaatcaaacaaggcctgggcttgaaatttgctgagctggtgtataccggtttctggcacagccctgagtgtgaatttgtccgccactgcattgccaagtcccaggagcgagtggaagggaaagtgcaggtgtccgtcctcaagggccaggtgtacatcctcagccgggagtccccactgtctctctacaacgaggaactggtgagcatgaacgtgcagggtgattatgagccgattgatgccaccgggttcatcaacatcaattccctcaggctgaaggaatatcatcgtctccagagcaaggtcactgccaaatagacccctatacaatgaggagctggggcctcctcaatttgcagatcccccaagtacaggcactaattgttgtgataatttgtaattgtgacttgttctccctggctggcagcatagtggggctgccaggccccagctttgttccctggtccccccgaagcctgcagacgttgtgttgtcaccgcagggaagggtggggggcagctgcggtggggagctataaaatgacaatt

SEQ ID NO: 36381 - DNA, 309 bp, Macaca Mulatta
  misc_feature (1)...(309): n = A,T,C or G
agccatattttctgctcttaagaatcttcaagataagattcgacgcttggaacttgagaggattcaggcagaagaaagtgtgaaaaccttgtctagagaaacaattgaatataagaaagtactggatgaacagatacaagaaagggagaattcaaagaatgaggaatcaaagcacaatcaagnagaactgacatctcagttgttagctgcagaaaataaatgcaatctattagaaaaacaattggaatacatgcgaaatatgataaagcatgcagaaatggagaggacatctgtgctagagaaacaagt

SEQ ID NO: 36382 - DNA, 666 bp, Macaca Mulatta
  misc_feature (1)...(666): n = A,T,C or G
caactactcagnnnnnnnnnnnnnnnnnnagatggggtctcactctgttgccccnggctggagtgcagcagcatgatctcatctcactgcaacctccatctcccaggtttgagtggtttttnnnnnnnnnnnnnnnnnnnnnnnnnnnnnnnnnnnacgtgccaccatgtnnnnnnnnnnnnnnnnnnnnnnnnnnnnnnnaggtttcgccatggttggccgtgctgctctctagnnnnnnnnnnnnnnnnnnntgccgtcctcggcttcccaacnnnnnnnnnnnnnnnnnnnnnnnnnnngcgcctggcctcagatatttttgacaataatcttggcttgggggagctatgtgtgtgtcagtcttagatgtatattcactctgcattgtatgttttattgagctataatggatgtgcagctacacgaattcttctagacatccttggacttggaagttatgctctcttggctttatcgcaggatttggccttcttggcctcagtttttcagagtagagaattttcttttggctcttctaggacatgtgcaaatgagaacttgctacaggcagatagacctgagagctcaaaaggaaatgggaaaagactagattcaatcaagtagttgtgtgatttgagtgaagtagtattaaatctggtttta

SEQ ID NO: 36383 - DNA, 669 bp, Macaca Mulatta
tcagtggcgacaggtgccgtctgtgtcctcaccttctgacaacactccccgtggccagggccaggtgggagctcgacaccaccctgtgtatccttgggtgctgctaccatccaacagggcctctccgtctgcctgcttctgcatcaccagggttccgtcttgttggggagactccctgtggcacagcaccttcaagtgtctcctgtgaacctgacaacagcaaggagagaactggtacttgtgagggccagatgaaggcccggtccttgtccagcagtacctggtccccctcacagtcctggaggagtggctgtgcacagggaggcagaagcagaggtgtcccgtgagccagagagtgcggattcctgacagtccgggcagtgcgagctccccagctagcgctcaacaagcatgtttcgcagtctgctcagggctcacaattaacaggactgtgccacccttgactgcgtctggaggtatttgtcatcatggacagtatgctggaatcctacattaattgccaagagtgcacaccacgaatggatattcagtttcatcaaaggctttcctgtatctatcaaaatcatcaaatgcctttcctccttggacttattaatgtgttgacttattaactcttatgagctaaatcatcctcttgttcctggaata

SEQ ID NO: 36384 - DNA, 591 bp, Macaca Mulatta
acagattgagtgtctctgtggttttggtgaccctgcttaagcattcccaccgtgtcccagctctgctctaggactacctcccactgtggcccctcacctgacctcagggcatggggagggagggagccagtgctccaaggccagggggctttgctcatgagagatgtcaggcttcctggaggcatcaggctttgagccctgctggggtccagctgacctgggaccaggtgtcgcacagagatgtgcctcattgtgtgcctcctgccgtgttcactttaactgtgcctcagtgtgggttagggaacaattgtgttattgtattaagtttattcagttaattcacttgaggaactaaccaagttttactttctgtctagaatgatgtacatgtagtagagtaagccataatgctcccgaagtgccttgttttctctgatacaaacatatttataaggacgtattccagtgggttcatgggtgtgtttgccacatcaagattttagggaatgcgtgtatgtgtagtacggacgctgtctgaaaacaggccctcttcccttgacgattcgaaaggagttcttcagttggagatct

SEQ ID NO: 36385 - DNA, 772 bp, Macaca Mulatta
  misc_feature (1)...(772): n = A,T,C or G
gggcagttttcttatcttttagttttttaggatgtttttaaaaataaccctgaacttattaaaattttatataattaattgatttcnnnnnnnnnnnnnnnnnnnttcgaagtatttagaaactcttctagtataaggttttggaaaacactagaagggggcacactttttaaaagcaggtgaccccagggcaaacttgtatcctcactgaactactgcagctgatgctttcttgaaagcagcacctcctggctggaggccaaccaacacactaaagaaaactacacacaaggaccctcacagagtccacttcactcctgtcctatctctactggagcaagtgctggtacccatggctgagagacctgaagacagatcacatcacaggactcatcacaaacactccccaataccagcctggagtccagcagctctgctgggtggctagacccagaaaagaaataacaattatggcagtttggctctcaggaagccccatccctaggggaagtgggaagagcaccacatcaagggagcacccttgtgggacaaaagaatgtgaataatagccctttgagctagatcttccctctgaaatagtctcccccagtgagaaagaaccagaaaaaacaattctgggtaatatgaccaaaaaccagattgttttaacacccccccaaaagaaaacacaactagccttcacccaagcaagtgggaatcccaaaattggaaggaaagaaaaatccttcctgaaatttggccccccaaaaac

SEQ ID NO: 36386 - DNA, 506 bp, Macaca Mulatta
ccttctggaggtaaatctgcagaatggcattttgtttgtgaattctcggatcgaccgggaggaactgtgccggcggagcgcggagtgcagcatccacctggaggtgatcgtggacaggccgctgcaggtttttcatgtggaggtggcagtgaaggacattaatgacaatccgcccaggttctccaggcaagaacaaagattgttcattttagagtcaagaatgccagattcgcggtttccagtagagggcgcgtcggatttggatatcggagcaaacgcacaattgagatacaggttaaatcctaacgaatattttgacttagatgttaaaacaaatgaagaagaaacgcactttttagagctagttttgaggaaatccttagatagagaagaaacacaagaacatcgtttattagtgattgcaactgatggaggacaacccgaactaacaggtacagttcagttgtcgatcaatgtattggatgctaatgataacgccccagaaa

SEQ ID NO: 36387 - DNA, 2030 bp, Macaca Mulatta
  misc_feature (1)...(2030): n = A,T,C or G
nagctactctggcttggctgaggtcttcctaaataatcaacatccctcaacagccttggcggtgagaaggcatgtgaaagctgccagcacatcccaggagccttggctgtggcggcttgtccttggaaagctcccggcacccttctgccagggatcccgtcctgcagggatgacagacccagcagtcccggcagagggcatgaggctccggcagctccatcagcaagtggccaggcccagccctgagccagagactgtcagaaggggacaatggtaaggagagagctgggctcagggtctggagcnnnnnnnnnnnnnnnnnnnnnnnnnnnnnnnnnnnnnnnnnnnnnnnnnnnnnnnnnnnnnnnnnnnnnnnnnnnnnnnnnnnnnnnnnnnnnnnnnnnnnnnnnnnnnnnnnnnnnnnnnnnnnnnnnnnnnnnnnnnnnnnnnnnnnnnnnnnnnnnnnnnnnnnnnnnnnnnnnnnnnnnnnnnnnnnnnnnnnnnnnnnnnnnnnnnnnnnnnnnnnnnnnnnnnnnnnnnnnnnnnnnnnnnnnnnnnnnnnnnnnnnnnnnnnnnnnnnnnnnnnnnnnnnnnnnnnnnnnnnnnnnnnnnnnnnnnnnnnnnnnnnnnnnnnnnnnnnnnnnnnnnnnnnnnnnnnnnnnnnnnnnnnnnnnnnnnnnnnnnnnnnnnnnnnnnnnnnnnnnnnnnnnnnnnnnnnnnnnnnnnnnnnnnnnnnnnnnnnnnnnnnnnnnnnntgcgcttacggcagctagtggtggggggatgaaacagaaatagtggagctctgggttcactacaaagcacaagatgccaaacacagacccactcccctgccaccatacatcttcctgggccctccaatggcctgtgtctgaggagttccacagctgtctgctgcgttgtgattccaacgtgagctcgagccnagccaagccacacccttggaaagttggcattataatatgtcaccaccaggaattttgaccaagttcgtagtaagcctttctccactctcagaaagcttacacagttctcccagaggcagagccttacccatctaactcaactgaacacaaactcaactaaacatgtcagaacatctgcagccttaaaataattgttttgggtttccaacccttcttctttaagtcgactggtgtgctaattatcgacttgcacaccaatatgatgtatttgtctctactatgatgtattctctaaatctcccagacccaattcaggacaaagctaccaggaaagcaactgctttaaatgatctgctaagcaaactgaccagcatctccgctgccattgtcttctccctgctgaagatggcctcactgtgtgaataactgatcctgtttgtggcagaattagcttagtttttaaggaactgttttttcttttcctagaagagaagaggggcccctttccagctatacatctccaccaaaaagacttgcctttcccttgccagatctaaggacacaggcctggggtctgccacaaactgcaaagtaccatgtctcccacagcatgttccagaatccccgtccatagatgctctnnnnnnnnnnnnnnnnnnnnnnnnnnnnnnnnnnnnnnnnnnnnnnnnnnnnnnnnnnnnnnnnnnnnnnnnnnnnnnnnnnnnnnnnnnnnnnnnnnnnnnnnnnnnnnnnnnnnnnnnnnnnnnnnnnnnnnnnnnnnnnnnnnnnnnnnnnnnnnnnnnnnnnnnnnnnnnnnnnnnnnnnnnnnnnnnnnnnnnnnnnnnnnnnnnnnnnnnnnnnnnnnnnnnnnnnnnnnnnnnnnnnnnnnnnnnnnnnnnnnnnnnnnnnnnnnnnnnnnnnnnnnnnnnnnnnnnnnnnnnnnnnnggctgacctacaaaaacctgacattacggcattgaattaaaccagtgggtttatccccatgagaagtcatggctaaactacgcatagaaaaggactggaaagaaacattaacagtgactatctttgcacagtggaac

SEQ ID NO: 36388 - DNA, 672 bp, Macaca Mulatta
  misc_feature (1)...(672): n = A,T,C or G
agctagctgctaatactcagntttagctgttatgatagctgaagtgatagttcttatactttcattacttactttttggcagctttcaatgaactcatctatggtaacaaccccatctttatttttgtccattttctgttcaggaagaaaacaaaaaattatatttagccttatatcccttaataccctcacacctgcaccaaatgagctgaagctgataaaaagaaaacctagctgcttatttcacatggaggaactgtttcagagcagaaaccagtagtttcttagagataaaaatgatagggccaaatcctgctggctgttcaatatgatgtggtgaagatttagagtcactctgtcctaggtaaaatcctaccttttagatatgacagctcggccaatttgctgaaactttcagagcttgctttctttttgtctcatctgtaaaatgggattaatgaggatttataggattcttgtaaaaactgaatgaaaacaaaacttgtgaaatatgagaattgtttaaatgttgtatcttggatttagagaatgttcaatgagtgtagttatcagcattgcaaattcaaatccaaagctattaaattaatgggatggtaaatactgttttgtctcagtaaaaattattttcctttgcttccttttgaatcatcg

SEQ ID NO: 36389 - DNA, 657 bp, Macaca Mulatta
cagaggtatggcagttactggcaggctgccatgacaaccaggcaatgctggatagataccgaattcttatcacaaaggtaggaagttatttcatattattttcattggatgacctattaaataaatcctagttttcatagctcccgtaagccataaatgctttgaacttcttcatgaatatattgaggtcatgaagtcagtacttctaccttttgttctgaatacttgtggtggtaaacaatgcacttagtcatctatgaatactgtatgccttggttttcatcttttcattcaagtgattttataatagctatttaccaaattggaatatatttatatttcaagtgttttctaacttctcaacctttttaaattctatgagatttatatagttataatcatacatagttactctattatagttttataataacattaaaatgaaataaaaaattcttctgtgtttatgtcacctaacatttaaatgatgtagatacttgccctttttctgtcaggggcctttggtttcactgtaaattcctttgcttatgtctaaatacctggttttagagcataagtaaaggtaagtgttggccttgatcctagactcaccaccctaggtctcaccacctaattacttagtctactctaaatact

SEQ ID NO: 36390 - DNA, 764 bp, Macaca Mulatta
  misc_feature (1)...(764): n = A,T,C or G
gggagagaaagctctggtgtttcttcctcttcttataaggtcactgatcccaacatggggcctccacactcatggcttcatctatccctgaccacctccccatctcctaataccatcccattggggttagtgcctcaacatatgagttttggggggacacagttcagtccatagcagcaggagtgataattaggaaagggagagggattattggtcttgttgcctcgatgtggttatctgggcttgcttgtgtcctcacttaagctgaaatgtttttatttctctctgtcttttaaagcagtccacgtggacttgttaggtactccgtatttgttgaatccaagagagatcatagctttatggggcctgaagcacgtgtagtttgaggggttgcttttatgacaagtaacaaaaaatacaaatacaaacaaactagggcttcttccaggagcctttggaaggccacaaagctttagtttcattaggttcatggtagttctggttggctcnnnnnnnnnnnnnnnnnnnnnntaatgtttatttaccatttttcaaatattggcagtaatatcgttcaccatagaaagtttagaaaatacagatgagccaaagcacctgccctgatttcataattctgtaacaatcactgttaatattgtagtatgcctgaagtgttttgaatgctggatgcgcatgttttcacatttcacactgccaggcctggatgcttctttacatagataccgtcgcatttatggcgcatc

SEQ ID NO: 36391 - DNA, 808 bp, Macaca Mulatta
atcagtggcaagaggcacaattcttaacaagcacagtcttcaagaaatttaactggcaagtggaaatgtttaacagttcagtgatctttagtgcattgtttttgtgtgggtttctctctcccctcccttggtcttaattcttacatgcaggaacactcagaacagcaaacataacctatgcgaagggccagagaagccagacccagtaagaaaaaatagtctatttactttaaataaaccaaacattccattttaaatgtggggattgggaaccactagttctttcagatggtattcttcagactatagaaggagcttccagttgtgaattcaccagtggacaaaatgaggacaacaggtgaacaagctttttctgtatttacatacaaagtcagatcagttttgggacaatagtattgaatagaattcagctttatgctggagtaattggcatgtgagcaagctgtgttgtcgtgggggtggaggggtgaggtgggcgctaagccttttttttaagatttttcaggtacccctcactaaaggcaccgaaggcttaaagtaggacaaccatggagccttcctgtggcaagagagacaacaaagcgctattatcctgaggtcaagaaaagtggtgtcagcctcacctgatttttattagtaatgaagacttggctcaactctttctggagtgaagcattccaaggaatgcttgaagtacccctgggagtctcttaacacttaagcagctgttttataaacagctcttaataaagggcaaaatccaacgagcttcaagggacggaaacgg

SEQ ID NO: 36392 - DNA, 950 bp, Macaca Mulatta
  misc_feature (1)...(950): n = A,T,C or G
gggttacctggaacatttttatgatttgttcctgataagtattttttggcaagtatcaagaggtctccaaataagttaattgaacaactttctttctattaatgtgtcctacaatgggtatgttacttattagtatgtttttaaactgaattttcactgctttgtatatacatacatatctttgggcattattcaactttttctaatcaagtacatcagtggtcccttgccccatctgtctacccgacctcatcaatccctttgtctaggggaagccactttcagatctttgaaacctcagcaattctaatacgtaaaaccatggtccacagttacattattatgactgtaaaatattgcttactgctgaattaagtagtataaataattgtttatttggtaacttaaaatttttcctgtggttaattattgctaatattgtggttttcccttgagtgttccgaaatgcctgatttaaattccttctcccaaaatctaacaaatgaaaacttggtaaaaaaaaccttaattttttttattaaccatttagctactaaaaatggtcaattaaataaatccccacattttaaatttttccaataatttccttcccccaaaccaagaaaaatattttcgtttgaacacaatccgaccccgtattataaaaccagattcatagaataacaacatttttctctctaaaagacaaaatttcaaacaacttttttttgaaataaataagaattcttgtctcataacccttaaatactttgaaacgcacacacatttgtcaccgcaantactacctcanttaccaagttgactaatcataatacgttagaaaaaacagtgtgcgtaccggggcgagccccctatgaggtgcactattcgcagaaataaaggaatatatttataacacaccatatacacgcctttgcgcaatacccgcc

SEQ ID NO: 36393 - DNA, 772 bp, Macaca Mulatta
  misc_feature (1)...(772): n = A,T,C or G
ggagatcgaaaatacacacacatacataccnnnnnnnnnnnnnnnnnnnnnnagtggtatttccagtgtctctgtgtcactgttgatgcagtttccatttcccagtgaattacgagtggagggcaacttttctagccagattgtcctttcagaacaaaggcctggaaattgaggaagagtttggaaagagggagaggcaaggaaagagagctttaaattgaaagattaatgtcccaagaggaacctgagctgaatgactacagtgctataccctccaatctttgcaggtgggcatggaacactgcttgtatcactctctgcatgatataaatccgtatatccacaaatacatccatccgtcaacatatacatggtttgggatgagcaggtcaatagttttgagaaggagtttgnnnnnnnnnnnnnnnnnnttatactcttaaattgttgtcagttatcaaacaaacaaacagaaaaattgtttggaaaaaccttgcatacgccttttctatcaagtgctttaaaatatagactaaatacacacatcctgccagttttttcttacagtgacagtatccttacctgccatttaatattagcctcgtatttttctcacgtatatttacctgtgacttgtatttgttatttaaacaggaaaaaaacattcaaaaaaagaaaaattaactgtagcgcttcattatactattatattattattaattattggtgacatttttgggaatactgtggaaagttttattctcttggcata

SEQ ID NO: 36394 - DNA, 810 bp, Macaca Mulatta
  misc_feature (1)...(810): n = A,T,C or G
gggaggcattgaggcagccagcacaggggtttctgctgaagtggcaggcgcagcttgaggaacccgcagataagttttctctctttgaaagacagagattaatacaactacttaagaaatgtagtcagtagcttactaagattttgcttagcattaggttcttaacgtaatttgaataagattttaagagaaaatatgaagagttaaaagtgtagcgtgagnnnnnnnnnnnnnnnnnngtttctaaaacatgacggaggttgagacgaagcttcttcaagaagtaaaaaaatgtatttaaaagaaaattgagagaagggacgccagagccctgaattaataccagtagaagggcagtgcttttagattaaaatgaaggtggatttaaacagagcttaaacgttgtttgaaaagttgtaggtgattaaaataatttgaaggcgatcatttgaaatgagattaaatccaaggtcattaaaagaccttgaactccatgacgcagggagacttgccgccccttttaagcctattccatcttacggcgcctggctcatccccgaaccaacacacaggcaaaaactccttgggcacgtggcccgggatgaaactacccccgaccaacgatcccacctcccctaagcccggtaatacccccccatttaataccccccgggaccgtcttttgtaacccccctttttagatccttccgggcgaccctttcgccactaatacgccaccgttgttttgtcactgcacggcgacgggacctgaccctttgtatacccctctagccacccgccgcctacccc

SEQ ID NO: 36395 - DNA, 697 bp, Macaca Mulatta
  misc_feature (1)...(697): n = A,T,C or G
ggcactgcaccacaactcaatatgaaaaaaactatttaacttatttattatcttgtgaaaagtatacaatgaaaattttgttcatactgtatttatcaagtatgatgaaaagcaatagatatatattcttttattatgttaaattatgattgccattattaatcggcaaaatgtggagtgtatgttcttttcacagtaatatatgccttttgtaacttcacttggttattttattgtaaatgagtacaaaattcttaatttaaagagattgtatgtaatattttattttcattaaatttctttcccttggttaacgtaaatttttgaaaaaaattgcaatgaattttccttgaaccgaaaaaacctaatccttggaaagcctgtgggaaaatttattttttgaagaaaacactcccttattggannnnnnnnnnnnnnnnnnnnggggataaaaagggttttttaaacccccatcccccnnnnnnnnnnnnnnnnnnnnnnnnnnnnnnncccccccctattcttttttggcaaaacccacggggtctgaaaaaaagggtgggggaaagggcgcctttttttctaaaaattccccccnnnnnnnnnnnnnnnnnnnnnnctannnnnnnnnnnnnnnnnnnnngnnnnnnnnnnnnnnntataattcctcccccccccccaagtttctctctccccg

SEQ ID NO: 36396 - DNA, 942 bp, Macaca Mulatta
  misc_feature (1)...(942): n = A,T,C or G
ggataagtattttattagtgcttgagagaatctgaatgtaggatgggttcaactgcacaaaaggaaaagacttttaccactttttttatatagatataaagtgaagcgaccgcctcttagtgctgaaatatgtagtacacaaatatgccttgtttaattacagaaaattccaaaacttgtactattttttttttttccgtgtagaaaggtaggaatgtttcctaagctttcctggacagcagatgaatgagcggtagctttagtttgtacgtaggtacagttggagcactatatgtactctctggactactttgacagaagtaggtttttgaatgtaacaagataagtcaacttgagttgtaatatattttggggaatcagttcactacaaattgtgactgtaaacattgtactgtaaatgttttgtagttttcccccaataaaatttttggcnnnnnnnnnnnnnnnnnnnnnnnnnnnnnnnnnncggnnnnnnnnnnnnnnnnnnnnnnnnnnnnnnnnnngggctggcctcggcccttgaaaatttttaaaaaccctccctttggcccgcgggcccaggaggaaagggaaaatggacataggctgtttccttaggacatccgagtccctgcctaagggcttgggattcccccccattaaaaaaatcccccggggggcaaccggagagcttcttgaataaattcccaaatggaaattctcgaaaggccataaacgtggaaccttggcaccccgggaaccccaagccgcaccccccaaatatccaaatttatgggncttgggccctgggccaccttgatgagaaaaaacggggtggaaagtttctattataaactattttcggccctaaacgggggaaacccgcttacacccaaacggggcaatggagagaaacccctgaaaatcccccaaagggggcca

SEQ ID NO: 36397 - DNA, 787 bp, Macaca Mulatta
  misc_feature (1)...(787): n = A,T,C or G
ggacaaacattctgtttttcactttcagtacagtagtcaattaattacctaagatattcaagactttattatcagataggctttctgtcagatgattttgcccaactgtagtctaatgtaagtgttctgagcatgtttaagtttggctagactaagctatgatgtttggtagactagatgtatgaaatgcattttcaacttgtgatattttcttatttaaaatggattcattgggatgtaacccagtaataacttgaggagcaactgtgtttgaataaattacagtatatagaaaaggcaatactcaaaactcatcatgttataataactgtactatgttttaccattatctatgcttctgcaactatttacatatattgtgtctgtatgatgacaatactatataatgaggtgctactgcacatttctttccaaacctgcattctatgatgtgatgttggtggcttgaaattggctttccgctacagtaaccaaaacagcatggtactaatagaagaacagaaacatagaccaatggcacagaatagagaactcagaagtaagtctgcacacctacaaccatctgatctttgacaaacctgacaaaaacaagcaaatagggacagggatttctcattttaataaaagggtggctggggaaaaccctggctgggttatattatagaaaaattggaaacctgggaccccttttccttttattacccatataagaaagatcccaactccaaggacaggatttnaaaggacctttaaaatgttaaaaact

SEQ ID NO: 36398 - DNA, 95 bp, Macaca Mulatta
atgattattcagagacaaactagaattaaagaatctttctttccatgattattcagtccatttagatagaagagacactgatcaaaagtcgtgag

SEQ ID NO: 36399 - DNA, 787 bp, Macaca Mulatta
  misc_feature (1)...(787): n = A,T,C or G
ggnnnnnnnnnnnnnnnnnnnnnnaagtgagctaccatgcctggcccgtattgatctaccttttctctcaacttcttatctcattatctgagtcttaactgttttctttgtttcagtattgtctgcccaaataaatgattcttgaggagagagatcgtatcacatacttctttaaattctcacagtacccaacaccttcccattcctactactaagctatcaacacaggtttatatgaaaaaaggactctaatttttagcaatcttcttttaagtcccatacgctgtgacctaactctcgcttccctctatagaagcctgttaagtattgcttaaataacctcaagatcttttcattttctaacccaatcattttttaaacacttttattcataatacatctttccnnnnnnnnnnnnnnnnnnnncaggttcccatcaaaatctatttcatgggattttaatagatgacagaagaaaaaaatctcagtctgagttcagaaaacatggaaatagtggttttttaatgtaatatcttactgggacttacaatccatagaaagtatttcagaaaatgatgcatttaagtagtattggaatctctccattgcaatttggattttggggatttaatatattcccccagattctagaaaaagctaaatttaattcctaaaagaaaaaagtaacccaaaaccacatggataaaaatgatggattgcccattatagaaaaaagtatctttccattagatgcctgggataaaaaatttgggggaaaccccattac

SEQ ID NO: 36400 - DNA, 5279 bp, Macaca Mulatta
  misc_feature (1)...(5279): n = A,T,C or G
gtttccgaggaggcctggatgtgacccacggacagacgggggtggaatcagtgtacacgacattccgggacagggagatcatgtttcatgtttccacaaagctgccatttaccgagggagacgcccagcannnnnnnnnnnnnnnnnnnnnnnnnnnnnnnnnnnnnnnnnnnnnnnnnnnnnnnnnnnnnnnnnnnnnnnnnnnnnnnnnnnnnnnnnnnnnnnnnnnnnnnnnnnnnnnnnnnnnnnnnnnnnnnnnnnnnnnnnnnnnnnnnnnnnnnnnnnnnnnnnnnnnnnnnnnnnnnnnnnnnnnnnnnnnnnnnnnnnnnnnnnnnnnnnnnnnnnnnnnnnnnnnnnnnnnnnnnnnnnnnnnnnnnnnnnnnnnnnnnnnnnnnnnnnnnnnnnnnnnnnnnnnnnnnnnnnnnnnnnnnnnnnnnnnnnnnnnnnnnnnnnnnnnnnnnnnnnnnnnnnnnnnnnnnnnnnnnnnnnnnnnnnnnnnnnnnnnnnnnnnnnnnnnnnnnnnnnnnnnnnnnnnnnnnnnnnnnnnnnnnnnnnnnnnnnnnnnnnnnnnnnnnnnnnnnnnnnnnnnnnnnnnnnnnnnnnnnnnnnnnnnnnnnnnnnnnnnnnnnnnnnnnnnnnnnnnnnnnnnnnnnnnnnnnnnnnnnnnnnnnnnnnnnnnnnnnnnnnnnnnnnnnnnnnnnnnnnnnnnnnnnnnnnnnnnnnnnnnnnnnnnnnnnnnnnnnnnnnnnnnnnnnnnnnnnnnnnnnnnnnnnnnnnnnnnnnnnnnnnnnnnnnnnnnnnnnnnnnnnnnnnnnnnnnnnnnnnnnnnnnnnnnnnnnnnnnnnnnnnnnnnnnnnnnnnnnnnnnnnnnnnnnnnnnnnnnnnnnnnnnnnnnnnnnnnnnnnnnnnnnnnnnnnnnnnnnnnnnnnnnnnnnnnnnnnnnnnnnnnnnnnnnttcatgaagttgaaggagaacggccgcgccatctcccgctcctcctccagcaccagcagcgtcannnnnnnnnnnnnnnnnnnnnnnnnnnnnnnnnnnnnnnnnnnnnnnnnnnnnnnnnnnnnnnnnnnnnnnnnnnnnnnnnnnnnnnnnnnnnnnnnnnnnnnnnnnnnnnnnnnnnnnnnnnnnnnnnnnnnnnnnnnnnnnnnnnnnnnnnnnnnnnnnnnnnnnnnnnnnnnnnnnnnnnnnnnnnnnnnnnnnnnnnnnnnnnnnnnnnnnnnnnnnnnnnnnnnnnnnnnnnnnnnnnnnnnnnnnnnnnnnnnnnnnnnnnnnnnnnnnnnnnnnnnnnnngggaagcccctcttctgtcctggaaaaggctcctgttccagcagtttgggagtgccgccgatgaccctgacagtcccagccccgccgccccccggccacctgcccacagacgtgctgtcggtcccggtgtcccagtctggccacaaccctgcctccaccctcatctacatgccctcccagcacctcccatctctgggcgaggccttcttcctcagattcctcccgctcctgacctcccagtgtgatgtccgggtcgtttattatcctgttcggcctggagaggaaaagagagttgggcaaagggggatctcgggggagctcagcagtgactggggagctggtctgcctcagagacggagttgggggcgggagcagagcctcggtgagggtcttggccatgggtcagtgccttcnnnnnnnnnnnnnnnnnnnnnnnnnnnnnnnnnnnnnnnnnnnnnnnnnnnnnnnnnnnnnnnnnnnnnnnnnnnnnnnnnnnnnnnnnnnnnnnnnnnnnnnnnnnnnnnnnnnnnnnnnnnnnnnnnnnnnnnnnnnnnnnnnnnnnnnnnnnnnnnnnnnnnnnnnnnnnnnnnnnnnnnnnnnnnnnnnnnnnnnnnnnnnnnnnnnnnnnnnnnnnnnnnnnnnnnnnnnnnnnnnnnnnnnnnnnnnnnnnnnnnnnnnnnnnnnnnnnnnnnnnnnnnnnnnnnnnnnnnnnnnnnnnnnnnnnnnnnnnnnnnnnnnnnnnnnnnnnnnnnnnnnnnnnnnnnnnnnnnnnnnnnnnnnnnnnnnnnnnnnnnnnnnnnnnnnnnnnnnnnnnnnnnnnnnnnnnnnnnnnnnnnnnnnnnnnnnnnnnnnnnnnnnnnnnnnnnnnnnnnnnnnnnnnnnnnnnnnnnnnnnnnnnnnnnnnnnnnnnnnnnnnnnnnnnnnnnnnnnnnnnnnnnnnnnnnnnnnnnnnnnnnnnnnnnnnnnnnnnnnnnnnnnnnnnnnnnnnnnnnnnnnnnnnnnnnnnnnnnnnnnnnnnnnnnnnnnnnnnnnnnnnnnnnnnnnnnnnnnnnnnnnnnnnnnnnnnnnnnnnnnnnnnnnnnnnnnnnnnnnnnnnnnnnnnnnnnnnnnnnnnnnnnnnnnnnnnnnnnnnnnnnnnnnnnnnnnnnnnnnnnnnnnnnnnnnnnnnnnnnnnnnnnnnnnnnnnnnnnnnnnnnnnnnnnnnnnnnnnnnnnnnnnnnnnnnnnnnnnnnnnnnnnnnnnnnnnnnnnnnnnnnnnnnnnnnnnnnnnnnnnnnnnnnnnnnnnnnnnnnnnnnnnnnnnnnnnnnnnnnnnnnnnnnnnnnnnnnnnnnnnnnnnnnnnnnnnnnnnnnnnnnnnnnnnnnnnnnnnnnnnnnnnnnnnnnnnnnnnnnnnnnnnnnnnnnnnnnnnnnnnnnnnnnnnnnnnnnnnnnnnnnnnnnnnnnnnnnnnnnnnnnnnnnnnnnnnnnnnnnnnnnnnnnnnnnnnnnnnnnnnnnnnnnnnnnnnnnnnnnnnnnnnnnnnnnnnnnnnnnnnnnnnnnnnnnnnnnnnnnnnnnnnnnnnnnnnnnnnnnnnnnnnnnnnnnnnnnnnnnnnnnnnnnnnnnnnnnnnnnnnnnnnnnnnnnnnnnnnnnnnnnnnnnnnnnnnnnnnnnnnnnnnnnnnnnnnnnnnnnnnnnnnnnnnnnnnnnnnnnnnnnnnnnnnnnnnnnnnnnnnnnnnnnnnnnnnnnnnnnnnnnnnnnnnnnnnnnnnnnnnnnnnnnnnnnnnnnnnnnnnnnnnnnnnnnnnnnnnnnnnnnnnnnnnnnnnnnnnnnnnnnnnnnnnnnnnnnnnnnnnnnnnnnnnnnnnnnnnnnnnnnnnnnnnnnnnnnnnnnnnnnnnnnnnnnnnnnnnnnnnnnnnnnnnnnnnnnnnnnnnnnnnnnnnnnnnnnnnnnnnnnnnnnnnnnnnnnnnnnnnnnnnnnnnnnnnnnnnnnnnnnnnnnnnnnnnnnnnnnnnnnnnnnnnnnnnnnnnnnnnnnnnnnnnnnnnnnnnnnnnnnnnnnnnnnnnnnnnnnnnnnnnnnnnnnnnnnnnnnnnnnnnnnnnnnnnnnnnnnnnnnnnnnnnnnnnnnnnnnnnnnnnnnnnnnnnnnnnnnnnnnnnnnnnnnnnnnnnnnnnnnnnnnnnnnnnnnnnnnnnnnnnnnnnnnnnnnnnnnnnnnnnnnnnnnnnnnnnnnnnnnnnnnnnnnnnnnnnnnnnnnnnnnnnnnnnnnnnnnnnnnnnnnnnnnnnnnnnnnnnnnnnnnnnnnnnnnnnnnnnnnnnnnnnnnnnnnnnnnnnnnnnnnnnnnnnnnnnnnnnnnnnnnnnnnnnnnnnnnnnnnnnnnnnnnnnnnnnnnnnnnnnnnnnnnnnnnnnnnnnnnnnnnnnnnnnnnnnnnnnnnnnnnnnnnnnnnnnnnnnnnnnnnnnnnnnnnnnnnnnnnnnnnnnnnnnnnnnnnnnnnnnnnnnnnnnnnnnnnnnnnnnnnnnnnnnnnnnnnnnnnnnnnnnnnnnnnnnnnnnnnnnnnnnnnnnnnnnnnnnnnnnnnnnnnnnnnnnnnnnnnnnnnnnnnnnnnnnnnnnnnnnnnnnnnnnnnnnnnnnnnnnnnnnnnnnnnnnnnnnnnnnnnnnnnnnnnnnnnnnnnnnnnnnnnnnnnnnnnnnnnnnnnnnnnnnnnnnnnnnnnnnnnnnnnnnnnnnnnnnnnnnnnnnnnnnnnnnnnnnnnnnnnnnnnnnnnnnnnnnnnnnnnnnnnnnnnnnnnnnnnnnnnnnnnnnnnnnnnnnnnnnnnnnnnnnnnnnnnnnnnnnnnnnnnnnnnnnnnnnnnnnnnnnnnnnnnnnnnnnnnnnnnnnnnnnnnnnnnnnnnnnnnnnnnnnnnnnnnnnnnnnnnnnnnnnnnnnnnnnnnnnnnnnnnnnnnnnnnnnnnnnnnnnnnnnnnnnnnnnnnnnnnnnnnnnnnnnnnnnnnnnnnnnnnnnnnnnnnnnnnnnnnnnnnnnnnnnnnnnnnnnnnnnnnnnnnnnnnnnnnnnnnnnnnnnnnnnnnnnnnnnnnnnnnnnnnnnnnnnnnnnnnnnnnnnnnnnnnnnnnnnnnnnnnnnnnnnnnnnnnnnnnnnnnnnnnnnnnnnnnnnnnnnnnnnnnnnnnnnnnnnnnnnnnnnnnnnnnnnnnnnnnnnnnnnnnnnnnnnnnnnnnnnnnnnnnnnnnnnnnnnnnnnnnnnnnnnnnnnnnnnnnnnnnnnnnnnnnnnnnnnnnnnnnnnnnnnnnnnnnnnnnnnnnnnnnnnnnnnnnnnnnnnnnnnnnagcttcctttttcctaaattaagaggaaaagtggtcaaagaaaaactcttcatttctccctgattcttaaacgaaggtggttaatagaaacccaggctcccgtgacaaggcaggacaagagcctcttttactttcctcccctgaccctttaaggtgccaactcaaacactacctttcttattgctttcgaagtcagtagagacggatctgttttgagcagtcgggggttcgagtcgatctcatggctacaggcggccagcagggaccaggccagtcagccatgctcaggaccccttggctcctcccccagcctctagctaccccttatcgaggcaagggaaggccagtaaagtttgccaaggctgatcctgcagcctgatggggctggctggggtgttcttttaccaagctctgttttaccgccagccccttgtccaccccgatcccacgtctccctcccttcagctggaccgtgtgcccctttgggacggggaagacaagccccactagggccaagggcagcagggccctgccgagtgagaggctgtgtggcagcggctctgtcctgtgccttaccagccctgggaggggggcatttggctggaagacaggaatttaattgccatcgtctttgattttgtgacatttctgcttggcagcgtgaa

SEQ ID NO: 36401 - DNA, 869 bp, Macaca Mulatta
  misc_feature (1)...(869): n = A,T,C or G
gggtttcataagaagtgaaaggtatttgcaaagtaagctacaaatgacccataaatctgtaaacaacactccttaatatgcaaagatgaaaaacaagcattactactacccaaagagaactggtgcttggtgatgtgcagatggggctgttggttaagagagctattacaggttttctctcttaggtttcataggaggtagtttctgaggtgagattgttttatctttttgaatacagatctcttgttctgagttagttctgaggatgggaggaaaggagnnnnnnnnnnnnnnnnnnnnnnnnngcttgtttgttttgtttttggctccttagtaatactcctctgacatttatttctattcttcttcaaagaaaggaaaccaactgaaatgtttgctttaacaaacattttaagaaattctttggggtttttttcctccctttttaaaaaattaggatataccatagcaaccaaagaacttaatgaaaactattgtacccctacaactttagtggatttttttctaaaaaagcacaatgtcattggaaagcattatttgaaaagggtccttagcccccttgaattttggtgaaacggccaaacaaaattggaacgggaaaggaaatttctcccctttaagaaaaatccacaatattttaggcaaatttttcgcgcgtcacacaaataccccccccaaaagatatttttacccctgggcaaacaaggggttccaaaaatggctgcggattattaaacgggctaaaaggttcccgcgttcttcgaaaatcgttgatgcccttacaatccacggcttttctccccgtcactacccgaaaaaagatggggcgacaactgctgcgggacccc

SEQ ID NO: 36402 - DNA, 594 bp, Macaca Mulatta
aaccttaaactcagtcctcccaatagaccttagtcagatcatctcagtcaagggtcagaagtacaagaaccaggcaaaagttttatggatgaagtggacaaagggagaagttggccaagagagccatctaacagggtactttggaaattagtgcaattgctcttagaaaagaatcatatgtgtaagaagttcctcttgaagcacaaatgttttttacttatttcttttcatatgtgtgaacttctttttctttaaaaactgaatataattaacattaaaatttcttcaaatatttcaatattgacttcagatcttcattattgtaactgcatatgtgtcattaatgtatatatacattttctttccaagtagacaaattaaaatatctatgaaatatcttaaaagaacttcctacatctagtcctaatagcaatagatcaagcaggttaatgttctgtatttaaagacgtgttgtgtttcactaaagaatagactgtgttttaagtataagattttgttgcctactccctacccaccatgcaaaactactgtactttgtaattgagttacccggaggaaagaaagagttctgtt

SEQ ID NO: 36403 - DNA, 856 bp, Macaca Mulatta
actgagaggatcactcagctgaaagacgttttggaggaaaaggaaaggaagattcagcagctggaagccttacggagtccccatcctccccaagaggtcaaggaccctccaggatgtttaccagaagccccagttttctctactgatgacgtccctcctgtggtctctgatgagaatttgtaaagattcccagtaagaaaacaataaaagtttattaagtgtcatccaggtaaagtccgatcccaagtagtgttctaggtgacaaactcaagtacaagttcatgcatttgactgtatactataatgtttgtattggaaggaaacaaattaaaggaaatgttcaggagcaaacactgcatgttttcccttcggacagcaatcgtcacgtaaaccgcacagctgtagaatactatgtttttagacatttctggtagcagtaggggagggaagaaaacaaaactagacagatggtgaaagaacttagcattatcctcttaccagagatttgtcacactgcaagggaggggcggcaccgaccccatttagtatgcagctctattgtgaacagaaagctgtcacagagggccagtttcaaactggtgaatgcgcgggtctttagcaggagctaaagagcaggagctgtcagcagagtaaatagccatgaggtctgtcctttcatgtcctcaggagttgatttctttatgacatgcagtttattaacattatcaaggatagaaaggaaataaaactaaagcaataaaaaaaaaattaaaaatgggtgaatcaaagctgcagtcctttgggaaaagtgtcctggtatagcatctccctgggaaaaaacataacactgattttt

SEQ ID NO: 36404 - DNA, 4213 bp, Macaca Mulatta
  misc_feature (1)...(4213): n = A,T,C or G
gctgacaaaagaagtcctggtatcttctatggtgggagaaggaaactagctaaagggaagaataaattagagaaaaattggaatgattgaatcggaacaaggcaaaggctattaaaaaaattaagcagcagtatccttcttgggggccccttccccacactatctcaatgcaaatatctgtctgaaacggtccctggctaaactccacccatgggttggccagtcttgccttgaccaatagccttgacaaggcaaccttgaccaatagtcttagagtatcaggtgaggccaggggccggcggctggctagggatgaagaataaaaggaagcaccctccagcagttccacacactcgcttctggaacggctgagattatcaataagctcctagtccagacgccatgggtcatttcacagaggaggacaaggctactatcacaagcctgtggggcaaggtgaatgtggaagatgctggaggagaaaccctgggaaggtaggctctggtgaccaggacaaggaagggaaggaaggaccctgtgcctggcaaaagtccaggccacttcttaggatttgtggcactttctgactgtcaaactgctcttgttcaatctcannnnnnnnnnnnnnnnnnnnnnnnnnnnnnnnnnnnnnnnnnnnnnnnnnnnnnnnnnnnnnnnnnnnnnnnnnnnnnnnnnnnnnnnnnnnnnnnnnnnnnnnnnnnnnnnnnnnnnnnnnnnnnnnnnnnnnnnnnnnnnnnnnnnnnnnnnnnnnnnnnnnnnnnnnnnnnnnnnnnnnnnnnnnnnnnnnnnnnnnnnnnnnnngatcctgagaacttcagggtgagtccaggagtttcagcagtttcagagttcagtctcaaggcaacttagacaactgagtattgatctgaggacagccgaacctacctgctgggtgtgagctatttgaagatactggggttgggagtgaagaaactgcagaggactaactgggctgagaccgaatggtaatgttttagggcctaaggagtgcctctgaaaaatctagacggacaattttgacattgacaaaagagaggtggaaatgaggaaaatgacttttctttattagattccggtagaaagaactttcaactttccctcatttttgttatttgttttaaaacgtctatctggaggcaggacaagtatggtcattaaaaagatgcaggcagaaggcatatattggcccagtcaaagtggggaactctggtgaccaaacagagtctgaggctattcctatatcagctggacacatacaaaatgccactatcacttcattacaaacttatatcctctaattccagatgggggcaaagtgtgtccaggggtgaggatcaattgaaacatttgggctagagtagattttgaaagccannnnnnnnnnnnnnnnnnnnnnnnnnnnnnnncgcgcgcacgcgtgtgtttcttttaatgttttcagcctacaacatacagggtttgtggtggcaagaagacagcaagttttaaattttggccagtgactagtgctgcaaggggaacaactacctgcatttaatggaaggcaaaatctcaggctttgagggaagttaacataggcttgattctgggtggaagctgggtgtgtagtttctggaggccaggctggagctctcagctcactatgggttcatttttgttgtctcctttcatctcannnnnnnnnnnnnnnnnnnnnnnnnnnnnnnnnnnnnnnnnnnnnnnnnnnnnnnnnnnnnnnnnnnnnnnnnnnnnnnnnnnnnnnnnnnnnnnnnnnnnnnnnnnnnnnnnnnnnnnnnnnnnnnnnnnnnnccccctgcccacaatgcagagctttcaaggataggctttattctgcaagcaataaaaataataaatctattctgctaagagatcacacatgattttcttcagctcttttttttacatcttttaaaatatatgagccccaaagggtttatattgagggatgtgtttatgtgtatttctgtatggctatgtgtgtttgtggtgtgcgcatgctccccatttatttttacatgagatgtgaattttgatgagcaaatgctgacaaaagaagtcacggtatcttctatggtgggagaaggaaactagctaaagggaagataaattaagagaaaaattggaatgattgaatcggaacaaggcaaaggctataaaaaaattaagcagcagtatcctcttgggggccccttccccacactatctcaatgcaaatatctgtctgaaacggtccatggctaaactccacccatgggttggccagtcttgccttgaccaatagccttgacaaggcaaccttgaccaatagtcttagagtatcaggtgaggccaggggccggcggctggctagggatgaagaataaaaggaagcaccctccagcagttccacacactcgcttctggaacggctgagattatcaataagctcctagtccagacgccatgggtcatttcacagaggaggacaaggctactatcacaagcctgtggggcaaggtgaatgtggaagatgctggaggagaaaccctgggaaggtaggctctggtgaccaggacaaggaagggaaggaaggaccctgtgcctggcaaaagtccaggccacttcttaggatttgtggcactttctgactgtcaaactgctcttgttcaatctcannnnnnnnnnnnnnnnnnnnnnnnnnnnnnnnnnnnnnnnnnnnnnnnnnnnnnnnnnnnnnnnnnnnnnnnnnnnnnnnnnnnnnnnnnnnnnnnnnnnnnnnnnnnnnnnnnnnnnnnnnnnnnnnnnnnnnnnnnnnnnnnnnnnnnnnnnnnnnnnnnnnnnnnnnnnnnnnnnnnnnnnnnnnnnnnnnnnnnnnnnnnnnnngatcctgagaacttcagggtgagtccaggagtttcagcagtttcagagttcagtctcaaggcaacttagacaactgagtattgatctgaggacagccgaacctacctgctgggtgtgagctatttgaagatactggggttgggagtgaagaaactgcagaggactaactgggctgagaccgaatggtaatgttttagggcctaaggagtgcctctaaaaatctagacggacaattttgacattgacaaaagagaggtggaaatgaggaaaatgacttttctttattagattccggtagaaagaactttcatctttccctcatttttgttatttgttttaaaacatctatctggaggcaggacaagtatggtcattaaaaagatgcaggcagaaggcatatattggcccagtcaaagtggggaactctggtgaccaaacagagtctgaggctattcctatatcagctggacacatacaaaatgccgctatcacttcattacaaacttatatcctctaattccagatgggggcaaagtgtgtccaggggtgaggatcaattgaaacatttgggctagagtagattttgaaagccannnnnnnnnnnnnnnnnnnnnnnnnnnnnnnnnnnnnnnnnnngcgcgtgtgtttcttttaacgttttcagcctacagcatacagggtttgtggtggcaagaagacagcaagttttaaattttggccagtgactagtgctgcaaggggaacaactacctgcatttaatggaaggcaaaatctcaggctttgagggaagttaacataggcttgattctgggtggaagctgggtgtgtagtttctggaggccaggctggagctctcagctcactatgggttcatttttgttgtctcctttcatctcannnnnnnnnnnnnnnnnnnnnnnnnnnnnnnnnnnnnnnnnnnnnnnnnnnnnnnnnnnnnnnnnnnnnnnnnnnnnnnnnnnnnnnnnnnnnnnnnnnnnnnnnnnnnnnnnnnnnnnnnnnnnnnnnnnnnnccccctgcccacgatgcagagctttcaaggataggctttattctgcaatgcaataaaaataataaatctattctgctaagcgatcacacatgattgtcttcagctctttttttatgtctctttaaatatatgagccacaaagggttttatgttgagggatgtgtgtatgtgtatttgtacatggctgtgtgtgttagtgtcatgtgcatatcctcacttttttgtttacatgagatgtgggttttgatgagcaatt

SEQ ID NO: 36405 - DNA, 805 bp, Macaca Mulatta
  misc_feature (1)...(805): n = A,T,C or G
ggatcgcttcagcataaaaatgatacaatggattgtaggaacttgggtggaagaatgggaggggagtgagggatgaaagaatacaaatataatgcagtgtatactgctcaggtgatgggggcaccaaaatctcacaaatcaccactaaagaacttacttatgtaaccaaataccacctgtaccccaataacttatnnnnnnnnnnnnnnnnnnnnnngtaataggcacaagtaacatttaaaaaatcccttcaacttaggtgaatctacttttgtgtcaaggcactaatagattgccacctcttctctaaagcttttccccatcctcctgctggaaggaatcttttctgcctccaaacacctccagtgttttatctccaattctcttatggcacttctcactttttatgataaaatacttacttaaaagactttcttgacaataatgtaagcttaaataactcatgtagtgtctttgaaatattttggccccaattcatatgaattgaggttgaagtctcctcagaggagacagattatgaagaaattacatttttgaccaagaagtattttctttaggtagtaaaaaggaacctacaaattaaaggaattggtttgggattggactgttctcagttccggactacccaaaggctttgtagacttcttttaaatacatgccctttttaaaaaaccggttaggccaatcctttcccttattggcatattccaaaaggcttaaatgtgttaaataatttttttataacacccagggtaatttatattttaatcctagggaagttggg

SEQ ID NO: 36406 - DNA, 936 bp, Macaca Mulatta
  misc_feature (1)...(936): n = A,T,C or G
tctggtcccatggtgtgtcttgagggctgtggtacaggcagtgcctgagctgggtcagctgctgtgggtcgctcccgcctcctggctggagacaccaaagaggaggagaagggggaggaggacgtctctgccttcggccttcagtaaaggaggggtgggggcgacggaagggtggcagggcaaattgcctgtcccaagtcgagccgctcgtggcaagttttgcctgcatataggagacgcccgtcctatctcccactaccaagtctgcgggaaaaggagtgagacgagggtgaagaagaccaggtttcgcttctcggccccaggctgttgcgcagtttccctggaatcgttttgatcgactgctacgttgagcatgtccttcccagtgtccttagcaggagcgatggccagagagataacttttgcacatgtcatgttttcgtggcaaaaattttagtttcaagttccttatgaaggcggttacctagttttaaattttgtcacctgttgaggttgtacaaaatcctgtctacagtcatactctttgaatgtattttcttttccgaaatgtacccataggaaacatgaccttattcctggtctttaatatttcttggttttataccaagcagcactgttcggaagaccatgttagtgctacattgtgcacagtgaggaacacgtttttttattaaagacagtactgtaattttaagttgtgatccattatttttacttttattctggatatgacgtgatactctacatttgatttanaatgctttctggactttctggaataagcatggtaaaagctatttgtttcacctccatataccatgtttatagatgtggctaatctgcnaatacctaacccaatttagacacactcagagaaggtcgattaagnntcgtgtaagtctgaantattattga

SEQ ID NO: 36407 - DNA, 1147 bp, Macaca Mulatta
  misc_feature (1)...(1147): n = A,T,C or G
aaagataactaatgaagacacaaattatattttgccaacacaaaaattccaatttgcctttccttctaataaatatgaacaggatgatctaaatttagaaggggtaggtaaaaatgacttatcacatgttgctggcaagctgacatatggttctcagaagtataaaaatcacattggcactgagatagcacctgagaagagtgttcctgatgatacaaaattagttaattttgcagaagataaaggagagagcacatcagtattctggaaaagggaaaattgtacaaacagaaatgaacaaagggaaattaaggaactatagcaatagtaggcagaaatttcaatattctgcaaatgtgtttacagcagataatgctttttctgcttctgaaatcggagaaggcatgttcaaagaccatcttttccagtttcttgccagcctcatgatattcaanagaggtaacagaaaatggtttaggttccttgaaggctgtcacagaaattccggcaaaatttagaagtattttcaaagaatttccatatttcaactatatacagtccaaagcctttgatgannnnnnnnnnnnnnnnnnnnnnnnnnnnnnnnnnnnnnnnnnnnnnnnnnnnnnnnnnnnnnnnnnnnnnnnnnnnnnnnnnnnnnnnnnnnnnnnnnnnnnnnnnnnnnnnnnnnnnnnnnnnnnnnnnnnnnnnnnnnnnnnnnnnnnnnnnnnnnnnnnnnnnnnnnnnnnnnnnnnnnnnnnnnnnnnnnnnnnnnnnnnnnnnnnnnnnnnnnnnnnnnnnnnnnnnnnnnnnnnnnnnnnnnnnnnnnnnnnnnnnnnnnnnnnnnnnnnnnnnnnnnnnnnnnnnnnnnnnnnnnnnnnnnnnnnnnnnnnnnnnnnnnnnnnnnnnnnnnnnnnnnnnnnnnnnnnnnnnnnnnnnnaggtacatattgtaaaagatgaaaatcgtggtccaactcttgaagttgtagtcagcagaatgaaaactgtacagtctgtttctcagactttaaaaaataccagcactgttactccaatgcgatttgtagctgtatctgcaacaattccaaatgctgaggatgtgagttacaattttagctgagctcttaggttttttatgacttgtg

SEQ ID NO: 36408 - DNA, 751 bp, Macaca Mulatta
ggcagagttcaccacaagctgaccgaagatcccttaggtcttcactggatatcagcagtagcctggaagtacttgctgttggctctgggtgctggtggtcatggggagtggtttcttatgcttgagaaaggagagaaaagagtagaaaggatgttgtctcatagcctcagtgccagcaaagccacagcagaatagggcaccaagtagattcctaaggtttctgactccatgttcttgctaccaaatggcattttgctctccccagcccagggtgggtaacagagctcactgcgctgagggaaaggacatgagactggctggattcaccacctcctgaagagaaactgggtcttgagtgagtatctgcagtagctaggtagtggtcactgtgggccttatgtgagagccagtcctttgctggctttgggtctgacttagtgtagtcttagtgatggtgaccacaggggtgcttgtgttacacccatcccagctccaggcagctcagcatggagacagagaaagattccatttatttggcagaatgtaaaaaaatagaaaaagagtctgcctggtaacccacagactctcttggatcttacctatgaccaccaaagtggtacctctacaagtctgcaagcattcacatggttattcagggttggggtggtcccccaaatggcggattggactggccatgattcaaagaaccttaaatttacaacacctcaatttccccttttgaaataattgg

SEQ ID NO: 36409 - DNA, 813 bp, Macaca Mulatta
gggttttgaggatggtgagctgcccaggtcatctggttctggatttgataccttctggatggacctacctatccaccctggactaccattggtcagaaaaggaaacttctatgtgggtgaatgcttcctgcccgttgggtttgccactggctggtatgtgagtgacactggctgctgtaacaaacgtacaccaacgttccagtggcttcctacaacaagagatttattcttcctcatgaaaaatttcaggctgcattcctggttggcaagaagttcccctccacatgatgactcagggacctcattttgttcatcacagctctgccctgtcttgtacatgttgttggtgaagttgataaaggaacatagaaagccattttctgtagaggagtaacccaagtgatgcctgtcttatcagctcctattcctttggtaggaatttactcacacgaccgcctctattttagagggaggcaaggagacttggtgtaactgtatgctcagaaaagagggatcaactgaggattttaagtatctatcaatctctacttaagtgaatatggaacattctaagtgtagaaaactaaagaaaacagagacggaggaacaaagtaggtggaaggttgcagagcacagaaatgaaggaagctggggaattggcaaagaaatttctttcttaaagggagagggatggggatagttttcccaattgcactggaaaaatcttattcctctctgaaaaacctgggggtttgacattgcttacaagtttttttcccatggaacctggggtggcgggttttttccagggcc

SEQ ID NO: 36410 - DNA, 985 bp, Macaca Mulatta
ggatgtcagttgcctccgtgtatccattaataatatgtcagttcttagaaacgccgatatattatctatatactatacatgttttttaagaatcctatttttagataatcagggtaatagcttgatatatttcactataaattttttaataagtaaaaacatattttgggtattctaaaacaggactccccaacccacaggccatggactggtattggtccgtggcctgttacgaaccatcccacaccgcataggtgagcggcctgccacccagtaagcttcatctgaatttatagcttccccgcatcactcaagcccgggcctgaaccccgcttttccgtcagagtcccccgcgctatcctattcctccttgatactgccacccgcccgttctcccaatcctccaccctttctatattattcctagcgtctgccggtgccccccttctgtctgcagtcctaatttgcccgtggatagtccatgtctgtccgcccggtgtcggtgtaccatgctccccacgatggggcgcgtccgcatcgttttgacctgccctttgcggaaatcacctgtgccacacccacggggatacccctccccttctctattacccgccctatttcgccgctttttcttgccgcgagacccccgtgttccgtctttttcactccctccacccctctttcccctttcatcccatccgcgctccctccccctttattcccactctgtatttattttttcccccttccgaactcacttatttttacccgcgctctttcccgtgttcccccttctcctttacctcccccgcttttctttgccacggctcgttccacttattttgtttcgccctccttctttattgtcccttccgctcgcaaacctcctcgcctcccggcgttcaactgttcatttgttgcccactattgacacatactaccctgcaccctattgctgacccttgcgccgccacccgcctccccg

SEQ ID NO: 36411 - DNA, 631 bp, Macaca Mulatta
tgtctgtgctgaagatgttccggaacaacagaaagaggcatttatttattcattacatgatactaatggaatgcattggatgtatcaggcattcaagtcttacaagacagcctaagctgacctacaggagcttagcatctgctagaggaggcctacaggaatttgtaagtgtctgggttcgagatcctaggattcagaaggaggacttctggcattcttacattgactatgagatatgtattcatactaatagcatgtgttttacaatgaaaacatcctgtgtacgaagaagatatagagaattcgtgtggctgaggcaaagactccaaagtaatgcgttgctggtacaacttccagaacttccatctaaaaacctatttttcaacatgaacaatcgccagcatgtggatcagcgtcgccagggtctggaagatttcctcagaaaagtcctacagaatgcacttttgctttcagatagcagccttcacctcttcttacagagccatctgaattcagacgacattgaggcgtgtgtttctgggcagactaagtattctgtggaagaagcaattcacaagtttgccttgatgaacagacgtttccctgaagaagatgaagaaggcacaagacc

SEQ ID NO: 36412 - DNA, 831 bp, Macaca Mulatta
ttttttccctccggtgttcattttgaagggaattcctttcccccaaggcttttttagccggaaggggtattccccgattgaaaataagattggtttttgattttggccattggggtatcccttccgaaggggatgttccattcccatccccattctagttttgtgggattatggggaatattggaggggttctgagagttgttgcctgtgcggatccttgcggtctctttctttccctcagcttttcatcattccagcacactttgcacaccccccccatgctgtccttcctacctatcttgctagtttcaacacacctgaagcttggagtagcatccacagcaacaccttcctgcattaccttggaactgatgactcaaaccaggagatagctatgggtcagagaaggcatcaggctctcaggtcggtgaaggcattgcaggaagtggtggtagattaggggtgagtatgatcaaggatggggctctagtccatcagggcctggtgacacagtcagagatctttgctatccataggcagtggtgcttggggtaggttgtgatgtcttgggaattggtgtcagtaccttgggctgttccattttctgacatggcttttctccttttcctgtggttgtttcttaactgtctacagtcccactggccctcctgtgttatcattcaaatgggcaggaagagaaggtggtcatttctccagcggattccagaatcctattccgaggtggttatactgttcagtagacttgtggaagcagatcagctgggccaaggcacggaagcaattttccctgaatggattgttcttatttcc

SEQ ID NO: 36413 - DNA, 114 bp, Macaca Mulatta
aggtcttcctacaattgccgcttcaagtgcctcccctgctgcttctttgacttcattggaaaataatggcggaggcagagtaagaagactcagtaccgggaatacctgacttca

SEQ ID NO: 36414 - DNA, 508 bp, Macaca Mulatta
tgaagaaccagctgttagatccagacataaaggatgaccagatcatcaactggctgctggaatgccgttcttctatcatgtacttgacaaaagactttgagcagcttatcagtattatattgagattgccttggttgaatagaagtcaaacagtagtggaagagtatttggcttttcttggtaatcttgtatcagcacagactgttttcctcagaccatgtctcagcatgattgcttcccattttgtgcctcctcgagtgatcattaaggaaggtgatgtagatgtttcagattctgaggatgaagatgataatcctcctcgcccctccctcgccacatgtcacagagccttgcaaataatagcaagatatgtcccatcgacaccgtggtttcttatgccgatactggtggaaaaatttccatttgttcaaaaatcagagagaacactggaatgttacgttcataacttactaaggattagtgtgtattttccaaccttgaggcatga

SEQ ID NO: 36415 - DNA, 376 bp, Macaca Mulatta
gggcttttttcaggttccgtgcgcccggggactccggtgaagcctgtttcgctgtcggtgtcttgtggccatcttgagtctattttgtcgctcttgtgccatagcaccccgagaaccgtcagtttgagccagatggaagctgagctgaacacattacgatggatgatggaaacataagactatcaagaaatccaaagtggtaatgggcaaagtctgttcagcattcggcaatggatttatcttaattggggaaacggtgttccaaataatgttctggaagttatcaggatacctattttgaatataggactgaatttttttaaagtaatatttaaggtggtccttgataattaaataaaatgcttaattcatgtgg

SEQ ID NO: 36416 - DNA, 748 bp, Macaca Mulatta
  misc_feature (1)...(748): n = A,T,C or G
ggggagaccttagttctctttcccatcttgcaagatggcgggtgaaaaagttgagaagccagatactaaagagaagaaacccgaagccaagaaggctgatgctggtggcaaggtgaaaaagggtaacctcaaggctaagaagcccaagaaggggaagccccattgcagccgcaaccctgtccttgtcagaggaattggcaggtattcccgatctgccatgtattccagaaaggccatgtacaagaggaagtactcagccgctaaatccaaggnnnnnnnnnnnnnnnnnnnnnnnnggttcttgcaactcttacaaaacccagttggtgggtgaccagaacggcgggtacccggggtgggttaaacttccccaaaaatgcctagattatatccctaatgaaagaatgtccctcgaaagcctgttgaacccccggcaaaaaaaccccttccgttccgccccgtgaagaaaaaactgccaagcccggccatttacccccccgggaccatttctgaattaaccccccactgggaacgcccacaagggggccaagaaggggggggtttttccccgaaaaccaccctgggccaaatggggccttgggttaaccttgggggaactgggaaccccccgggggccccccaaatccgaattttcccttcttcccaaagnnnnnnnnnnnnnnnnnnnnnnnnnngtcacttgggcccaccctttaaaccccaaaaattccaaatttacccccccggg

SEQ ID NO: 36417 - DNA, 843 bp, Macaca Mulatta
  misc_feature (1)...(843): n = A,T,C or G
gaaactactaaaggtgcttattccctctctattcgtgattgggatgaggtaaggggtgacaatgtgaaacactacaaaattaggaaacttgtcaatggtggatactatatcacaaccagagaacaattggatgctctgcagaaattggcaaaacactacacagaacatgctgatagtgtatgccacacgttaacaaactgtgtgtccaaactgtgaaaccttcagacctcaaggtctagcaaaaaccatggcttgggaaatccccttgagaattttgcgactagaggttaaactaggacaaggatgttttggcaaaatgttaatgggaacatggaatggaaccacaaaagtagcaatcaaacactaaaaccaggcacaatgatgcccgaaactttccttcaagaagctcagataatgnnnnnnnnnnnnnnnnnnnnnnnnnnnnnnnnnnnnnnnnnnnnnnnnnnnnnnnnnnnnnnnnnnnnnnnnnnnnnnnnnnnnnnnnnnnnnnnnnnnnnnnnnnnnnnnnnnnnnaagacatggtaaacttgttccactatatgctgctgtttctgaagagccaatttacattgtcactgtatatatgtcaaaaggaagcttattagatttccttaaggactgaaggaaggagatggaaagtatttgaagcttgtacaaatggttgatatggctgctcagattgctgatggtatggcatatattgaaagaatgaactatattcactgagatctccgggctgctaatattcttgtaggagaaaatcttgtgggcaaaatagcagattttggtttagcaaggttaattgaagacaatgaatacaca

SEQ ID NO: 36418 - DNA, 841 bp, Macaca Mulatta
  misc_feature (1)...(841): n = A,T,C or G
gggnnnnnnnnnnnnnnnnnnnnnnnnnnnnnnnnnnnnnnnnnnnnnnnnnnnnnnnnnnnnnnnnnnnnnnnnnnnnnnnnnnnnnnnnnnnnnnnnnnnnnnnnnnnnnnnnnnnnnnnnnnnnnnnnnnnnnnnnnnnnnnnnnnnnnnnnnnnnnnnnnnnnnnnnnnnnnnnnnnnnnnnnnnnnnnnnnnnnnnnnnnnnnnnnnnnnnnnnnnnnnnnnnnnnnnnnnnnnnnnnnnnnnnnnnnnnnnnnnnnnnnnnnnnnnnnnnnnnnnnnnnnnnnnnnnnnnnnnnnnnnnnnnnnnnnnnnnnnnnnnnnnnnnnnnnnnnnnnnnnnnnnnnnnnnnnnnnnnnnnnnnnnnnnnnnnnnnnnnnnnnnnnnnnnnnnnnnnnnnnnnnnnnnnnnnnnnnnnnnnnnnnnnnnnnnnnnnnnnnnnnnnnnnnnnnnnnnnnnnnnnnnnnnnnnnnnnnnnnnnnnnnnnnnnnnnnannnaanaaannnngaaanaaaaataaaattaaaagaaaatagnnnnnnnnnnnnnnnnnnnnnnnntcggcgcgccctcnnnnnnnnnnnnnnnnnnnnnnnnnnnnnnnnnnnntggcgcgccgggcccccgtaaggtaaagtgaacattgctcaaaagctgttttccaagagagatccggggtacatgaaccaaagggcttgggaattcccnnnnnnnnnnnnnnnnnnnnngcggcgggcaaaccgaaggtgtttcttgaaacaaaaatccccaaaggggaattttctgagaggggccaattaaccgggggattctttatccaaaccgagggaagctcccaa

SEQ ID NO: 36419 - DNA, 657 bp, Macaca Mulatta
ttatgggtagtatttttcatattgcatgcatttacatgtttggatattgaatttcccatatttgttcttcttaacacaagttactaggggaaaaaatgtgaacattcaaaggattgcttttaaactttgtaaggcaggcacagaacaacatttattttactgctgagtcagtaccattccgagtactttattaccctatgaattacaagggattttcactttggctagtggaacttaaactgttcctgatcattgtgggctccaaaaattttttccccttgtgctttcaggtggttctttagaaggccttgggtagtagtcacatgtggtcaacaatactcagctgaagactcaaggggaatcctctgcagataatctggagcaatctgtagttttgtcacatttggtactctaccttgtgaactctagttttgtcctccgtggcttcctaactctttctccccaatttagagacttcgtggctatacctggatttcccttccttgcccggcaattgtgaaactctaggcagtaagagacagagcagtcatagggctcagctaatttgcttcctctgtttcgcagatcatggttcctcattatctgatgtctattgtctggaaactattgtctcttggttttgtcctggtccctatt

SEQ ID NO: 36420 - DNA, 778 bp, Macaca Mulatta
  misc_feature (1)...(778): n = A,T,C or G
ggcagtggaatagaatagagagttctgaaataaattcatacagataatgggcagttgacttttaaaggtgccaagtcaagccagtggagaatggatggtttannnnnnnnnnnnnnnnnnnnnnnnnnnnnnnnnnnngacagagtcttcctcttttgtggagactgaagtgcagtggctcactgcagcattgagctcctggcccatgcaatcttcccaccctnnnnnnnnnnnnnnnnnnnnnnnnnnntgtatgccatcatggcctgctaannnnnnnnnnnnnnnnnnngagatgaggtcttgctacgttannnnnnnnnnnnnnnnnnnnnnnccctcccnnnnnnnnnnnnnnnnnnnnnnannnnnnnnnnnnntgccaccattctcggcctggatagtcttttcaacaaatggttctgggacagttgtgcactcatttgcaaaaaaaatgaacttcaacctgtacctcatacttgatataaaaatttaacacaagaccagtcaattttatatttgactttaaacataaaatcataaaagttgtttttgaaaaaattacttggggtttaaggcaaaaagagttttttttaaaatacccttaattccaaaaaaactttaactcccttaaaaaggaacaaaaaatttggattaaatttggggccttaaatatcccnnnnnnnnnnnnnnnnnnnnnnntggcctccnnnnnnnnnnnnnnnnnnnggttttaaaaaggttaaattgggaaaaaagaatatataaagcccttttt

SEQ ID NO: 36421 - DNA, 604 bp, Macaca Mulatta
  misc_feature (1)...(604): n = A,T,C or G
gggggactttggggcaggtgattaaatttatataggtacctcaagaaaaagaacctgaatatgctgcattttatttctttagcttttacatgtagcattttgttttgcttttgttatttttgtttagatatatgctttttggaccccaatagactgttgaaagaaatttaaaaattactcttgtagggatatagtatccnnnnnnnnnnnnnnnnnnnnnnnnnntgctgcaatatctggctcgaaggttgccctatattagaacattagccaaatacacccgaggaggcggatactatgtttataagcagacaataatgttctgaatcctttctgttcatgctgctttcttaattcatttctccatgtcatcaagaggttggataacttatttctaagctcaaggttaaaaatcatgtcnnnnnnnnnnnnnnnnnnnacacagacctcagaaaaattgcaattgaggaagtagcatgattctaaatgtgttgctgaaatcaggcagcccgcgcctctggtctctccagagagcccgtcttcacatttctcttcctcagcactcacccgagactgaacagatggggggtggtcttgattgtca

SEQ ID NO: 36422 - DNA, 3381 bp, Macaca Mulatta
  misc_feature (1)...(3381): n = A,T,C or G
atgtgctctgtcctagcgttcgtgtagaaggagatcgctttaagcacgaccaatggaggaaccaaggaaatcacaggtnacaggttttgacctgaaggatttgttcagtgtgaaggaaatcttggggaaaaaagagaatggcgtgcagagttcttatgtacagatgggatccttcccggtggggcaaannnnnnnnnnnnnnnnnnnnnnnnnnnnnnnnnnnnnnnnnnnnnnnnnnnnnnnnnnnnnnnnnnnnnnnnnnnnnnnnnnnnnnnnnnnnnnnnnnnnnnnnnnnnnnnnnnnnnnnnnnnnnnnnnnnnnnnnnnnnnnnnnnnnnnnnnnnnnnnnnnnnnnnnnnnnnnnnnnnnnnnnnnnnnnnnnnnnnnnnnnnnnnnnnnnnnnnnnnnnnnnnnnnnnnnnnnnnnnnnnnnnnnnnnnnnnnnnnnnnnnnnnnnnnnnnnnnnnnnnnnnnnnnnnnnnnnnnnnnnnnnnnnnnnnnnnnnnnnnnnnnnnnnnnnnnnnnnnnnnnnnnnnnnnnnnnnnnnnnnnnnnnnnnnnnnnnnnnnnnnnnnnnnnnnnnnnnnnnnnnnnnnnnnnnnnnnnnnnnnnnnnnnnnnnnnnnnnnnnnnnnnnnnnnnnnnnnnnnnnnnnnnnnnnnnnnnnnnnnnnnnnnnngtgccaggtgacagtggtgacagagcctccacctccacccccaccccagcggcctcccaccccaggcagtgaacagattgggtttttgaagaccatcaactgctcctgcccagctggagagaaggnnnnnnnnnnnnnnnnnnnnnnnnnnnnnnnnnnnnnnnnnnnnnnnnnnnnnnnnnnnnnnnnnnnnnnnnnnnnnnnnnnnnnnnnnnnnnnnnnnnnnnnnnnnnnnnnnnnnnnnnnnnnnnnnnnnnnnnnnnnnnnnnnnnnnnnnnnnnnnnnnnnnnnnnnnnnnnnnnnnnnnnnnnnnnnnnnnnnnnnnnnnnnnnnnnnnnnnnnnnnnnnnnnnnnnnnnnnnnnnnnnnnnnnnnnnnnnnnnnnnnnnnnnnnnnnnnnnnnnnnnnnnnnnnnnnnnnnnnnnnnnnnnnnnnnnnnnnnnnnnnnnnnnnnnnnnnnnnnnnnnnnnnnnnnnnnnnnnnnnnnnnnnnnnnnnnnnnnnnnnnnnnnnnnnnnnnnnnnnnnnnnnnnnnnnnnnnnnnnnnnagaaggtggcaccagtaactacgctgaaatatttgttgtttctgtgcagggtgacgtgggacctgcgggcctgcctggtgtaccaggttcggtggtgnnnnnnnnnnnnnnnnnnnnnnnnnnnnnnnnnnnnnnnnnnnnnnnnnnnnnnnnnnnnnnnnnnnnnnnnnnnnncagggccctccaggaccacctggtgtcccaggccccgctggaccgggaggttctccgnnnnnnnnnnnnnnnnnnnnnnnnnnnnnnnnnnnnnnnnnnnnnnnnnnnnnnnnnnnnnnnnnnnnnnnnnnnnnnnnnnnnnnnnnnnnnnnnnnnnnnnnnnnnnnnnnnnnnnnnnnnnnnnnnnnnnnnnnnnnnnnnnnnnnnnnnnnnnnnnnnnnnnnnnnnnnnnnnnnnnnnnnnnnnnnnnnnnnnnnnnnnnnnnnnnnnnnnnnnnnnnnnnnnnnnnnnnnnnnnnnnnnnnnnnnnnnnnnnnnnnnnnnnnnnnnnnnnnnnnnnnnnnnnnnnnnnnnnnnnnnnnnnnnnnnnnnnnnnnnnnnnnnnnnnnnnnnnnnnnnnnnnnnnnnnnnnnnnnnnnnnnnnnnnnnnnnnnnnnnnnnnnnnnnnnnnnnnnnnnnnnnnnnnnnnnnnnnnnnnnnnnnnnnnnnnnnnnnnnnnnnnnnnnnnnnnnnnnnnnnnnnnnnnnnnnnnnnnnnnnnnnnnnnnnnnnnnnnnnnnnnnnnnnnnnnnnnnnnnnnnnnnnnnnnnnnnnnnnnnnnnnnnnnnnnnnnnnnnnnnnnnnnnnnnnnnnnnnnnnnnnnnnnnnnnnnnnnnnnnnnnnnnnnnnnnnnnnnnnnnnnnnnnnnnnnnnnnnnnnnnnnnnnnnnnnnnnnnnnnnnnnnnnnnnnnnnnnnnnnnnnnnnnnnnnnnnnnnnnnnnnnnnnnnnnnnnnnnnnnnnnnnnnnnnnnnnnnnnnnnnnnnnnnnnnnnnnnnnnnnnnnnnnnnnnnnnnnnnnnnnnnnnnnnnnnnnnnnnnnnnnnnnnnnnnnnnnnnnnnnnnnnnnnnnnnnnnnnnnnnnnnnnnnnnnnnnnnnnnnnnnnnnnnnnnnnnnnnnnnnnnnnnnnnnnnnnnnnnnnnnnnnnnnnnnnnnnnnnnnnnnnnnnnnnnnnnnnnnnnnnnnnnnnnnnnnnnnnnnnaggatgtgtgcagtgactgccctcctggccccccaggcctccctggtctaccaggttttaagggggacaaaggtctcccaggaaagccagggaaagaaggcacagaagggaaaaaggnnnnnnnnnnnnnnnnnnnnnnnnnnnnnnnnnnnnnnnnnnnnnnnnnnnnnnnnnnnnnnnnnnnnnnnnnnnnnnnnnnnnnnnnnnnnnnnnnnnnnnnnnnnnnnnnnnnnnnnnnnnnnnnnnnnnnnnnnnnnnnnnnnnnnnnnnnnnnnnnnnnnnnnnnnnnnnnnnnnnnnnnnnnnnnnnnnnnnnnnnnnnnnnnnnnnnnnnnnnnnnnnnnnnnnnnnnnnnnnnnnnnnnnnnnnnnnnnnnnnnnnnnnnnnnnnnnnnnnnnnnnnnnnnnnnnnnnnnnnnnnnnnnnnnnnnnnnnnnnnnnnnnnnnnnnnnnnnnnnnnnnnnnnnnnnnnnnnnnnnnnnnnnnnnnnnnnnnnnnnnnnnnnnnnnnnnnnnnnnnnnnnnnnnnnnnnnnnnnnnnnnnnnnnnnnnnnnnnnnnnnnnnnnnnnnnnnnnnnnnnnnnnnnnnnnnnnnnnnnnnnnnnnnnnnnnngggccagaaaggaagcaaaggggaaaatggcagcccaggacttcctggcttcctgggtccccgtgggcctccggtaagcagagaaccccaatggaacccaagatacctggctccagnnnnnnnnnnnnnnnnnnnnnnnnnnnnnnnnnnnnnnnnnnnnnnnnnnnnnnnnnnnnnnnnnnnnnnnnnnnnnnnnnnnnnnnnnnnnnnnnnnnnnnnnnnnnnnnnnnnnnnnnnnnnnnnnnnnnnnnnnnnnnnnnnnnnnnnnnnnnnnnnnnnnnnnnnnnnnnngggggagtctccatccatggaaaccctgcgtcggcttattcaagaagagctggggaagcagctcgaaa

SEQ ID NO: 36423 - DNA, 767 bp, Macaca Mulatta
ggattatagaaaaggtttaattttgttctcatctgtgtcactgtctgtagtgacctatagagaaccactgtgtgattatctcctgtatgtatgcaaatctgagcaaatgtaaacattttcttgttttccttccacaatccccccccacccctgaccccgcccccgcctgtatgtgtctgcgttttccctcaggtgcatgcaggccggcattcatcagtgcagccccttcctgctgccctgtgggccccacacactgcagaccctgctgcctcagacttgtgtgtgcgtgcctggcgcgcctgttccctgagcctgagacagcggctgcctgttgagggcagggcacgtccgctgcttacagagacgtgaagcccaccacggccattctgtcggcgcgcttttgtcaccagctgtgtcccgtatagaaatgtttcttgtctttagggggcttcttcctcattaagctctgtttcttaaagtctgcttgactaatactaatctagctatgccagctttctgttggttaatacttgtgtggtatttctgttcttaaagtgtcttaaatgtgacactgtttacaacatagaattaggtttttttaaaaatcagaaactttttgccctggcgcggtgggctcacgccctgtaatcccacgactttgggaaggccgaaaaccggcggatccacgaggtcagggagattcgagaaccttcctgggcctaaccctgttgaaactcccttctctttctaaaaaaaaaatcccaaag

SEQ ID NO: 36424 - DNA, 401 bp, Macaca Mulatta
tcctcctccattctgtccccctcgatgtcgccctctcctttccttcctgcaaacccccacccaggcccagagacctctgaggactgaggacttaggcacttcacacatcctgctcaggggggacccaagacaggtttgggaccaaacctacatgtctgtatgtcatccaagctggcctaataaatgcataacctctctacgaatacgggatcttcattattgtattggagccatgcatgggtgtttatgtaaggtgtgagatctctgagctattcggtcggaggcctatgacagggtatgacacctctgagcacggaatctaggatcatccccttgggattcaaggctcctgacagatttctccttgtcagtgacgccatcatcttcatcctttcctaact

SEQ ID NO: 36425 - DNA, 586 bp, Macaca Mulatta
  misc_feature (1)...(586): n = A,T,C or G
gnnnnnnnnnnnnnnnnnnnnnnnnnnnnnnnnnnnnnnnnnngtagtttagttgttcaggccaaaactcttggaatcctccctgatgccagttttcgattaaacaggaaattctggcagctgtatccttaaaatatacagaaatgtgcttctcaccaccctggtctcagccatcattatttctgacctggattattgcagtagcctcctaacttgcctttctgcttcttccctttctcctcgcaaccgattccccatacagcatcctattgactttttaagatgttaaatcagtcatcaactcaatcatgtgacttctctgctcagaaccttccaataacttcccataaatgaataggagaactagagctgggcctgaggacaggcaggccagaaagtaggaagatagttttgacctcaaacttgaaatttgcatcttttaacaaatgtgcaaagccatagccctgagctaggtgcagaagacaggacttccctcagggaactctcagttccctggggagccagccttatatctaagttcctccaaatcctaccaattgcctgtcatgctgaaagagctaggacc

SEQ ID NO: 36426 - DNA, 3718 bp, Macaca Mulatta
  misc_feature (1)...(3718): n = A,T,C or G
nagctctttgaaggtgtatgcagcctacttgatcgcctgggagcctggccccacctggccaacggcacagctgatctccgtgagatggcacagattggcctgcggcttgtgcttggctacatcctgctggaagacccacannnnnnnnnnnnnnnnnnnnnnnnnnnnnnnnnnnnnnnnnnnnnnnnnnnnnnnnnnnnnnnnnnnnnnnnnnnnnnnnnnnnnnnnnnnnnnnnnnnnnnnnnnnnnnnnnnnnnnnnnnnnnnnnnnnnnnnnnnnnnnnnnnnnnnnnnnnnnnnnnnnnnnnnnnnnnnnnnnnnnnnnnnnnnnnnnnnnnnnnnnnnnnnnnnnnnnnnnnnnnnnnnnnnnnnnnnnnnnnnnnnnnnnnnnnnnnnnnnnnnnnnnnnnnnnnnnnnnnnnnnnnnnnnnnnnnnnnnnnnnnnnnnnnnnnnnnnnnnnnnnnnnnnnnnnnnnnnnnnnnnnnnnnnnnnnnnnnnnnnnnnnnnnnnnnnnnnnnnnnnnnnnnnnnnnnnnnnnnnnnnnnnnnnnnnnnnnnnnnnnnnnnnnnnnnnnnnnnnnnnnnnnnnnnnnnnnnnnnnnnnnnnnnnnnnnnnnnnnnnnnnnnnnnnnnnnnnnnnnnnnnnnnnnnnnnnnnnnnnnnnnnnnnnnnnnnnnnnnnnnnnnnnnnnnnnnnnnnnnnnnnnnnnnnnnnnnnnnnnnnnnnnnnnnnnnnnnnnnnnnnnnnnnnnnnnnnnnnnnnnnnnnnnnnnnnnnnnnnnnnnnnnnnnnnnnnnnnnnnnnnnnnnnnnnnnnnnnnnnnnnnnnnnnnnnnnnnnnnnnnnnnnnnnnnnnnnnnnnnnnnnnnnnnnnnnnnnnnnnnnnnnnnnnnnnnnnnnnnnnnnnnnnnnnnnnnnnnnnnnnnnnnnnnnnnnnnnnnnnnnggtgaggttcccctgacacccaccgaggaggcctcactgcctctggcagtgaccaaagaggccaaagtgagcaccccacccgaggagctgcaggaggaccagctcggcgaagatgagctggctgagctggagaccccnnnnnnnnnnnnnnnnnnnnnnnnnnnnnnnnnnnnnnnnnnnnnnnnnnnnnnnnnnnnnnnnnnnnnnnnnnnnnnnnnnnnnnnnnnnnnnnnnnnnnnnnnnnnnnnnnnnnnnnnnnnnnnnnnnnnnnnnnnnnnnnnnnnnnnnnnnnnnnnnnnnnnnnnnnnnnnnnnnnnnnnnnnnnnnnnnnnnnnnnnnnnnnnnnnnnnnnnnnnnnnnnnnnnnnnnnnnnnnnnnnnnnnnnnnnnnnnnnnnnnnnnnnnnnnnnnnnnnnnnnnnnnnnnnnnnnnnnnnnnnnnnnnnnnnnnnnnnnnnnnnnnnnnnnnnnnnnnnnnnnnnnnnnnnnnnnnnnnnnnnnnnnnnnnnnnnnnnnnnnnnnnnnnnnnnnnnnnnnnnnnnnnnnnnnnnnnnnnnnnnnnnnnnnnnnnnnnnnnnnnnnnnnnnnnnnnnnnnnnnnnnnnnnnnnnnnnnnnnnnnnnnnnnnnnnnnnnnnnnnnnnnnnnnnnnnnnnnnnnnnnnnnnnnnnnnnnnnnnnnnnnnnnnnnnnnnnnnnnnnnnnnnnnnnnnnnnnnnnnnnnnnnnnnnnnnnnnnnnnnnnnnnnnnnnnnnnnnnnnnnnnnnnnnnnnnnnnnnnnnnnnnnnnnnnnnnnnnnnnnnnnnnnnnnnnnnnnnnnnnnnnnnnnnnnnnnnnnnnnnnnnnnnnnnnnnnnnnnnnnnnnnnnnnnnnnnnnnnnnnnnnnnnnnnnnnnnnnnnnnnnnnnnnnnnnnnnnnnnnnnnnnnnnnnnnnnnnnnnnnnnnnnnnnnnnnnnnnnnnnnnnnnnnnnnnnnnnnnnnnnnnnnnnnnnnnnnnnnnnnnnnnnnnnnnnnnnnnnnnnnnnnnnnnnnnnnnnnnnnnnnnnnnnnnnnnnnnnnnnnnnnnnnnnnnnnnnnnnnnnnnnnnnnnnnnnnnnnnnnnnnnnnnnnnnnnnnnnnnnnnnnnnnnnnnnnnnnnnnnnnnnnnnnnnnnnnnnnnnnnnnnnnnnnnnnnnnnnnnnnnnnnnnnnnnnnnnnnnnnnnnnnnnnnnnnnnnnnnnnnnnnnnnnnnnnnnnnnnnnnnnnnnnnnnnnnnnnnnnnnnnnnnnnnnnnnnnnnnnnnnnnnnnnnnnnnnnnnnnnnnnnnnnnnnnnnnnnnnnnnnnnnnnnnnnnnnnnnnnnnnnnnnnnnnnnnnnnnnnnnnnnnnnnnnnnnnnnnnnnnnnnnnnnnnnnnnnnnnnnnnnnnnnnnnnnnnnnnnnnnnnnnnnnnnnnnnnnnnnnnnnnnnnnnnnnnnnnnnnnnnnnnnnnnnnnnnnnnnnnnnnnnnnnnnnnnnnnnnnnnnnnnnnnnnnnnnnnnnnnnnnnnnnnnnnnnnnnnnnnnnnnnnnnnnnnggtcgtcagtgatggtgtacccctggtgctagctctggtcccccaccggcagccccactccttcatcacccagggttccccagacctgttggtnggtgaccgtgagtgccagtgggctgctgggtacccacagctggttgccctatgaccgcaacataagcaactacttcagcttcagcaaagaccccaccatgggcagccacaagacgcagcgactgctgagtggcccatgggtgccagacagtggtgtgagcggacaagcactggcagtggcccctgacggaaagctgctattcagcggtggccactgggatggcagcctgcgagtgactgcactatcccgtggcaagctgttgagccagctcagccgccaccttgngatgtagtaacctgccttgcactggacacctgtggcatctacctcatctcaggctcccgggacaccacatgcatggtgtggcggctcctgcatcaggnnnnnnnnnnnnnnnnnnnnnnnnnnnnnnnnnnnnnnnnnnnnnnnnnnnnnnnnnnnnnnnnnnnnnnnnnnnnnnnnnnnnnnnnnnnnnnnnnnnnnnnnnnnnnnnnnnnnnnnnnnnnnnnnnnnnnnnnnnnnnnnnnnnnnnnnnnnnnnnnnnnnnnnnnnnnnnnnnnnnnnnnnnnnnnnnnnnnnnnnnnnnnnnnnnnnnnnnnnnnnnnnnnnnnnnnnnnnnnnnnnnnnnnnnnnnnnnnnnnnnnnnnnnnnnnccaggtcacctactccttgcacctgtattcggtcaatgggaagttgcgggcttcactgcccctggcagagcagcctacagccctgacggtgacagaggactttgtgttgctgggcaccgcccagtgcgccctgcacatcctccaactaaacannnnnnnnnnnnnnnnnnnnnnnnnnnnnnnnnnnnnnnnnnnnnnnnnnnnnnnnnnnnnnnnnnnnnnnnnnnnnnnnnnnnnnnnnnnnnnnnnnnnnnnnnnnnnnnnnnnnnnnnnnnnnnnnnnnnnnaggtgcgcagcagccagttcgcgcggaagctgtggcggtccgcgcggcggatctcccaggtgtcctcgggagagacggaatacaaccctgctgaggcgcgctgaacctggccagtccggctgctcgggcagaagcccccgacgggcttcccccggaaggccccgcccagaagtcgacgggaacaccccggggtggg

SEQ ID NO: 36427 - DNA, 910 bp, Macaca Mulatta
aagccaggtgtaaatagagcagagcagctatactaacatagaagctctatcattctgaagatcagtatctgaataataccaattaaagtatcccacatgatctccgatgattaggagagtgtttggccatagaggtcttttagaagacgtaaaacttttgtataaatttagaaaactaacattgaggaaggaagttactcataagttcaatagaatagcttctatttattgaagtaagattttcctttagtcctaagtaatgcaattcttcattcagcatatagcgaaacatttcttctgcctcatttgaaagacatcccagcacagcatatcacagtaagtgttcatacaagttgtatagaattttacttctggtttaaactttgctatttaactctaaccagctgttagggcattctaaaggttatcagattctttcatgtgaataagaggttgcccagctctcatggcaaaaaattgtgctgagaaaactcgagcgattctagggtgatagaccatggcatattccttgtgccaaacttgaaggccaagttaagcttcctaagttatacatgaataaacactaaaaagaattgctgagagaagggttctgtcttctctacctattatttacaaacaatgagctcatcaccaccactatccccaaatcagatgagctcctcattaatgggaggaactgcattttattcattcttgtgtctcccgatgtctggtgtattcgtccgacgtatagttcattgaaccttttttcaggcttcgtgagggcttctctccaagacacactctggcatccaagcggttcatcgccgtgtttttccccccccggttttcacgctttggtttactggtctcaccgttccgcaagaatcttacctccgtgggaaccccc

SEQ ID NO: 36428 - DNA, 687 bp, Macaca Mulatta
atgattcggaaggtgaaggtagaggatgaggatcaggaggcagaagaggtggtcgaatggccccagcatctatcgttacttcccagcccctttcctgcgcctgacctggggcatctggctgccgcttacaaactggagccaggggccccgggggcactgagtgggctcgcgctgtccgggtgggctccgatgcccgagaagccctacggctgtggggagtgtgagcggcgcttccgggatcagctgacgttgcgactgcaccagcggctgcaccggggcgagggtccctgcgcctgcccggactgcggccgcagcttcacgcagcgcgcccacatgctgctgcatcagcgcagccaccgcggggagcggcctttcccgtgctccgagtgcgacaagcgcttcagcaagaaggcccacctgacccgccacctgcgcacgcacacgggcgagcggccctacccgtgcgcggagtgcggcaagcgcttcagccagaagatccacctgggctcccaccagaagacccacactggcgagcggcccttcccctgcacagaatgcgagaagcgctttcgcaagaagacgcacttgattcggcaccagcgcatccacactggcgagagaccctaccagtgcgcgcagtgcgcacgcagcttcacgcataagcagcacttggtgcggcaccaaagg

SEQ ID NO: 36429 - DNA, 1090 bp, Macaca Mulatta
  misc_feature (1)...(1090): n = A,T,C or G
tgcagtgttgcgcaccgccaatctaacgccatggctgacagccgggatcccgccagcgaccagatgaagcactggaaggagcagcgggccgcgcagaaagctgatgtcctgaccactggagctggtaacccagtaggagacaaacttaatgtgattactgtggggccccgtgggccccttcttgttcaggatgtggttttcactgatgaaatggctcactttgaccgagagagaattcccgagcgagtcgtgcatgctaaaggagcaggggcctttggctactttgaggtcacacatgacattaccaaatattccaaggcaaaggtatttgagcatattggaaagaggactcccatcgcagttcggttctccactgttgctggagaatcaggttcagctgacacagttcgggaccctcgtgggtttgcagtgaaattttacacagaagatggtaactgggatctcgttggaaataacacccccattttcttcatcagggatcccatattgtttccatcttttatccacagccaaaagagaaatcctcagacgcatctgaaggatccggatatggtctgggacttctggagcctacgtcctgagtctctgcatcaggtttctttctagttcagtgatcgcgggattccagatgggcatccgccacatgactggatatggatcacctacttccagccggtctacgccacagaaagccgtaacttgcacactccctataaacactgacccggcctagaaaacttctgttgagatccccgagactttccccgcacacacgaaatagcagcggacactataaaggttggcaaagcatcaaatctcgttcagagcgagtgcggtcaacacagggcctacaataccgatgactatgtcagcatgcgcaaaacctggtggaaaaggaatcactaagtgtccaaccactacgctgttttgtattcttcttctctctcgcttctgatttgcctacccacccacaccaccaacnagcgaggacatacactcgattgcatgagatcaggaaagacaggaatgaactagcagagcgcaagaatactgagataagcagaacaga

SEQ ID NO: 36430 - DNA, 949 bp, Macaca Mulatta
  misc_feature (1)...(949): n = A,T,C or G
ggttggcaaattaagttaaagaatactactgctccattcccctcacttattctccagttaattgcttgtcagttctcatttcacgaaagcggtgacgttccaggtttgattcagttttcctgtgcgcactgttgccnnnnnnnnnnnnnnnnnncaaagattctgcactggaacgtagatagttggaaacagtaccacctacagaggctatgtgttttctctttctcccccctttcacctctttctttcccaattcaaaacagccaagtgagccctgttctggtattttgaatcattagaaaaaagaaagggagtggctgttttgagttgtcctttctttgcagaaaggagaaaatgtgattgtgtttttttaccagcctacttctaagtgtcactgcctggtttttctctttttcaaggattagaagtaagaggacacaccagcatcggagtgtattaagcccctgaaacacatggtagctagggactgaacacgggaactgtatgacagcagcacaaaccccaaagaaccttcctgccttgtgggcccctgagccccttgggagactgagaataatgaccagattcatccagaactgctgcaatgttaagtgaaaatcctctgtagttggtcaacagggggaacctttccttgcattagaaaatttctgctcaatacagaatggtccacattcacccaaagtgcgcctgtttggagatgctgtgaaattaaaaccagggagtaccctctttgttactgaaacatctagattcacctcaagaaacctgaaaggaatgggtgacttgtgggaaaaaacttaacaacccttttaggaattctccaaataaacccagccttaacccgtgggttaaacaagggaaaggggctttaattttttttctgggggactctcccccattaaaacccctgggaaaaacttcctccccg

SEQ ID NO: 36431 - DNA, 616 bp, Macaca Mulatta
caaggatgtctgtgcttccagttagcttcctggaggaaacccccaggagtcatcagtacccctgggccatgctaacaaggatctgactaacaaggagcccagtgccctcctgctccagccgcatctggacccatcagtgactgcctgccacagcctgggagtgtcttgtggagatcttgcagaggtagggacaattgttccttctacttttccagggactcttgggcttagaaactcaccatacacttgaccttgagtcttgtatttgcttcatctgtaatgtgaagtgctagcattagatgtttgagagctctgagctgtgtacctgggtgcctggtttttggggagtcatccacagaatcactcacccactgtgtttccgatgccaaggctcttgggggatcccactctcatccctgcttttcctaccagggactccaaggaaggcataggagttatttccaggcttaagaccatgggctcacgggtacctatttatatgcccaaagcagattactgtgggtgtgctgggaggggtagccctgttcaagagcaatttctgccctttgtaaattatttaagaaaccacctttgtcattttattagaaagaaacca

SEQ ID NO: 36432 - DNA, 611 bp, Macaca Mulatta
  misc_feature (1)...(611): n = A,T,C or G
ggatgatgagttcctataggtgacaatgggatggagaagagagaatggattatgagatcatagagtgtacagttacagaaattatagaagaaggttttaaggaaaaaaaggttagcattgtttttgttgtaaatatttaagtaaaataatagtaataacagtaattgcaaacacttgcatagcatttactgtgtaccaggaatagtgctatatgctttatttacatttgagagccaagattcaaactggttccagagtccctctcttatctagtatacttgaggagtgtctgcttgtgaaaattacatcaggaaattttagtctgaagtgaaggttaaaaacccagatttaccgggggaagttaaaaaaaccaaattgggggtaaaaattaacccccccgggaaagcctttttcccaccnnnnnnnnnnnnnnnnnnnnnnnnnnnnnnnnnnnnnnnnnngcgggattggagttagggggccaaaagnnnncnnnaagaangcgagagaaaagggaganaaaatttttgggggcccccccttggggccccccttcgnnnnnnnnnnnnnnnnnnnnnncacnnnnnnnnnnnnnnnnnnnnnnnnnnnnc

SEQ ID NO: 36433 - DNA, 819 bp, Macaca Mulatta
  misc_feature (1)...(819): n = A,T,C or G
ggtacaaactgtggaagggnnnnnnnnnnnnnnnnnnnnnnnnttctttattagtaaaattgaagataaaaacatatcttaaaatatgagcatctttttaatctttcaggtatttctatgtaattttataacataacatgactctatctggcacatgagaaagaggaaggagatttacaatagttcaacaactgttttatcatcaaacaatttaactcatatagtcaccccagcctggcaaccagacaacacagaaattcccttctcaatcataacgaaaaggtttagtacattgtacnnnnnnnnnnnnnnnnnnnnnncgtaacttcagtgttctaagtaaacttgttaatttaatccataatgtatgatttgcactagaaattaagtagcaaatcagaaaattatgaaaaataaataaactgtgaatcaacctaataacaataacaaagtaagatgggaaaaaaggaaaccttttatgactctctactccaatttaaaggttatcagaacactgtatcatctgaaataacctaaggcactgctctttttgnnnnnnnnnnnnnnnnnnnaaattttgcatgttaattcagaccctgatgttttgagtcccttcaagttatgagttatttaattacataaaggaacttataagtttttaatttttaaattggattccaatagttatatcctctgcccatcacgtgaaaataagccttaaaataccccggattcggggcaaatcnnnnnnnnnnnnnnnnnnnnnaagaaaaatacaatccattttttcgaagaattaccaaatggggttctaatgcc

SEQ ID NO: 36434 - DNA, 963 bp, Macaca Mulatta
tgtggagcgaaggaaagcaggccagcatacactatcgatatacgcataccattcagtacgagagattatacaggtacgagcggtgaccaggacatatgaccgaggaaattcagggctagacgggcacgggaccaagacggagatcatagcccgtggaacacagcagagtcctcacaagtaataccacacctctacagccctctgatttttgacgagcctgagaaaaacaagaaatggggaaaggattccctatttaataaatggtgccggggaaattggctagccataagtagaaagctgaaactggatcctttccttactccttatatgaaagttaattcaagatggattagagacttaaatgttagacctaataccataaaaaccctagaagaaaacctaggtaataccattcaggacatagacctgggcaaggacttcatgtctaaaacacccaaagccatggcaacaaaagccaaaattgacaaatgggatctcattaaattaaagagcttctggcgcagcgaaagaaacttcgatccgagtgaaccgggcaccctacagaaatgggagaaaaattgttgccattctactcttccttgaacgaaggggctatttttcccgaaccccaagtaaaactgtcgaaaacacagaaaaaaacaatgttcgggccgcgcctttgggcccttccgagaaagccttttcctcgaccatttcttttttgggggccccggggcccccgaaaaaggtgaattggaacatggggacccaaaccgtttttcctagagaaaatgcctgggtccgtggacatacgcgccttggggattcccccccaacagacaaaaaacccccgggcggactcacccaaccgctttcggagaaaaatcccgaatggagacttctaaaggccccttaaccgggatgtttttcagacgggaagatccacaacggacccccaactac

SEQ ID NO: 36435 - DNA, 484 bp, Macaca Mulatta
  misc_feature (1)...(484): n = A,T,C or G
agagagcctacagaatgcagaccacttgcctcccatactgctgttgcgtctcatccacctcttctgcgccgtcctcgctggaggaaaggnaggagaacgggcagatggctgtaagtgacggctctgtgaaaggcctgctgagtgtggtgcggggctggagccatgggccagccccagacccccacctagtaccactggctctagaggcactggtgggtgcagtccatgtcttgcatgccagccgcacacctcctcgtggcccagagcttcgtgccctgcttgagagctacttccatgtccttaatgccgactggccagctggtctgagctcaggccccgaagaggcccttgtcaccctccgggtcagcatgctcgnngccatccccatgatgctggcatgtgaagaccggccagtgctgcaagccaccttcctcagcaacaattgctttgaacacctcactcggctcattcagaacagcaaggt

SEQ ID NO: 36436 - DNA, 368 bp, Macaca Mulatta
  misc_feature (1)...(368): n = A,T,C or G
tgtctttcatagattttttacatactttcttaaagatgagcatcanaattttctctactatttaataattcatgggttgtacatgacgtttaccgagtgaattcttcttanaaaaccagtgcttttanttgttttttactttttttttaattctctattcttcaagtcctatttcttataagcccatccttattttagactctagacttggggacctatgggatttgcatcaattatggtgcttaacaaaactttaataccagaattttagaatcttactttcttgttgaaagtagcagtttgtcccagccttttcctgttatttaccaggagatccttctatatactctcatattttgtatttttta

SEQ ID NO: 36437 - DNA, 1034 bp, Macaca Mulatta
gggggttgaggttttgtttttgcacatgaatataagccatttgtgaagagaccgtcttttcccttttacatcactacctttgtataaaattaactgattatgtatatgggctggtttctggaccctctattctgttcatgaatttttgtctaacttaatttcaatattgcactctcttgatttttgtagttttatagtaaatcttgaaatcaggtagtgtaagtcttctaactttattcacgtatgttaaaattatttggccattcgagcttcttcgtatttctaaagaactttttaatctgcaccaaaagaattaaaaagtctgctttgatttttattcaaatagtattggcttaatagatcagtctggaaataattgatatctttagcaatggtgagtccctccaaatccataaaaaatggttgtaatctcctcaactttattttaagaatctgcctttaaaatatataacgaagagaagttacctaaccaaaaagactaaagccgttatattataagattatatatcagacgggagatcaaagattaccgttttctccaacaatccctctctatttgaatcctcaagaatatatatatattcctcgcccgtaaactcttttttattaattttttccccaacaaactttgttatattatttggggcaagaggggcctcaagattggggggtataaatattatacaatcgaggagaaataggagcatggattgtcggtcttagaaaaaattaatcgagtagattattttgccccaaggagggagcattatttagggagtatagatattgaaaataaaaatggggtgggaagaaatagaaccaaaattgtggaacatacatagtcttatttatcacaatattatctaaaccacttttttcaaatttctcattccaagagaacccccttgtagctccgaagtaccgcgtataatgtaaagaagtgcaatttcaaattacaccggtgtgtatagaacaagccccctctccccctttcagcaaaatatttaacaaat

SEQ ID NO: 36438 - DNA, 490 bp, Macaca Mulatta
gtctccccaatgctgtacaagcaactacgtcaggcctgtgaagaccacgtccaggcacagatccttccgtttagagaactcactagatagtgttttattcttaaagaagattaacacatgctggcaggaccactgcagacaaatgatcatgattagaagcatcttcctgttcttggaccgcacctatgtgctgcagaactccacgctgccctccatctgggatatgggattagaactgtttagaacccacattattagtgataaaatggttcaaagtaaaactattgatggaatcctgctgctgatcgagcacgagaggagcggcgaggccgtggaccggagcctgctgcggagcctgctgggcatgctgtccgaactgcaggtgtataaagattcatttgaactgaaacttttggacgagactaactgcttatatgctgccgaaggccaaaggttaatgccggaaagagaggttccagaatatcttaac

SEQ ID NO: 36439 - DNA, 715 bp, Macaca Mulatta
  misc_feature (1)...(715): n = A,T,C or G
gggaaagggatggtttaaatattaccatgatgccgtttaaatataaaataggatttggaaccttattgtgataaatatttatatatgatgtatgtttgtctccccctccaaagtaaggaacccagctgggcgtgnnnnnnnnnnnnnnnnnnnnnnnnnnnnnnnnnnnnnnnnttgggtggatcacttgagctcacgagtttnnnnnnnnnnnnnnnnnnnnggtgaacccccatctctacaaaaaatacaagaaaatgagccaggtatgatgatgtgtgcctcnnnnnnnnnnnnnnnnnnnnnnnnnnnncagaggatggcttgaacccgagacacagaggttgcagggtcaagatcacaccatttgcactgcagcctgggagacagaaccagaccttgtctnnnnnnnnnnnnnnnnnnnnncaaagtaaggaatccttttaaagcatgttgagaaagtattttttggtatgaatgggtgacgggccttttaatctttcaggaatacatacaagcataagtacttagcctgtatggtgaaggtgtgtgaaactcccaagttgctaacatcatcttccttattttcagccagggctgttacttcatttagcatggctctgatgagacagtgggagagttcctgacagcatagtatactgcctttctgaaagactgggtttaagctacccaaaaaatgaacaaatccagggaa

SEQ ID NO: 36440 - DNA, 128 bp, Macaca Mulatta
gggccgacgagctgggtctgcgcaaggcagtgaaggccgagtttggcgggggcacccgcggcttctcctgcgaggaggactttatctatgagaatgtggagagcgagctgcgcttcttcacttcccag

SEQ ID NO: 36441 - DNA, 808 bp, Macaca Mulatta
  misc_feature (1)...(808): n = A,T,C or G
cctccctcacccattatttccatatcctagaacttgtttttgaanaattgataacccttccataatcttttaattccacgtgtcatacttttaaatatggtacgaggccaccataactagacctaggtcaacatggtgacccccaaaccttcctgaattctacatctcatttgatggaaactgcaatttctaaggcaagatgtaacgttcattcttgatcaaatgcatcaggaaaacatgctgagtaccttcattgtaaggtatggtcagatacttctatcagaaagattaaatgacagaagtagcaaccagttggcatatatgttatcttggatcttacaatgtcttgctcagttgcccaggctggaatacagtgccatggtcatagctctgtaacttcaaactcctggactcaagtgatgctcctagctgcctcagcctccttagtagctaggactataggcaggcaccgtcacgtttgannnnnnnnnnnnnnnnnntatgtatggggtctcnnnnnnnnnnnnnnnnnnnnnnnnnnnnngccttaagtgtttctcttttgcctcccaaagagctggaactacaggcatgggtcaccatgccctatatattttagatcttgattcaagtgcaccagttgaacatacattaaggaatcttgctgaccatgtatgtggttaggtttttaagaaatttggaggtaatgatgaatctaggatttgctcagaagcttccgggatggggttgtaggcaatgaatgggatcaacatgaagttagatcacatcccccaaaaggttgggaaat

SEQ ID NO: 36442 - DNA, 775 bp, Macaca Mulatta
  misc_feature (1)...(775): n = A,T,C or G
gggaggatgaagactctgatgcagatgaggaggtggaactgatcctgggggacactgacagctctgacaactctgatttggaagatgacatcatcttatccctgaatgagtgaggaaccatcactgcttggaagagattcttggcaggcgagaaactgagtcaaatgaattcagaacatattcccttctctttctcccagggctgtctgtcttttaaggagctgcatgccctgcattcagaggattatggcttagagagcctcattggcacccgagagtccttccagaaacaataacaaccacaaaaatgacaacagggactaggccctactctgcacccccgacccccaccccacaccatttcctagaatggacatatctttcnnnnnnnnnnnnnnnnnnnntctggggtatttcacaatatattttctttgtataatgttctttacttaaagaacaagaaatagttttttataaaacttnnnnnnnnnnnnnnnnnnnngcatttataactgagggtatgaacttatatccaccaggtctcttgtccctgcacttcattttctttggaagaaaatgatgtctaaataacaatatagaggcatttttacctacgtatttaaatgaaaaaggaaaatcgtggtttccttaaattgataaggattaagnnnnnnnnnnnnnnnnnnataaatatatgattttttttaacctgtttttgttggcctcatatgcctgtccagggttaaatttgtttttcctttcgnggcccagaatg

SEQ ID NO: 36443 - DNA, 791 bp, Macaca Mulatta
tgtatattacggagctgcgtaatgttcaacaccacagatacttaaacttcagatcataattaacggaataatggaactcttaagtaacaaatttgaaacttactatagtaacttgaaaagaacttatacacagaaaagacagaaataacagaatacacatgtaaagattttccaagttggtctatgctctgtaatatatatggcatgatctttggcatatcctgactttatgaaatagtatattaattttgtgaaaagttgtttttgcatttaagtagagaaaagaacctgggcactaccagtgtttctcaaggtaagatattattggcattttgggtggaataatttttggtgtagactatgctctccatttctgagcccatggcatccctgggcccatttatgatttcacctattaaatgtcagtagcagctgcctgtcactgtgacaaacaggatgcctacacacacttctaaaccaggtgtggatattgggggctagtagatttgaggggtacatgtttgagaagatgtgggattcatactaaaaaccactgagctaaactatcaataaagacaagaggagaggcctggaacagtgtgcaaggtttttagcactgcaatgatctattcagatgtcacttccctctgctttgttcctggttagcagaaattggccctaagtacgaaattccttctgtcaaaaatttcctaaaggttcaggcattatttgaaaatctgttttatccggaggaatccctagggacgttatgggttacgatagtgagtagg

SEQ ID NO: 36444 - DNA, 814 bp, Macaca Mulatta
ggcagggaaaccagtttttaaaaacactcataggtaaggaataaaagggaaagaattaggaagaggacaaggttacttaagaacagcctgcacttagatgtcaaacagcaatttaggaatctgtttttggattttaatcatcaaaactttcctgtttctctcctcaaagaagggaccaaaacagatactaaactgcctgtgtgcagggcagtgagggcttaaatttatggcgttatctcaataacaaaaccattccaaaacataattataactacagtaaatattattaattagagggaagtaaaaattcagaagtgaccttccttctaatcttacctccgaaaggtgaatttataaattaatttcattagttcaggttcccaaaaaacaatgacaataaaatgtgtttaaacggccaagagatttaattggggaaaaatggctaccagggaaaaatggggcaagcagaaggatggcacagccttccaatcacttgggggacaaagaaggaaggaagattgagtaggaaccatgccgtgtggaataaagttcaaagaataactttgaagactggataattactccctccagcccaaattctatttgtccaaaaaaaccccctcctcttgacaaaaacaggtttggtctttggtaacccctgcccctgcatcagttacaaggccccagaaactagttcctggggaaagccttggacagcctgccaaaaatgtggggggtaataatcccccccagggaacctggcaggacatatccggcctcccgcccccgggagacatggaacagaccccaccgc

SEQ ID NO: 36445 - DNA, 585 bp, Macaca Mulatta
ggggtggccgccatgttctctgtgtgtctttgtcttttgtgtgttctttcattctctaccacccccggcacggaccccaacaagtggcgcagcgagcagggtcagcacgggccctgaattactgtgtcatatgcttgtcccccaacaaagcacatacagttctggagaattccgagaccaaggtaccagaagatctggaggtgtctgctaagttttactttcttccctgagagaaagaatatggaacagctgtatgatctacgcgatagttgatgcaaaactacatcgaatctccatgctatttgccatatctttgtcaactgatatcagtaaaagcgccatgacttggtttctcaaacatacaagtgagatcactctcctcatgggcaaccttcaacatgctggaagaccaaacagcagagtgcagtggaggaagtcctagaagaaactctatgaagaattcctgtgacaagtatgctgaagattttgacccatggactgagaacaaaatgcaacttcagttttgtctctctctggttgtaactgtcttgacctgtaatgattaaatgttttttactttgcaaa

SEQ ID NO: 36446 - DNA, 786 bp, Macaca Mulatta
  misc_feature (1)...(786): n = A,T,C or G
gggcatccaggagtgcctgggagaggcaggatcagagtcccttcaggcagtaaggatgaaatagatgaaaaatgagaacattaacactgggaatcagaggtcagggaacctagagcccaagatagcaaaaagatgtgagaaaacagtcattatataaacacctaaaagtcggagaaacctttgctctttggagaggaattactgcaagaaaactattcagaggatctttaagtcttggaggccccagaggggcatggagagggagaatgaggagacaccattttgtttaagaaagcaaaggagtggagactactattttgaagataaacaaattaatagaaaaaaagtcctatggtgtgtttagaaagggagagaaaactgcttgcctgaagtcgagaaaacattttcataaatgtaaacttcacaaatatcttcacatcaagcatatgactgactaaagatgaatgactcccaattccacaataaacattagagtgcatctacacacaaaagtcagcttgactgaatgtattagaaggagaaaaggtcaagtcaatgaaacaaccagttcttacagtgccaagtacctgatttgcctgcgtgttttagttttcacttgttttggcattcttagacatagccagaaaatattacaaccagaaatatctcattccaggatgttattttagtttactggggacagggnaaagggaagaagtgcttttctagatataacctttaattgaaaggtaaccctgggttcttaaaatctgtaaatggaagttt

SEQ ID NO: 36447 - DNA, 705 bp, Macaca Mulatta
atttaagtttcagtgtaccaacgataagggcatttggaacagtgctatcaggtgagctcagtggtgcttttgtaggttcagaaatggaaatatgtaagggaggtcacacatacactttacctgtatgttcaacctatgttatcaaatcaatttgccaataatagcatgattagtagggattcccaagaagttattaaaaacatgaacaagattttaatgatagttacagttgcagtggaaaggtctcgtttaatggttttcaaggaaatgggatttggttgctgacatgaattgatgatattagttatatttataaagcctttcaaacttccatcagtcctaagctaaaaatccttattacttatacatccttttcagtgaactgagaggaaaaaatttggaaaccatgtactttttgggagtaactgatttaaaataatggctgattggcattgttaatgaaggcttaattttttaggatgatgctggtaaatggagcatgcttagagtacgaaattgacctaatgagaatttggatgaacataaacttaattttggatttaatataacattccagtctgtcagacgcatgtaaacagaatatttgaatctttgtacctccatacaagtgttagcctgctaggctgtaagcttaccttaattaaactttcagtgaaagtggaattattaagatataaatttata

SEQ ID NO: 36448 - DNA, 764 bp, Macaca Mulatta
  misc_feature (1)...(764): n = A,T,C or G
ggatttgattaacttaatgttataccattgttggacattaataggtttttgggagtgtgtgtgtgtctacacaatatgtcacaggtagtttattacatataattatatttagcttcttgtaagaaaacgtattagtcccatgaaagtttttgttgttaaagcaagtaattgagcttcatataaggctgtcagatcctccagtttgagctggtcaaacttcactgttatagtagtactggggtcctttatcttttattctttattccaaacacattgggccaaagtcccagctctgctcttgaggacaagctctgctcttggcagaagatgtgacattgtcatatctactcaactatcatatcattgttagtattcaaattactgaattagtttgattttagacatnnnnnnnnnnnnnnnnnnnnnnnnnnnnnnnnnnnnnnnnnnnnnnnnnnnnnnnnnnnnnnnnnnnnnnnnnnnnnnnnnnnnnnnnnnnnnnnnnnnnnnnnnnnnnnnnnnnnnnnnnnnnnnnnnnnnnnnnnnnnnnnnnnnnnnnnnnnnnnnnnnnnnnnnnnnnnnnnnnnnnnnnnnnnnnnnnnnnnnnnnnnnnnnnnnnnnnnnnnnnnnnnnnnnnnnnnnnnnnnnnnnnnnnnnnnnnnnnnnnnnnnnnnnnnnnnnnnnnnnnnnnnnnnnnnnnnnnnnnnnnnnnnnnnnnnnnnnnnnnnnnnnnnnnnnnnnnnnnnnnnnnnnnnnnnnnnnnnnnn

SEQ ID NO: 36449 - DNA, 2965 bp, Macaca Mulatta
  misc_feature (1)...(2965): n = A,T,C or G
agacggcatcctgtccttcttgaagaacaacaagccaggggacgcgctgtgtgtgctgggcctcacgctgtccgacctgtacccccacgaggcctggagcttcaccttcagcaagttccttccagggcacgngaagtgggcgtctgcagcttcgcccggttctcnnnnnnnnnnnnnnnnnnnnnnnnnnnnnnnnnnnnnnnnnnnnnnnnnnnnnnnnnnnnnnnnnnnnnnnnnnnnnnnnnnnnnnnnnnnnnnnnnnnnnnnnnnnnnnnnnnnnnnnnnnnnnnnnnnnnnnnnnnnnnnnnnnnnnnnnnnnnnnnnnnnnnnnnnnnnnnnnnnnnnnnnnnnnnnnnnnnnnnnnnnnnnnnnnnnnnnnnnnnnnnnnnnnnnnnnnnnnnnnnnnnnnnnnnnnnnnnnnnnnnnnnnnnnnnnnnnnnnnnnnnnnnnnnnnnnnnnnnnnnnnnnnnnnnnnnnnnnnnnnnnnnnnnnnnnnnnnnnnnnnnnnnnnnnnnnnnnnnnnnnnnnnnnnnnnnnnnnnnnnnnnnnnnnnnnnnnnnnnnnnnnnnnnnnnnnnnnnnnnnnnnnnnnnnnnnnnnnnnnnnnnnnnnnnnnnnnnnnnnnnnnnnnnnnnnnnnnnnnnnnnnnnnnnnnnnnnnnnnnnnnnnnnnnnnnnnnnnnggctgagctccctggtggcctcagaggctccgccggcacttgttggccctgaggaggctatcaaggagcatgaacggtggctggccatgtgcatccaggccctgcagcgggaagtggcggaggaggagctggcacaggtggacagagccgtggatgccctcgaccgctgggagatgttcacaggccagctcccggccatcaggcaggacccacccagcagcaatgacagtgtggggctgcgcattgttctgggggacaagttcttctccctgaggaggaagctgagtgcccgaaaactctccagagcagagtcggccccctgcccctgggatggggaagagagttagcacagcaggggctgccctgcgtctccttccctaggatgctggctggccagcgctgtccagtatctgaggccactactgacctgccagggatnnnnnnnnnnnnnnnnnnnnnnnnnnnnnnnnnnnnnnnnnnnnnnnnnnnnnnnnnnnnnnnnnnnnnnnnnnnnnnnnnnnnnnnnnnnnnnnnnnnnnnnnnnnnnnnnnnnnnnnnnnnnnnnnnnnnnnnnnnnnnnnnnnnnnnnnnnnnnnnnnnnnnnnnnnnnnnnnnnnnnnnnnnnnnnnnnnnnnnnnnnnnnnnnnnnnnnnnnnnnnnnnnnnnnnnnnnnnnnnnnnnnnnnnnnnnnnnnnnnnnnnnnnnnnnnnnnnnnnnnnnnnnnnnnnnnnnnnnnnnnnnnnnnnnnnnnnnnnnnnnnnnnnnnnnnnnnnnnnnnnnnnnnnnnnnnnnnnnnnnnnnnnnnnnnnnnnnnnnnnnnnnnnnnnnnnnnnnnnnnnnnnnnnnnnnnnnnnnnnnnnnnnnnnnnnnnnnnnnnnnnnnnnnnnnnnnnnnnnnnnnnnnnnnnnnnnnnnnnnnnnnnnnnnnnnnnnnnnnnnnnnnnnnnnnnnnnnnnnnnnnnnnnnnnnnnnnnnnnnnnnnnnnnnnnnnnnnnnnnnnnnnnnnnnnnnnnnnnnnnnnnnnnnnnnnnnnnnnnnnnnnnnnnnnnnnnnnnnnnnnnnnnnnnnnnnnnnnnnnnnnnnnnnnnnnnnnnnnnnnnnnnnnnnnnnnnnnnnnnnnnnnnnnnnnnnnnnnnnnnnnnnnnnnnnnnnnnnnnnnnnnnnnnnnnnnnnnnnnnnnnnnnnnnatctcttctgacagaggctgcaggagttgagggtgtctgacatgcactgagggcagaggcccccttattcctgaggcagctgctgctcactgtggggaaaataaactgcggtgatgtttttgggacagtttcttggcaaaggcggctgcactgtcagtaccacnnnnnnnnnnnnnnnnnnnnnnnnnnnnnnnnnnnnnnnnnnnnnnnnnnnnnnnnnnnnnnnnnnnnnnnnnnnnnnnnnnnnnnnnnnnnnnnnnnnnnnnnnnnnnnnnnnnnnnnnnnnnnnnnnnnnnnnnnnnnnnnnnnnnnnnnnnnnnnnnnnnnnnnnnnnnnnnnnnnnnnnnnnnnnnnnnnnnnnnnnnnnnnnnnnnnnnnnnnnnnnnnnnnnnnnnnnnnnnnnnnnnnnnnnnnnnnnnnnnnnnnnnnnnnnnnnnnnnnnnnnnnnnnnnnnnnnnnnnnnnnnnnnnnnnnnnnnnnnnnnnnnnnnnnnnnnnnnnnnnnnnnnnnnnnnnnnnnnnnnnnnnnnnnnnnnnnnnnnnnnnnnnnnnnnnnnnnnnnnnnnnnnnnnnnnnnnnnnnnnnnnnnnnnnnnnnnnnnnnnnnnnnnnnnnnnnnnnnnnnnnnnnnnnnnnnnnnnnnnnnnnnnnnnnnnnnnnnnnnnnnnnnnnnnnnnnnnnnnncgtgttgccttcagagaagcaaagatgcagctcaaaagtggcattaggatcttcatccgtcctgttctcttttgcatagcttcaaagaggcatgacactgacctgggagggaagatgaagagccaggcctttcagaaagtggccaatggaaggtgccggccgagaacaatgcagtaacagaaggtgaaagctggagcctggtggctgttgctgcaaacaaaccacccaagacttagtggcttaaatcacaacagtctagctcatgaatctgtaacttgggcagagcttggtggagacggtttgcctctgtggttcaactggagggtttgttcacgtggctgccaagaggaagctggctgggaatgtcagacattggttcctgcccacgtgaggctctccatggaggagaggcatct

SEQ ID NO: 36450 - DNA, 737 bp, Macaca Mulatta
  misc_feature (1)...(737): n = A,T,C or G
ggatagaaactcaaaataacagtgttttaagcaagttagacttttttcctcaggtaaaagttaggaaataggcatctcttgccccgtgaagccagcacaggccctggtgcctttggcctctttctgcacgttggagcccaattcccaggggcacctgaggagctgaggcggctgctgctgctccagccatcatttccacgttccagccagcaggaggagaaaaagaaaagaacaaagcatgcagaccatagggaaggttcccaagctgtcctacactgaaattccattgatcagaacgtggtcacatggccacacgtagctaaaggttgggaactattgagatatcaattctgaatatctataggcctatctaaaaatcagggtatctattactatggaagtagaaaagaatggttatcaagaacaactagtagtttctgccacagtggctggnnnnnnnnnnnnnnnnnnnnnnnnnnnnnnnnnnncctagcactaaagggcaagaaacatatttaaacctaaaacatatatnnnnnnnnnnnnnnnnnnnnggccccagttgtcagattccttctccgttgacataattctaaaagcatctcacgttgcttctggacctattataaaattgcctgcatggctgcaacttagaattgtttacagagttggttccgacagtangaatgtgctcaccatccatcttaacagtctggcagaccgtagtcagcaacaga
